United States Patent Application Publication US 2026/0103690 A1 - sequence listing, part 22

SEQ ID NO: 95587 - protein, 407 aa, unidentified
MKVIRAKRSASRTVDCAGNRAEPHAEAPRGALSAKRRQTMHESITAYVRLDVHKDSIAVAVAGNDREVPHFVGTVRPDVKQVRKALSRYGSPSSLQVVYEAGPCGYTLARQLLADGFGCQVIAASRITRSPTERIKTDRRDALTLARLARSGDLIAVRIPDERDEAVRDLSRARQDAVRACLKARQQLKAFLLRHGRPLRGSKPWSATGELYLSKISFAHPAQNIAFADYRQAVLDTHARVERLTEALRAQCENWRMQPLVSALACLRGVDFLTALILVAEIGDFTRFAHPKELMGYLGLVPSEYSTGERHHRGDITKTGNAHARRVLVEAAWNYRFPARLSHKITRRQEGQSKPVRDIAWKAQLRLGHRYRRLQSRKLHQNKIIIAIARELSGFLWDIARQVPLAA

SEQ ID NO: 95588 - protein, 342 aa, unidentified
MTMIGIDPHKATHTAVAVDDDENVIGEFTLGASKDQVERLTGWAEGLGKREWAVESANGLGYLIARQLVTCGETVFDVPPVLASRVRLLGSGKSQKNDPNDARSIAIAALRSDRLGIVKPDDHVVVLRLLVKRHRDMARLRNKHCSRLHALLLELEAGGIGVKISVSNASELLDRISVTDEAARYRILVAREVVDDIARLDATLSASKKRIAVAVTASGTSVTNIVGVGPIGAATIIGYTKDVSRFPTKGHYATYNATAPIEVSSAGNTRHRLNLRGNRILNHAIHIAAVTQLRHDTIGRVYYQKKIAEGKTPKEAIRALKRRISDAVYRALIADTRRTPTS

SEQ ID NO: 95589 - protein, 410 aa, unidentified
MGRVVIGMDPHKRSATIEVLDEAEQPLMAGRFGTDSDGYRLLLAAGRQFPQRLWAVEGCQGVGRHLAQRLVADGEFVVDVPAKLSARARVFSTGQGRKTDATDAHSVAVVALRTRSLRQVGRDDRTVALRLLADRRDELGAARTLTINRLHRLLVELVPGGAKKALTARQARGLLTEVPAGDVVRETRRQLAAELVDELEVIDDRIKAAKKQLAALVAETGSGLMQLNGIGPSGAARLLGDIGDVSRFPTKGHFASWNGTAPLDASSGDQNRHRLSRAGNRRINRALHIMAVVQLRHANTDGRRYYDRRVAEGKTPMEAMRALKRRLSDVVYRQLVNDQKQQTAHDGDQDTEARRTGPEGHLGATTKSSAAGLNPNADASDKSLSEPASIDATPTSEASPDRTSAGSSSL

SEQ ID NO: 95590 - protein, 347 aa, unidentified
MKITRAGVDIAKSVFHVHAVDRHDRPQWQAVLRRGKWLDALCDRLTPGAEVGMEACASAHHWGRELQKRGFRVKLIAAQFVKPYVKGNKNDRVDAEAICEAMGRPGMRFVAVKSVAQQDRQATHRIREELVGQRTAKANQIRGLVGEYGLVAPVGIQHLRRAVPEWLENGDNGLTDEFRSLLADLGVDLRQLDDRIVRLDDTIAQFVKNDPIARRLLELRGVGPLTASALSGALGDGAAFSKGRDFAASLGLTPRQHSTGGKDRLLGISKRGDGYLRKLLVHGARAVIRHARNRDDALSEWLKELTARKHVNVVTVALANKTARIAWAIVHNETDYDPRLAAGKQAV

SEQ ID NO: 95591 - protein, 367 aa, unidentified
MKKVSTVTAKQSRNFSQPKLTIGLDLGDRWSWYCVLDEAGSIVQEQKLGTTPKVMKEVFGRLPRCRIALETGMHSPWVSRALSELGHEVIVAHARNVRLIGESRKKDDRLDAQTLARLARIDPQLLCPVKHRSAKAQANLTVIRARAGLVRARTALVNTVRGLAKSYGERLRGCSVRNMNAEKAKGLSPELQTALEPLLAGIESLSEQIREYNERIETLAQQSYPQVALLRQVKGVGTLIALTFLLTLEDAHRFGKSRDVGCYLGLQPGRRNSGQSEPQMHISKEGDPYLRTLLVQGAHHILGPFGADSDLRRWGLKLAERGGKNGKKRAIVAVARKLAVLLHRLWVSAEVYEPLRNHSRRTMPVAA

SEQ ID NO: 95592 - protein, 411 aa, unidentified
MMTLGIDIGKHKHNATLLDDQGKKVFHNMSIENNADGVSKLINAINSANISTKGILVGMEATGHYWMNLFAELETHDFLDIHIINPMIIHARRNETVRGAKTDRIDSFRIAKYLREADHRSSSIPSDEIAELRKLARLRYDLVQNANSMKLQIISYLDIVFPEYVNQFRNIFGIASRKLLEDYPTAEMIAKVDIRRLTSVLKNASRGRLGRGKAEQLKEVARQSFASKSSSEAMQISIRFTVQQLNMLLDQIKQLEKMTASMLVEQQNILKSIPGIGVVYAPAILAEILPVFQPELRTGADKLVAHAGLDAKPNLSGKNNSLQGKSFKMSKRGSKYLRTAVMEAAINAAITQNDPMFRAIYDRQKEKGKKHLVAASHVARKMLHVIFALLRDNKTYIPLVYESKPTATCYK

SEQ ID NO: 95593 - protein, 317 aa, unidentified
MEQRQSSRKVGGIDVGKRWLDIAVHGLEDELRVENGPAGYSELIAWLRAREVGRVGLEATGGYERGVRAALEQAGFEVVVHQPIEVRRFAQLKRWRAKNDRLDAKLIAWATSQLDAVKAAQDPRLVELAERLTVYEQITDQAAELRSFLDSVTLKDMAAVVRSQIAGLERAKARLAADIVRRIKAQADLLTRLRLLTSLPGVGPIVGASLVIRMPELGAMQRGQAASLLGVAPFDRDSGQAKGLRFISGGRARPRRMLYLSACRAKVCNPTFKAFAERLRAAGKPPKVTIVAVMRKLIEAANLVLQRGEPWLLHPAT

SEQ ID NO: 95594 - protein, 342 aa, unidentified
MDTIGLDLHKRESQLCIIGSEGEVTEKRIVTTRERFSAVLGGRAPCRILLEASTESEWVARHLESLGHEVVVADPGFAAMYATRSKKVKTDRRDARTLAEALRLGAYRATHRVSPEQRHVRSELLVRDALVRTRTRYVALIKAAVRREGLRLSQGEAERTASKVRSIPLREEVLKELAPVLDLLSQLNGEISSADERIGQLGKNNPVVRTLMTAPGIGPVTALSFVASLDEVTRFPGAHQVESYLGLVPSECSSGDRKHRGRITKRGNARMRSLLVEAAWRIMRSKRSECAALRAWAMQIAARRGKQIAVVALARRLSGILYAMWRDGSEYRTSNKTLEAAA

SEQ ID NO: 95595 - protein, 400 aa, unidentified
MKVSGLDVHKDSIFCAIYDGKKMGKVKEYPTFTHSIREMGEHLRKEGVQKIAMESTGIYWIPVWNILENMGFILTLVNPYIIKQMPGRKSDVKDAQWIATLLHKGLLRGSLIPNKRIRELRSYSRKYVRLQSQINRVLQEMERILEMSNIRITSLVSNNNSVSVKNIIEQIIQGNSLPEELARYVHGRIVKAKGKLVQLSLDGFIQEHHRFLLELTYQQYQLYQKQLLLVESKMEEICNTYYQKEMELLESIPGIKKQAAMQIIAETGADMTAFENSGKLTGWAGLRPKNDESAGKMKSTSVTKGNKYLRRIMVQCAWAASRTKGSFYKSKFEQLCIRKSRKKALIAIARKLLTVIWHVLSEKKGYNENFLPAYNPEKIKHKIFYHQRELHKLQALGFSL

SEQ ID NO: 95596 - protein, 415 aa, unidentified
MAARLVRRGPGLVDEDETFRLQIKLAIEPALALLQDVGTVLLDRVPGLYGMARPFSPASDMMPALEKERSGPMSIVILGVDLGKNACSVVGVDAAGAVVVRRSMRRQTLVDYVAKLPVCVVAMEACCGAHYLGRLFAAHGHEIRLMSPEYVRPYVKAQKNDDRDAEGIAEAASRPTMRLVELKTQEQLDIQTLHRVRSRLVAERRSLTNQLRAILLERGTIFPVGRRKLELGIDALLADEDTSLSPRLRQLVAELRAEWRELDTRVEALNGEFVELARNDAAARRLTSIPGVGVLNATALIAAVGDASSFAKARDLGAWLGLVPRQHTTGGKPRLLGISKRGNTYLRTLLIHGARAALPSLARSETPLGRWLTGMIERGVHRNAIVVALANKLARIAWAALRKDATFERDHPVAA

SEQ ID NO: 95597 - protein, 369 aa, unidentified
MKHSIIFCGLDVHKDSITIALADGGRNGEIRSQGTISGDMASLDKAIRKFRRSGVELRFVYEAGPCGYEIHRHLTAQGFPCEVIAPSMTPKRSGDRIKTDRRDAITLARLYRTGELTPVYVPREDDEAMRDLVRGRDDAIKATRHARQRLSAFVLRHGFRYSGGSPWRVAHLRWLADIKMPHPAQQITLQEYIHSVEECTERIDRLTEQILKLLPTWRMAPVVTAFQSLRGVAPIVATVMVVEIGDLRRFENPRQLMAYLGLVPSENSSGQTTKRGGITKTGNGHARRALIEAAQAYSFPARVSRALRKRQEGLSREVKEISWKAQVRLCGRYRKLIARGKNRNRTVAAIARELAGFMWAIAKVVPMSA

SEQ ID NO: 95598 - protein, 402 aa, unidentified
MNAVGIDVSKGKSMVAIMRPFGEIVSAPFEIKHTASDIHSLVELINSVEGESRIVMEHTGRYYEVLAHQLSKANLFVSAINPKLIKDFDNDSLRKVKSDKADAVKIARYALDKWQNLKQYNVMDELRNQLKTMNRQFGFYMKHKTAMKNNLIGILDQTYPGVNTYFDSPARSDGSQKWVDFASTYWHVDCVRKMSLNAFIDHYQNWCKRKKYNFSQSKAEEIYGKAKELVPVLPKDAITKLIIKQAVDQLNSASTTVESLRTLMNETASKLPEYPVVMAMKGVGTSLGPQLMAEIGDVSRFTHKSAITAFAGVDPGVNESGTYEQKSVPTSKRGSADLRKTLFQVMDVLIKTHPQDDPVYQFLDKKRAQGKPYYVYMTAGANKFLRIYYGRVKEYLSSLPES

SEQ ID NO: 95599 - protein, 400 aa, unidentified
MLSIGIDVSKGKSTVCGMKPGGEIVYTPFEVQHTREGMSELVSLLRSSGEEVRAVLESTGSYHCPVVAALLENGIFVSVVNSLRMKRFCSQSIRKVKTDRIDAMQIALYGLAYWQELQPARLPEDTYRELQLLARQYYQMTSLLIKAKVDFNAICDQVLPGMQELMSDHAGRHKLSDFVLRYCHTTHILEMGETRFRKDYCKWAEKKGYRNCERMAALIFATAQNGIPVLPNAPSTQIVITEAIRVLHTVEASRDAILTQMQALAKTLPEYSLVREMPCIGDTLAPRLIAEIGDVRRFHSKRALIAYAGIDAPPYQSGKFCANNRHISKRGNRYLRKTGYEVMQSYVMHKPANDPIFTFIEKKRGEGKSGKLAMVAGLNKFLRVYYGKVTELYRSLPTIE

SEQ ID NO: 95600 - protein, 333 aa, unidentified
MQYYAGLDIHKKTCQAIICTEKGNIVKKGRITTEKEKIQEFFSDFKELTIAIEACNTGEHIFDALEMDGHNVVLAHPLKTRIIAESKIKTDRIDAKILVHLLRTNFLPTSYTPKKEIRDLRNFVRRRIFLGKYSARLKNKIYAELLRQGIKYERGPTLFKGKGRQWLRSLKITSIDSYLNMYESILKEIKNLELELRNHGRQYEEAQILTTIPGIGIYSALIILSEIGDITRFPCEEKLYSYAGVTPSVHQSGEHQYHGHITKQGSKHLRWILTEAVRIHIIWTKRRETVTSISRFYNRLRKRKPENVAVIAASRKLLQVIYHMLKNKDEFRG

SEQ ID NO: 95601 - protein, 355 aa, unidentified
MTVTIVEEARPVTCRAAVTGGVDTHADTHVAAALDPVGGLLGVAEFPATTAGYARLLGWLGGFGTVCLVGIEGTGSYGAGLARYVTATGIRVVEVDRSDRQDRRRQGKSDPLDAVSAARAAQSGRASGAPKGRDGAVEAIRALMVARRSAAGERARTVNQARALVLTGPDDLRARFAKHKPAALITGLAALRPRPGDVAGHATRIALRELGRRAQFLDGQLVRLDELIVPLVTARAPGLLAVYGAGPRTAALLLIAAGDHPERLRSEAAWAHLCGVAPIPASSGKVTRHRLNPGGDRQANHALWRIVFTRLGSDAATRAYAERRTAEGKSKAEIIRCLKRYVAREVYRQLRPAVG

SEQ ID NO: 95602 - protein, 402 aa, unidentified
MQRTLFENGCIMIYVGIDVAKSKHDCCILGSNGQIIRESFTFANNRDGFEQLQAEIHHAMTQTGLDQIKAGFEATGHYNENLAAFLRSSGIEPVVFNPLQVNLFRKSQSLRKTKTDKVDAKCIAQLLMSAESNPVSISYQIQELKTLTRHRFRLISQQTKLKQSVSRLVDILFPELPSVCCSVTQVSIKALLLELNGVRQIAACRIDRLANILAKASHGRYGREKALEIKALAQRSIGSNSPATALELRLTLQQLDFLQLQIRDLNKAIQAAVASTQSPLLTIPGIGIILAAIILSEIGDIHRFSSPDKLQAFAGLDPSTYQSGKFKADRTPMVKRGSTYLRWALIQAARQVTLHCESFRRYLAVKLAQGKHYFVALGHLAKKLIRVIFRLMTANEVFVPQS

SEQ ID NO: 95603 - protein, 361 aa, unidentified
MKILSLDMGKFKTVWLVYLTGGVGEKQYGKIATGPREVHDLLVEHQPDRLVLESGPSAGWVCDMAAALSIPAQVANTNDERWHWKKSKKKTDRIDALKIAQMSEMGCLPTVHVPTPKVRQWRELIAYRHGLVDRRTAVKNSIRAIFDRRGERLPRGNKAWSVAGIKQLRAEARELCQCGADELWRGQLHEELQQLESMEKNIATVESKLDELAAGDERIKRLKTAPCVGPRTSELVLTALDDPHRFKTTRQVGAYAGLSPRQWQSGQSLREGHISRMGNRLLREVLVEICWLGIRTDPWMKQVYEGVRRGSDKRKKIAITALSRRLFIRLWAMLRDGTDWIAPALRAEASAVSAQGMSAAG

SEQ ID NO: 95604 - protein, 429 aa, unidentified
MNISTSIAETDSKYAWSVGIDWADEKHDISQRCWADGRYQTFQIGADPVSVRTWLEELKELAGPQGRIVVGFEQNRGSLFEMLREQKDWLDLCPLNPLTLSRYRQSFYTSGAKDDPLDSQLIEELLRKHLDRLRLYEPPEPVLRQLDLLCQLRRKAVDSAVGLENQLRSHLKVYYPLAVELHEDLSSTLTLHFLKRWPTLQSLKRAKAQTLRSFYYQHHSRSQSLIEERLQKIARAEAVTEDCTLIDPLVLSVQGLVNQLLAHKASEAAFDKAVQKLALKHPDYEIFNSLPGAGPQMTPRLMVAFGSNRSALTEPSQMQKKSGIAPVLDRSSQSQRIHRRWCRPKFLCQTFHEFAAYSIPHCTWAKAYYEQLMARGKSHHTAVRALAFKWIRIIFRLWQDHTTYDEERYLRDLQKRHSPLSQKIQLQPL

SEQ ID NO: 95605 - protein, 411 aa, unidentified
MHHRQNYLYVGVDLHKEQHTAVIINCWQEKLGEIQFENKPSAFSKFLLEVETYVCDGITVVFGLEDVGGYGRALAKYLVDHERVVKEVNPALSFLERKSQVMIQKNDSWDAECVARILINKFNQLPDAKPNDLFWSIQQLVSRRNALVKAQSALKNQLHIQLNHHYPSYKKFFSELDGKTALAFWQQYPSPSCLEGVSIKQLTAFLLDVSNNTCSVKKASDILKLVKEDGQTMKEYQETRDFLVRSIVRDIEFKKREMKYIERELKRLLNLLDYQLDTMPGIELVTASALIAEIGDVRRFPNANKLARFAGIAPVYFGSGGKGKTHKSKQGNRALHALFYNLAVQQVQVAKGSKLPRNPVFHAYYQKKLKEGKTKGQALVCIMRRLVNIVYGMMKYKTAYELPVVEEKEVV

SEQ ID NO: 95606 - protein, 404 aa, unidentified
MKGPIVSIDVSKGKSDYQAFKNLNVKYTGSRSIKHTKEGFDEIVNLVREMEKKLEAEVCVVYEATGVYHRVLKKVLEDNNIKQFIINPLLSAKTRKNDSLRCPKTDKLDPKSIAKTYYSHSLHNSHKPETIYHELRELSRYYEDILVHIRKDKVAFRAQLDIVFPGYDTLYDDLYGPVALAVIEKYPHPEILQKKKINTVSKVIQNKTCHRQAVSDTMADKAIEYSKTIYSGCDKDDIEVLILQRFIKKLKEDMAEAERTIGEMIKLAQELPDFSIIKSIPGIGDNLAARIIAELGDMTRFKKKNELVAFAGLDPRISESGQDDGDHMHITKKGNKRLRCLLYLAVTCSIRLKRDNNSIKDFYIKKKQQSNPMCSKAAKTACASKLVRIIYSMCKTGELYQYNK

SEQ ID NO: 95607 - protein, 368 aa, unidentified
MTKVRTWVGLDVHAAKTVACVVDAHTGEMRVHRLPGLTGGLVAFCAGLPGPTRVAYEAGPTGFGLARALDAVGVGGVVAAPGKIERPSADRVKTDQRDAERLVRLLMIDALVAVRVPSDQEEAIRDLVRAREDLRGDLMRARHRLSKLLLRHDVRYQDTTSAWTERHRSWLAKVDLGERGAQATLTDYIGAIDALIIRRDTVEATIGELIPGSPLAHTVARLRCMRGIDTLSAIGLAAEIGDFTRFPRPAQLMSYVGLVPSEHTSGEQRRQGAITKTGSRHARRLLVEAAWHYRKPPRHGTTLARRQDGQPAAAVAISWKTQQRLHQLWRRLDTKRGKRRTVVAVAVARHLAGFCWAIVTTNQEHAAP

SEQ ID NO: 95608 - protein, 343 aa, unidentified
MNVKVLGIDIGKTVFQLHGVDGHGKAVLKKRLSRDQLTRFVSNLPQCCIVMEACGGANYWARVFQRNGHTVKLISPQFVKPFVKTNKNDANDAEAIVEAASRPSMNFVPIKQVDQQDIQSIHRVRNRIVKNRTALINEIRGLLLEYGLIVAPGVIRVKHSLFAIIADRANELTPLSRDCMQDLFDELVEIEAQSKRLDKKIRQLCKQNDTCCRLLTIPGVGELTATAMVAAVPNANEFTNGRHMAAWLGLVPRQSSSGHKQVLLGISKRGDRYLRTLLIHGARSALSHYKNTDSDYGRWLTTKKEKLNFNKAAVALANKNARIIGSLLNTGKEFNCNNQMAAA

SEQ ID NO: 95609 - protein, 322 aa, unidentified
MRYIGIDVSKATFVVAYSSDKGGEIRTFNNTTAGIRQFIGTLPKDGSIHCVMEATGNYSALLLYMLNVAGITVSMENPLKVKNFAKALLSTVKTDKSDARLITLYGEKMNPRPFKVQGEAILRLRQKRTVIRQLTKQITAMSNLRGSLACLPVPDKGATHTVDETIKFLEKKRDRLQAELTDLVEVEFSRQLALLTTIKGIGITLATALIITTGGFTYFQNAKQVSRYLGICPTYEQSGTSVNIKGHINRNGDAYTRGLLYIAAWPASRFNAQCKETYTRLRQNGKSGKLAMIAVANKLVRQAFAVVAHDKEYIDGFVSNRP

SEQ ID NO: 95610 - protein, 321 aa, unidentified
MPTFYLGIDVAKAKLDCALRYPNGKVRTKIVPNTPQGYADLLGWLSYKEALDVHVCMEATGVYWEEIAQFLATHGLTVSVVNPAQIKAYAASRLTRSKTDAIDARLIAEFCAERQPPPWQARPEAEVTLRALVLRLDALQTMRIQESNRLGVAQESVRSDIQKHLEWLDQQIQSLIKAINDHIDSNPELKVKRDLLNSIPGLGERTTAILLAFYADPSRFANSRQAAAFAGLDPRQRESGTSLKAKPRLSKVGHAFLRKALYMPAMVTLYKTKWGKQFKDRLALSGKPAKLIIGAMMRKLLQVAFGVLKSGKNFDPALHGA

SEQ ID NO: 95611 - protein, 441 aa, unidentified
MAVINPNACGIDVGSKMHYVATGQGSEEVKSFGVYTKDHQAMVAYLQNKRVTTIAMESTGNYWQTLFAALEKAGFEVFLVCGNQTKNVKGRKTDVQDCQWIQWLHSVGMLSNSFIPNEFVSHLRIYSRQRLKYIQVQSRLINQIQRDLRAMNLRLEVALNDITGKSGRAIIEAILSGERDPKSLAGLADYRVKKSKEEIALSLEGNWHEGYLFVLRQHYSEYVQNLVRIQACENEIEKILKESLECSEIDPQDAPNHKKALKKNKNKPVIDFQRYSFQYFGGVDLFAVEGINQNTVLSLMAEVGTDITKFHSAKAFSNWLHVCPNQKVTGGKVISNHTKGGSNPLSQAIKSAANTIGNLKTVTHLTQFFKKIAYKKGRKEAITATAHKLAVIIYNMLTKYEPYKPFVREVNEQAERIKKLKEVEKIVKSHNFKIEDINFGY

SEQ ID NO: 95612 - protein, 423 aa, unidentified
MESSDTRNPFQQQYPLFVGFDWASDHHDVVGLDARGQIVLDLRVEDTAEGWACLRQTLLDRVGGDLSRVAVSVETCNGPAVERLLEMGCQVYPLNPKAAERYRDRKAPMGSKSDRLDAWSFGDALRTDGHGWRLLQSDDPLTQELRILCRDEVQLIQQRTALVVQLRAALREYYPAALEAFDDWTHPSAWAFVEAFPTPGDLVRAGKRRWEKFLHVHKLYRPQTAARRMETFAQADRFAGPPAVTRAKSRLVLATAAQLKVLQKQIDQYRQAIGELFARHPDHDVFGSLPGAGPKIAPRLMAELGDRRDRFEEAQSLQCYGGTAPVTEQSGKKRWVHFRTGCNKHLRAALHLWANLSREKSTWAQVYYQHKRDQGKRHATALRCLAQRWLKILWKMWQTHSRYDEALHTRNQTLHGSWVVQLT

SEQ ID NO: 95613 - protein, 366 aa, unidentified
MRKNSTVVKNGSKIFKQPALTIGLDLGDRTSCYCVLDGLGNVIVERGVPTTPSGIRQAFGKMPRSRIALETGTHSPWVSRQLARMDHEVIVAHARNVRLIGESSRKDDQLDARTLARLARIDPGLLGPVRHRSAEAQIQLTVIRARAALVSTRTALVNAARGLTKSYGERLKKCGTEQINRDSSEGLSPELRAALDPLLREIESLNERIKEYDQRIEQIAKEVHPEVARLKQVKGVGTLIALTYVLTLDDPRRFRHSRDVGCYLGLRPGRRNSGKSEPQLHISKEGDRYLRTLMVQGAHYILGPFGQDSDLRRWGLKLAERGGKNAKKRAVVAVARKLSVLLHKLWVSGEIYEPLRNNRKAVRAVA

SEQ ID NO: 95614 - protein, 339 aa, unidentified
MKQEVATVGLDLAKNVFQVHAVGSDGTVLVRRKLRRAEVIGFFTDLPGCVVGMEACASAHHWARELIALGHEVRLMPPAYVKPYVKRGKTDAADAEAICEAVMRPTMRFVAVKSVEQQAVLMLHKSRDLMVRQPTMLINALRGHLAEYGIVTGMGAGGVTAMLKALHEREDELPAHARSALHGLAAQMRALASEIDRLEAQILAWHRADETSRRLATIPGIGPITASAISAAVPDASLFRSGRQFAAWLGLTPRANSSGGKERLGGITKQGDGYLRRLLVVGATAVMRITRKNAERQPWMAQLLERKPAKIATVALANKTARIAWAVMSRKEVYAAPAA

SEQ ID NO: 95615 - protein, 393 aa, unidentified
MEGRMENTPSAGVNYDPVHCFVAIELSKSSWIVGFQTPLSKQTSQYQLKSCDAKPLLELIERVRIRISRELGRPVEVMSCYEAGYDGFWLHRVLEAHGIHNHVLDPASLQVNRRARRPKTDRIDADRLVRALIRHLRGEPEACSVVRVPSPEQEDARRLHRERGRLIAERVAHVNRIKGLCASQGIYDYEPVRKDRLQRLEKLRTGDGRPLAPQLKAEIVREIKRLQCLLEMIATVEAERDAILESEKSRHLNADKIKMLAKLKAIGPEFSTTIVGEVLYREFANRRQLGSYVGLASSPFRSGSLGRDQGISKAGNPKARAMMIELAWSWLRYQPDSALSRWFRERVGNLKGRPRRIAIVAMARKLLVALWRYLQTGVIPTGANLKTNRLKQA

SEQ ID NO: 95616 - protein, 460 aa, unidentified
MAKKRMAKKGKQNTPTPDNMPILHPHAAGIDVGAEEHWVCVPADRDAQPVQKFSAFTCDLHRLADWLTTCRITTVVMESTGVYWIPLFQILETRGFEVALVNARHVKNVPGRPKTDRFDCRWLQKLHTYGLLASSFRPPEDICQLRSLLRHRDNLIQMTVKHIQHMQKALDQMNLHLHHVISDVTGVTGMRILRAIVAGERDPHTLAQYRDYRIKSSPDTIAKALEGDYRPEHVFTLTQSLALYDYTHQHIAACDQEIERVLSTLDSLVDLEAHPLPPPTTTHRQPQRNEPAFDLRSHLYRITGVDLTQVPGLQAMTIHIILAEVGLNMYKWPTDKHFASWLGLCPDNQISGGKVLSTSSRRVQNRASRALRMAAQSLRTSPTYLGAFFRRMRSKLGPAKATTATAHTLAKILYHMLKEKTPYQARGAEDYTRKDQERQIRRIRQQAKHLGFELVPQTSH

SEQ ID NO: 95617 - protein, 337 aa, unidentified
MDVHKKSWTAHFKTDLFDNKTVTMSAESEALINYVEKNFSGHAVSCCYEAGCCGYWIARSLQQRGWEVKVVNPADVPRSNKQDWQKTDRIDSRNLCKHLSDGNLKGIYVPGEEQEQLRALFRRRIHLARNLRSIKNHIKSQLLYFGIKLPAQYDNPNWSREMKTWIANIKWKYSSAAESMKSRLKQLEFMWYEQLHISNELRSYCRKHYKKDYYLYKSVPGIGGITAAAIIAELGDIRRFNRLDELAAIVGLVPGIYQSSENKINLGMTKRSNYQLRSLLVEASWVAVRDDLALQQYYRKHAHNEPNKAIIKVAHKLLNRLRAVIHSGIPYQKGLLK

SEQ ID NO: 95618 - protein, 412 aa, unidentified
METTMHTDFQYFAGIDWGSEKHRVCLMNAAGNVLAERWVEHSGDSLAELVDWLRQQSSAAPQALAAAIEIPRGAVVETLVEQGFAVFSINPKQLDRFRDRYSPAGAKDDRRDAFVLADSLRTDPHCFHAVRLDEPVMIRLRELSRLEDELAQEFSRAANRLREQFHRFFPQLLQLSESADEPWLWELFELAPLPAKAARLTEARIARLLQQHRIHRITAAQVRAMLKTKPLTLAPGAREAAAEHALLLLPRLRLLHQQRSDLARRIGALLKELTAPAEGQTEHRDAAILLSLPGLGRKVAATMLSEASQAIAERDYHALRCYSGAAPITRQSGKKKSVMMRRGCNERLRNALYHWSRTSVVWDQASKNRYAGMRACGHSHGRALRGMADRWLKVLISMLRHGTLYDPQYSVA

SEQ ID NO: 95619 - protein, 317 aa, unidentified
MREYIGIDISKTSIDVYDGKKSYKFENNATGFEATVALVDDIDKSIFIFEPTGVYSYALTQFCAQKRINIVMVGPKESRDFARSLKVRSKTDKIDAKVLYRYQAQIEPGMIKVPVVNHQGIKIQEMLNVYEGICSAAQKFKNQIESTSKENKELLHTLKQMIKDLEAQALKLFNKIELTLLNDEKTKARYEAISTIPAIGQKSALYLTAFFLKYPMANAKEITALMGLDPMMRDSGTYRGKQKISKHGGQQLRDLLYLPTLSALQYNDRIKVFYERLTSQAKPKKSAVIASMRKLVLMAFSIFNSLEVYRKLEVKAQ

SEQ ID NO: 95620 - protein, 391 aa, unidentified
MILVGIDIAKDKHDCFIRTLDGEVLWKPFTITNTISGFDLLYERICATGEDFDNIKVGLEATGHYSYNILGYLLDKGLPTFVINPLHANLYRKSLSLRKTKTDKVDCTIIAGMLMSDVDLKPYSRALYHSTELKSLTRYRFDKIQQRAKLKISITRLVTILFPELPSLVSKIHIPSIYALLSEYPSAEAIATAHLTKLTGLLEKSSKGKFSKATAILFRDTARTSIGASMPAKSLELKHTIKLIGTICAEIEEIECEINRIMATINSPITTIPGIGRMTGAQILAEIGDFQNFSSPDKILAFAGLSPSTYQSGQLYSSYAKMEKRGSPYLRYALFTATTLVCNWDPTFSAYLAKKRAEGKHYFVAVSHAAKKLVRVIYQLEKTRQPYIKSA

SEQ ID NO: 95621 - protein, 448 aa, unidentified
MVVRDQPWLFLHPKKKGGEAVKKRKKIDHLSTLCVGLDIGSRKNFITAMNFDSERLIDMQSVPNAASGVEQLESMILAVLAVHAEFRYVLIAMESTSFYGVHVANYLSTSDALKPYHAEVFCLNPKEVANYKKSFAGIGKNDGIDSFVVADFIRVGRISIEPWRGAQYLALQRLTRQRKHISECIAREKNYALNNIFLKFSQFALLDGADTLLSNKFGSTAEAILTEFKTTEEIVNTPLEDLVTFISDHGRGRFAEPEEIARLLQKAARDSYRLDKSLYEPITTSISCSFNCIRANEKQLKALDKAIAELIAGLNPTEYQILRSIPGIGPVYAAGILAEMGSVRCFPDNNSLARYSGIVWKDNDSGEFEAEDRPMNKAGNRYLRYYLIQAAGSVAQYCPEYAVFYQKKYAEVPKHQHKRALALTARKLIRLIFGLLDKNQLYSPAKSK

SEQ ID NO: 95622 - protein, 411 aa, unidentified
MIKENYIYVGIDLHKETHTAVMIDCYNQKLGEITFPNRPADFPKLVTKVKKCNTDGKEVVYGLENAYGYGRALAVWLIDKGYLVKDVNTAISHRQAKHQGAMYRKSDSDDAKAIALATLNMLDKLPDACPNDAYWSLGQLVHRRDNIMKQRTRLVNQLHEQLCIAYPSYKSFFNDISRPTALYFWEHYPSRKYLRGKSVEDLRKELVPVSHNKCSTKTCEKILDAVASDKVKNNAYQDARDMVTLSIVSDLQHYDSQLAEVDKMLEQMYKMLGCTLTTIPGVNVITAVKILAEIGDIKRFSNANKLAQFVGIAPLHLSSSGKGKDVATKQENRRLHATIYFLAIQMVQLSSKGTPRNPVVRAYYEKRKAEGKTSQQALICISRRLISIIYGMLKNGTEYRMPVVENAGEKL

SEQ ID NO: 95623 - protein, 336 aa, unidentified
MEHYVGLDVSLKLTAICIVDRTGKIVREGVVTSDPETIAAFIKSHAPHVVRVGLETGATATWLWTELNKMGLPVICIDARHAKAALKMQINKSDRNDAVGIARIMQCGWYKEVRVKDLNSHAIKAVLISRALLVKIKRDIENQIRGLLKNLGLVIGRAKMNVFAVRAAELAEARPELAAAVEPLLKAREAVGRQIADLDRKVMRMARNDAQVRRFMTAPGVGPITALCFLATIDDPTRFKRSRSVGAYVGLTTRRYASGEIDWTGRISKCGDAMLRSYLYEAANVLLTRVAKWSTLKAWGIRLAKRSGLRKAKVAVARKLAVILHRMWVEGTEFNW

SEQ ID NO: 95624 - protein, 352 aa, unidentified
MEHVAIDLGSRKSQVCVRATDGTIVEERRITTGSLGQYLAGRPLSRVIIETCAESFRIADLARAAGHEVRVVPATLVRSLGVGARRTKTDRRDAQVLSEVSCRIDLPSVHIPSADSRERKTICGMRETLVGARTQLINCVRGWLRTQGIAVRVGADTFAARVRQEHNEQRPRRVPEHVESLLITIEQLSAQIRDADKRVAKLAKSDTTCQRLMSVPGVGPVTSIRFCAALDDRTRFASAHAVQSYLGLVPGEHQSADRQQRLSITKAGSTRLRWALVQAAWSARNTKPYDPMVRWCLEVEKRRGKRVAIVALARKLAGILYAIWRDETRYNPRRGATPIALPPLADELVAVG

SEQ ID NO: 95625 - protein, 321 aa, unidentified
MQPVTVTVYAGVDVAKASLQLHLQGRQTEFPNQPAGLAKLRQQLQTIPHVHVVCEATGGYERPLVQALHQAQIPVSVTNPAQVRAAAQAQGQRAKTDRIDAALLTDYGQRYQPKPTPPTSASQDQLVALTQWLTQLVQAQALAKTQAEHHEAAFVCKQHTKLMAHFQSQIEAVEKQIRALLAEDALLQQRVECLDQIKGVGPRTAWLVLAHMPELGQINRQEVAALAGLAPWTRESGTMKGMRCIGGGRPEVRLALYMAALSAARCNPVLQPFYQRLRAKEKPAKVALTAVMRRLLVYMNHQLKALAATQAATKTENAKSP

SEQ ID NO: 95626 - protein, 311 aa, unidentified
MQQKFTKFIGIDVLKEKLDIFLSDSQKYIQIQNCKKSIKNFLKSLTPNDETLVIIDLTGGYEAICVNEFYEQGYNVHRAEGRRVKAFVKAIGENAKTDKIDCKILTLYGDKMQEKIILYKPEDEKLKKLNERLQDLKDFLQREKNRSKAPNLDETVKRSIKRNMENLKKEINEIEKEINSKIEKDPETKAKITAMKKQKGIGKKTATTLISMLPELGQVNRQTISALAGVAPYAKDSGKFRGSRHTKIGRNIKPFLFLPTYTAIRHDKKLNSFYEKLLAKGKRKMVAAVAVMRKIIITLNSICKHFYPYHA

SEQ ID NO: 95627 - protein, 312 aa, unidentified
MLHAGLDLSRKRLDVCLLSEHGELVEEFSAPPDADGLRGLVRHVSQHGVPVRGVIESMTGARFVHDTLEQLGWEVLIADAQKVKGLAPLACKTDKIDARVLAVLSERDLVPAIWLPDPRIRSEREQARFRLHLVKHKSMLKHRIHSTMLSFGHPCPVDLFGVEGRRLLERLQIPDPWRQSVDASLELIDDLERQIDQINRELKSSGAEHPYVPLLLTVPGIGWVLAFTIAAEIGDITRFPSAKKLCGYTGLCPRVRQSGESDRRGPLTKQGPKYLRWAMLESTMHALRHPAHAERYQRNKNAFRLSVIAPGL

SEQ ID NO: 95628 - protein, 359 aa, unidentified
MGSMLAGVVDFVVGVDTHRDTHTAAVVDARTGGVIDQITVPTDAFGYRRLRSFADQQAPERRVWAIEGTGSYGAGLTTSLLEHGEWVVEIDRPARPARRDGAKSDDLDAVRAAREALSREHLAAPRARGDREALRVLTAARQGAVVTRTKAIGQLKAAIVNAPQSLRDQLRRGTTDQQLQRCARLRTLPQHSIEHRATIRAIRGTARRALALEAEAAEDETELEQLVVAICPVLLAQPGVGTITAAQFLISWSHAGRIRSEAAFASLAGAAPIPASSGTVTRHRLNRSGDRQLNRALHTVALSRLRIHEPTKAYAARRQAEGKSPREIKRCLKRAIAREVFRLMNTHAAAVTGSLPMTA

SEQ ID NO: 95629 - protein, 378 aa, unidentified
MGKLIRIGMDTSKSVFQLHGVDSADLPVLRKKLRRQQLLSFFEKLEPTRIGIEACGAAHHWARELKALGHEVVLLPAQYVKPYVKRGKNDAADAEAICEAMSRPSMRFVPVKSVEQQAALMLAGTRDRLVRRRTQLTNTIRGCAAEFGLIAAKGLGKIEPLLLRIKTDAMLPELAKELFAAHAKEYAQLKGQIEKIEAKLMAWHRHSELSCRLVKIPAIGPIGASLLAMKVTDPKAFRSGRDFAAWIGLTPKDHSTAGKTRLGVITRAGDEALRSTLVAGATALIQQAQKGRGHPSPWLVELLKRKPPKLAAVALANKTARVAWKLMVSGEPYNPAQARPVSREGRAAALYEGSASHPSLAPIATPGRATFAAATRNA

SEQ ID NO: 95630 - protein, 355 aa, unidentified
MNSIKYVGLDVHRDTISVAVLNADGKLEVQSVMATHAATMVDFLRALRGTLHVTFEEGTHSAWLYDLLVGRVTKLVVCNPRKNALLKAGNKSDTIDARKLAELLRAGLLSPVYHGQNSTAAVKHLGRSYAALTEDTTRIMGRLKALYRSQAIACAGKKPYGARHREEWLAQLSESGLRRRAERLYQELDLLQELRREARHDLILECRKHNETKLLRTVPWLGPIRVALLIGRVQTPHRFRSKRQFWAYCGLALETRSSADYQMVNGQLERRNKPVFIRGLNLNHNHDLKNLFKSAATTASGSNGPFRLFYENLLGKGIKPELARLTLARKIAAITLHVWKKGEPFDAEYLKSQAA

SEQ ID NO: 95631 - protein, 343 aa, unidentified
MQAVTTIGLDIAKSVFQIHGVDAAGNVIVRRRLKRRYVLPFFQKLPPCLVGIEACASSHHWSRELQALGHTVRLMPPAYVKPYVKRQKNDAADAEAICEAVTRANMRFVATKTPEQQSCLMLHRTRHLFIRQQTSVINAIRAHLAELGIVAPVGRNGVEELLGVVADPSDKRVPEIARACLAALGAQLRVLKAQILEFDRMINAWHRSNETSKRLDEIPGVGPALATALVASVADPKAFQSGRNFSAWIGLVPKQHSSGGKDKLGSISKQGDRYLRSLFTAGALAVIRYAKIHGTKHRPWLTALLARRPTKVAAIALANKIARMAWAMMAKGERYKEPVALAA

SEQ ID NO: 95632 - protein, 352 aa, unidentified
MGQVTMADQQSHVTVGVDSHKDVHVAAVIDQVGQILATTSVATTDRGSGQLVRWAQRHGQVDRFGVEGTGSFAAGLTRYLRARGYQVLEVNRPNRQTRRRCGKSDTVDAESAARAALAGQASTPKAADGTVEMIRALRVARRSAIKARTQAANQLDSLVITAPEELRVQLRGLATARRVEVAAAFRPGSLTTPVAATKLALRELARRHLALSAELERLDTELAKLVRKAAPKLVARRGVGTEVAGMLLVAAGDNPDRLRSEAAFAHLCGAAPIEASSGKTVRHRLNRGGDRQANNGLWVTAMCRMHSDQRTKDYVARRTKEGKSKKEIIRCLKRYIARELYRDLVTAVLDKP

SEQ ID NO: 95633 - protein, 374 aa, unidentified
MDEDKVWVGLDVGRERSQVCIVDATGAELLQQDCETKLTALKKAISIYPADRIAMIAVEASNDTHIVRKLRNAGFPVTIFETYKASKFLALRRNKTDASDARGLADLARLGRHTVSEVYLKSPECQKLRGILVMRQRLSIMRVAAENVLRSRLALHGLSMKRVYALGGLRQEVNDQLALLRAEEEVDLTSDLQPLVEMCEGLRAYLRQVDNDLQHRAKSHPVCRLLMEVPGVGPLCALSFYTAIENPDRFTDASGVGAYFGLAPRRYQSGQTSRTRGISKAGSKLTRTHLVTAATVFGNTAPDCGLKRWFLALRERAGSGRARVALARKLAVILLAMWKTQSHFRYGPPGPDSLPGPDSPEPPRESCCEDIPLL

SEQ ID NO: 95634 - protein, 420 aa, unidentified
MIRYVGVDLHKHFIEVCVTDRKGKVLQRHRVECLRDELTAFARKILKKTDQVALEATTKTWSVVDLLRPHVKRVVVGNPVKTKAIAEAKIKTDKVDAETLAQLLRCDYLPEVWQPDGDTQMRRDLMTHRTALTSRRGRHANRVQAMLSRLMLRPPVKYLWSNAGVAWLESLALNPHDRVLLGSHLRQWRHAGEELELVDRALVEIARADPRVRLLMTLPGVSHVVAVGLLAALGPIDRFKDGDRAAAYLGLVPSTRQSGNKCYHGRITKAGNPQARGLLTQACQHVARHQGPLGAFYRRLAKRKPRQVAIMALARKLVTVAYLMLKNGEPYRYAQPMLMAEKFTKLQRKYRSAERGKPRPAHARAADGLPSVYDEVDLPEATGPNALSTGERRMLLDKDVMRYVEELYAPRTKKAVDPIP

SEQ ID NO: 95635 - protein, 419 aa, unidentified
MSNVVYRRCCGMDVHKDTIVVCVLPPDGGDGTPARKTYMTFRNDLTRMRVWLKQLKVTEIAMESTGVYWRPVWNVFEDHGFRLLLVNPAQVKALQGRKSDRRDAKRIAEYLQDGRLDPSFVPPHEIRELRQLLRHRLSLLQQRGESHNQIRDLFETANIKLSSVASDLLGLSGRCIIEAMIAGEDSPELLAWKVKGKLRKKEKQVKESLKGCFNEFHRTMLKTHYALYQFLSRQVEELEAEIARRMQPYADRVDALATIPGVEKIAAWHLIAEMGPDMSVFPDADHCASWAGVSPGSCESAGKQLSGRTKKGNKYLRRILTQSAWAASRCKRGYLRAFFHRVKARRGWARAVIAVAHKIVVIAYCILKTGAPYQDLGDDYFDRLHPERTAKRLVHRLERLGLTVCVTPSADLTPGFSES

SEQ ID NO: 95636 - protein, 338 aa, unidentified
MTLYGGIDLHSNNSYIGIVDRENKVIYKNRHRNDLPLIFSVLAPYKDELEGVAVESTFNWYWLVDGLMEAGYPVHLANPAAMKEYKGLKHKDDKKSALWLANLLRLKILPEGYIYPKEERPVRDLLRKRLHLVRHRTSHVLSIKNIMSRNLGAAMKSDDIKTLQKKEVERLFQEPHLRLSVMASLSTIHHLTGQIKEIENTILGQVRLRDEFKGLLTVPGIGTTLGLTIMLEVGDISRFPQVGRYASYCRCVESIRRSNDKKTGEGNRKNGNKYLSWAYMEAANFAKRYYPAVARYYMKKTAETNNIVAIKAVSHKLARASYYVLRDRAVFDDKKLFG

SEQ ID NO: 95637 - protein, 330 aa, unidentified
MNSICLSTDQLTAALPVLGLDVAKKSVQAELRTNGKRVRFGFENNAKGFAQLAHMLKEQGAPKVWAGLEATGPYSHALALWLHGQGHRVSLLNPRRVKQYARSAGNRNKTDLLDAAIIADFVCAHLPAAWQPPTLEVAQLQALVRRREELSLMLQAEKNRLEGVASHVRCSLERIIDTLSAEKTRLEKLITQQIRSHQQLSRDHQLLCTIKGIGSLTAAILLAEMARPGQVERARQAAAHAGLAPRREQSGTSVRRNRGLGKEGNRYLRKALYMPALVAIKYNAPLRHFASRLRTAGKPKMSIVCAVMRKLIHIAFGVLKHQKPFNPSLA

SEQ ID NO: 95638 - protein, 444 aa, unidentified
MDEADSVTGGAGSSEASPGGMTPPAPRETAASKQATDLPPKAEAIGTPAWSEPQEVGAQGRSVMRSVGLDLGARHIAYCEVRAGQVVDRVAVTRLEELASRLGKGTAPACVAFEAAREAWHVHDVLTQWGHQAKIVDTTRLKTIGVGQHKRKNDAIDAEHIAMAVDHGRVPEAHVLSPARRQLRKQLSIRQALVETRSQYVVTIRGLARAEGTALPSCSTHNFLDRLQATELDGKIRPLIAPLVAALEAIEQQLAHVDDELEQLAKTDPLIRLCATVPGVGLIVAATFLSVIDDPKRFKSAHAVSAYLGLVPSESTTGGPAKRRLGSITKQGNPHARAMLVQAAWSILRASPADDPLRMWGARIAKRRGSPIGAVAVARRLAGVLWAMCRDGTFYSPAEQANASSTGVRRRIQDDTAHAAALELAAKKIHRRTKRRPTSEVASM

SEQ ID NO: 95639 - protein, 358 aa, unidentified
MESQEVKYVGVDCGKKSIEVVRINSENSLERRQFSTTESGINNLLQWLTLNDIVGLEAGSQSFRIAKSILNKGVQVIVLNPGNLATIYQSLKKTDKEDSLKIARLIQRHPIEELPTVPIPNDEEEDNRRLCTEQENWTRQLTQSKNRLHSLFTQAGLTHITKKHLRTKANREISVALLPSRYQKEAERILKVLDLVEQNLKLIEEEIQEALKKNKAYVQTIMSMPGIGMITSLAIMYEYMGDCKRFSSAKQAAYYAGLVPRVDISGDTVRYGRIINRGCHSIRRVIVQAAWSLVRCQHGGKVKEFYQRLYLKKGAKKSIIATSRKMIEALYAMIRTGKLFDSMPENILNRKLTQYGLM

SEQ ID NO: 95640 - protein, 355 aa, unidentified
MDKCMLAGCDLHDKTMLLKLAVGRAAATKRSFSNDSEGRRAMSAELKQRALAAGAARIVFAYEASGLGFNLYDELTAQDIICHVLAPSKIERSPKHRRSKTDEKDATRILEILRGHYLAGNALPAVWIPDQQTRDDREVVRARLDAQDKCVALKTQIRTLLKRNGVEKPAGLGASWTREYRAWVAALSTCDEPLAWGARQHLASLLRQMESLEAEVQALERSVGELATQPRHAKQVEQITKLKGVGVLSAMVFLVEMGNPERFANRRQVGAFVGLVPSSAESGETSDKKGHITHQGPARLRYILCQAVWNRVRGDPDEKAVYERIVARNPKHKKIAVVAAMRRLAIRMWHLTKAA

SEQ ID NO: 95641 - protein, 374 aa, unidentified
MSSYEDITFVGLDAHAKNINVAVILPESGEVDAQWQITHDERSLRRLAKKLLTMAHGEVQVVYEAGPCGYALKRKLEGLGLCCEVVAPSLIPVKPGERVKTDRRDACKLASLLKADLLTLVHPPNEKEEALRDLMRAREDAKKDLLSARHRLGKMVLRYGLQFLETKNWTVKHRAWLKGLRFDEPYAQQVFDNYLLAIEQIEERLKMLEAHIEEAAADDAYAEQVGWLCCLRGIGTVTAMTILAELHDFRRFARPRDLMAYLGLVPSEYSSGGHTKRGSITKAGNSHVRRVLVEAAWNYRHRPAVSALLRKRRAGQPAAVIAIADRAQHRLYKRYYRLKEGHRKPHNVVTVAIARELVGFIWAVLHHQDAARAA

SEQ ID NO: 95642 - protein, 352 aa, unidentified
MSQPYNLKEESKMKLYGAIDLHSTNNVTVVIDEQDRVVYQKRLPNDLALILKELSVYQCELQGIVVESTYNWYWLVDGLMEQGYKLHLANTAAIQQYEGLKYTDDHSDARWLAHLLRLGVLPEGYIYPRADRPVRDLLRKRSQLVRQRTTNLLSIQNLLTRNTGSSLSAKRIKGLDVQQVDELLANADLALAVKANLSVMSSADEQVQRLEQTVTQRVKLRPQFSFLKTVPGIGEILALTIMLETGDIGRFPSVGNYASYCRCVGSQKISNGKKKGQGNTKNGNKYLAWAFVEAAHFAIRFNSQIKSFDQRKKAKTKVVVAIKAVAHKLCRACYYIMRDQVPFDVTKAFGQK

SEQ ID NO: 95643 - protein, 318 aa, unidentified
MSDSVFIGIDVSSQTLEIAISDQAKTWQVANDTSGIEQLVRQASALAPGLVVLEATGGYEFEAACALQAAGLAVAVVNPRTARDFARAMGALAKTDALDARMLAAFARVLHQHPERERFVKPLADAELQQLQALVLRRRQLVQMLTSERQRLRLAHAAARPSIERVIEFLKRELGDSESEVAAHVQRHHAQLAQALASVPGIGAASVAVLLAELPELGKLDRRRIAALVGVAPLNRDSGQMRGQRSIWGGRADVRRTLYMATLTAVRHNPALRACYERLLAAGKRKKVALVACMRKLLTMLNAIAKHGSAWDSTMHTA

SEQ ID NO: 95644 - protein, 347 aa, unidentified
MAHPQIAVLGIDLVLNSCSIVGLDGMGRVVARRRMHRDSVLKFASTLPPCIAAMEACCGAHHLGRLLRGMGHEVRLMSPEYVRPYVKAQKNDDRDAEAIAEAATRPTMRFVALKGEAQLDLQTLHRARDRLVAERTALINQLRAVLLERGITVPQGRRKLEQHLAAMPDGGEGTALSERIRVLVDDLRAEWAELDRRVGALDAEFVALAKADGAARRLATIPGIGALTATALAAAVGDGATFARGRDLAAWLGLVPRQATTGGKPRLLGISKRGSKYLRKLLVHGARAALPWLAAGGTPLGSWLQALLGRAHKNAVIVALANKMARIAWVVLRRGETFNAAALAAAA

SEQ ID NO: 95645 - protein, 401 aa, unidentified
MIDTRDVAVFLGLDVGKGEHHATGMTPDGKQVIDKPLPNSEPKMRAMLDKLTAKYGRVLLVVDQPASIGALPLAVARDAGCDVAYLPGLTMRRIADLYPGEGKTDARDAAIIADAARTMPHTLRSIELDDETVAELHMIVGFDDDLAGEVTRVANRLRGLLTQIHPHLERVLGPRIQHPAVLTLLERFGSPAVIRKAGRRRLVTLLRPKAPRMAERLVEDIFTALDEQTVVVPGTEAAAVIVPKLAKNLTGLLDQRKELAATIESLLESHPLSQLLTSMPGIGVRTGARILIDVGDGSAFPTAGHLAAYAGLAPVTRRSGSSIRGESPSRRGNKHLKRAFFLAAFASLSDPASRAYYQRKKDEGKRHKQALMCLARRRVDVLFAMLRDGTFFESQTIPQAA

SEQ ID NO: 95646 - protein, 425 aa, unidentified
MKSNRNDRTNQRIERISMQHAVVGIDIAKDAHAAQMTDFRGRSLTPRHLSFPNTLEGFEKFLRWVKEAQSKHRLTSLLIGLEPTGHYWFNLANWLLQQGIEVVLVNPVTTHRNKENRDNSPSKNDPKDALVIADVVSRGYYTDYVTQAAVFERLKTLMSDREYWVKQSTSLGNRIVRWIDLYFPEFRQVFPDWTVLRSLASLHACPMPCDLKRLSIDEVIDHWRKQGMRRASGVSGRAKAAALLAAATHSIGDTRATEEARQDIRRLLQTYEHVVAMLGEMDEAIQSILAEIPLAEQLRSICGLGNMTLAAILASAGDLRLYAHGRQLLRRAGLNLAECTSGKFKGQIKLSKRGDSTLRKHLYWGMLNLVRQNPDFKRWHAHNQAQGMKKQASLFKLIGKLARILIGMVQRGETYRSALAAPVAA

SEQ ID NO: 95647 - protein, 424 aa, unidentified
MAGPSTGFTCENGKAAQVTATDVVWVGIDAGKTSHHAAAVDAGGKRLWSVKVANGQQPIEELIGRAAQSAGDGEVRWAVDLVSPAAALLLAILLAGGQKVVYVPGRVVHGMAQVFRGEGKTDAKDARIIADTARMRSDLTELTATDELVVELTRLTSYRADVMADWVRGINRLRDLLTSIFPALEASFDYSTRSALILVAGYCTPAGIRQAGAGAVAAYLREHGAWAKGIDAMAATAARAAQQQTVALPGEATTALLIGKLARQLLDLDREIKDTDKLLTSRFRDHPQAAIIESLPGMGPILGAQFLVATDGRALEAFASPGRLASYAGLVPVPRDSGRVAGNHHRPRRYHRPLRNVFYMMALSSLRTEGPSKAFYQRKRDENKIHTQALLALARRLVDVLWALLRDNRVYSPIPPSQVTAIAA

SEQ ID NO: 95648 - protein, 389 aa, unidentified
MSEAFDASRSLTMLEQDSTLIAVIEMSQSAWLVAAVVPGFKRQPLKKLDADAEALLKLLHRWRKEAGMAGREIKRIAVAYEAGRDGFWLARWLRMRNVDAYVIHPTSVAVSREHRRAKTDRLDTELLMRAFIGWLRGEKRHCNMVAIPTVDEEDARRPNRERGNLVTEQTRIVNQIKAILARFGIRTFRPTLRKAEEKLEKLRTAEGMVLPHNTRAELCRYLARLGVVRQQIRAIEQGRLRQLAMAPAEQEGPHAMMRLIARVLGVGIETADMLVNEVLSRHLRDGKAIARYAGLTGSPDESGKRRREKGLARAGNARVRCGMIQLAWRFLRFQKDSDLAQWFRARTADGRGSTRKTMIVALARKLLIALWRLATTGEVSDGIVLRPAS

SEQ ID NO: 95649 - protein, 343 aa, unidentified
MQVTTIGLDLAKHWFQVHGVDASGVVAIRRKLRRSEVLHFFQLLPPCLVGIEACATAHYWARELIKLGHEVKLMPPAYVKAYVKRNKNDAADAEAICEAVTRPSMRFVPVKDTEQQSVLLLHRAGTLLVRQCTMLVNALRAHMAEFGMVAPQGLRNVELLIKMVDHEQERLPELARQILRVIVDQLHDTIARVQEIELRLTRWHRQSQLSQLLATVPGVGIMGASAIAATVTDPSLFRSGREFAAWLGMTPRQNSSGGKERLGRTSKRGDKYIRSLLIAGAVAVLRHARNRPTRDGAWVRAMLERKPTKVAAVALANKTARIVWAVMMRGDGYRAKQALGQPA

SEQ ID NO: 95650 - protein, 370 aa, unidentified
MSDMPVSYAALVGVDLHKCTVSLCAVDPKGEVISRLTCDTKCVDRIEQWLLALPRPSHMAVEAVGFVEWFIDRFRRCVDKMDIADATALANLRGKRRKTDKKDAGDIAKRLARGECPLGWIAPEEVMQLRKLGRHWRNLSRTISRAKHSMRSMLLAANLRGPKFDGASAQKWLLAHGHLLKDVQREAFGNLLDIVCLIERQRESLRRKIIFANRAPRFAALITILKSVPGIDEIWACIIASEVGEFSRFPNADALEFWAGLTPDNEESAGRTQSGHITKAGSPTLRWALGKAAVTLCRSDAKQEAIRQRLIGHMPKAKANVAMGRRLLRILFAMVRDGSLYLGQEPTGHEQAANKARLKKLNHRKERTAA

SEQ ID NO: 95651 - protein, 344 aa, unidentified
MKISTVGIDLAKNVFSVHGVGKDGKVVLRRTVGRADLLPMFAQIEPCLIGMEACSGAHHFARELRKLGHDARIMAPRFVAPYRKSGKNDGNDAEAICEAVGRPNMRFVAVKSVEQQAVLVLHRERKEVSDQRTALINPLRGMLCEFGIVLARGRYSFRHQLPAVLDDEGNGIPALARRSFRAVDERIRALDQQILAYDREIEALARHSEPAQRLMAMPGVGSITATAIVASVADMKVFRSGREFATWLGLVPRQYSTGGKVRLGKITKQGDVYLRTLLIHGTRAVLATLGKKNDRLSQWVRSLVERRGYRKAAVALAAKHARMIWAMLVAANPIASPRPCSRSK

SEQ ID NO: 95652 - protein, 374 aa, unidentified
MSDSHLFVGLDVHKATVAIAVAEQGRSGEVRYIGNFPNNPASIITQLSRFAERYGPIECVYEAGPCAYTLYRKLVAAGIRCIVVAPSKLPMPKGRVKNDHRDAVALARLLRAGDLVPIWVPDPVHEAIRDLVRARQAASFDVRKARQRIQSYLLLRDRHFAGKPWSYRHMRWLSDQQMEHPAMQITLQGYVNALEQAESRRAELDVQISELLPTWSLAPVVTALQALRGVASVIAIALVAEIGDFRRFPSARDLMAYFGLVPSEHSSGSTVRSRGITKQGNSAMRALLYEAAWCYRQSAKIGQWMKARMPVGVPQFARDIAWKAQTRLCGRYRKLIARGKKSQIAVTAVARELLGFVWAIARAQESHQPPVVLA

SEQ ID NO: 95653 - protein, 419 aa, unidentified
MLTARWFVGIDWATEAHEVCVLDPEGQVCDRRSVPHSATALQAFVDALLERAHGDASTVAIGIEVPRGAVVDVCVERGFGVYAINPKQLDRFRDRFTAAGAKDDRRDAHVIGDSLRTDPQAFRRVRLDHPLVIQLREWSRFDEDLAGDLTRMTNQLRDLVYRIAPGLLTLCPAADERWLWTLLRDAPTPADQRRLSLRRLERLLRDHRVRRLEAAQVREVLQKPSVYTAPGVVDAVAAHIQLLLPRVDLLAGQRRDAEKQLERLLDALDAQEPAAGDQREHSDVAIVRSMPGIGTRVAARMLAEASQPLVERAYHVLRATMGVAPITKQSGRRRTVSMRYACNARLREAGYHWARTGAQKDPASRAYYAQLRARGHSHGRALRSVADRLLRVLMTLLNHGQLFDLTHGQHAPAVIGAGA

SEQ ID NO: 95654 - protein, 347 aa, unidentified
MSYFAGIDLHKRYLTLCVLDPIGNVVVQHRRLTTDGLFAVLAELDGPLTVAVEATLHWAWLHDRLVAQGYGVQVADPGQVKLISRARCKTDPIDAKKLADLLRSNLLPAIWVPDPTTRANRKLLRGYSFLVRSRTRLKNRVHAYLAEINLASPATDLFGKQGRIWMDSLTLPDEVRFQVDNLLELLDQLELRIRTTAKRIEQRVDITPEAQLLLTVPGIGAKTAMLIMAEIGTLDRFPTSHHLTSFAGLVPTTRSSGGKTTHGSLPRAGSPWLRWALVETTQTLKMKPGPVRAHFTRLTRAKGNSKATVAAARKLCCYLFWMLKEGRTYPDWLHNRHSHQLLEVRPT

SEQ ID NO: 95655 - protein, 385 aa, unidentified
MQRNDLSQSLTAFDQNSTIVAVVELSLESWLMSGLVPGVKRQPLKKQPADPERLLALLERWRQEAIKAGHAVKRIVVAFEAGRDGFWLARWLRSHDIEAYVIHASSIAMPREHRRAKTDRLDTEVLMRAFLGWLRGEARHCRMAAIPTLAQEDAKRPSREHQSLVTERTRLVNRMKATLVWLGLPRVNIKLRKAAEHLAALRTPEGEPLPPNTLAELHRDLERFAMIRAQIKAIEQARLQRLKAAPAQGTHPMILMLAKILGVGIETADMLVHEVLARRLRDHRAVARYAGLTGAPDESGSKRREQGLAKAGNGRVRRGMLQLAWRWLMHQKDSALTQWYRSRTVDGRKDTRKTMIVALARKLLIALWRYVTAGEVPRGVVLKAA

SEQ ID NO: 95656 - protein, 319 aa, unidentified
MSDACMVGIDVAQATLMVAVLPAGRTWEVAYTPEGLATLVAELQPLAPARVVLEGTGGLQALAVAALALAGLPVVVVNPRQVRDFAKAMGQLAKSDQLDALVIAQFAAAVQPPVRPLADDDTTRLSEFVTRRRQLVEMRRAEEQRLARLEQQRAARRVRTDVAEHIAWLSRRIERLDEELQAAIEKSPVWCLQNQLYQSVRGVGPVVARTLLAELPELGTVSGKVIAALVGVAPYVRESGVWRGRRHICGGRAEVRRVLYLGAMSGVRTNPVLHAYYARLVAAGKPRKVALIACTHKLLTILNAMARDQRPWTPPPATA

SEQ ID NO: 95657 - protein, 399 aa, unidentified
MLAVGIDISKSKSVAAILNQDGSMHTSPFEFHHTQPELDAFIKYILNSKQSATILMENTGYYHYPVLKALQEAGLPVCMVNAYQIKKFGDMDLRKAKTDKKDAVRIARYALEKSYSLVPYTSMEQKYEDLRFLARQYNQRMLTLKTNKVFLLNLLDETMPGITNILPLTTRTPETSLSVLFINRFKSYDRIKKMGKSRFLDAFEKIARKSRNRQTKTYGLAIYEAALRNITTRGENEYTLAAQDQCLELVCESQKAADSIILKMQTLAETLPEYAVLRSMAGVGDRLGPLILAEIGDIRRFHSGKALNAYAGNDAPPYQSGAFESHNRHISKRGNAALRKYCFEVMQALKLTRPQDDPVYLFLLKKEQEGKPYNVAKMAGVNKFLRIYYARAMETLKQQ

SEQ ID NO: 95658 - protein, 413 aa, unidentified
MSPGLLLREVPGDRLVVAIDPGKVSNRVWLTTGERGLIGEPVSLPVLRDGVEELDRLIASSGVDGAPVIGIEATGALHRAWAAEVERRWPGSLRLFAPSETQAARAQLGSRRFKTDDRDCAALVWLLRQGAGRPSAPSQVEALLGAVRHRRQLVDARRVAQQRLHDQLNALCPGLSAPVGHGRVLELENPSGGAVLACAAAFAGRAPSARSLLARSPGRLSEANARFWSERWKRLLAPPADAELRAQRLGRDVERWLGLREDIAALEAQLGELLAGTDGQILTTLPGVAIVRAAAFAAHTLPIERWPTPEQLYSATGLAPASYQSASVTRRGRISRQGLPEHRDALMAIAWGLAQHSPAFAERDREYRARGFRPIQARVALARHACRLAWRLMISQQPYDDQRYDRARHRRGR

SEQ ID NO: 95659 - protein, 363 aa, unidentified
MNNTTHLGLDVHKESIAAGILRPGSVEPDLRTLANTPEALRKLVSPMDRASLIACYEAGPTGYDTYRVLERLGVRCEVIAPALIPRRAGKRIKTDRIDARNLARLHRAGELTAIRVPTPAEEGLRELIRTREDLKDNRRRAQQRIKGFLLRRGCRYPGNDKGWTQRYDRWIHSQSFDEPAAQLSFEHYLAARTAAHAQLQQATDHIESAATWPQIADMVARLRCLRGLDTISAVTIAAEVSDFRRFANAPSFMAFTGLVPSEHSSGHSEHRGPITKTGNRHVRRVLVEAAWTYRHRPNVGRGLSKRHEGHPPEVLAYCWSAQLRLHARYNKLSRRSHRNTAVVAVGRELSGFVWGLMNDRISV

SEQ ID NO: 95660 - protein, 349 aa, unidentified
MTDQRISYCGRIVYVGIDVHKETYTVTCVCNKQIVKTATVQADPAALAASLPRWFPGATLYSVYEAGFSAFVLHRVLTKAGITNLIVNPASVAVAANDKVKTDRRDATKLAIDLADGRLRGIYVPTEAEELARLLPRTRAQIVKHRATIARQIKAKLHQFGLIAPSSRRLISRRYLREMAAWSLPPELSVRLTLLAEQWRFATRQLIEMRRLLRDQAQAQEAIEKVYRSVPGIGEVVARTLATELGDMTRFANERALFSYTGLTPSEYSSGASVRRGHISRQGSSRVRHLLVETAWRALPRDGVLKEMFDRIAATRGKKRAIVAIARRLTGRIRACFRQGTTYAVGTYA

SEQ ID NO: 95661 - protein, 343 aa, unidentified
MIRRVGLDISKEVFQVHGVDEHDVPQLRKRLPRAKVLQYFAQLPACEVGIEACGGAHYWGRELTQLGHTVKLIATHFVTPYRTGGKNDANDAEAICEAVGRPKMRFVAVKSEEQQSVLMVHRARELALGNRTAQVNQIRGLLAEFGIVVPQGVARLRYALPRILEDAQNGMPMIARQVLTSLLEQLHTVDEQMAGFDRQIREIADASEPAQRLLKIVGIGPQTATALVATMGNPNAYDSGRNFSASLGLVPRQNSSGNKERLGPITRKGDCYLRKLLVLGAQACLRRVGKKTDHKSNWAKPLMERRHTNVAAVALAAKHARIAWAMLAHDAEYRPAGPEVVAA

SEQ ID NO: 95662 - protein, 385 aa, unidentified
MSKPDDLSKPLVALDHDSTLVCVIEMSGTSWLVAATVQGVDRRPLQKLPVNPARLLAQVERWRREAARTGRTIMRTVVAYESGRDGFWLARLLRDHAIEVYVIHASSVAVSREQRRAKTDRLDTEMLMRALLGWLRGEPGHCRMVAIPTIAQEDARRPGREREGLVAERTRLTNTIKAELALWGIQGFKPGLRKAAEHLEALRTDEGEPLPPNTLARLHRLLKRRTLISDQIKAIELATTQAIERDPTGPNAMILLLARIKGIGLETAQMLVHEVLSRNLRDRRAVARYAGLTGTPDESGSKRREKGISKAGNPRVRCGLIQLAWRFLMFQPDAALIQWYRERTAGGKGAIKKTMIVALARKLLIALWNYAAAGVMPEGVVLKEA

SEQ ID NO: 95663 - protein, 420 aa, unidentified
MPNQPSDFVAVIGLDWADKKHDLCLLETGQTTPEFSILEHDPLAIDAWAAKLKKRFGGRPIAVCVELARGPIVSALLEYDFFVIFPINPAMLAKYRRAFSPSRAKDDPKDAFLALDLFRHHFDRLSPLRRERPAMRALQCLVQGRRSLVEDRCRLINRVTYALKEYFPQVIRWFRDKHTEVFIDFVTRWPTLEAAKRAHRDTLIDFFHDHNVRGRKTAERRVEAIKAARSLTSDVAVIETNRLMAESLLTQIVVLSKAISRFDAEIAARVAELPDYKIFAALPGAGSALAPRLLAAFGENRDRFPDAASVQKCVGIAPVVERSGNKSWTHWRFIGPTFVRQTFVEWVGESVPHSFWAKAFYESRQAKGVPHHVILRALAFKWIRIIWRCWYDRQPYDEARYLLALQKHHSPIIANAAQLS

SEQ ID NO: 95664 - protein, 336 aa, unidentified
MSHYCGIDLHSNNHVVVVIDERDKRVFDKRLNNDLSSTLEVLAPYQETLKGVAVESTFNWYWLVDGLQEHGFGVQLVNTAAVKQYDGLKYSGDHQDAFHLAHLMRLGILPTGYIYPKEQRAIRDLLRRRMSLVRSASTQLISVQSQIWRSTGIRIKSGDLRKLEFISPMMDKYTLQAVHAGLMVYQAIQQEINVLEKSAFEAIKLTQSFKILQTITGVGKILGLTIMLETGDIHRFAGAGNFASYCRCVDSSRTSNGKKKGVGNAKAGNKYLSWAFSEATHFAVRFEPLAQRFYERKKAKTNGIIAIRAVARKLARATWMMLRHQVPYDAKLMFPN

SEQ ID NO: 95665 - protein, 404 aa, unidentified
MYNAVGIDVSKGKSTIAVLQPAGVIIRKPFDVSHTSQQLNELSSYLNSLEGDTKVVMECTGRYHEPMANALHKAGLFVSIVNPHLIKNFGINSLRKVKSDPADANKIARYTLDNWPELRQYSSMDDTRTQLKTLNSQFSFFMKQKVAAKANLIALLDNTYPGVNKLFDSPARSDGSEKWVDYAYSFWHVDCVRKIGLKAFTERYKAFCKKHHYNFQPLKPEELFLASKELIAVFPKEKNYKLLIQQSIQQLNLASEHVEQLRKEMDALAATLPEYGTVMGIYGVGKTYGPQLMAEVGDVSRFTHREALTAFAGVDPGVDESGQRKPKSNRASKIGSARLRKTLFQIMTTLLQNAPQDDPVYRFLDKKRSEGKPYYVYMTAGANKFLRIYYGKVKECLRNLEQSE

SEQ ID NO: 95666 - protein, 339 aa, unidentified
MAIIGGLDLHRAQITFDYLDTETGELRRGRIAPATRGSLRSWATALPAVRPAAFAVEACTGWRFVVEELRTAGITPYLAEVADTAALRGPKRRAKTDRADARHLRQLLQRGALPTAWIPPDHVLEARTRIRLYKNLVDERTSWQQRIKAALFHHGVPPIKDLRTAEGRAHLKEAELSAAARATVEVGLRAIGRSDEEIRPLRKELADLASRQAGCRALDGLYGVGPVIAVAIWAELGDCRRFSSSRDAVRHTGLDVTVHSSDDQRAPGHLARQGPPVLRWALCEAATCAARTTSPDHALYESVAERVGASRATLTVARKLARRAHHILRALGDDAMAAA

SEQ ID NO: 95667 - protein, 331 aa, unidentified
MSIIIGIDVSKANLDCAYLRDPDQKRAKRLSCKNEVSSFASLVSWAETKSDLSVKSLAFVIEPTHVYHEPLVQFLHNSGATVYLVNPGRVRKFAEGIGILSKNDMVDADLLTRYGLLARQLTAYAPVAQEVNDLRSLLNRLDVLERNLRSELNRQEKVGKTMVFHRLEQQSIARAVKRFKAEIITFKRAIRECIKSTPSLQQPFDLLCTIPGVGAKTAWIMIVVLASRPFMSAPEVASFLGLNPIEKRSGNSQYRRPRLSKSGSGHYRQKLYFPAMVATRKNPDIKALYERLLAADKTKMCALGAAMRKLVHICYGVMKNQTPYQAQYMPS

SEQ ID NO: 95668 - protein, 426 aa, unidentified
MKYTQNEKLNQLDFSTMVVGVDVGSEFHYARAFDYRGIELSGVFKISNDAVGFEAFEKWSHELMMKHDKSKLIVGMEPTGHYWFNFGYSLKENNRKVVLVNPMHVKRSKEFDDNNPTKNDRKDPKTIAMLVKDGRYLEPYMPEGVFRELRISMETRERYIKHMTVINNKVQRWLSIYFPEFKTVFKDWSGQGAMIALKSFATPEKVIAKGIEAIANEWKSQIKRAVGTKHAVRLMKAAETSVGIKEGLRAAEYDLLSLIEEYEFVTKKLEATLSLIEELLQQVPNITELLAIKGIGVVTVAGFIAEVGNISRFEHPKQIQKLAGLNLKENSSGKHKGKTTLSKRGRKRLRRLLFQAVMILVAKNAEFRQLHLYYTNRIKNPLKKKQSIMAISCKLIRVFYTLLTKGTPYDGEKMIRDIKRIEPKAA

SEQ ID NO: 95669 - protein, 417 aa, unidentified
MTLKIVYPICCGIDIHKSFLVATIASTNDKGVTSYVKRRFSTFTKDLRILAKWLEDNNCRDVCMESTGKFWIPVHNILETTCKVVLAHPKYVKSIRGKKNDNKDSKWIADIFKHDLVCGSFIPPPPIRQLRDLVRYRVKLTNASVGEQNRLQNCLTVSNIKLDDVFSNVLGKSASAITEQLLVHPNGDFDVAPYIDYRCKATPEEVQAAIDGFVCPEQVEKLKVIRSHLDSIELCKENLDAVVISLSSQFQTQLDLIMTVPGIKLHSAIAVISEIGVDMSVFPTVKHICSWAGLVPQNNESAGKKKTTRISRAGAYIKPLLMQCALAVCKSDKHPEVKTRYLALKKRRGHKKAIVAICRMLLTAIYAVLKKSEAYNPDLYKREEPIPTERAMSVNQAIAFVQRHGFRVVDSDGVIAS

SEQ ID NO: 95670 - protein, 419 aa, unidentified
MEILYERVAGIDVGKKEIAVAVRTPDARPGAARVQRVRKFKTFYPVLAQMVAWLTEQQVTHVTMESTGVYWRPVFHALCEAQPPIEVLLVNAAHVKNVPGRKTDVNDAQWLAQLLEVGLLRGSFIPPAEIARIREMTRYRRKLTEARTSELQRLAKVCEDAGIKIDSVASSLTTVSARDMIEALIGGERDERVLADLARGAMRKKITDLSMALAGRFDTHHALLARMHLEHIDHLAGMIARLDGEVEAMTSPFCPQLALLCTIPGIDIRTAQVIISEVGVDMSRFPTAEHLASWAGLCPGNNESAGKHGRTRARKGNSRLRSALIEAAWAAGRTHTYLGARHQRLLRRFGKKNAAKASFAIAHDLLTITWHVLHDAAPYRDLGADYFQRPDSPASNARKNQLIRELKALGYTVHATPAA

SEQ ID NO: 95671 - protein, 337 aa, unidentified
MSVYVGIDVHRKRSQVAVVAEDGQVQLNKNVVNGSEPMLRLIGDLPAGTPVAFEAAFGWGWLVELLEDYGFDPHLVHPLRCKAIASARLKNDKVDAAILAQLLRADLLPEAWIAPPKVRQLRALLRHRVGLVRLGTQLRNRIHAVAADHGYDRSASYWTGPGRGWLAELDLPAASREIVTDCLAVIDALAPIIDRIDGELHQHAKADPRVKVLRTLPGVGEFTALVMVAEIGDITRFGSARKLASWAGLTPTVRGSDLKVRHGNISKQGSAWLRWVMNQAAQTAKRSPDFAATYSSIAKRRGKKIATIAISRKLLTRAWHLLSEIQAAEASTPPRRP

SEQ ID NO: 95672 - protein, 382 aa, unidentified
MGLVEGNTYIGLLVEESNTLLDWGNMVERETEAKSSGSGVTNPYHRTEHCDKIHAYRCDKEVGVIGIDISKEHLITSRGRVRRYENKKEGYEEILKMKPCTIVLEPTGVYAIKPSQYFKERGVRVLQVSPNVLSREKEFRGKKTDFYDAEKLENMVDKAKEYDYNPLKEMTTLYLFLKDIETKYKNRLKRALFLVSDNDKVSKDRLEKLAKGDFTQEELYQLEYTPLVLEEIKMLAKNLLETQERLKEVRRMIEGQVPQDHVLLTIPGVGRLAAGIIIGIVGDVKRFPKPESFVAYCGLDPVVERSGRAVISRGISKRGNKYLRSLFYFLAVRSYSRNPTLLKFYETHKDRLKGRKLYVALARKLARVVWSVWYNNRPYEPK

SEQ ID NO: 95673 - protein, 368 aa, unidentified
MFYLAVDQHSKQLTVNLRNEAGEILLRRQVSTRGDAPRQFLGEVQQRSAAEGGYVTIVEVCGFNDWLLELLVQCGCREAVLVQADGRSKRKTDRRDANQLGEVLWVNRQRLAAGQSIRGLRRVRILTRPEREDRRVTQLRKNLGRELTRTINALKTLLRRENLEQHCPTKGIQTLAAARWLKSLALSPLDRLEMDQLLARWQLLKRQKEQVEEQVARRAAAHPDAQLLRTLPGAAAFTALGLAARVGPIERFPRPRSLANYWGLTPGCRNSGETTDRLGSITKEGSSLARFLLGQLVLHVLRKDAVMRGWYKRIKLRRGSKIARVAVMRRLATIIWHMLKEREPYHLGGPPRSKIKRHEPALSRTAPV

SEQ ID NO: 95674 - protein, 377 aa, unidentified
MHSENIAAYVGLDVHKETLAVAIAAPERLGEVRYYGTINNEGQAVRRLFQKLQGLYGNILSCYEAGPCGFGLYHQLTAMNIKCQVIAPSRIPKSPTDRIKNDHRDAISLARLLRAGELTPVWIPDLTHEAMRDLIRVRAAAKRDSRVARQRILSMLLRTDKHYTGKHWTGKHRTWLANQSFSQPSQQIAFQHYCQSLEQIEDRILQLDQEISRLLPEWSLCNLVCQLQALKGVGQLIAITLVAELGDFSRFSNPKQLMAFLGLVPGEYSSGNSIRPRGITKVGNSELRRLLYEAAWSYRTPAKVGAWLIYYRPDSVTQYSKDIAWKAQQRLCSHYRSLTAKGKKSQVAITAVARELTGFMWDIALAAQSSFSQQKQN

SEQ ID NO: 95675 - protein, 316 aa, unidentified
MTETETYVGIDVSKARLDVAIVPGEQTWSVANDDGGITELVDKLKGLTPKLVLLEATGGLERRVLARLVGGGQPAMAINPRNVRDFAKALGKLAKTDRIDAIILGRFAQAVRPELRAIADEQSQELQTLLTRRRQVVEMITAERNRLFATDLPKTRRTIKEHIEYLQKSLNINDYDLDQSIKQMPVWLEKVDLLESMPGVGRVTATTLVALLPELGTLGRKQIAALVGVAPFNRDSGTLRGRRAIWGGRAAVRAVLYMAALTSARWNPAIRALYQRLKAAGKPSKVALVACMRKLLTILNAMLRSRTPWRSPEIPA

SEQ ID NO: 95676 - protein, 416 aa, unidentified
MGVFGWAGRAIGLDVHRDFCVVAICEDGVVRSAGRVASTPEGITTLAGSLLASDRVALEVTGSAWEVARLLEPHVDRVVVVSPDDTGIVQARAKTDRLDARTLAVLLSRGELESVWMPDERCRVMRRRLARREQLVRARTRSKNEIYAVLARRLAGRPPCSDLFGVKGRRWLAGLELPGEERESVDAAIRHIEFLDREIAEVERLIAQQALAWPEIRRLMTIPGVNLVCAASFVAAVGSADRFLTSRRLVAYLGLDPKVRQSGEAPARSGRISKRGSASARWALVEAAWSVVLQPGPLHAFYERTRARRGHGKAIVATARKLATLCWCLLTRDEDYAHQQPSLTRQKLRRLELTAGAPKNAPDAAGRWATNPRIREAERELARQAEASYKRMVRDWQATAHKKKAGASVTPERAQV

SEQ ID NO: 95677 - protein, 315 aa, unidentified
MEESVVVGVDVAQATLEVACTPGTERWQVTNDAPGLQGLRERLRTVQPRVVVLEATGGLEGPVAATLSAAEVPVAVVNPRQVRAFAKALGILAKTDRIDAAVLAHFGQATGVQPRPLPDAATQALDALVGRRRQLQEMLTMERNRLRLAQPVVQPQLRKHIAWLERQLEDLDTDLSAQIQSSPMWRVQDNLLRSAPGVGTVLSPQGGAELPELGTLGRRQIAALVGVAPFNRDSGTLRGKRAIWAGRASVRRVLYMATLVATRWNPVIRACYRRLLAAGKPKKVALVACMRKLLVILNAMMKHQTPWQPDLGSTS

SEQ ID NO: 95678 - protein, 373 aa, unidentified
MEHDSTLYVGLDVHKDSITVAYALGAGEVELPGKIGTTKTDLDRLCKRLQSKARHVCVVYEAGPCGYGLYRQLVQKGFDCMVCAPSLIPRKPGERVKTDRRDAIKLVRSLRAGDLSAVYVPTVEDEAFRDLARAWMTAKDDLRQARQRLKSFLLAHDVRYAGHADWGPAHRRWVSQYAFDSEWQQFAFEELRRTIEDRFAQCQRVEAALREAVTMWRFYPAVLGLQAMRGVQFTTAVGMLAELGDLSRFDHPRQLMAWLGVTPSEHSSGDKRRQGSITKTGNSYARKLLVEAAWSYRHPARISADIQRRHEGIPKAIIDRAWDAQVRLCRRYRRLAARGKNANTTVVAVARELSGFIWDIGRLAMSLALPCRT

SEQ ID NO: 95679 - protein, 365 aa, unidentified
MQKNSTMQTSGENIFQGQLTIGVDLGDRSSAYCVLNEAGEIVFEHKLATTPEAMKQVFSSMPRCRIAMETGTHSPWVSRLLTALGHEVIVGHAQKVRLITKSRRKDDRLDARTLARLARIDPELLSPVKHRSAQAQLHLTEIRARAGLVSARTALVNAVRGLVKSYGERLRKCGTQQFRRETIGGLSAGLREALEPLLREVESLNERIQEYDRRIAKMAKQTYPETALLQQVKGVGDLIATAYVLTIEDPHRFRKSRDAGCFVGLQPGRRNSGESEPQMHISKEGDEYLRTLLVQGAHYILGPFGEDSDLRRWGQKLSARGGKIAKKRAVVAVARKLAVLLHRLWVSGEVYEPLRNSQKTMSAAA

SEQ ID NO: 95680 - protein, 343 aa, unidentified
MQTVTTVGLDIAKSVFQVHGIDAKGDVVMRRQLKRRYVLAFFQKLPSCLVGIEACASSHHWSRELTALGHTVRLMPPAYVKPYVKRQKNDMADAEAICEAVTRATMRFVPTKTPEQQSCLVLHRTRHLFIRQQTAVINSIRAYLAEFGIVAPVGRKGVAELLHVVADPSDKRVPEIARACLAALGAQLLILKEQIVKFDRMIMAWHRSNETSKRLHYIPGVGPMLATALVASVADPRTFRSGRNFSAWIGLVPKQHSSGGKDRLGSISKQGDRYLRSLFVAGALAVIRYAKIHGTKHRPWLAALLARRPTKVAAIALANKIARMAWAMMTRGERYRQPVALAA

SEQ ID NO: 95681 - protein, 408 aa, unidentified
MNAVGIDVSKGKSTVAALRPMGEVALLPQEFLHTEVGLEQMAYAIVALGEDTRVIMEATGRYHEPVAAALHEYGIYVCVLNPLFIKQSGGGSIRKVKTDKADAMKIAKYGLDNWVDLREYTPMDTVRQQLKLCSRQYNLYMKTVVSLQNNLISLTDKTFPGVNGLFSSPERADGHQKWVDFVMTFWHCDCICRVSEKAFAERYQKWCKRKGYHFSAEKAQDLYAGSCGHFTTLPKNDNTKLLITTAAQQLLAGKMTLAALRAEMTRLAKQLPEYDTVRAMYGVGETTAAQLMAEIGDVRRFPRRSSIVGFAGVDPAVDQSGKHEAKSTPTTKRGSPHLRKTLYQIVCTYLRKAPEDEPVYQFLDKKRAEGKPYFVYMTAAQNKFLRIYYARVKECLEAFDAQQNSTQS

SEQ ID NO: 95682 - protein, 342 aa, unidentified
MSAAFIGLDLAKSVFQVHGVDAQGKVVVAKRLRRDAVLAFFANLAPCVVGLEACAGSHFWAREIARLGHTVRLMGPRYVKPYVKRQKNDRADAEAICEAVQRPSMRFVAVKSEDQQSTLAIHRVRETLVAQKTQLINALRAHLAEFGIVAPQGAGKVAQLSAVVADLEDTRVPALARSVLQSLIDQLRDTERRVEELDARLAEQAKADEACQRLTTIPGIGPITATALTATVGDATVFESGRHLAAWLGLAPRQNSSGGRERLGGISKAGDGYLRRLLVHGARSVMRWHGKTSPWLAGLLKRRPFNVAVVALANKLARIAWAVMAHGENYRKPAVTAEPVTA

SEQ ID NO: 95683 - protein, 272 aa, unidentified
MQGKVSFQEDAMPVVYAGVDVSKEWLDVHLHPLGESRRFSNDKTGIRQLKRLLARHRPKSIVMEATGKFHRPAHRSLWLDGFGVAVVDPLRARMFARACGYLAKTDRLDARFLALLAESLRPPADTPPSPHIEALQELVNARSAAKCDITALQNRSKTATTALLRGELNRLVRRLEQHVERLDKEIERCVGEDPQLCRKAEILTSIPGIGRVTALALMAGMDELGSCSGKQAAMLAGLAPIANDSGARTGRRSIRAGRPAPRRALYMAALSA

SEQ ID NO: 95684 - protein, 395 aa, unidentified
MTRVKRSTAPSKAWMPNARPQCWCQAPQPRSGAPKAQGLIAARWPQHNPPCHRSLRADVLTANNTSTGADRFVAPQLQFRISTSLTDVTAGWSGFWLARWLGHRGVEAHVVQPSSIPVDRRARRTKSDGIDAELLLRTLLAWFRGEPRVCSMVPIPNEVDEDERRRTREREELMADRISLVNRIAAVLATLGVRDYNPLRRDRRARLGALRTALGDPLPPHASARILRILDRLDLVCAQITELERGRDAVLEKEAPDRAEKMIQQLVDLRGIGVQSATVLVREAFVREFTNGKRLGSYAGLTPTPFSSGAAKREQGIGKAGNRRLRTVMIELAWLWQRYQPGSALVGWFRERVSGTGRRMRKVMVVAMARRLLIALWQFATQGIVPEGAVMKPTY

SEQ ID NO: 95685 - protein, 401 aa, unidentified
MEVVHAHCAGLDVHKDTVVACVRHMADGKVATTIRTFSTATQELLALSDWLSAENATHIAMEATGVYWKPVWNILSDGEFELVLGNAAHIKNVPGRKTDVKDAAWLADLMAHGLVSGSFVPDQATQEMRDLLRTRKQLVRERTSHTQRIQKTLECANIKLDSVVSNVVGVSGRRMLEALISGQTDPRELAAMAHGRLQATPAELEAALRGRVTTHHRFMLRLHLDQIDSFDQAIARIDKEVKDNDKNFRAAVELLKSVPGVGSLAAEVIVSEIGIEMNRFATAGNLVSWAGLCPKNDESAGKRRSNRLKAGAPWLKTTLVQCAWAAARSKDTYLHAQYVRIRARRGDKKAICAVAASILTAAYHMLKDGTFYEDPGPDYFDRRNKDQQSVWSDRRDALTVG

SEQ ID NO: 95686 - protein, 412 aa, unidentified
MEVLHSRCCGIDIHKRSITVCVLIREAGRKEQKHLREFGTTTSAILNCADWLRSLGVTHVAMESTGVYWRPVWNLLEGQFDLLLANATHMRNVPGRKTDIKDSEWIAQLLQHGLLKPSFVPNTVLRDLRELSRDRTSLVAERSRLKNRIQKILEEANIKLGSVASDVLGKSGRAMLTAMVEGQENPQHLADLALGQLRLKIPQLVEALRGRVRGVHRFRLKQQLERVDFIDVQIAQLEAEIEKQNAPFDEAVSLLAEIPGFDRTTAWSVIAEIGIDMNQFPSADHLASWAGVCPGNNESGGKRLSGKTRKGSRWLRQKLCQSAWCASRCKNSYFTAFFQRIAAHRGRKRAIVAVSHSLLVVCYYLLKRRCHFQDLGVNYFDQLNQEKLTRYFVKRLTRLGHRVILEPCSAGA

SEQ ID NO: 95687 - protein, 355 aa, unidentified
MNQEKYIGMDVHAATISAAVMNAEGKVLMECVLETKAATILEFIEGLRGTLALTFEEGIMATWLHDLLKPHVSRLVVCDPRKNALMRDGNQNDRVDARNLAELLRTHHVHGVYHEKHGTRALKELGRSYLTLTKDSTRVMNRIKSVYRSWAIPCAGTSVYSRRHRAEWLAKLVEPGVRMRAEHLYEQLDSLQPVRQAARRELLRESRKHAAVKLLRQIPAIGPIRSALLVAILQTPHRFRTKRQLWAYSGFAVQTYDSGEYRFVRGKLQRNRERITVRGLNHNHNHDLKNLLKGAAITAIERPGPLQDFYAALVDKGIRPSMARLTLARKIAAITLAIWKKGVSFDPKQLQRQAA

SEQ ID NO: 95688 - protein, 415 aa, unidentified
MTSSPLIAGVDVHRKTNTYCLMTQDGREVVPHFTLGNNRPGAQALIEKVRQVMEADDFTELRLAAEATGWYWFHLFETLQNDPGLQAWPHELFLINPRLTANFKKSYVDLDKSDPIDAYVIADRLRWGRDIQTPYRYDEKLLALRFLTRYRYHVVHQLASEKAYCTAILYLKASEYSNDDRQAFSNLFGAASRAVLQEFASMEEVAAMPFDELVEWLDVHGKRHFSDPAENAKRLQRIARDSYPLPEPLQPAVNLVLSLSLKNISNLETLSKRLETAIAEQMEDIPNTLTTIPGFGLVLAAGIMAEIGGVERFDCNEAKVAKFAGLKWRKSGSAEFQSEETRLTRTGNSYLRYYFCEAAFSVQRCDSEYGAYFQRKFKEVRKHQHKRATVLTARKLVRLVVRLLATNQPYQPRRP

SEQ ID NO: 95689 - protein, 345 aa, unidentified
MPIVGGLDIHRKQITFDYLDTATGQVERGQIAPADREHVRAWLGRFAGRDEAAFAVEGCTGWRYIAEELAAAGLEPHLGEPADTAALRGRKRHAKTDKTDARHLRTLLAEGRLPGCWIPPEHILEYRALLETYHDLRAEHTAWVQRIHAVFFHQGAPRLGEGALRTEPGLAGLRAAAAADLSPAGQLQVATALDMLAAVEARMGPLRRQLLHAARHLVGAKVLAARLYGAGPVTALALTCWLGGAGRFSSSRKAVRFTGLDITVWSSDRKGPPGRLSRQGPPVLRWAVYEAGKTHGRTPAPDHGYYAAVKDRKNGKQAALSEARKIVRQACHILTELGDDALTIA

SEQ ID NO: 95690 - protein, 321 aa, unidentified
MAEILLKTNVGIDVSKKWLDIVVIPSGETWRNENTDEAIGELIKKLEQLEGQTERIIVEATGGYESRLVSRLYEVGMPVARVNPGRVREFARSVGQLAKTDKLDAKVLARFGEAVKPPLTRPLSADEQALDALLERRTQLLNIQSAEKNRLELAPAAIRSSVQEHLNWLKKEIKKLDQEIEQFIDRHPDFKKKDALLQSVPGIGIVTSSKLIADVPELGQCDRKEIAALVGIAPFNRDSGFKSGKRSIKGGRSDVRRILYMATLCATRHNPVIKTFYQRLRNAGKKNKVALVACMRKLLTILNAWQVSYLVVGGYDPRKGG

SEQ ID NO: 95691 - protein, 507 aa, unidentified
METRTNLNEVGKKKLVLGIDVALKNHWAAIGDNKGQEMVKPFQFSNNAEGMSLLEGMIKQTGRAEDKGDVIIGMEPTGIYWKPMGHYLREAGYRVVLINPSHTHKTKELEDNSQTKNDRKDSRVIQTLTREGKYLEPIILRGIYGELRRLGQAYKSALKRGNVISNKVKMIADEYFPEMRGIIKSINGKTAMGLLAEIPFPDDIIRLGKTKFYKKLKKWSNKRFGKKKSLKLWEAAKKSIGVKVGQEAAKIELRQLVEEMELVKRHREELVKGIEEKAKVTEEGKSLIKLPGLGYLSIGKLIGETGSIKSYKGARSLEKLAGLNLIESSSGERHSGKKISKRGRKLMRTTLYQMALASIKNNRAIKYEYQYRIKTKKQKKMKALTAVACKMLRVIYALVSANKEYDERKISRHYYESEIKREENICEWVTPIIPPSGPGYNSGDTVMKNTGHPLPMTLNEVMSGAPVQYRDDTGRNDRVRHRKSGGTNPLANIEKSWAEENQEVVCK

SEQ ID NO: 95692 - protein, 312 aa, unidentified
MTHITIGIDISKALLDVATYPEDEFKQFSNDPKGHKALAKWLDTREVKLIIFEATGVYHRGLERFLGQGGFPFAKINPYQARCFAEATGKLAKTDKVDSLMLARFGELLEPPLSAGKSQTLEELGELVCARRTLVKDRTAARNRQHNLKTGLLKRQTTRRLRQIEADIAAIDTECLVLIKGDETLVHRYDILISIPGIGQTTAIIMLAEMPELGTMDKRQTAALAGLAPISRQSGTWKGKSFIRGGRANLRQALYMPAMVAIRCNDELKARHNKFIVSGKPFKVAITAIMRKLIITANALLRDNRKWAKITA

SEQ ID NO: 95693 - protein, 283 aa, unidentified
MEITTLGIDLAKSVFQLYGVDADGTVVLQKKLRRGAVLDFLGKLERCLIGMEACPTSHFWAREIAALGHDVRLIPPAYVKPYVKRQKNDAADAEAICEAVTRPNMRFVPAKTEEQQSVLVLHRSRDLLMRQRTMILNAIRAQLAEFGIIAAQGPRKVTELLRRLNGPDSFGLPALARSALLALGAQLEHIAEAIRNTERQLMTWHRQNAASQRLETIPGVGIITATALAVSVPDPSVFRSGRQFAAWLGLVPRQNSSGGKERLGRVSKMGNGYLRRLLVVGAT

SEQ ID NO: 95694 - protein, 350 aa, unidentified
MRVFLGIDAHKRTHTVVAIDEAGRKLGEKTTTATTTEVHLELVRWGERFGATRRWAVEDCRHLSRRLEADLLARGEEIVRVPPKLMAHARDAARTYGKSDPIDALAVARAALREPDLPMARLDGPSREVRLLVDHREDLVRERTAHVNRLRWHLHELDPAWDPAPKALVRFKHLDAAAARLAEIEGPVARIARDLVGRIRELTVAAKALEREILQLVARLAPTVLSVPGCGGLTAAKLLAETADVRRFRSKDAFARHNGTAPLPVWSSNQVRHRLSRTGNRQLNAAIHRIAITQKRIHEPARAYLERRTGAGNTNTEALRALKRKLSDVVYRALLADARDAIHASIGEAA

SEQ ID NO: 95695 - protein, 380 aa, unidentified
MDVHSSNFTLCSFEPGYGFEADKIFGQTQIKEDIFNSTVKYINKLKSMRPDVDVICGYEAGGLGYNLHRKLKAKEIESVILAPTTMAVARNSSKKKNDYRDAITIAKCLASSAYKAVYIPDEKDEDVRDFIRMRDDHKTALKQIKQQLNAFCLRHGHHYDKPKWTGLHLNWLRKLELSKVQRETVEEYLATYEALTSKIAALDVRIEDIASEERYSEKVNKLKCIKGIKTHIALSFVCEIGDFNRFKSADKFSGFIGLVPGECSSGNTERMLGITKAGNRHLRRLVVEISNTYRRGAVGRKSVALRERQKDMPKDVVAYADKATNRCQRKYQRMMFKGKNSNQAVAAVARELCCFIWGMMTGHYSRTAQAEASVYRSELD

SEQ ID NO: 95696 - protein, 428 aa, unidentified
MLKINPLSTLYVGIDVSSKSNYVCALDFYKNKYINSSFANNQPGAEELAKKILECLKEHPDLNTIVAALESTSVYSIHIANFLSSCEELMHFKPYVFVLNPKCTANYKKSYIGLGKSDPIDAFVIADYARAGNIETEPWRGSQFLALKRLTRHRLHLVECMTREKTYLVSNLYLKFSELQMLEGDDQPFCDIYGATSSSVLTEYLSPEEIIDSSEEDLISFLAQKSRNRIKDISKTAELLRKAARDSYRLDKALYEPLNVSIASSFNCIETFKKEIKLIDIAIEREIRGLNPNAFIILQSIDGIGPVFAGGIVAEIGDISAFHSSDALAKYAGLMWKSNQSGDFDGEDTPMSKAGNRYLRYYLGEAANSMRKHNVEYGAYYRKKYNEVPKHQHKRALALTSRKFVRLVYGLLARNQLYSGVSLDTSNE

SEQ ID NO: 95697 - protein, 447 aa, unidentified
MDTESATQYAAYIGIDWADKDHAYALRATEGKKVEQGKVEAKPEAIEEFVAQLRQRFGGKAIAVALEQSRGSLLFMLSKYDHLVLYPVHSSTLDSYRKACHPSGAKSDPDDAALILDLLQKHPEWLEPFAPDTVPTRTLQFLTEERRDAVNDKTRYLNQLTAALKTYFPQMLEWLDVDSKVMCEMLQRWPTLEQLQQQKPSVVEEFLREHRYPVVRVKPLQEAMEKAIPATTDQAVIEAKKFTVQRTIAQLEALRANIAELDRRIEQITRLHEDYRVFASLPCAGKVMVPRLIAAMGTQRDRFQTASELQCQTGIAPVKEASGQREWIHWRWACPKFLRQTFVEWAWLSTRKSQWAREFYDRQRAKDKSHHAAVRALAFKWQRIIFRCWKDRCPYDEARYLATREQRARTAKASTDGSPQLKSSQAGGVEITWKNVSGFSRPDSISC

SEQ ID NO: 95698 - protein, 454 aa, unidentified
MTCPVLTFFFGVRAARGTPAVRANCQGVRLAVWPSEFRCRSQIFGNGGPARRVATVSGGCAGGRPEPVALPTEVRTFSTMTTDLLGMRDWLLAERVSVVGMQATGAYWKPVFYLLEHDIECWLLNAWHMKAVPGRKTDVKDAQWIAELVEHGLVRPSFVPPEPIRQLRDLTRYRTEIIRERTREVQRLEKFLEDAGIKLSVVVSDLTGKSARAMLEALIAGQRDPQVLAELALGSMRGKRPVLAQALTGRFTAHHAFLTRAMLDRIDACVAMEQRLSVQIEQAMAPFRHQLDLITTIPGVSTRTAEVILAEIGADPGPFRTAADLASWAGIRPGNNQSGAATKPSPTRHGDPWLKAALGQAAVAASRTKGTYLATRYRRIATRRGKKRALVAVGHSILIAVWTMLTRDLPYHDLGAEHFIERLGPHGKARQARRLIDQLHQLGYQVSLHPAQAA

SEQ ID NO: 95699 - protein, 343 aa, unidentified
MEHYAGIDVSLESASVCVVDASGRIVREAKVASEPEALITWFGKLGVEVSRIGLEAGPLSQWLYAGMREAGLPVELLETRHVRDAFKAMPVKTDRNDARGIAQLMRLGWFRPVHCKSLPAQELRAVLTARKLVQGKRHDIEMSLRGILRGFGLKVGPTTPRSFEGRVRQLVEGHPTLLAIADALLLARATLAEQLGKLQKRLVSLARDDTRTRLLMSTPGVGVLVALTYVAAIDDPARFRSSKAAGAHFGLTPKKYQSGETDITGRISKIGDASVRTALYEAANVILTRPVKGSSLKSWAMRVAKRAGMRKAKVALARKLAVVLHRMLADGTQFAAGKAAAAI

SEQ ID NO: 95700 - protein, 276 aa, unidentified
MGNVTTVGIDLAKNVFSLHGVDESGAVVLRRTVSRARLLEVVTQQPACLIGLEACSGAHEWARRFQALGHTVKLMAPRFVAPYRKNGKNDGNDAEAICEAVSRPSMRFVPVKTLEQQSVLCLHRVREGLIEERTATINRLRGLLAEFGFVLPQKAAEVRLGIGPLTASAIVASVGDVREFKNGRQFCAWLGLVPRQHSTGGKQRLGHITGRGGPYLRTLLVMGARSVLQRASSQSDPLSRWALAVRVRRGYHRACIAVAAKNARVVWAMLNQHARA

SEQ ID NO: 95701 - protein, 424 aa, unidentified
MNPQPETEFAAFVGIDWADAKHDICLRPAGIDKAEFAVLPHRSDAIEQWACSLRKRFQGRPVAVCLEIAKGPLVYALQKYDFLVLFPVNPATLAKYREAFTPSHAKADPSDAEIALEILLCHRDKLKALSPQSASMRTLERLVEQRRRLVGDRNRITNRLTAALKQYYPEVLDCFEEKDTLLFCDFLARWPTPRDAKRARKATLATFFREHHVRSAGLIDERLRVMKGAMPLTEDVAVITPNRLLVQALVEQLRVALYAIARFDAEISTVSQTLPDYPLFSALPGAGAVLAPRLLVAFGEQRQRYASAAEFQKYTGIAPVTESSGKKHWVHWRLRCSTFMRQTFVEWAAETIPRSFWAGAYYRQQRAKGSSRQAALRALAFKWIRILYRCWQTRTPYDESTYLNALRRRGSPLLTSIAGTAKDT

SEQ ID NO: 95702 - protein, 357 aa, unidentified
MAALSIADVPANVTVGVDTHKHSHIARAKDGLGRHLGQLEIETDPRGYARLLAWAQGFGPVVTFGIEGTSSYGAGLTRFLRAQGQAVIEVLRPVRRDRRFGGKSDPIDADAAAGAVLSGKATAVPKVGDAGVEMVRALKIAKQTAIKARTQAVNAVKGLVVMAPDPIREQLRNLKTPALVRTCSAYRVSRASDPTSAIKLSLRSMCRRYIALDQEVRSLEKELEALTIRLVPQLRQLFGVGQDVAATLVLAAGDSGDRLRSEASFSMLCGASPIPASSGMVQRHRLNRGGDRQANAALHHIVIVRLRHDQATKAYFAKRKAEGKSKKEIFRCLKRYVAREVYRTLVGPREDAIRSAA

SEQ ID NO: 95703 - protein, 361 aa, unidentified
MKCVQRNKLDFSGQNIYVGIDVHLKSWSVAILSEHSVLKRFSQSPEPELLHKYLVSNYPGANYFSVYEAGFCGFWIHESLTDLGITNIVVNPADVPTMSKEKLRKTDAVDCNKLARELRSGSLEGIYVPGTATLELRSLIRMRTLIVKDSTRAKNRIKSLLHFHGVKIPEEFIRCSSHCWSKRFLRWLDNLELSTEYGKKTLELHLEQFIRLRKMLLQETRAIREISRKAPFAKPIRLLSSVPGIGITTATTLMVEIDDIVRFNSAEHLASFIGLVPMCHSSGDNDSVSNMTIRRHFMLRWLLVESAWTAIRIDPAMTMAYTEYRKRMNPQKAIVKIARRLVNRVYFVLKYEKEYVSCIVK

SEQ ID NO: 95704 - protein, 399 aa, unidentified
MNYFIGVDISKSSFNYAVVDNNCKPIESGKLSMDRDGFDSFKSVIEKYKNSIVACESTGSYHINLISFLLSFKKEVALINPSLVKRFIFSVSLRKTKTDEIDANLIAMFICKNQDNIRYFSLDDIDSVSAIARLRESISKEIVKTKINLKQHLNITFPELERNCNIFTMSMLNLIKKYPSAYTIKKISIVKIYKSLGKSFGRKVEITPKKIKELAKESIGINSSGYDNIVRYDVEHLLFLMDKIDEITKQFTDIIDKTRKDDIEILTSIKGIGNTTASHFIAEIGDINRFKTKSKLIAYAGTDPSIKQSGSSINIRGKITKKGSKPVRRVLYIMAMGVIRSNEYFKAYYTKKRKEGMQHRKAIVALMNKLLRVIYALLKKKEKFIMPTCKQAGKKVLAC

SEQ ID NO: 95705 - protein, 324 aa, unidentified
MTCVCQRQIVKTATVPAEPVRLAESLLRWFPGATLSSASEAGISGFVLHRALTTAGITNLVVNPASVAVAANDRVKTDRRDAKKLAIDLADGRLRGISIPTEAEELARLLPRPRAQIVEHRATIARQIKAKRHQFGLIPPASRRLMSSRYLRELAAWALPAELHARLTLLADQWRFAPRQLLEVRRLLRAQATAQAELETVYRSAPGIGEVVARTLATELGDMSRFVNERALCSYTGLTPSEYASGASIRRGHISRQGASRLRHVLVETAWRALPRDPILQAIFDRIAATRGKQRAIVAIARRLIGRIRACCRHGTTYAVGTAG

SEQ ID NO: 95706 - protein, 346 aa, unidentified
MEHYVGLDVSLKLTSICIVDRTGKVEREGVVASDPEAIATFIKLHATHVVRIGLETGATSTWLWTELNKIGLPVICIDARHAKAVLKMQINKSDRNDAAGIARIMQCGWYKEVCVKDLDSHATKALLVSRALLVKIKRDIENQIRGLLKNLGLVIGRAKMNMFAVRAAQLAEDRSELFAVVDPLLKAREAVEQQILDLDRKVLRLARNNAQVRRFMTAPGVGPVTALCFLATIDAPARFKRSRSVGAYAGLTTRRYASGEIAWTGRISKCGDKMLRSYLYEAANVLLTRVAKWSALKAWGIRLAKRSGLRKAKVAVARKLAVILHRMWIDGTEFKWSSKDAADQPA

SEQ ID NO: 95707 - protein, 483 aa, unidentified
MKKHIDRKHACPRGAGRKQIQLIQGLEQINLQAAGIDVGSAENYVCVPQHSVRPGEKNVRKFGVFSQQQDDLVEWLKAYGVTTVAMEATGVYWMSLYDKIEATGLEVVLVDPHSVKQVPGRKSDVLDCQWLQQLHTYGLLRGAFRPDAAVRDLRGLCRQRADIVMNGAAYLQQAQKALVQMNVQLALVVSDINGETGLRIIEAILSGQQDAKELVKLRDQRCKKSSLTEMEAALKGHYTPELLFVLGQTIDGWKFCQKQLALCDQQIAKALAAIPTAKPRPAEVKVPPKTVAVDPAAAEKAKRPKRPRGNNQATVDFSEALRRVCGVDLMRICGLNVLSVLMLIAEIGPDMRHWRSQKAFSSWLGLCPGTKISGGKILSRRTRHVVNRAATILRLAAMAAGRTDTWIGRFYRRKQSHLGAPKAITATAHKLACVIYHMLKYQEEYLPIDVAIHDLQAQQRRLRHLRNEAEKLGCQVVEIQPAA

SEQ ID NO: 95708 - protein, 359 aa, unidentified
MKTQVKKIDFTGQNIYAGFDVHKNSWKVTIMAEDILYKTFTQPPNPEVLFNYLKSNFPGGNYHSAYEAGFCGYWIHDKLTSFGIKSIVVNPADIPTTDKERVQKEDKRDSRKIARSLSSGTLIPIYTPTIQTLRDRSLLRTRAMLVKDLGRYKNRIKSFLFFYGISIDEAFAEPKKHWSRRFISWLESLAIDGGSGKEALQILISECKNLRSSILKVTREIRELSQTKTYQEQVILLKTIPGIGLLTAMTILTELESIDRFTNLDKLCGYIGLVPSTKSSGDKDKTGDITPRGHSVLRSAIIESSWIARKCDPALMKSYVIYCKRMDSSKAIVKIAKKLLNRIRFVLINKKPYECLIEK

SEQ ID NO: 95709 - protein, 348 aa, unidentified
MIVAHRYDHVVGVDTHARTHTYAIVATKTGEILGTKAFPVTAAAIDRAIAWVRGIAGGSVLFAMEGTGSYGASLGRALLRDEIVFCEVRPPKKSSRVRGKTDEIDAIAAATSAMGIELEALTRPKADGLRNALRVTLDARRDMEVRRTSARNQLNALIRTADFGLDTRRALTDRGVQQLANLDANRSDVAERIIRAEAVRLASTVIDLGRQMRHNREALAELVELLAPGLQQIYGVGPVTAAVAVAAYSHPGRVRSEAAFAALAGVNPIPASSGNTTRHRLNRGGDRQLNRALDVIARVRMVSEARTRAYVDRRTSEGRTVREIRRSVKRYIARELFKALQVRMALCT

SEQ ID NO: 95710 - protein, 340 aa, unidentified
MAIVIGCDLHARFQQLAVLDTASGEIVPHRLEHDGEQVREFYRRFPPPVQVGVEATTGVYWLQELLHGLGHELVVGDAARLRAMVVRRQKTDARDAEHLALVLAQGRFPRVWLPGPELRDLRQLLLHRHRLVRMRTQLRNGLHALARNHGPNPRRRRFTQAARAHLAALPLGEFAQLRREESIALHDDLDSRITALDGRLQQQLEVSEQARRLATHPGVGPVTALAWTSIIGDISRFGSSAQLCSYLGLIPSERSTGGKQRLGSISKQGNSFLRFLLVEAAQTAVRGDDQLGRVYRRLAARRDRPTAKVAIARRLAVRLYWMSRRNVAYSDLREEQAHAG

SEQ ID NO: 95711 - protein, 337 aa, unidentified
MRIIRVGLDTSKHVFQVHGVDEADQPVLRRQVRRGEMEKVFAKLPATRIGLEACGASHHWARVLRGLGHEVVLMPPQYVKPYVKRSKNDAIDAEAICEAMSRPGMRFVAVKSAEDQAGLMLLSVRDLLVKQRTMLINAMRGHAAEFGVIAAKGPVKIAELLQRAHAPEAGVPALVLELLNLLSNQLDALEARLKTIEAQLLVRHRSNPVSQCLATQPGIGPIGAISLALRVPDPKTFRSGRHFAAWLGLVPKENSSGGRRRLGAISRQGDAALRKLLVLGATAVIRFAKPGKASPWLVNLLARKPKKLAAVALANKMARTLWAMMVSGEVYRRPRPA

SEQ ID NO: 95712 - protein, 411 aa, unidentified
MERVYDKCCGIDVHKKLLVACFRNGNKQDVREFGATTREIFRLTDWLSEGGCQMVAMESTASYWKPLYNILESIDMPAMVVNAKHMKAVPGRKTDIKDAEWIADLLQHGLLQASYIPDKDQRELRELVRYRKSLVGERNRELNRLQKMLEGANIKLSGTVSDINGKSARHILEEILTGKEIGPEEYDILYESGAISHNLKATKEEIIDDLQGMMSDLQRKMMRILLNHLDELNAHISELDDDIDGFMKPEEKQAAEMIREIPGIANTSAQAIISVIGTDMGRFPTDAHISSWAGICPGNNESAKKRRSGKIRKGNSLLRETLVVCAHAAVRVKSSYFSALFARISCHRGKKRAYVAVAHSMLVTIYHILKDGVKYTDLGADYYNQFNRERKISAYLKKLKALGWEGPVVAA

SEQ ID NO: 95713 - protein, 359 aa, unidentified
MRIIGCDLHSRQQTLAMLDTATGEIEKRTLKHEENIVREFYSKLPRPVRVGIEATGSMQWFVNLMEELGIECLVGHPAEIRAAEPRKQKHDRRDADLLLSLLVEERFPSIWLPTKDPLDMRALLRHRHQWVGLRVKIQNALQAIALANGLRRGSSLWTQAGQHAIAALPLSPHAAYRRNELQAMYVKFETEIEKLNQRVEQQARERSGARLLMTHPGVGSITALATDVFLGDPARFADSKALASYVGMIPGEYSSGKRQRLGGLTKQGNPLLRSLWGEAVIHAVRRDPQLKHFYRRKLIQKGLGKARAAVARKLGIRMWIMLRDRIEYHEFCRRGQRQQTSGDARAGMSEPRYGAKVTG

SEQ ID NO: 95714 - protein, 372 aa, unidentified
MNYNTVYVGMDVHKESFTLCSCKYEDEKASHYQRTPASYKNVLRYLAFLRTIYGEDTRFVCGYEAGCLGYSLYHQLENFNVECVILAPTTMLEQRSKRRIKTDKRDAEIIARSLAQHNYSPVHIPTKMDNQTKEFIRMRDDHKAELKKIKQQILSFCLRQGYQYDGSGNWTAKHVKWLRSLKPAGLYKEILDEYLLTYTILTDKLNRLDQRIEELASKEEYKESVSKLTCFLGIKTHTALSVIVEVGDFQRFVSARKFAGYLGLVPGQHSSGDDRNGLGITKAGNTHVRRLLVESAQSYTRGKIGYKSRVLRSRQAGNSPQVINYADRANERLRRRYYKMVLKDGKKYNIAKTAVARELACFIWGMMTDNIY

SEQ ID NO: 95715 - protein, 405 aa, unidentified
MGKVFVGHDWAETHHDVYVVDADGNRLGGSRLPEGVEGVRRFHELVGAHCENSAEVVIATETDRGLFVGALVAAGYTVLAINPLSTSRYRDRHSTSGAKSDPGDAKVLADLARTDAHQHRAIAGDSELAEAIKVLARAHQSLIWTRRRQLNQLRSMLREFYPAALDAFEELGHRDALAVLALAPTPEQGRALSTTEIAAALRAGGRQRRVEERAAKIQAALRTEQLATLPMVSAAMGSTVTALVAVATELTGQMDRLEEELADRFEQHPDAKIIRSLPGLGMTLGARVLAEFGDDPNRYADTKSRKNYAGTSPITRASGKSHVVLARYARNQRLADACYPWAFAALNTSPGTRAFYDAHREAGDTHHQALRALGNRLVGILHGCLRHHTLYDEHTAWGHRTELAA

SEQ ID NO: 95716 - protein, 411 aa, unidentified
MDIYCGIDWAEDHHDIALVNRDGQLLARRRISDDAAGLAQLLALLAEHGDTAGDPAPVAIETPRGLLVACLRATGRAVYPINPMAVARYRDRHSVAGKKSDHGDAVVLANVLRTDLHAHRPLPADSELAQAIAVLARAQQDAVWDRTQTHNRLRSHLREYFPAFLAAFAPAKGGIMRPEARTILAAAPTPADAAKLTLTQLRGLLKKAGRSRGIDTEATRLRDAFRISQMRQLPLVEQAMGRQTLALLGQLDAACTAAADLERAVTESFNLHPDAGIITSFPGLGALTGARVLAEIGDDRSRFQDAKGLKAYAGAAPVTRASGKSRSVTHRRVKNNRLAAAGYIWAFSALTASPGARAHYDRRKDAGDRHAAAQRNLFSRLLGCLHHCLITGRHYDEVTAFPARTDLPAAA

SEQ ID NO: 95717 - protein, 347 aa, unidentified
MNFYTQQHKHYCGIDLHAKAMYVCILDQNGTKLVHKNLPTTPEAFLRVLAPYKEDVVVGVECMFTWYWLADLCSKEGIAFVLGHALYMKAIHGGKAKNDKIDAQKIAILLRGGMMPQAYVYPAEMRATRDLLRRRCHLARKRAELLAHIHNTNSQYNLPEIGKRLAAKANREGVAEHFPDPSVRKTIEVDISLIDHYDQLLGEVELYLTRSAKTDDVQTFARLQSVPGIGQILALVILYEIQDIARFPRVQDFVSYCRLVKCAKESGGKRLGTSGKKIGNVHLRWAFAEAAVLFIRQSQPGQEYFAKLEHKHGKAKALTVLAHKLGRAVYYMLTREQAFDLNRFVTA

SEQ ID NO: 95718 - protein, 416 aa, unidentified
MNAVGIDVSSRKSTVAVLRPLGEVVCLPFDVTHDIAGLASLVEKLKALDGETRVVMEHTGRYYEAVEKALHEAGFFVCAVNPLLIKEYGANSLRRVKTDKADAVKIARYALDNWADLRDFTPMDAIRYDLKTLNRQFQLASKQRTASANNLIALLEQSFPGIRKCFDSPVRSDGTQKWVDFAHSFWHVDCVRKQPFPAFCERYRKWCKRHAYLFKLSNAEEVYALAKRAVVLTPKSKVVKVLVQEAANQLISISRSVEVYRAEMDRLAAMLPEYPVVMAMYGVGKSYGPQLMAEIGDVRRFERKQALVAFAGIDPMPNQSGDKNVRSNKSSKRGSPYLRKTLFNVIRTYLQCAPQDEPVFQFLNRKRAEGKPFYVYMLAAANKFLRRYYAKLRDYFASLDTLQPVAPIPTILKATL

SEQ ID NO: 95719 - protein, 369 aa, unidentified
MVWTPPPSYGIDVPELEVLYNRLTREGAKMKIKAIGLDLAKSVFQVHAVDEQEQVVLRRQLKRSQVLAFFARLQPCLVGMEACASANHWARQLRALGHEARLIAPKFVKPYVKNNKNDQRDAEAICEALLRPSMRFVAIKSEEQQAVLVLHGLRQGLIDARTALVNGLRGHLAEFGVVVPVGRRHFEQALPGLIQDSADKLPSLVREVLEPMRCHLLELNGQIAQLDRRIGAWHAQSEASRRIAEVPGVGVLSATAVLASIGDAKVFDSGRGFAAWLGITPGEHSSGGKQRLLGITKRGDKRLRTLLIHGARSVIRAHRAGSNPWLDGLLARRPKNVAVVALAHRNARIIWALLARGERYEPRRAVAAI

SEQ ID NO: 95720 - protein, 412 aa, unidentified
MLFVGDDWAEDHHDIEIVDDAGRVLARKRLPEGLKGVTRLHALIAEHLPEDLIDLDVGDAAAEVKVGIETDRGSWVAALVSAGYEVFPINPMSVARYRERHSTSGAKSDAADAHLLAEIVRLDRAHHRPVAGDSDEGEAIKLTARTHQSLIWDRTRHVLRLRSTLREYFPAALQAFSDLDAPDALELLGRAPDPDQASRLSIAVITTALKRARRRNVEDRAQQLRALLRAQELRQPPVLQTAYAAVVASEVAVITALNIQIDRLGAVMADHFGRHRDAEIYASLPGLGVILAARILGEFGDDPHRYPAAKARKNYAGTSPITRASGTKKVVLARYARNRRLGDALQQWAFCSLRGSPGATAYYQQLRNRKIGHQAALRQLANRLVGILHGCLKTQTPYDEHTAWAHILNAAA

SEQ ID NO: 95721 - protein, 385 aa, unidentified
MKNTIVHDEGAASLEDAVKRIKLSGSMIKIGLDVHARLYVAVAQYDHLLPKPARRLAPSEFVPWVKQLLRAGHTVHVVYEACGFGFGLYRELKAAGAHCYVIAPRKLDEQCTRVKTDPRDATTLCQRLSRYLDGNTRELAVIRVPTEGEEQARHVSRQREQLVCFRQKLEAQGRSLLVNHTLPSPAHWWKNQTWSRLSKLLPGWICLRLEVHRPVLLGLEQQIGVLSAQLEAAAPADVPAGVGKLTTVIMTREICLWERFTNRRAISSYTGLCPGERTSGSKRVPGSVTKRGNPRLRAALVECAWRMVRFQPNYPPVKKRLAILAKGARATGAQRKKAIVAVARHLAVDLWRIHTGRCSAAQLGLKTAETLIVRGEQKAELNALA

SEQ ID NO: 95722 - protein, 318 aa, unidentified
MAQDDRVVVGIDVAKDKVDVCVRRLALRQVFPNSAPGHRKLVAWLRQHQVNKAVMEASGGYERAWAKVLRQADIEVRIVDPRRVRNFALSAGRLAKNDPIDAEMIGWFAETFEAPGQIHDAAREELASLVKARKRLIDLKTQLQTQDEHAAPKAVEKAHTRVLKSLATEIAKLEAAICATVKATPEFAERAEIIESVPGLAETASATLIAGMPELGQVSDVVAAALIGLAPYDDDSGKRRGERHIKGGRRWVRNAIYMPCLGAATLSNPVLKAFYQRLIAKGKEPKVALVACMRKLIIILNTLIARRQKWDPSRYARA

SEQ ID NO: 95723 - protein, 343 aa, unidentified
MKAWTELTHFAALDWADDHHDLVVVDAQGQVALELTFTHNAEGWQQAQQALAAWPGLPVAIETSAGPAVDQLLQRGFVVYPIMPKAAARYRERKRPTGSKDDRHDAWSLADALRTDGHGWSALSPLDPLTGELRALCRDEITLIEQRTALVNQLQAALKEYYPAAVEAFEDWTAPCSWAFVLAFPTPKALAAAGKRKWEKFLHTHKLWRPQTSSQRMEIFARATAFSGGEAITAAKSLLAQSLARLLQTLEQQLANYRARIQALFDQHPDHDLFGSLPGAGAKLAPRLLAELAGADWSQLSQVQARAGTAPVTYESGNTRRVKIRRACTHPLRAPVGRPEPAL

SEQ ID NO: 95724 - protein, 364 aa, unidentified
MDDPRQIREQVTLGVDTHAELHVAAALDERGRLLGTCTIPTTTTGFGELLRWTTQYGELARVGMEGTGSYGAGLARWLRARDVAVVEVDRPDRRTRRRRGKSDSVDAEAAARAVLAGTATAQPKAGNGAMEMVRALRVARQSAIKARTQAANELHALVVTAPDALRAELRRLKIPQLVATAAAFRRSTALTTPTAATKLALKSIAMRYQQLSTEINALDEHLDQLVAAAAPALVAIKGVGTDIASTLLTIAGDNPERLASEGAFAHLVGVAPIEASSGKITRYRLNRGGDRQGNRALYLLAVGRMGWDPATRAYVERRTAEGRTKPEIIRCLKRYIARELYPVLLAATSTLASAGRSSSPSQAA

SEQ ID NO: 95725 - protein, 470 aa, unidentified
MGFEPGSFRWPPLRLARLCREHVSVVVVSPLLLQWFTQSEEDEVRSAGRAIGLDVHRDFCEVAIAQDGEVRSAGRVDTTPEQLELFGSSLDPRDRVALEVSGSAWEVARILERHVARVIVVSPADTGIRQARAKTDRLDARTLARLLAAGELDGVWSPDERCRVMRRRLSRREQLVRSRSRAKNEIHAVLVRRLVGRPPVTDLFGVKGRRWLSELELPLEEIETIGACLRHIEFLDSEIAAVERQIASEALRSAEIRRLMTVPGVNVICAASFMAAVGEIRRFQNPRALVAYLGLDPRVYQSGSAPATGGHISKQGSASARWALVEAAWSAVRQPGPQHAFYQRVRARRGHGIAIVASARKLACLFWFLLTREEDYAHQQPSLTAKKLRLLEIRAGAPTVKGTPTGVWATRQAMRAGERKLAEQAEASYKRMVSDWQAAAPKKKAGASVTPGRASQKPSTGKVARQTTSP

SEQ ID NO: 95726 - protein, 355 aa, unidentified
MKNQALQYLAMDVHQATVVASVRNEQGAITMRATVATEARAILSLIRAVGARVMVAFEEGTQAQWLHDLILPHAEGVVVCNVRGKSELTNKSDRIDADALSELLRLGALKAVYHGAPSMLTLKELVRNYNAVVEDATRAMLRIKALFRARAIPTPGTSIYRVSDRAGWLDQLTLQGARVRAESLFKQLDLLRELRPKAKRAMIAEARKQSGWKPLRSIPFLGEVRTAQLMAIIATPHRFRTKRNIWPYAGLAVVTRSSADQEFAGGELRRRNRPPQTRGLNRNHNPMLKSIFKGAATSAAAKPGPLKNIYDACVARGTKPDMARVTLARKIASIALRLWKKGELWDPTKLRMQTT

SEQ ID NO: 95727 - protein, 359 aa, unidentified
MKTTLNHASKTTTLPNIETQARIQQLKLGVDWHADHFRVVRMCDGQSPQPAQRFTPASFLPFVQKQLTLADQVFVVYEAGPGGFHLHRQLTALGVTAFVVHPQKLDPQHKGVVTDKTDARELTLNLDRYLRGNVRAMSVVRVPSPAEEQRRALSRQREQLRRERQRLAAQGRSLCLTQGIRLRGSWWKNSLTLPDWLEQRLAVWRQLIVAVEGQLAALTQQVETLAPKERPKGLGPLTLGMLIAELCDWSRFRNRKQIGSYTGLCGGVSSSGQSHCDLSITKAGNARVRWLLVELAWRMVLYQPQCRAVQRWRHVLLHPQAALRQRKRALIALARQLAVDIWRWQTGKVTPQQLGWVMV

SEQ ID NO: 95728 - protein, 418 aa, unidentified
MKKDNNSAKKSEPTVKRAKSRAPVQRDAKEVLAEVLGKLTGKLDAPAVSTNSKENRRGNTVGPNRDRMTVGVDLGDRWSQYCILGLEGETLAEGQLRTTQEDVGEFFQALTVARVVIEVGTHSAWVQDVISEWGHEVLVANPRLMEGSKRRKRKSDRIDANKLARLGRVDPQSLYPIRHRSREVRQDLVVLRARDALVSVRTELINTARGLVKSMGTRLPRCSSPSFAEKVKHAIPVEVREALLPLVQLTETVNDCIARYDQKIEELGQKKYGHTTLLRQVKGVGPITALAYVLTLEDPQRFSNSREVGPYLGLVPKQEDSGDSQPQLGISKTGDRMLRRLLVGSSQYMLGAFGPDTDLRRYGLRLCERGGKNAKKRAVVAVARKLAVLLHHLWVTGDVYEPLYRSGAGTGTAHAAAA

SEQ ID NO: 95729 - protein, 345 aa, unidentified
MKKLVAGVDLHSNNVVTGVMDVDGKRVATQKLPCELSEVVKFLAPYKKRLEKVAVESTYNWYWLVDGLQALGYSVVLANPAGMEQYNGIKHADDTNDAFFLAELLRLNILPTGYIYDPQLRPVRDLLRRRLLLVGQRTALMLSFKSLYTRTTGQEMPLSELKGLEIKDAQDLYDHPANQLIAGMQIKHIEQFTESIEKIEKAVLASARELPYYPKLTTLPGVGKILGMTMTMEVGDIKRFADAGNFASYCRTVEAKRTSNSRKKGENNSKCGNKYLSWAFVEAANFARRYDEHCRKWYDRKAAKTSKVIATKALACKLAKAAWHVMSQGTNYDAKRIFGQPATTK

SEQ ID NO: 95730 - protein, 341 aa, unidentified
MQITTIGLDIAKNVFQVHGIDGDVKVVVRKQLRRNQVLQFFDELPPCLVGLEACATSHYWARELARLGHEVRLMPAKDVKAYIKRNKNDAADAEAICEAVRRPTMRFVQIKSADQQAQLMQHRARDLLMQQRTQLINAMRSHLAELGIIAPQGREGVKELLAIIAHDDNRHLPVDARASLVVLAAQLQALQTMIGAIEKRIVKQHRASKESKRIQTVPGIGEIGASAIAATVTNPRIFRSGRDFAAWIGLVPRQMSTGGKPKLGPISKQGDRYLRRLLVVGAISVLRQAKLHPGKFPWVTQMLARRPFKVVAVALANKMARTAWALMMSGKTCRAARYAAA

SEQ ID NO: 95731 - protein, 345 aa, unidentified
MEHYVGLDVSLKLTAICIVDRTGKIQREGVVHSDPEAIAEFIKSNAPHVVRVGLETGATSTWLWTELKKLGLPVICIDARHAKAALKMQINKSDRNDAVGIARIMQCGWYKEVRVKDLDSHAVKALLVSRALLVKIKRDLENQVRGLLKNLGLIIGPAKMNTFALRAAGLTEDRPELAAAVTPLLKARMAIEQQIAELDRKVMKSARNNAQVRQFMTAPGIGPITALCFLATIDDPGRFRRSRSVGAYVGLTTRRFASGEIDWTGRISKCGDKMLRSYLYEAANVLLTRVAKWSALKAWGIRLAKRSGLRKAKVAVARKLAVILHRMWIDGTDFRWSKETAAQTA

SEQ ID NO: 95732 - protein, 436 aa, unidentified
MTSLPVLDPLAAFVDVGSEQMYVSIAGGEPRVFGTFTVQLHALRDWLLSQEVKSVAMEATGIYWLPLYGVLEEAGMQVLMVNGKHTRNLPGRKTDMKDCQWGATLHAHGLLRAGFVPPEHIRRLQDYLRLRQDHISLAAAHVQHLQKALERMNIKLHDVISSLVGASGLSVIRAILEGERNPERLLALCDVQIRNKKAEQVKEALRGTWAEEHLFALRQALESWEHYQCLIQACDRQIEMVLRSIDVDPPVSPPSKPLKRPGVNAPQIDDLHQMLVALCGGKDLTVLPAHTDYSVLQIIGEVGTDLTKWPTEKHFTAWTGLAPGSHQSGKRHGKAKRKRNRAGRLFCVMARSLARSKDIALGGFYRRMSSRRGGLIANIALARKLAILFWRVMVKGLDYVEQGLKNYDAKVLETKQRSMRRLAKQLGFNVIPAQAS

SEQ ID NO: 95733 - protein, 415 aa, unidentified
MADQRQWYAGVDWASESHHVFVTDGDGRKIGERVFKHSGEGLAEMAAWLMAASGAADPSQILVAIEVPHGPVVETLLERGFKVHAINPKQMDRFRDRFTMAGAKDDSRDAEVMSSALRTDARCFRLLAVADPMVCELREWSRIAEELGVERNRLTNRMREQLWRYFPAFLEFDSDLRAGWLLDLWQAVPTPDKAAGVRETTIAKLLKRHRIRRFDAAHVLSVLRKPPVQVAAGTIEAASAHITTLIARIRLVNRQIEQAHQRLDSLIARLSPPEEAAPGQNKQHDAEILASLPGVGRIVLATLLAEAHDALQRRDYAALRSLTGAAPVTKRSGKSCTVIRRHACHARLAGAMYHWARVATQHDPTSRAKYAALRSRGHSHGRALRSVADRLLNVACAMLRAGTTFNPDLAVQKTS

SEQ ID NO: 95734 - protein, 331 aa, unidentified
MAQNDCVVVGIDVAKDKVDASIRSLSQRQTFPSTTEGRRTLIRWLRKHKVGKAAMEASGGYERDWAKALREARIEVRIVDPKRVRSFARSAGRLAKNDAIDAEMIAWFAETFGEAPSQAYDAARDKLVQIVRARQSLLDLQTSLQNRGEHAAPEVVQKMQARLLKTIALEVAKLEAAITAMIKATPHLAELAEIIESVPGLGKITSAGLVAAMPELGQVSNNIAAALLGVAPYDDDSGQRRGDRHIKGGRRKVRNLFYMACLGAATRHNPMLKAFYDRLIAKGKEPKVALTACMRKLICILNTMIARREKWDATRYKMTDPARLPPSACPA

SEQ ID NO: 95735 - protein, 405 aa, unidentified
MTDTEQHDSVQVFVGVDVGKGAHHAVALDRKGKRLLDSALPNDETKLRALIGKLKEHGQVLLVVDQPATVGALPVAVARDEGVLVAYLPGLAMRRIADLHAGEAKTDARDAYIIAEAARSLPHTLRSLKLADSQVAELTMLCGFDEDLAGQITQVSNRIRGLLTQIHPALERVVGPHLDHPAMLDLLERYPSPAQLSALSQKQLANRLVKLAPRMGKTWAAQILQALSEQTVVVLGTQAASIVLPRLAQQLAALRIQRDEVAKEVERLVLAHPLHPVLTSMPGVGVRTAARLLIDVASRAFASAGHLAAYAGLAPVTRRSGSSIRGELPSRRGNKQLKRAMFLSAFAALRDPVSRAYYARKISQGKRHNQALIALARRRCDVLFAMLRDGTFYSPPRPQISLTTT

SEQ ID NO: 95736 - protein, 352 aa, unidentified
MRTSQKTAGIITTIGIDLGKNTFHLIGFDQRGAIILQQKVSRGQLERRLAIIPRCLIGMEACSGSHHIGRQLQAAGHDVRLIPAQYVKPFLKGHKNDYRDAEAIAEAVQRPTMHFVAIKTPEQMDLLALHRVRSRLVSQRTGVINQIRGFLIERGIIVRQGVVPLRKALPEILSSQTGRLSPRMIGLIADLTQDWRRLDERIAGVSAEIEALAEQNESCQRLMTVPGVGPIISSAVVAAIGNGAGFRQGRDFGAWLGLMPKQESTGDRTILGKISKRGNKYLRTLFVQAAHVVLARRPSAAMRGLWPWIEQASKRLHRNMLAIALANKLARIAWAVLARGRAYQPRITADAA

SEQ ID NO: 95737 - protein, 350 aa, unidentified
MPRSTNLSVATMGIDIGKNSFHVVGLDQRGAIVVRQRWTRSQIRARLANMPPCLIGMEACVGAHHLSRRLHSLGHDARLMPAKYVKPYRKGQKNDFRDAEAIAEAVQRPTMKFVATKTADQLDLQALHRVRARLVSLRTGIINQIRAFLLERGIAVRQGLRFLRAQLPEVLGKRTDVLSDRMVHVIEDLAADWRRLDERIQGLSGEIQIVASQDPGCKRLMTVPGIGPIISSAMVAAIGSGAVFSNGRDFGAWLGLVPRQISTGDRTILGKVSKQGNRYLRVLFVQAAWVVLIKPQIWERYGLKQWISAAKRRRHPNVLAIALANKLARIASAVLSKDCDFKCEKTLYVS

SEQ ID NO: 95738 - protein, 566 aa, unidentified
MDEVAICATLARISCFRNNRFVDNSSAYLCTSWGDYPERGGDFVSVVRCYSHQESGRPKSGRSPGVNNTAAGLAKGVLALQVVSVNLLPDCGTNRGINSTDEHVSGLRPQSDSIGFGHARSATGARTPRNDTSCSPRPFNPKPLMKTTDYAVCVALDWSDQQHAFALQFAAANSKETGMIAGSPEGFHGWLEELHARCPNQRGAVILEAGRNSVVHVLVEHDWLDIFPIHPATCARFRTAFTPSGAKDDVPDAEVLLTLLLRHRDQLHQLHRDTAQTRELAALVVARRHAVDRRTQLGHQLRTTLKSYFPQALQLIGDAVEHPMALDFLSRWPDIESLKKAKAATLRSFYYLHRARRPELIEQRIKLIAEARALTPDPAVVAPAVMQVQMFVELLRVQEKHIARFDERIAELFAAHPAAAFFRQLPGAGANLAPRLLVAFGDDLSRYPTPSSLQKYAGVAPVRECSGKKSWTHWRWHAPIFLRQSLVEWAGQTVVFCPWAKAYYWQQRRAGKAHQSILRALAFKWIRILWRCWQSHEPYDDARYVAALRRRNSPLIALIESQDAAA

SEQ ID NO: 95739 - protein, 344 aa, unidentified
MKIAVLGIDLGKNVCSVVGLDASGAVVLRRRVRRDTLIDLVANLPACIVGMEACCGAHHLGRLFAAQGHDVRLMSPEYVRPYVKAQKNDDRDAEGIAEAATRPTMRFVEVKTEDQLDMQTLHRSRERLVGERTALINQLRAILLERGIVAPKGKRELELALVGLMDEREGDALTARMRMLIADMQAQWRELDRRIAAFEGEFVAFAKEDEDARRLTTIPGVGVMIASALIAAIGKAETFEHGRDLAAWLGLVPRQWTTGGKPRLMGISKRGNKYLRKLLIHGARAALPHLAARDTSLGRWAKGLLARAHRNVAVVALADKLARICWAVLRSRQNFSAKGAPMAA

SEQ ID NO: 95740 - protein, 344 aa, unidentified
MDHFAGLDVSVKETSICIVGDTGRIMKEVKVASEPQALLKVLGNPAYRFKRIGLEAGPLSQWLFSGLAEAGLPVVCVETRHMQAVLKAQINKTDRNDARGIAQMMRAGLYRPVHVKTLRSQKLRMLLTHRKLLQSKAIAIENDLRGTLRNFGLKVGMVGKVRFEARIKELVESLPDLAELVEPLLIVRRSLREQIVILHRRLLAIVRDDEVCQRLMTTPGVGPVVALTYRATVDVPARFRKSKAVGAVFGLTCARYQSGEIDWSGRISRCGDEMMRVMLYEAAQSMMRSKKWSWLKAWAMQIARRRGMKKAIVALARRLAVIMHRIWVDGTEFRWTREQAAAAA

SEQ ID NO: 95741 - protein, 327 aa, unidentified
MGKSIKNLSSVTVVGLDIAKNVFQVHGVDAKGATVVARAVRRGQLLSFFASLPRCLVGMEACSSAHHGGRALSELGHEVKLIPPAYVKPYVRRNKNDAVDAAAICEAVGRPNMRFVAVRSVENQAELMRHRARELLAGNRTRMLNALRGNLAEIGVVAAQGAQHAYGLKRLLADGFDDNGEVVVPNCVRQALAPLVHQIDAIDEEIAAIDKEIAALVKADETARRLTTIPGVGPVTASAIVATVQDASAFANGRDFAASLGLTPRQSSTGGKARLGRITKMGATATCASCWSSGPARRSAIARATTTRCACGPIGCWRARRSNTSSS

SEQ ID NO: 95742 - protein, 372 aa, unidentified
MQRTTFVGLDVHKPWINVAVLLPGHDTPIEWRIINEPQAIRKMLKRVASLAPGDVRYCYEAGPCGYALQRQIISWSDASCMLVAPSLIPRKPGERIKTDRRDAKKLALLFRAGLLTEVHPLTEEDEAARDLSRARDDLREDLVRARHRLGKFLLRRAITFTPGKRAWTLAHRRWLESLSFDNPADSVVVADYLLAIDHIEQRLKALVVHVERLALDPRYANAVATLRCFRSIDTISAVGYAVELHNFERFTSARRLMSFVGLIPGEHSSGEKRRRGAITKTGNSHVRRFLIEAAWNYRHRPHVGSSLRRRRMGQPPRVIALADRAMLRLHRRYEQMTRRGVLPQKAVVAMARELAGFIWAALSPLAGHTVTH

SEQ ID NO: 95743 - protein, 363 aa, unidentified
MPDERNTLMNSIKYIGLDVHQSTISVAVLEREGKLIQQAILATHASAILDFFNGVRGELQVTFEEGTHSAWLYDLLVRRVSKLVVCNPRQNALLKAGNKSDRIDARKLAELLRAGLLSPVYHGQNSTQTMKHLVRSYSALTEDTTRTMGRLKALYRSQAIACAGQKPYGRRHRQPYLEQLRDAGLHRRAERLYAQLDSLQQLRREARRDLILECRQHDDAKILRQVPLLGPIRVATLIGRVQTPHRFRSKGQFWAYCGLALETRSSADYQMVNGQLQRRTKPVFIRGLNLNHNHDLKNLFKSAATSAAARPGALREFYENLLRKGMKAELARLTLARKLAAITLHVWKKGERFDVNYVKPQAA

SEQ ID NO: 95744 - protein, 392 aa, unidentified
MRINVGIDIAKEIHWVTAIDASGVVLLDRRLENRPAAIAELVDALVALDGDVQIGFDVVGGIPGLAEAMLAQAGFALVHVPGLAVNRARQGSVGGENKSDPRDARVIADQVRIRSDLRPILPARELDLEIGLLVGRRGDLVAAQTQRLGRQHDLLVGIFPGLERVHDLTTKGAQHLLSRYVTPAELRAAGTRRLVRHLQAAGGLPRVEALVDRVIEAAAEQHVAVPAEAMSARLIRELAAEALAARARLIALDGELLALLDRHPDAALIRSLPGIGVVLTAEFIDEAGDLSRFRSADALAPAAGIAPILRQSGKTRFLPRPAGGNKALKRVFYPSAFCSLAHPDSHAFYDRKRREGNRHYQAVIALARRRTNVLWALLHHRQPFQANFKLAA

SEQ ID NO: 95745 - protein, 350 aa, unidentified
MNILALDLGKYNTVFCDYNSTNGEHEFGNVKTTPQAIHDLIVEKDPERVVMEVSDLAGWIVDMARALGKETEIANTSHEAWRWKNVKKKNDREDALKLAKLSAMSQLPTVHIPPKPVREKRALIQYRQRLVKHRRSIQLAIRALFSREGITTIPKGQKAWSAVGLRWLRSHAQALEDITDINQLWRGQLHVELETFEAVSQSLKKVEDKLNKLGACDARIQRLQTIPGVGPRLAETVVAFLDDPKRFHNSKHVGSYVGLTPRQYQSGQMERQGRISGQGNKLLRNLLVEVCWVSLRYNPWARETYHRLLRGSRSRKKIAITALARKLVVKCWAMLRDEENWRYESQDNVA

SEQ ID NO: 95746 - protein, 354 aa, unidentified
MLAELVDHVIGVDPDRDWITVAVLDARTSGVITTDRFPATGDGYRDAIVWADAHTTGSERAWVIEGTASYGRGLTMALQRRDELVVEFDRPTRKAAKDGAKSDALDAIRAAREALGRDRLHEPRAHEGIREAIRVHTVARAGAVRARTAAINELKALIVTADEQLRSEFRGLRTHKIVVRCSRFRDTQKRPIDERCTRNTMRALARRIQHLNVEIADHNTAIKALIDEAAPQLIAEPGIGYVTAAAFYLAWSHPGRCPSEAAYARLGGTAPIEVTSGQTQNRHRLNRGGDRQLNQALYFVAVTRQRCCPETKAYMTRRTSEGKTEREATRCLKRFIARRVWRLLEHPEHHLDTT

SEQ ID NO: 95747 - protein, 428 aa, unidentified
MNYNTQNAKIASITEKTLIVGIDVGSETHYARAFSWRNYEYSKKPFAFSNDEAGFAAFKEWMDDIAEKHRMEVIIPGMEPTGHYWLNLGAYLQEQGMKPVHVNPHHVKKSKELDDNNPSKNDRKDPKTIAGLVNEGRFSYPYIPTGIYAEIRNLSNLRIQTQEEITRIKNRMARWFSIYFPEIKDVYRDPDAVSGLMVIKQAPLPCDIRELGVEGVNKIWRDARLKGAGIKRATTLVTAAEHSIGNTEAPRSARKEIRNLLEDYEGYKKRMDELMEEIEKTLSEIPYIDKLMEINGIGIKTVSCFIAEVGDIGRFDNPKQVQKLAGYAIVADSSGKHNGESRISHRGRKRLRYALYEAAISVIGKNKEFKEIHSYYRTREKKPLKKMQSVIAVACKLIRIFYTILTKGVDYDGQKMLNDIVRPEIQPA

SEQ ID NO: 95748 - protein, 351 aa, unidentified
MLYLGIDQHRKQLTVNIRDEQGDVVLKRQVSTEWDRVRKFLEDLRQRAELVGGFMAIVEICGFNDWLLEMLNDYGCRETVLIQPEKKSRKKTDRRDASALSQLLWVNRQRVLGGKKVQGLKRIILPSQEEQDNRQLTALRQRTAALRTRTINKVQHILLKHNLQQECPTKGMKTKKARQWLAELSLGEVDRLEMDQLLSRWELWDVQIAKIDAKIQERQQKHKTAPILATLPGASAYSSLALASRIGAIENFPRPGSLANYWGLTPGCRNSGDATDLNEAALAPARRSKNIFGVRSTRPERLLTSRRIHEGMDWGAAARKRSVARNLARTNRDNCWPREYDNDGSQQNGEA

SEQ ID NO: 95749 - protein, 394 aa, unidentified
MKLIGIDIGKNKHFFCIMDQQTGEIIFQPVSFSNDKEGFDFLIQKINSYPKDSVLIGMEDTGHYHFALLKYLLNLQYTVALINPKTTDFNRKMQGGITKNDKLDTINICDVLDTPERKKQYRISKVNSFDLYEQKQLTRHHHNLKEEENVYKNRLQKCIDIVFPEFNKLFNSKYSTVYMNILKTFGSAENIANTDIRTIRKCFEIEGRGNRISLTPERLKECARSSIGISSSAEVIQIKHLTAQIELIEEQLTEIDKKIEEFSIQNNSPILSIPGISHFSGTSILAELGDISNYSKPSQIIKFAGVAPLHYESSQFNAQHTSITKKGSKYLRKTLYQIILPVIKHNPVFNKYYQLKISQGKGHRCAQGHCVRKLLRIIYHLLKTNQQFDHQLLR

SEQ ID NO: 95750 - protein, 330 aa, unidentified
MNYSHFVGLDVGKKSFDACLVSLDKELSHHTFPNTPGGIEELLHRVKQRGVEVETALFCAENMGSHVIDLCLSSYQFHFPLALECPLTIKRSIGLQRGKNDRIDARRIVRYACLHYRKLRLYQLPDKDLVRLRNWMVIRDNLVKQKVSSRKLLELPRETSGLADLVTAMTFLEKQLSLVKEKISYVEQEMEKIISSNIALLTNYQLLTSIKGIGPINAIVLLCVTGNFHRFSDPRKFACYCGVAPFEHSSGTSIRGKTKTSNLANREVKVYLTRAAITAISWDPQIKAYYKRKTGEGKHKASVINAVRAKIIARCFAVIKRKTPFVTLRA

SEQ ID NO: 95751 - protein, 345 aa, unidentified
MVTLGADSHKATHTLVAVDGAARELGQRTFAANTGGHLEALAWASQWSERRWAMEDCRHVSRRLEHDLLGAGETVVRVPPKLMAGARSSARTRGKSDPIDALAVARAAVREPGLPPATMDGPSRELRLLVDHREDLVNERTRIQNRLRWHLHELNPGGAAVGNLSRKKGVDLLDAELAHHQGLVADLARDHAASIRSLNSRIDALEHEILARTREAAPSLLALPGCGFLTAAKLVGEVGGAARFKSRAAFAMHNGTAPIPVWSGRADRFRLNRGGNRKLNTALHTIALTQLRLEGPGKDYIAKRLSLGNTKREAIRALRRRISDEVYRRMLLDESAGLEAVVRAA

SEQ ID NO: 95752 - protein, 430 aa, unidentified
MSYRIAGIDVHKKMLAVVVTDVEVDDEYQFERRMFGSNPEQLRLLTAWLLEQEVEEVVMESTAQYWKPVWEALERYWRPTRQKREGASRRSGTLHLAQAQSNRGRRGRKKDFPDAERLVKRLVARELTLSFVPDAEQRLWRTVTRRKYQLTRDKVRLQNQLESLLEEAHIKLSSLVSDLLGASARRMLKALADGETNPVALAALADQNLRATPEQLCDALGACTDLKPVYRRLLKMVLEQLQFLEQQIGQLDQEMASLLSQHQDAVQRLAEVPGLGVDSAQQIIAEVGPTAATFPSEKCLSSWVGACPGDDESAGVNYSHRSPQGNRHLRRLLNQSANAAARAKGSIFEIVYRRSVPRLGHNQAIGAIAHRQCRLIWLILHQRVRYEERGPAVTKRSKQKRTARMIRQLRSLGYRIEPINSQQAAPGRAQ

SEQ ID NO: 95753 - protein, 416 aa, unidentified
MLFIGDDWAEDHHDIELEDEDGRRLVRARLPEGLEGITRLHALVAEHAPAAWADLPPEQVADHVIVGIETDRGPWVTALRAAGYQVFAINPLSAARYRERHSTSGAKSDAGDAHVLSEIVRLDRDHHRAVAGDSDLADAVKLLARAHQTAVWERTRQVLRMRATLLEYFPSAVQAFEDLAAPDALSVLGRAPNPDRAAKLTRGQLVAALRAARRHHVEAKADTLLTVLRAPALRQPATLQGAYAAVVLGQVGIITALNEQIAGLHEVMAEHFWRHPDADIYLSQPGFAVVLAARTLGEFGDDKDRFASARARKNYSGQSPITRASGKKSVVLARYATNRRLGAALHLQAFAALGASPGARAYYDALRGRNIGHHAALRQLANRLVDILHGCLKTGTVYDEDTAWQHHQITSGTVAA

SEQ ID NO: 95754 - protein, 339 aa, unidentified
MTRFLGVDLHKNMFTVSFYDATTGKHKVKSYKLKDIETFKKELSKEDVVGVEMTGNTRYFVKKMTDSVREVKVINPLQFSVISKSVKKTDKNDAKVIAEFLSKDMIPEVKLKEELAAQVASLASTREKFVHLRTTLKNKIHGLLNTYGISLEKESLSSKKGLQSVLKYKLAPIAAKELGIMVKQIEHLNDGITELDKELKECGKKLEGFENITSIKGIGKKSGAILLSVIGNIDNFESEKKLAAYFGIVPRVHQSNEKEWQGHITKRGSRLGRTTLVQCTWVAIKYSSYLRTFYEKIKAKKGTGKAIIAAAKKLLGIIFETLKNKWIFEDFPNFVIKNI

SEQ ID NO: 95755 - protein, 335 aa, unidentified
MEKDIIKQNVGIDISKDNFKVCFSVMYCNLRVKVLGSRTFANNYKGFNDFLLWTQSKRKSSEAVYFTLEATGVYYEGLSYFLWKAPDFKVCVILPNKVKHYAKSLDFKSKTDKIDAQILSRFGLERDLRLWQPISGNLLELKQLTRERDMLVRNRTASANQLHAAEHQGKPNKKIIVRAKKHISLLDKQVKEIEKEIKAVVHQDDNLKKKFAYLQSIPGVGLLTVACIVAETNGFETFTSIKQLTSYAGLDVRIVESGNFKGKSKISKRGNSHIRKALYMPSLSRIRSDKSAKQFYENLKERKGKSMIALVAVQRKMLGLMFSLWKNETMYNVNH

SEQ ID NO: 95756 - protein, 348 aa, unidentified
MIRNAPKEATVYGVDLGKNVFHVVGVDDRGAVVQRVKFRRDTMLAFFERASRSIVGMEACPGSQWLARKLQAMGHRVRIVPAQFVKPYIKSQKNDTIDAEAIAEAVTRPTMRFTQVRTPEQVDLQALHRIRDQLVSSRTRLINQARAFCLEYGIAIRQGAGVFRLDLPRVLVDETNDLTPAMRRMLSELFDDVVLDQRIAGATREIEGLAARDDRARRLMTIPGIGPLAATALLAAIGDGGQFKRARDLAAWLGLVPREYSTGGKTKLLGISKRGNRYVRRLLIHGARSCVTHLDRTRDRLGGWLDALQSRMHVNKVTVALAAKIARTAWAIITRPGALYERRDPAAA

SEQ ID NO: 95757 - protein, 309 aa, unidentified
MKPSLSQYIGVDVAKSCLDFDLPAPLDRIANTAAALAAALPGLPPGAHLVCESTGGYENALVAAAQAAGVPISVVPPQRVRSHARSTGRLAKTDRLDARLLSAYGRAHTPAPCRAPEPSRQQLKELVRVRAQLLELKKTEAGWREHPPALPLLQAQAQQREALLDAQLAEVEKAIRALVQSCPGRAELERMQQVQGVGEVTAWTVWAEVPELGQMEPGQPAALVGLAPYARDSGQQRGPRFIQQGRPQVRRVLYMAAVTACQHNPVLKAFYRRLRARGKPAKLALVAVARRLIELLNLLLRNPNFVLAR

SEQ ID NO: 95758 - protein, 419 aa, unidentified
MTGPPLQSFPRFVAIDIHKSYLMVGAIDIEQRIVLQPRKVELHRFLAWAQANLLPTDAVVLEATTNAWTIYDQLVGLVARVVVAHPAKVKLIAEARVKTDKVDVLTLAKLLRADMLPEVWVPPMHVRDLRALLSHRRRLVALQTTAKNRLHSVLHRLNLKPPAGDLFARKQREWWKELELSATERLRVEQDLATLEHIRPQIEEVDDELRHLSTSEQWAEQVPYLVQLPGIGLLTAMTILGAIGDVTRFGAAKQLVGYAGLGAGVHASGKTHRDKGITKQGRRDLRFVLVEAARVAVQTHPYWKREFVRLTTRIGEHKAVVAIARKLLIVVWHVLLAKSADRRADAEQVAFKLMVWSWKLTDEQRGGLSSRQFIRMHLIRLGLGAELTHITRGGTRRPLATIEEVLALRPDLRGPPSSA

SEQ ID NO: 95759 - protein, 430 aa, unidentified
MNFLPNYISVGIDVAADFSWFCILTPDGKEFKKPFKVEHDNADSLKNAVLTIKKAEEQFSMKSKIFLESTGIYHFPLFCHLKKLGFEVFVINPLITNSNKNIGIRKVKNDRLDAKRIAAIGYSPDTKVSVMPAELILNLRCLCREYYSLVDNHTSYVNKLKAQLHIVFPGFCNVFSDVTGIAAISLLKRFPTPEDVINAQTDEIVKLISTSSRKGLNYAKAKYDKLFKAAKNALNFRYNLPSVYDVLKVYIYFIEEFDKKINLILSKIKAFVDENKSEKFVQQIYYLDSIPGVGFLSAVTLMCEIGDFSAFRKPKQLFAYFGVDPSVNESGHFKGTDNKMSKRGSKIARRVLYAIALASVRVKRNGIAINPVLYDYYQKKKESKPKKVALGAIMHKISDIVFAVLRDNKSFVLKTPDEHKLQYQNIHKAA

SEQ ID NO: 95760 - protein, 363 aa, unidentified
MDSQKYIGLDVHQESISVAVRDTTGKLLMECIIETKAATILQFVQGLRGTLLVGFEEGTSAAWLYDLLKPHVAKVIVCDPRKNALLKAGNKNDRIDARKLSELLRAGLLTPVYHGESGVRTLRELARSYLAVTKDLTRVMNRLKALYRSWAIACTGQKVYSAGHRSAWLEQLSEPGVRRRAERLYSQFDSLRELRREARRDLLAESQRHPASEFLRQIPRLGPIRVALLIALLQTPHRFRTKRQLWAYCGLALQTRSSGEYRFSDGQVQHSRRPPALRGLNVNHNRDLKSLFKGAATHGSASTDALGAFYQGLLTKGMKPAMARLTLARKIAAIALKIWKKGERFDPELLNGKALERVKRADR

SEQ ID NO: 95761 - protein, 420 aa, unidentified
MPDDRCRLGSDDVVIGLDLASTEHQAVVLTAAGQRLTRFRIPHTRAGLEELLRRTTPAALGRTGGARVFAFEATGHMWEAVAYVLRARGERYVVVNPLATFRVREARQLSREKTDLTDAEQIAELCRTGLVTRTQLETRPYLALRRAWGEYARLREERARLKVLVAHQLYGLFPEFLRVWADLLQPGALAVLRTGLTPAAMAALSLPEFVAQVRAQRAGHRIWRYKLAQVHREAAQTIACPDGLDVLAREVQRVVARMDMLTAHMTAVAAEIDVVLAELEEVPYLRTIPGLGWASVAGLLAHVGAITKYHHGRQLIKLAGTNPSRRDSGQTVGRGQRMSHRGRAGLREVLYLATLSCLQHNPRIRAHYDRLIQRADRPLPKMQALGACMNKLLLYAFAVMSRREAFQLDHDWQRAMARVA

SEQ ID NO: 95762 - protein, 361 aa, unidentified
MRIIGCDLHARQQTLAMLDTETGEVVNLTLMHEGNQVREFYSQLPRPVLVGIEATGSMHWFLNLMEELGIECRVGHPATIRAAEPRKQKHDRRDADLILKLLAENRFPAIWLPTKELLDLRALVLHRHQWVRMRVRMQNALQAIALANGLRRGPGLWSYDGQAKIAFLPLLPHASYRRSALQTMYKHMEEEIENLTKQVAEQAGHRSGARLLMTHPGVGPVTALATDVFLGDPKRFVDGKALASYVGIIPREYSSGERQRLGGVTKQGSPLLRFLWCEAGAHAVRRDPELQRFYRRKLVQKGLGKARVAVARKLGIRLWIMLRDEIDYEEFCRRGQKQQSGAACAGMLEVRNGANRHRPID

SEQ ID NO: 95763 - protein, 442 aa, unidentified
MAAPPPGRPKAAQPPRGAASTQSVRSVGSLASRQIAKPTQEWPRRRRAAPRRRSPLVCLFLCSRSGYRQGRHSPIPLRVRNSSPSMGRAGPCVCRQARTVTRSRFRMLQGRDMTNACTYPSEGHVTWFVGVDVAKDEFVWAVHGSSQTTSCPNDSAGAQALFSALAEHNIGLVVLEATGGHERALAGFLLERGVAVAVVNPRAAREFARSMGHLAKTDQIDACALAHYAQTLAAKADQAGIRFAPPPPHIEALQALVTRRAQLLNMRTAEKNRLAGAVRVLRSSIEDVIRTLDRQIKRLDKEIDDHLDSHFSQQRKRLESIKGIGVTTCATMLAFMPELGHVSAARVAKLAGVAPLNQDSGKMRGRRQIWGGRSLVRCTLHMAMLSAVRYNPVLQAFYQRLVAAGKPKKVALVACAHKLLRILNAMERSGQHWNEAMHTNPA

SEQ ID NO: 95764 - protein, 354 aa, unidentified
MMVVGCDPHKRSITCGAVAASSGAARGERTAPAHADGFDVLLRWARALDGERVWAIEDCRHVSGRLERFLLARGERVVRVAPKLMAGARTGARTRGKSDAIDALAVARAAVREGIQTLPTARLDGGALELRLLVDHREDLVAARTRDQARLRWHLHDLDPTFTVPPRALDRPLWWRRVQTRLQQQPAGVRVRIAVELLEQIRACTLRIRALERELERLAHAHAPRLLAERGCGALTAAKLIGEIAGADRFATDAKLARNAATAPIPASSGNTTRHRLDRGGNRQLNCALHRLAVNKALWDPASAAYLARKQAEGKTRKEALRCLKRVLTRRVWQLLRTPTPTQPAIQIHCNTPA

SEQ ID NO: 95765 - protein, 418 aa, unidentified
MEHASKTTLPAAGPGHRTAGVDWARDDHAVAVVDASGQVVERFTVVHTAAGIRDLVHRLARAGAHEVAIERPDGPVVDALLEAGLIVVVISPNQLKNLRSRYGSAGNKDDRFDAFVLADTLRTDRGRLRTLVPDGPATVALRATCRARKDLVAHRVALANQLRAHLQRVFPGAVGLFAEIDSPINLRFLARFDCQDRAAWLSPRRLAAWLASVGYCGRIAPATLQARLDAAPAGATGVEGTAQAHVTRALLAVLSALVEQIRVLSEQIDEQLALHADAHIFTSLPRAGTVRAARLLAEIGDCRARFPTPEALACLAGVAPSTRQSGKHRAVTFRWAADKQLRDAICDFAGDSRRASPWAADLYRRAVARGHDHPHAVRILARAWLYVIWHCWQNGAAYDPAQHRALQALLHPDHQQVA

SEQ ID NO: 95766 - protein, 419 aa, unidentified
MSQFSISQPLRQVQSETLHVGVDLALEKNMVVVINEKAKQLDRFSFPQDRGGYDYFLRRVEGLRQKHAASGIAVAMEPTNYFWKLLARELEEKKISYHLVNAYTVKKHREGNQLDPSKDDPRDAGQIAELSRTGHYTETRLQKGVYEELRQYATLHGQLIQGVQRELQILWGLAGQVFPELSEAFKDLDGATSRALLVSCACAADIRQMSEDDFIVKVRTAYTGKKLHVSKVQRAYQLAATSIGLTEGIQAIQLAIQLHFTHLQTLQAQLGQITKAMTACLVSLPEAPYLLSIKSLKPMTVALFLAEVGDPRRYRTAAQWVKLAGIQPVPNASGKKQRSKTPMSHHGRARLRTLLYFTCLRMVQQDPHFAQIYSDLQRRPKNPLTKMQALGVLMNKLLHILWALAQNQTLYNPSFAQSI

SEQ ID NO: 95767 - protein, 350 aa, unidentified
MLDGATGGVIAEQTARAKRRSFEDLLLWARQLGPERVWAIEDCRHVSGALERFLLAHGEQVVRVPPKLTAGARSSARERGKSDSIDAVSIARAAIREGLDTLPVAQLAGPELDVRLLVDHRERLIAQRTQLSNDLRWSMHDMWPEFDVPARALTASGWQERVASRLARAEQSARVRIARDELRRIRELTRTINALEGELATLIATLAPRLLAEPGCGVLTAAKLIGEIAGISRFATEAQFARITGTAPIAASSGRTERHRLDRGGNRQLNCALHRLAVTRGRMDPDTSGYLARKQAEGKSRREALRSLKRHLARRIWLVLQPPGRDTPPTRHRPAVTIHCNTPYGSFSLT

SEQ ID NO: 95768 - protein, 315 aa, unidentified
MDDHTPDTVGVDISKAHLDVHRRSTGESARFANDAVGIEDLAAWVDDPAVLVVYESTGPWHRDLEESLAGRLALARVNPLRARRFAQAMGEEAKTDAADARSLAAMGAAMEVRRVEPRPPAQRDLDELATARDALVKDRTAALNRQKHARHPLLRRQLRNRLAQIGRQIKALDDQIAKTTAEDAGLSRRMEVLTSIAGVGRVVAAGLLADMPELGRVDGKAAASLVGVAPWTRESGQWKGRSFIRGGRARPRRLLYMAAVSALRCNPDMARKYAELRARGKPPKVALTAVMRKLAVLANVLLKQDRLWTPEPVRG

SEQ ID NO: 95769 - protein, 413 aa, unidentified
MDLLVERCAGLDVAKREVVACVRTPEPGTGGQRRQVVRTFATFSAELEALADWLQAEGVTQVVMEATGQYWKPIWYVLEERGFALLLVNARHVKILPGRKTDVADAAWLCELLECGLLRGSFVPPPAIRRLRDLTRYRKKLVQAHTAETQRVHKTLEDAGIKLDSVAADVLGVSGRAMLAALVAGERDPAVLAALAKGKLRKKLPQLRQALAGRFSEHHALLVELSLGHLEHLEGAIARLDGRVDEVIAPFAVARDRLDTITGVGKRAAETIIAEIGADMRVFPTAAHLASWAGRCPGNNLTGGKRRSGKPTKGNRWLGEVLVECAWAAAHTRETYLAAQFWRLARRIGRKKAAGAVGHSILVIAWHLLSNDCDYHELGGDWFAGRSDHDRHKTHLVKQLQALGYSVILQPAA

SEQ ID NO: 95770 - protein, 362 aa, unidentified
MKRDLPSGTLRSVHPEAREEVPDMFYAGLDLSRKRLDVCVLDEAGETVATRAIGPDADGLRWLVGTLGLFPVRAAIESMSGARFVHDQLELRGWEVEIADAVKVKGLAPLACKTDRIDARVLAELARRDLVPEIWLPTPGVRAERERARFRLHLVQHRTALKNRIHSTIATFGHPCPVSDLFGQTGRERLAAMQIPDPWAGTIRASIDLIDDLDSKVRTCESELCLLGADHPYATLLRTIPGVGWVLGYTIASEIGDIARFPRPKNLVSYTGLCPRVHQSGDTDWRGPLARNGPRYLRWALIEAAMHAGSHPAYRQRYERTRRRLGRQRGPKIARIEVARSLAEAIWHMLTRNQHFAPVGPA

SEQ ID NO: 95771 - protein, 386 aa, unidentified
MATPIRTRIEQEPPHQSTLFLAFELGKNTWKLGFTIGVAHQPRERTIPAGALDTLQQEITRAKQRFGLPEDARVVSCYEAGRDGFWLHRSLVAHSIQNHVIDSASIEVNRRQRRAKTDRLDVRKLLTMLLRHRAGEQKVWSVVRVPSVDEEDRRQLHREMLTAKQDRTRVINRIQGLLAGHGVQFALPGDVDAQLDQVHQWDGTPLPSALRTRLKRAWQQVGFLTAHIQTLEAERRALWRRRKDPVLAQVRQLFTLRGIGINSAWLSVMEFFAWRDFQTAKQVGALAGLTPTPYQSGQSRRELGIAKAGNRHIRAMAIEIAWAWRRFQPARALAQWYERRFGAGSARLRKLGIVALARKLLIALWRFVKTGVLPEGAVLKTVAPCR

SEQ ID NO: 95772 - protein, 368 aa, unidentified
MDKDTVVAVDIAKTIFEVAVSREPGRVAERRRLSRGTFLIFFAQMPAATVVMEACGSAHSWARKLQELGHKVVLLPPHQVRPYVMRNKTDRTDAKGILEAYRNADIRPVPLKSVSQQVLVTLHRFRSAWMAERTAQINTVRGLLRELGFVIPLGMEKVLPQVRALVEDADSEVPDALRGVLFEACEEIRTLGERIKKTERQLEALAEQTPVVERLRSVPGIGLLTSTAQVTFVGQILRFPSGRHYASYFGLTPREFSSGAKRRLGRISKRGDAYIRMLLIHGARSVLCHAKKEQEHDRLRAWALALERRVGHNKAAVALANKLARIAWAVWKNDPPSSRCPWPLRRRPPQEERRNQGFAHPGTAQSIA

SEQ ID NO: 95773 - protein, 269 aa, unidentified
MKNTIVGVDLAKDVIQVCIYTNKKVRSNIEMTPPEFIEFLANYTSLTIVFEACGTSNYWKQKAISLGHDARLISAKLVSVVRQNQKTDKNDALAIIQAALLPDVTFISGKSIEQQQLQSIMRLRELCVKQKTAAGNQLTSLLLEFNIKVSSRNSGLKGAVESTLEDAENGFSFEFRKALSEAWQLYLSAIKSIHTYDECLECAIEGHTDCKKLRQIEGVGTLNAINLYIALGCADLGVFNKGKDASACIGLTPIQYSSGGPLCQDSCRL

SEQ ID NO: 95774 - protein, 427 aa, unidentified
MPYRIAGIDVHKRMLTVVVCDVEVGSEYEFERQQYGSTPSHLRLLAAWLVEQEVEEVVMESTAQYWKPVWAILERYWKPLQQGREGARPMSGTLHLAQAQSNRGPRGRKNDFADPERLVKRLVAGELILSFVPSAEQRLWRTVMRTKYQLRCNQVQLQNRLEALLEEAHLKLSSLVSDLLGLSGRRMLTAIAEGETDAAAVAARADYRLRATPEELCDALGACGELHPVYRRLLQRALEEWQRAEAQITQLSQEMATLLAAHQEQVQRLAEVPGLGVDSGQQILAEVGASAATFPSAKALSSWVGACPGEEESAGVNHNRRSPKGNRHLRRILNQAAHAAVKLKGSVFAILYRRYVARLGHNQTIAVIAHRLCRLIWKILHQGVRYEQRGPAVSQKSKQKRTARMIRQLRDLGYRVELLKLAAGVPA

SEQ ID NO: 95775 - protein, 343 aa, unidentified
MECYVGLDVSLKQTSICVVNERGSVVREGVVDSVPEAIAGFVRSKAPGAVRIGLETGPTATWLWTELARLDLPVICIDARHAKAVLKMQVNKNDRNDAAGIARIMQTGWFKEVRVKDLDSHAVKALLASRALLVKIKRDLENQVRGLLKNLGLVIGHGTFNVFALRAKELIADRPELTSAVSPLLTARTAVEQQIGELDRQVLKLSRQDAQARRFMTVPGVGPITALCFKATIDDPARFRRSRSVGAYIGLTTRRHASGELDWSGRISKCGDAMLRMYLFEAAGVLLTRVPKWSALKAWGMRLTKRNGLRKAKVAVARKLAVILHRMWIDGTEFNWSNKEVAA

SEQ ID NO: 95776 - protein, 358 aa, unidentified
MKKERLKILKQAVGIDISKDSFYACFKVLYEDGRIVIKGTKSFDNTVSGMKKFYEWVAKRIKTRDAELIFVMEATGIYYEELAYFLHEKEEIVSVQLAQRLKYFAKGNNIKTKNDKVDSKMIAEFGIEKKLKGRDFWTPPSKEFKMIRDLAREHTNLKQAQSAAKSQLHALKYSHDANTEVIKMKEEQILFYEKHIDTSEKEMRKLVKSDSKLYEKINKIETIKGVRFITIIKVITEVNGFLLFNNIRQLVSYAGLDIIENQSGKITRKTKISKKGNARIRAALYMPALSAKKYNQPLKIFYNRVMEDRTIKQQGMVAVMRKLLILIYTLWKNDTEFDPDYEQNKKKLQQTEAVYCNS

SEQ ID NO: 95777 - protein, 369 aa, unidentified
MEERIKFFVGLDVDAQSIAVGVAEAGRAPARARGSIAHDVAKLRKVLANYGDPQQVHVVYEAGPTGYGLQRALTKYGYCCEVIAPSLIPKRAGDRIKTNRRDCLRLAELARAGELTAVWVPDPGDEAIRDVARAREDAVKARTQARHQLKAFLLRHGVHYAQRTSWTKTFYRWLATLHFDSAGAQTAFTEYWQAVSSAEERVVRLTDALVRSIGAWRFEPVVKALQVLRGIDRISAIGLVSEIGDLHRFAHPRQLMAYLGLVPSQHSTGDRIVHGSITKTGNTHARRLLTEAAWNYRFRPRIGYDAQRRAENLPQALRDLGWKAQLRLTGRYARLQARGLHKNKICVAIARELAGFIWAIGTHEKVTHM

SEQ ID NO: 95778 - protein, 485 aa, unidentified
MSKRKLSTFERLSQGKMNRKQRKELARRLYSDDPGLEVVHRNVAGIDVGNESHFVAVAPGCDSPAVREFGSWTADLMRMAEWLKSCGVKMVVMQSTGVYWIAVYEVLEKAGFQVWLTNARDTKNLPGRKSDVQESQWLLKLQTYGLLRNSFRPPEEIRRLRTVWRLRNRHVQEAGRAIQHMQKALTTMNVQLANTLSDVSGVTGQAIIRTILKGERDPYQLARLRDYRVQASEEEIARSLEGNWQEDVLFELQQAIDGYDFCQQQIRECDLRLQKYLGAVSSHPRSQPESGQTVGSAQSQPAEKSPKKKSSKPRKNQPQFDLDAELQRLCGVDLRTIEGVDVMTILTFVSELGTDMTPWRSEDHLVSWLKLSPQRQISGGKLIKHERIKVKNRTAEALRMAASTLAHSQSYLGARFRSLRGRMGPGKAIKAMAAYLARLIYRMLTHGQAWVDRGVQQYEAKRQARETQSLQRRAAALGFRLVPAA

SEQ ID NO: 95779 - protein, 311 aa, unidentified
MDAIFVGIDVSKDRLDVAMRPGEGFFVSRTGAGIDELVGRLKAVPTQLIAIEATGGFETVVAAGLAGAGLPVVVVNPAQVRAFANALGKRAKTDPIDAAVIAHFAEATKPQVRQLPDETTQMLADLVARRRQIVEMIASESQRARRVTSARLNKSIARLRKALEKELSDLDGEIGDHVRGTPAWAEKEDLLASVPGIGPTIARSLIAELPELGSLDRRQIAALVGLAPWTRQSGQWRGKSFIGGGRAHVRRVVFMGAMVAARFNPALKSFRDRLVAAGKPKLVAIVAVARKLLTILNAILRDKSPWQLKNA

SEQ ID NO: 95780 - protein, 351 aa, unidentified
MIIIGCDFHTRYQQIAMADDETGELLLERRLDHESGEAHAFYRNFSVTVRVGIEATGPIHWFERLLAELGHELWIGDSAKIRASEVRKQKTDERDARLILDLMLAKRFPKIWVPTPAERDLRQLLWHRHKLVCLRTMLGNQLHFLAMSQGLCRKKKLFTKKGRVELSGLALGPWTRRRREELLQLLDRVDAPIADLDRAVLEEAKRRDDAVLLMTHPGIGPVTSLAFVLAIGPVTRFCCSRKLVSYLGLNPSEDSSGQRRRLGAISKQGNTMVRWLLIEAVYPAVRKDLALRQDYQRLKFRRGHAVAKVAIARKLAVRMYWMLRSGAAYAQLVRRQGSPGATLVDASPSLG

SEQ ID NO: 95781 - protein, 403 aa, unidentified
MSQQAEQVIIGVDPHKLSATIEVVDEREQLLGSGRFTTDRAGYAAMRTYAKKWPDRVWAVEGSNGAGRPLAQRLLEDGERVLDVPAKLAARVRLFDTGHNRKTDAHDAHAVAAVAVRTKTLRVLQLDGELEALRMLTDRREALTRRRVQTVDRLQALLAELLPGQAKRDLTTGQAKTMLASVRPRDIAGKTRRRLAAEELAELIAVEAKIKKSTAELKTIVLARGSRLMDLHGVGPVVAARVLADVGDVTRFADRNRFASWTGTAPLDASSGEQNRHRLSRAGNRRMNHMIHIAAISQLRLDTDGRGYYRRKRAEGKKPLEAIRCLKRRISDAIYRQLLADAQEAAGTGPGGHCGATQESSAVDLPPHIDTSDQPLPGPADPTLRPAAAARKTHHEDTLAATG

SEQ ID NO: 95782 - protein, 577 aa, unidentified
MLAPTPSLGQVARIGVGIDTSRYGHYAAFLRDDLQPAAAELQFAESAAGCAALRQRLQRFAECHPGVAFVVRLDAAGQYADNLLHFLHALGTPPADAGGSSALAVLVSCGDPQRNKNYRAALFGSQKSDPVEARSAARFALTERPASDTPMSLELRTLHQVASRLQAVVRQRTRLINQLHHLLALAFPELALLTKNIATGWVLELVHRYPTAPLLAQESSDDLQNIPYLPDAQLQPLLDAARTSIGSLRGATIEELVRDQVRQLRDVSARQKRLESLLISAYRALPEPNHLDSIPGIGDVTAAILTAFILDIDRFDRPGKLVAYFGVMPIEVSSGIDRDGHARSPRRHVMSRRGNDLVRRYLWMAALSAVRFNPAVRALYARVVAKHPDRKAVAIGHAMRKLLHLAFAIWKTRRPFDANRANGTAPVASGSAEESQTAGRKPDEPARTAVTAACDEILPRPDSLGGSLAIDFAHLKRQLPPARVLDHLGLAARLKGVGAQRRGPCPIHRGDGRGRTFSVELEKHAFQCFAKECGAKGDVIDLWAGVHRQSLREAALDLVRTFHLEPMPTKGTEKRNG

SEQ ID NO: 95783 - protein, 523 aa, unidentified
MVTKSRVRKSGGLRKRLIGKPAGRIAERVQAAGPERFGVIAVDCAKRRSKWMLCDFYGKVLVEPTTAEHTAGGLSAMTRQVAEACRAERLTDSIVAVEMTGIYHKPAFRVFRQAGFDTRIVHPFASNHFRRPLHGDVKTDDRDLEAIFHAAIKGYGLAPPPVGETFQTLQAVSRHRHNLVKQRSRLMVQIRRLLHQTMPGFADLFEDDKLFHKSIALAVAERFTSPQAIRSAGAAGVARYLKDAKMRFQARSLDRIVAWASAAAEPAELAAIYTQQWRQLDALRRLCDEQIAATEREMARFLVKTPYVLLLSVTGINVVSAARLAGEAGPIEHYASARALNGRAGLYPSRYQSDEVDRTGGPLVRQCNRKLRGAAMLVAENLIKCHPYYRGRSALWAAQDVDPRDRRCRVANRAMRMVYQLVGGRQVWRGKGVDREYVLRKLQEFHRLHHTPLDETLRDLNEAFAWLPKSIYAAEAKPLAELVRKPRRGPQRIGDLIVPLLLRLGVGVETEVESNTSEARSSG

SEQ ID NO: 95784 - protein, 416 aa, unidentified
MEQPAHFAAYIGLDWSDAKHDLCLVDAATGSRERAVIKQTPEALNEWARSLRTRFRGEHVAVCLEQSRGPVIYALMKYDFLVLYPVNPKTLARFREAFTPSRAKDDPQDAEYLVELLLHHRERLRTWVPDDEQTRTLQLLVEHRRRLVGDQTRISNRLTSLLKGYFPQVLQWFPDMRTEMVCDFLLRWPELSALKRVRREALLKFFRAHNSVRRDTLETRLRAIKGATPLVTDRAVITSSVLMVKALVAQMRTTLAAVRDFDSQIAELCQVHEDFDLFVSLPGAGRVYASRLLAAMGANRERWQSADELLRFSGVAPVIERSGKSSWTRWRYFCPKFFRQSFVEYAGESVRHSEWAKAFYLSQKAKGKSHQAAVRALAYKWIRIIWKCWRTRTKYDEARYLECLRKKGSALVSTAV

SEQ ID NO: 95785 - protein, 414 aa, unidentified
MSHNIAGIDIHKKLLVVVIVNRADPGKPLQSRRFGTGAAELRHLLAWLCHHGVTEAVMESTAQYWKPVWMELEPHMQLHLAQAQSNKAPKGRKSDVADAKRLVRRLVAGELMLSFIPDPEQRQWRMLTRGRLQVIRERIQLQNQIESLLEEGRIKLSSVISDLLGASGRRILYAMSQGETNPETLAGLGDSRLKCEREALVDALTGAMGELHRGLLAQHLERVEMVDRHIAELNQLAAARMRIWQDAITRLIEIPGVGVEAAQEILAEIGPEAAAFPSAAQLASWIGVCPGSNESAGENHSGRCAKGNRFMRRLLCQAAQAAVRTNGSHLQALFKRLVVRLGYVKAVWAIAHRLCKIIWNILRKGARFIEFSEARNPKAVQRAINHHLKALRRLGYQIPFATGSVGLLTPKGAA

SEQ ID NO: 95786 - protein, 351 aa, unidentified
MSIVGGLDIHRKQLTFDYVEVETGRLERGRIAPADREHLAGWLTRFDGRTPVAFALEAGTGWRYVVEEMRGAGVAPHLAEPAETSTLRGPKRRAKTDKADAKLLRELLAAGRVPECYIPPSQVLEWRALLELCHDLRVEHTGWAKRVHATCFHQGTTALGEAGVVRGSRQRLESIVAEQLSPVGRLQVNTALSMMDTLAEYLDPLRRRLVATARHVRGARVLIEAIYGVGPQTALALCSWLGGADRFSSFRKAVRLVGLDITVHSSDTKPSPAGSRGRARRCCGGCCSRRPRPRPAAALPVTATTPTSGSDRVTAGRTGAADGPERLSGRASRAGGQPINHHVARHTNERV

SEQ ID NO: 95787 - protein, 468 aa, unidentified
MKKGRNSKRKKRRSRNKSWDSFPIINVNAAGIDIGSEEHWVAVPADRDEEPVRSFGCFTADLHAMADWLEACGIETIAMESTGVYWIPAFQILESRGFEVKLVNARHVKNVPGRKTDVLDCQWIQRLHTYGLLSGSFRPEDSTCVLRSYWRHRDNLIRYSSAHVQHMQKALTEMNVQLHKVISHITGLTGMRIIRAILAGERDPLKLAQMKDPRIKNSTEVIAKALEGDYRQEHLFALQQAVELYDFYQQQIEACDRQIESCLNQLDSKIDIDVDSNPPPPSKRRRNKPQGNAPHFDLRTHLYRITGVDFTQIDGLEAYSVHRILSEVGLDPGPFPTEKNFTSWLGLCPDNRITGGQVKSTKTRVVVNRASNLFRLAAQSLVRSSSALGGYYRRMQARHGAPKATTATAHKLARIFYHLWKYGGVYQDPGADYYEQKYKERVLRNIKSKALKLGYQLTLTPLTNGEVS

SEQ ID NO: 95788 - protein, 375 aa, unidentified
MKKNSSGCKSPKASMKATKETNVTVGMDLGDKTSRYCMLDENGEVLREASVGTTKEAITQVFATMKPCRVAIEVGTHSPWVSRLLKSVGHEVIVANARQVQLISNSTRKNDRMDAQMLARLVRVDPRLLRPIQHRSEQAQEHLRVIRVRAALVEARTMLVNAARGLTKATGERLPSCDADQMGVERTELLPAGLQNSLRPLLEEVESLTEKLQALDQQVEQIARTDYPETRLLRQVSGVGSLIALTFVLTVEDRERFQKSRDVGCYLGLRPRQSDSGESEPQLRITKEGDPYLRKLLVQGAHRIIGRRGPDTDLKRWGLKLSARGGKNAKKRAVVAVARKLAILLHRLWVTGEVYEPLRNNRAEPPVKETGKAAA

SEQ ID NO: 95789 - protein, 335 aa, unidentified
MGQGRKSVLRKGSTVFVGIDVSKDVLDVALRGPQTSSFQVGRDEKGLEELVQRLSLLDNKVELIVLEATGGLERDVVAVLAAAKLPVAVINPRCARDFARSLGRLAKTDGIDAAVLAHYADAVGPMAQAVPDATAREVEALLTRRRQVVQTLVSERNRRSGLLLQRLTGPGKRVMESLERSIAWLEKELASLEEDLDDTIKRSDIWREKDDLLKREKGVGNVVSRTLLGYLPELGTLNRKQIAALVGLAPFNNDSGKRWGQRSIWGGRGHVRAVLYMAAVTAVRWNPVLRSFYERLLTAGKPKKKALTAVMRKLLIRLNAMMRNHLQALSPAKIA

SEQ ID NO: 95790 - protein, 346 aa, unidentified
MMIIGCDFHPSWQQVSWLDTETGETGEQKLVHAAGDAERFYRQVAAPALIGMEATGNCHWLVDVLAEIGHELWVGDAAQIRASCVRQQKTDKRDAEHLRKLLAEGRFPRIWMPSSEVRELRQLLLHRYKLVIIRTRVKNELQHLCLNQGVQKKRKLWSQAGQQVLRQLPLKRWASRRREDLLALLAMLEQQIGPLDEAVKAEAQRDPAARLLQTQPGVGAITALAYVLTMGDVGRFPRGKQVASYLGLVPREHSSGGRQKLGAISKQGNRMLRMLLVEAAQIAVRYDPGFRKEYLHRCHHKPKAVAKVAAARKLAVRLYWMLRTQKPYPEVVGIESSPRVPLVGAS

SEQ ID NO: 95791 - protein, 315 aa, unidentified
MRSTITQSVGVDISKDALDVAVHPAGESFRIPNDPQGHRALIKKLKGFDIARIVFEATGAYHRLFQHALDAAGLPWVKVNPRQARRFAQAAGKLAKTDRCDALILARMGAALGLEPSAPLSQTVEAMKELVNARDALVKDRVAALNRQAITVSPLIKRQLAQRLRQVDSQIEAINKRLKSLRGADPDLGRRFDILVSIPGVGETTANALMAETPELGRLGHAQAASLAGLAPIAKDSGQAHGKRSICGGRPRARQALYMPALNAIRFNPQFKAKYQAMVKAGKPAKVAIVAIMRKLLILANALIRDQRKWSPPST

SEQ ID NO: 95792 - protein, 388 aa, unidentified
MIYVGIDIAKLNHFASAIDSDGVVLIEPFEFLNDNDGFYMLLSKLNSFEKNSIIIGLESTAHYGNNLVSFLVTKGFNVCVLNPIQTSTLRKNRIRKTKTDKVDTLVIAKAVALMKNPRFFTLYDIALMQLKNLGRFRLKLVKQPTRTKIQLTSYVDQTFPELQYFFKSGLHQKAVYAILKEAPSASEIASMHLTHLKNLLTSNSQGRFKKEMALELRVLAQKSVGNPDKSLSIQITQSIAQIKLLDSQIDTVENEIKDIVESLDSVILSIPGIGPINGGMILGEIGDINRFSKPRKLLAFAGLDPSVYQSGNFSAKKTRMSKRGSSALRYALMNAAHNVVRNNVTFKEYYDSKRAEGRGHYNALGHCAGKLVRVIYKMLTDNVKFNLN

SEQ ID NO: 95793 - protein, 347 aa, unidentified
MTIVGNPDAVVGGVDTHADVHVAAVVNHLGGVLGVESFTTTSHGYRQLVSWLRSHGELVLVGVEGTGSYGVGVSRYLQREGVTVVEVDRPNRQTRHRKGKSDPVDALAAARAALSGSATGSPKTRDGNVEAIRVLMIARRSAVDTRIETLNQLRHVVFTATPEIRAKFTGLTAIGLVNKATALRPREGDDPVRYSTLVTIRALGHRVQYLREESKRLNGMLRPLIRQTAPTLLEVYGVGYDTAAKLLVAAGDNPERIRTEAAWAHLCGVAPIPASSGKTKRHRLNRGGNRQANSALYHVVITRMRHDQRTRDYVARRLTEGKTMGEIARILKRYVAREVFKHLPHPA

SEQ ID NO: 95794 - protein, 370 aa, unidentified
MKKNSTVQQSPKRATARKEGPITIGMDLGDKTSRYCALGDDGELFAEGSVATTKKGMTQKFAGMRRCRIAIEVGTHSPWLSRLLTGLGFEVIVANARQVRLISTSSRKNDRMDARLLARLARVDPQLLRPIRHRSEQAQTDLMTIRIRASLVEARTMLVNAARGFAKSLGERLPACDTDTMGIERMEPLPEGLRDRLRPVLEQVESLTEKIHELDGNIEQIARTQYPETELLRQVSGVGTLIALTFVLTVEDRERFQKSRDVGCYVGLRPKQSESGESQPELRISKEGDVYLRKMLVQGAHCIMSRRGPDTDLKRWGLKLAARGGKNAKKRAIVAVARKLAVLLHKLWVCGEVYEPLRNSQPARSSHKAA

SEQ ID NO: 95795 - protein, 346 aa, unidentified
MTHSTTVGVDLAKNVIQVSVVSAGGKELLNRSFTRHKFAEFLGKQKPSLVAFEACATSHHWARAAHRHGHVARIIPAKFVAPFRQGHKTDSNDALAVAESARRPSIKEAPMKTVEQQGLQAIHRSRQLLIQESTALSNHLRGLLMEFGVVIAQGFASLLRAVPEVLEDGENELPDLYRPTLHRMYTRLLELREHIEAMTKEVEVLVKQHPICSRLTALEGIGPIGALLLYATLGSGHVFSSGREFAAYLGLAPRQYSSGGKTNIVGLSKKVGNCRLRSILILGARAYTYRLKEPKSAKDRWLKAAIDRNGHSRAAIALANKNVRTAWAMVTQGTEYQPRGQQKVAA

SEQ ID NO: 95796 - protein, 386 aa, unidentified
MLAGLALPSNRPVSRRRFARLAGDLIEACVRCPTQPCPGRSTRSTEGGYVTDWTVAIGVDTHKGAHVAVALDRLGGQIASCTVNATIAGYRRLLVWATDLGRPVFGVEGCGSYGAGLVRFLETQRVLVYECERPRRNERRRGKNDLIDAALAARRVVTGEGLSLPRGGGRREQLRLLLVERRGAVRARTAALNQLSALVVTAPDPLRHRLAALSKHQLARKAALLRSGSGAAADVLRRIARRVQRLSEEITEIDRDLTILVTEIAPHLLTECGVGAVCAAQLLVSSGDPGRMASEASFAALAGTTPVDASSGKHQRHRLNRGGDRQLNWALHVIALQRIHHHPETAAYYQHLLDAGKTTREARRCVKRTLARHFYRRLRPTPALTT

SEQ ID NO: 95797 - protein, 324 aa, unidentified
MSCVFVGIDVSSGSLSVTIRKGEEVWRGAFENNTGGQTLLCTKLARTRSLVRVCLEATAFYHLDVALRLHAQARVEVMVVNPRAAKDFARARLQRSKTDRVDADVLVEFAWRMPFVPWQPPSAQVLELRAISRYMASLAQARGRERARLSHVRSKVVCAAIEQHIVRLDAQIQELLIAALAEVQSDPQLSRCFHHLVSIRGIGRASAVGILAELASLPSDMSARQWVAHSGLDPKHFESGTSVKRRTRISKVGNSHLRSVLYMPAVVAARFEPRVRAYYEHLLAKGKKPMQANIAIMRKLLHAIHGMLAHDTDFDGERFFASTA

SEQ ID NO: 95798 - protein, 405 aa, unidentified
MARYYLGLDWADEAHAVWVADESGEKIWEGKVAQTAEGLAEFGRRLYEWSSTGVEVWAALEKPEGRIVDFLLDHGILVYPVNPKAVDRARDRFRMSTSKSDLFDARVLADFLRTDYGHLRPLMPNSAEAQELKLLTTDHQRLVQQQTRLINQLTITLKEYNPRVLEMFTDLNTTVALDFLACFPTPLALTQMTPAVWQRFVKEHRLHNERATLLWELTKAPQLDIPGHVVRAKERLVQVLIAELRVVREAVADYRVVIDRFFASMPASEVARTLPAGKSGVVVPTIWAEIGDVLGRWESFRHLQAQAGTVPVTNRSGKFMMVKFRFACNKRLRHAIDLFSFISLQHSTWALAYYRRQRERGHRHHEALRALSAKWLKIIFVIWSRNVPYIEQHHLANINRQTIPG

SEQ ID NO: 95799 - protein, 386 aa, unidentified
MHDSTNLAVPERTGIRGDCATLFVSLELSRSTWVATSLAPGSKKMSKHTLAGGNGRELLDLLARLKTRAEQRIAAPVKIVVIHEVGLDGFWIHRLLDANGIESHVVDPASIAVPRRHRRAKTDAIDGETLLRTLMAWQRGEPRVCAMTVPPSPSEEDRRRISRERATLLRERIRHTNRIRGLLFGQGIANYNPLNKNRRDCLEELRTGDGRSVPARLKAEILREIDRLELVLRQISQVEAERDEMLRPAEASSPAALLMRLKGIGAEFATVLYLEGLFRHFENRRQLAAYAGLAPSPWKSGSIDHEQGISKAGNPRLRTTMVELAWMWVRYQPDSALSCWFRQRVGSERGRTRRISIVALARKLLIALSRYVTHGEIPAGAVMKPV

SEQ ID NO: 95800 - protein, 336 aa, unidentified
MKKNYGFIIGLDVSKAKIDYCIMNQATMHQEFGCVANTARGIEAFLASLKKKLKVGKEDILFCLENTGVYSMPACYWIQNRQFDYWVVSALEIKRSKGIVRGKTDKADSRDIALYAKSHLHELKLSILPEKDFLEIRLLLAERDKVIKAISLFNMTNENKNFLPKDVLKTTLQHNAKMIRFLKKQLLLIDASIEKLVQSNPIFKQQDDLLQSIPGVGRQTSVLLIAYTQAFTLFKNHRQFACYAGVAPFEYSSGSSVRGRTKVSNLANKKLKTALNMAALTAKKFDSQLKQYYESKVEAGKNKMLVLNAIRCKIISRAFSVINRNSKFVDTLKAVA

SEQ ID NO: 95801 - protein, 339 aa, unidentified
MQLYAGLDLHSRNTFIGIMDKEFKRVFAKRVSNNLPLIIKTLEPFQDQLKGLVVESTYNWYWLIDGLMDAGYDCLHLANPSAMKQYEGIKHTDDQHDSFFLAQMLILGILPQGYIYPKEDRPVRDLARKRLFLVRHRTSHILSLQSLITRCCAQRVSASEIRKFTVEDLQQLLKQEHIVLSAQANLDTIIFLKQQIKLLEKAIQKKVKLNKAFQQLMTVPGIGLILAMTIMLEVGDIGRFAQVGNFASYCRCVSSQRLSDGKRKGHGNRKNGNRYLSWAFTEAAHLSRRYNEHFRSYYNRKVAQANTSLATKALSNKLARICYYIMRDQVPFQENLLSQ

SEQ ID NO: 95802 - protein, 397 aa, unidentified
MGGKAAWKGRKFSTQPAELERLWADLDLADPAELTVVLEPTRNAWIVLAHWFRSRGARVVMVPTTQSADLRAYYSKHAKNDRLDSEILAKLPLLHPEGLREFTGPGSADPLRRLTKQRSTMVKRRTAVYSRLDAFIELLGPAWYGVLGSNYGKAALMLLARYADPQAVIRLGQARLARFLVRHSRGFWREDHTKALIVAARETLALWTGPDGTIGLDFAELGADIAAEAEQARFLTEQIEDLDERIANLNDQADPDGIIASAPGVGPVTSAVIAGRIGDPHRFTSLAAIRAYSGLVPKVSQSGTSDPTLGLTKAGDPLLREALYMAAEQARRIDPQLGALGVRPVVHRSRPGARDASGSGTPRCQELGTRAGRRSPRGRRRTGRGASASERQAGVPV

SEQ ID NO: 95803 - protein, 355 aa, unidentified
MEHKKYIGMDVHQATISLAVMDSAGKVGMESVIETKAATILEFFQGLRGNLVVTFEEGTSAAWLYDLLRPHVEKVVVCDPRKNALLKGGNKNDRVDARKLADLLRSGLLSPVYHGESGVRLLKELARSYLNLTKDLTRVMNRIKGLYRSWAIPCAGQKVYSPRHRSAWLKQLTEAGVRRRAERLYQQLDDLQPLRREARQELLAESRKHPANALLRPIPWLGPVRVALLIALIQTPHRFRTKRQLWAYSGLALRTRVSGEYRITGGQLQRAKRPPALRGLNENHNHQLKEVFKSTATRASASAGPFGKFYAALLATGMKPSMARLTVARKIAAIVLTIWKKGGRFDPAHLKRQAA

SEQ ID NO: 95804 - protein, 414 aa, unidentified
MRVFCGVDWAEGHHDIAIVNDSGELISKKRITDDPAGFADLLDLLAAAGDTAECPIPIAIETPQGLLVASLRATGRPVYAINPLAVARYRDRHSVARAKSDHADAMALANILRVDAHVHRPLPADTELAQAIAVLARAHQDAIWRRTKAHNELRSVMRDSFPTFLATFTSRFALGIASPEARAILAIAPTPTQAAKLPATRIAAALRRAGRARSIDRLSSEIREQLRAPQLHYLPQVETAIGKHTLALLAVLNTACEGVDELGQASAELFQSHPDYAIITSFPGLADSTGARVLAEIGDDRARFTDARALKAYAGSAPVTRASGKTISITYRRIKNDRLAAAGWVWAFAAAAHHQPAQQHYRRRREHGDRHSAATRHLFNKLIGQLYHCLQTGQPYDELKAWNPSLNSPNAVAA

SEQ ID NO: 95805 - protein, 465 aa, unidentified
MGAALPRAQTSPPTSCVRSEGFLSKTLLERHERFEACPALVFENAREGFRLLIERIRGLAPLEHVFVLMERTGHYHRALEQYLQELDIPVYMMHVQSRPGGMLKTDKRDALTLANQLYSQLELGVQVANKLQLVRRVVPPTEAAAQLKGLIRHRYELIRESTQRKNKLTAICDEVFPELTRVVKDPNSLFALALRERFPTPQALAPVSFTTLQEIRGGARSLSDAKLLELQGLAAQSIGIKDVARLRGLVLEQGQLIKELRLLREHVEQLDSEIGNIVEHAREGQILLSFPGFGAITAATIIAAIGSIHNFPSASALKSYFGWAPVVVQSGSTLDHSRLTRGGTRTMKQILFLAVFQAIRLQDNEWAKLYERLVKTRCPYDEKTQSRVGKKRVIGRVAGQMTEAIYALLKRDAELLAKILPGQDPPPPMLYDPEVHQRHRQGHYRPLKSTPLPNTITVLHPLPSE

SEQ ID NO: 95806 - protein, 403 aa, unidentified
MNAVGIDVSKGKSMVTILRPFGEIVSSPFEIKHTSSDIHSLIKLIHSIEGESRVVMEHTGRYYEALAHQLSAADLFVSAVNPKLVKDFNNDSLRKIKSDKADSVKIARYALDKWQSLEPYSITDELRAQLKVMNRQFHFYVKQKTAMKNNLIGLIDQTYPNANTYFNSPTRSDGSQKWVDFVSTYWHVDCIRKMSLNAFVEHYQNWCKRKKYAFNKSKAEEIYTKTKELVPVFPKNEITKHIIRQAIDQLNSTSVTVETIRTLMNETASKLPEYSIVMQFKGIGPSLGPQLMAEIGDVTRFTHKGALTAFAGVDPGVNESGSYAQKSVPTSKCGSSNLRKTLFQVMDVLIKTMPQDDPVYQFMDRKRTQGKPYYVYMTAGANKFLRIYYGRVKEYLSVLPDPS

SEQ ID NO: 95807 - protein, 351 aa, unidentified
MDKTKYVGMDVHKETISVAVVNSTGKLVKEVILETKVNTILEFILGLRRNVHVTFEEGTWAAWLYDLLKPHVANVVVCNPRKNALLNDGNKGDETDARKLAELLRGNFLRRVYHGETGTRTLKELTRGYIAISKDLVRVMNRIKALYRSRGIACAGILVYAPRHRSEWLDRITDADGRRRAELFYQQLDALQALRQEARRDLLAEGRKHSATELLCQIPCIGPIRAAQLIALIQTPHRFRTKRQLWTYSGLGLEMHPSAQYGYFKGQLRRSKKPHRFRGLNRNCNHDLKNIFKGAAAKASIGAGSFHDFYQGLLMKGRKPAMARLTLARKIAAITLIIWEKGVSFDAQHFK

SEQ ID NO: 95808 - protein, 387 aa, unidentified
MSQTAAALIPAPVAYGSTLVLAIEVSNKSWVLAAQVPGLPHTKAKRTIHPEAGALLAAIAGYRARAAATGHSIERVIAVYEAGWSGFWLARWLIRHGVEVYVVQPSSVPVDRRMRRAKSDGIDAELLLRTLLAWLRGEPRVCSMVPVPDEADEDARRCVRERTELISERVGLTNRIGAVLATLGVTDYNPLLRSRCRRLAELRTGLGEPLPANAHAKIKRLLARLELVLTQIAELERERDAVVETEASDKAGKMIQQLISLRGIGVQSATVLVREAFVRRFANGKALGSYAGLASSPYNSGGINREQGIGKGGNRRVRTAMVELAWLWTRYQPCAAQVCWFRERIGPTGRRVRKIMVVALARKLLIALWRFVIDGVVPEGAVLKTAT

SEQ ID NO: 95809 - protein, 443 aa, unidentified
MSFDRLKRTQRRKRLPGHKLKPSRATLFVQNSKPHLSMKPTYFLGIDAAKHKMRATLSNRSEHVLFEKDLSVQATGLRQLLAAIKRQVKDPEQLLVLIEATGLLHLNWSAALTKAGYAVAVINPLIARRLYTLQNSIRDNKSDPIDARGLCTIGLLHGEKLLVHYRFSLRPEQFTLQRAQSVRKALRSALTNLKKTYQSLMDLSFPELGGLLQLDGVGIRQLLIQAPTPAAIAGKRLSTLENNWMVRPKAAALKALAADSMADPDLAAASGPALVALLQSVAAMEGRLHALDQQIAKLACTSVDPQTKALIETIPGFGPVNAAKTLAWLPTEILHSGSNRKVAARLQAFMGNDPRLRQSGQWKGHTKMSKRGVEMLRTAFFQSAFSAAHNDPELRAYYQCKRAQGKTHQVALSHLMRILTRRLVAVLRSGKPYQSHYNLKNAA

SEQ ID NO: 95810 - protein, 356 aa, unidentified
MYKNKGIDFTGQDFFLGIDVHARQWNVTIRHNNMELKTCSMDPSPSVLTRYMERHYPGGNYHSVYEAGFCGFWPHRELTKLGFENIVVHPPDVPTSHKEKDRKDDPVDSRKLSRELEKGDLTAIYVPDEFHQQLKSLVRLRGRITESTTRVKNRIKGYLYYNGIPIPPHSELSHWSNNFISWLEELEFSSQPGKEYLRICLDELRSHRRRLASVTRSLRKYARETGISETIKLLCSVPGIGFVTAISFYAELMDMGRFPNLDHLASYIGLVPSIYSSDTREKNRGLTKRRNRYLRYLIIEAAWVAVRKDPVLLYKFNELSRRMKKQDAIIRIAKKLLSRIRYVWRTGMPYCPSVIE

SEQ ID NO: 95811 - protein, 414 aa, unidentified
MSMQVFCGIDWAEDHHDVALVDRDGQLLARRRISDDAVGLAALLDLLAEHGDSAEQPVPVAIETPRGLLVACLRATGRKVYPINPMAVARYRDRHSVSGGKSDHGDSVVLANVLRTDLTFHRPLPADTELAQAIAVLARAQQDAVWDRITAHNRLRSCLREYYPGFLAAFEAARGGIMRPEARVILAAAPTPADAAKLTLAQLRGLLKKAGRRRGIDAEAARLREAFRAGQMRQLPLVEQAMGRQTLALLRQLDAACASAEDLEQAAIESFNQHPDAGIITSFPGLGPLTGARVLAEIGDDRSRFCDAKGLKAYAGAAPITRASGKTKSVTHRRVKNNRLNATGYTWAFSALTASPGARAHYDRRRETGDRHAAAQRNLFGRLLGCLHRCLATGQHYDETIAFPDTTQKLPTAA

SEQ ID NO: 95812 - protein, 310 aa, unidentified
MDIIIDKGCGLDVHKETVVACVMGSGIKKEIRTFSAMTGDLLRMKGWLTDLGITHVAMESTGPYWKPVFNILEDSFEVILANARHIKNVPGRKTDVKDSEWICKLLRSGLLTASFVPPQAIRDLRDLTRYRQKLIQAASAEKNRIQKVLEDANVKLSSVVSDTFGVSASRMIKAIMSGNFDTDSLAELAVGRLKGKKEKLKEALQGHFRDHHGFMIQASLDHIASLEKIIADLDRQINEKLKDYHRERELLASIPGVKEQGSSSILAEIGAAMNVFPSEGHLSAWAGMSPGNNESAGKKKVARQPTAIKT

SEQ ID NO: 95813 - protein, 353 aa, unidentified
MEEINKQCAGIDCSKKDFAVTISHSDRYQEIQHLSSRTFANNDVGFKAFNKWAGKLYKKSIPMLFVMEATGVYHERLAHFLSQLGYHISIVAPKRAKDFSKTLKVKKITDKIASQYLAIMGLEKKLDLWSPPHREYAELKHLTREKEQIQNQITMLKNFMEAEKSAYLIHEESLKRFDQTLNLLKKQKAEILKQLKGLISENKELKDRVEKVTSIPGVGVLTAATIIGETNGFSQVRNKRQLVSYAGYDVMNQESGTSVLTKARISKRGNKHIRKAMHMPALTSIKHTDSSEATFIRITSKTGIKMKGVVAVQRKLLVLIYTLWKNEAIYDPNYELKKEGDIKPPCELDHVRS

SEQ ID NO: 95814 - protein, 332 aa, unidentified
MMAQNDLVVAGIDVAKGKVDVCIRSLSQRQTFPSTPDGRRALIRWLRKHKVGKAAMEASGGYEREWAKTLRKADIEALIVDPKRVRNFARSAGRLAKNDPIDAEMIAWFAETFIEARGQAYDAAREELAQMVNARQALIDLQTSLKNRREHSTPDVVEKMQGRLLKQIALEIAKLEAAIAALIKATPRFAELAEIIESVPGLGEGTSAGLIGAMPELGQIGNKVAAALLGAAPYDDDSGKRRGVRHIQGGRRKVRNLFYMACMGAATRHNPVLKTFYDRLIAKGKEPKVALTACMRKLIVILNIMIARGEKWDASRYEVSDSARLPPSACTA

SEQ ID NO: 95815 - protein, 468 aa, unidentified
MAKRKSSRQGQRREKTEKAVAVSAGPTQVKQDVAGIDVGSEHHYVAVPAGRDPEPVRRFGSFTADLYRMVKWLLDCGIKSVVMQATGVYWFGLYQVLEDHGLAVTVTDARYTKMLPGRKTDVAECQWLQQLESFGLLTQSFRPTEEFRVLRSYMRQRENLVADIGICIQRVQKVLTEMNLQICNVLSDINGKSGMAILRAIVKGERDPYRLADLCDSRIQAPRQQVAESLEGTWQNELLFILKQQLEIHDALAAQVSQCDRQIETHLQTIQQKVVPEVTPMPAARRPSKLPNRKHTSQYDLRKYLYQITGVDLTQIDGIGEQTALTVVSEVGVDMSRWKTEKNFASWLGLSPTNEKTGGKVIQRGTKKVVNRAATALRLAAQNLRTSQSFLGAKYRRFRGRMDAAKAITAMAHNLATLIYRMLKFGHNYTDKGMQFYEQRYRERQLQYLKKQAAKQGFQLTPAQGVVA

SEQ ID NO: 95816 - protein, 409 aa, unidentified
METVVERPAALDVHKAQVTACVRVPAAGGGREQHVAEFATTVRGLLTLRDWLAAHRVTQVTMEATGVYWKPVWAVLEDEFELLLVNARHVKQVPGRKTDVSDAAWLAQLAEAGLLRASFVPPKPIRALRNLTRYRKTQIGERAREANRLHKALEDTGIKLDCVATDILGASGRAMLDALINGTTDPEVLADLARGRLRAKLGALREALQGRFDHLHAVWIGAILAHIDFLDEQIAGLTETIGEQIAPFEPAVELLCTIPGVQRRTAECVIAEIGTDMSVFPSAKHLASWAGLCPGNDQSAGQRRSGRTRKGSKWLDWALEEAAMAAVRTKDVYLAAQYQRLRPRRGHKKALGAVKHSIICAAWHMLTTGELYRDLGGDYYQRRDPEKTTKRLIAQLERLGHTVVLHEAA

SEQ ID NO: 95817 - protein, 294 aa, unidentified
MTYYAGLDVSLRTVNICIIDEQGEFVTETKLASDVQDMVAYLDELDLDIESLALEAGTLTQYLTYGLQAAGFEVICMESRQVKGALSAMRNKTDKHDARGIAQILRSGWYSPVHVKSIESHHIRMLLSSRRAVLSKCVDLENEVRGLFKIFGLKLPPKLGHGAFDNAVRDIIETDAALSHALLPLLEARLALYRSFRELDNRTRKMANADPVCQRLMTVPGVGFITALTFKAGVDDPSRFKKSRTVGAHFGLTPRRSQSGEIDFDGHISKAGDVDVHCTPPPTPCSHELHNGHP

SEQ ID NO: 95818 - protein, 327 aa, unidentified
MNNKKQNYAGLDIGLEWIDASWYEQDKLHHTKVSNNLSGFKKLVKQCGTLRHYVMETTGPYYVALALHLHLKGIKVSVVNAIVIKRFIQMNLEKNKSDKKDAGWICRYAISQQPELWQAPQEHIIRAKQMQTAIMQLTKQRTALINSQKSLQQMPVISKESKRSYQHMIDQLNKEIALLEKSLNALLKLHEEKKMQVLETIPGIGKRTVAMMIIATDGFRKVDNYRQLSSWAGLSPKEYSSGKSIRGKIRISKMGGKELRNMLYMCSLTAIKCNKGCKELYDRLKAKGKNGKLALAAVGNKLIKQCVAIAKSELPYDEKYLSQTACF

SEQ ID NO: 95819 - protein, 387 aa, unidentified
MGCKVGAICVGQTFLSGKLEKVSLLWWCSNPYVTDSSLTSHQQKETFMRIAKLSESFETSKSVKEYDHYIALDWSLASMAIGHMSRRDESPRVFERPSVLKDLKAYLVSLKGRKIMTFEESGTAHWLYLELIDCVDRILICDPFQNRLLCHGPKTDKIDAEKLCILLRGGLLKEVYHSDSTLYELRSLVSAYEDVVRAGVRTLNQKEALALGHRDTGKTAAFIKETLDENINLYRRTKRLYEHHFSEMARRNKLVNHQRAITGIGTIGAVKIVATVVDARRFLNIGKYYSYCGLVKHEKLSGGRNYGKRKPRYSRILKSVYKTAAIAALRGVNPIREYYDHLLARGVAEHNARHAVARYIARISYGMLKSGTRYEPNRWKERTAQLI

SEQ ID NO: 95820 - protein, 323 aa, unidentified
MIDGILGIDVSKNTLDASVSSCSKVRARCFANSPDGWRHLLDWLITQKIRRVHACLESTGRYSLGIACALYEAGHVVSIVNPAQIRDFARTKLGRNKTDGVDASHIREYCELFKPQPWAPSSEAHRRLGELQTIRAGIIAGLTEWKNRKNSGMVDAVAQSLADVTISHFNNQLEAVDEAIAQTIDNDSGLRRKRDLLLSISGVGEILAGVVLAELPGPDVLRSSAAVVAYAGLNPRQHQSGTSIDRVTRISKIGNAVLRAALYMPAMSAMRFNPAIVALVTRLKSRGRLNPKQIVVAAMRKLLVLCFGVLKTGKPFDPAIAMG

SEQ ID NO: 95821 - protein, 483 aa, unidentified
MKPKRQEKNKKTTDHSTQHHWHEMNRKQRREMMRKMQTEDLSLEVIHPDAGGIDIGNESHYVAVPPGRDSQSVRRFGCTTAELKAMAAWLKQCRIRTVAMQSTGVYWVAVYDILEQAGLEVYLVNARDTKNLPGRKSDVQESQWLMKLHTYGLLRNSFRPSQEIRVMRTYWRQRNDLVQSAGRHILRMQKALTQMNLQLANVLTDISGATGQAIIKTILAGERNPHKLAEFRDPRVKASEEQIAQSLEGNWQEDLLFVLKQEHEGYQFCQKQMAECDRQLEQYLQQREDRSHGAPLPEEKRKGRLKKKRANKPQFDLREGLFRMTGTDLTRMDGIDVMTATTVISEAGYDMSKWENENHFVSWLRLCPDNRISGNKIIGKGRLPTNNPISIALKLAASTLRESKTYLGAQFRRLRTRLGAPIAIKAMAAKLARLVYRMLRYGMKYVDQGAAFYELRHRELQIKRLKAKAEKLGYRVTPIPAAA

SEQ ID NO: 95822 - protein, 418 aa, unidentified
MQTELSRFTAVIGIDWADKKHDVCIQDMVTGRRRASQVRHRPEDLDEWARSLHRRYGSPIAVALELAKGPIVSVLQKYDFFVLFPIDPSTLAYHRRTFTPSGAKDDPTDAEFALDLLFKHTEHFQPLNPQSVEMRTLMTLVEHRRKLMNDRVRITNRLRNALKQYYPQPLEWFDHIDTILFCDFIRRWPSLLQARRARKATLEKFFREHNMNRQALLERRIKAIKSAMPLTNDQAVIVPYRLQVLSLVAQLEVTLECIKQYDAEIARLAPQHSDYELFDPLPGAGPVFTPRLMVAFGEQRERFANAAEVQKCTGIAPVTERSGQSTWVHWRWQCPTFLRQTFVEWAAQTINKSYWAGLYYHQQRARGCSHRAAVRALAFKWIRILYRCWKTRTPYDEARYLKALQERGSPLLKMAEAA

SEQ ID NO: 95823 - protein, 412 aa, unidentified
MLFVGDDWSEDRHDIEIQDEVGRRLARARLAEGIAGITRLHELIAERLGEDGEPGRVVVGIETDRGPWVRALVAAGYQVYPVNPLQVARYRERHSVSGAKSDPADAHTLADMVRTDRHQLRPIAADTTLGEALKVLARAHQTLIWERTRHLLRLRSALREFFPAALVAFGEDLAGAHALELLGVAPDPASAARLSISRISAALTRARRRQVADKAKVIQAALRGQRLGQPPVLTGAYAASVRAQAAILATLQTQITTLEGQVEAHFGQHPDAEIYLSQPGLGSILGARVLGEFGDDPQRYASAKARKNYAATSPITRQSGKKKTVHARHVHNDRLLDALARQAQSALNASPGARAYYDRLRAREVEHFAALRQLGNRLVGILHGCLKTRTLYNEATAWPAATAAGDQQASAA

SEQ ID NO: 95824 - protein, 349 aa, unidentified
MSQNLNSAVAVIGIDIGKNSFHVVGLDNRGAIVLRQKWSRGQIEARLANMPPCLIGMEACVGAHHLSRKLKALGHDARLMPARYVRPYSKGQKNDFRDAEAIAEAVQRPTMKFVATKTAEQLDLQALHRVRERLVSQRTGIINQIRAFLLERVVAVRQGLRFLRAELPRILATPADVLSARMVRVIRDLAEDWRRLDERVDHLSSEIAALARQDAGCERLMSVPGIGPIISSAMVAAIGTGDAFSKGRDFAAWLGLVPKQISTGDRTILGKISKRGNRYLRVLFVQAAWVVLIKPRSWERHGLKHWIEAAKKRLHRNVLAIALANKLARIAWGVLAGSRTFEASKLQAA

SEQ ID NO: 95825 - protein, 380 aa, unidentified
MKKNTTTKKSSKQGKGQKPEIHRLAAKQKLTIGIDLGDQSSRYCILDEGGEVVSEDQVPTTKAGMDFLFAKMAASRIALEVGTHSPWVSRHLAEMGHEVIVANAHKVKLITQSVRKNDRIDARQLARLARVDPKLLSPIRHRGEEAQMDLAVIRARADLIEARTKLINSARGLVKPMGERLKACDADQVARGLGERLSEGAQAVIGPLLKAVEGLSEQIGKYDEQIEEMGKRYPETKLLQQVHGVGPLIAMTFVLTLEDAGRFAHSRDVGPYLGLTPKQRDSGDSHPELGITKAGDGLMRSLLVQGAHCILRKGGAASDLRTWGLEKMGEGGKRAKKRAIVAVARKLAVLLHHLWATGEVYDPQYNRKAAEAKAKGKVAA

SEQ ID NO: 95826 - protein, 338 aa, unidentified
MIGVDLAKFVFQLHAASMTGQPKFRKKMPRSAFTAFMAAQPPAVIVMEACGSAHYWAREMIRLGHEVKLIAPHYVKPFVKRQKNDAADAEAIVIAAQRPEMRFVDLKSEEQQSSAILFRGRERLVHQRTELVNAVRAALYEYGHVVPQGINQLSRIADILDEINSDLPVLVREECRDLLAQIAEKTERINIRTKKIKALAADTDAARRLQTIPGVRPLTALAVEAFAPSMENFRCGRDFAAWLGLVPRQFSSGGKERLGRISKAGQADIRRLLIIVAMSRLNWMGRKSIPENSWLADMLVRKPRMLVAIALANKMARTIWALIKNGNDYRIPAQVAVA

SEQ ID NO: 95827 - protein, 354 aa, unidentified
MKRRTKYVGLDVHQAMTVASVREEGGRVVARTVVATEEAALVEYFSGMRGAVHVAFEEGTQAQWLHDLLMPVVDRVVVCDRRGESRRGNKGDQVDADQLSELLRRGGLRAVYHGSADRATLKEFTRTYQNVVEDTTRAMLRLKALFRARGIKTPGKRVYHPKQRAQWLAKLPERGARFRAEALYAQLDVLRELRPKAKAAMVAEARRDPAWSVLRSIPFLGPVRVALLMATMRTPWRFRSKRNLWGYCGLAVVTSSTSDFTLVEGRPVRRRRKPLTRGLNRNHNPVLKDVFKGAATAATGRPGPLQEFYHAMIARGMEPELARVTLTRKLAAVTLRLWKTGERYDPTMLTVQAR

SEQ ID NO: 95828 - protein, 377 aa, unidentified
MKRIKFVGLDVHAETISIAVAEQDGEIRSLGVIANREESIRKLVKKLGPVEELRFCYEAGPTGYALYWQLTRMGAKCEVMAPTLVPVKAGDRVKTDRRDALKLARNYRAGELTAVWVPDAAHEALRDLVRAREAAKQDELRARHRLSKFLLRHGRRSPMGVKAWSMKYLEWVKREVHFEQMAQEATLLDYLHEVEHEATRIARLESAITEAVKSAPPQMRAVIEALQALRGIAHVSAVTVVAELGELSRFTRARQLMAYGGIVPSEDSSGERTRRGNITKTGNAHLRRVVVEAAWAYRHRPSVGAKLRKRQAHVSEEVKEISWKAQHRLHERYRKLLGKGKNKGVVMTAVGRELLGFIWAIGIQAETAYKESLPRAA

SEQ ID NO: 95829 - protein, 322 aa, unidentified
MSVSVLGIDIAKQKFDVALLADGKAKHKTCKNSTEGFETLMIWIEKQGVETVHACMEATGNYGEALAIYLHEAGHMVSMVNPARIKGFAQSELIRTKTDKIDAGVIARFCLAMKPEPWIPPALEIRSLRALVRRVDSLIDMRSQEKNRLGTAHESVVVLIKEHIVYLDQEIEKIRKQIDDLVKRNPQLKQKKDLLDSIPGLGKATIPNLLAELYNLDKFTHVREMVAFIGLAPKETISGSSIKGKPRLCKIGHARLRKALYMPALVSIQYNPVMIAFYNRLKEKGKNGKVIVCAIMRKLVHVIFGVLKSGKMYDPNYKPALA

SEQ ID NO: 95830 - protein, 344 aa, unidentified
MTSMHFIGLDIHKKTISYCVKDVSGTVLSDGTVAATRAQLNEWMKSLPAPWIVAMEATMFTGWIYDHLLPHAAAVKVAHPLMLRAIAAAKKKNDRIDASKICDCLRCGFLPECYMVSSEVRARRRTLRYRKLLVRQNVQLRNKVSQMLMESGVIYNKQKLHKVGYFKELMATNPDISSELKPLLTICRETIVRIGKTEVALVRSLRRDPLLHARVERLMTIPAVGPITALTWVLEVDDVARFHSVKQAVSYCGLCGAEQSSAETIKRMPISKQRNKHLQSVLIEAAKLAPRLSPDLALVYDTEKQKGHANRASIAVARKLVAYLLAVDRSGREFVVAGERKAAA

SEQ ID NO: 95831 - protein, 416 aa, unidentified
MKKVQNTRGYERYMALDIHREYILVGAWNQEKDWVLTPRRVSTEKFPEWAKKNIRAGDIVVLETTTNVWATYDIVVPLASRVLVANAAEVEEIAKARVKTDKEDIKKLLKLLIGGIVPEVWVAPMEVRELRAFISYRGRLVKTSAMIRNRLQSLLHKHNLKLSETGLLDQTWWEAQKDISPLEKMQIRQELALLQEVEKLKAAVDEELQRQSTGAVWGKPALQLMQLPGVGFVVAMTVLSAIGDISRFESARKLVGYAGIGAGVHDSGKTHKDKKITKKGRRELRWAMVEAAWRAVGMSPFWKAEYEKYLSRLRKKNQAIVVIARKLLVAIWHVLSKEETDIHASEEDLAYKMLLLSWSLKEDTRMGLTYKQFAKYALMQLGVETDITRFVRRDVPRRLAPRAEVLARMTELGLTA

SEQ ID NO: 95832 - protein, 410 aa, unidentified
MGLERCCLVLFFLGVFIMFIVGVDIAKRSHEAIVLEDSGKVVHKAFSFKNDVSGFQRLLDILSSLSPDPNNFLIGMESTSHYWLALHSALRKRGFSVCVLNPIQSNALRGLYIRQVKTDQRDCLIIADVIRFGRYQQGNVPPSELYELRELCRARSFLADSTADLKHKVIALLDQAFPEYETLFTNIFGLTSSELLLNCSTPEEILAIDTDKLVKILETPSRKRFGKAKAEQIKETAANSFGVILEFGSASFLIKQYMEHIRYTEAQIAQLEEKIAEIFSHFDTQLTTIPGIGPVLGATIFSEIGDISRFPSPAKLAAFAGIDPSVKQSGEFQSSHAHMSKRGSPYLRRAIWQASVIAAMHDPAIRAYFEKKRTQGKSYMVAIGHVTRKMNNIIFAVLRDNKPYYSSLDS

SEQ ID NO: 95833 - protein, 405 aa, unidentified
MPYILALDVSMGHSYSVLYKDDTCLFEDEIEHTQRGFHALLEEIQHLPERPLIVFEATGIYSRPVEKFFQDHHFSYCLLNPLEAKKQMEESTLRSWKTDKSDAHRLAQTHLKNQRQPKEVQSNFYLEMRDLARFYQEIEKKITRLRMDLHNCLQLTFPELEQFFSNRLTPYALTLIRLFPHPDFVLASTRTKIKNKLINETRKKISANRAEQKADQIIHYAQCAYPAVEKDSIHCQKTIYYAELLQDLLEQKEALATQMIKKAEGSPCFLLYQTFPGIGALTAALLLGELGDITRFKTHKQLNAFVGIDIRRYQSGKYTGQDRINKRGNPKARKIIFFTIRNMIRQQRAAPNHIVDYYYKLKKQPIPKKDKVATVACMNKLLKCMHAIVRAHTEYDYAYAVSVDH

SEQ ID NO: 95834 - protein, 460 aa, unidentified
MGHARARKIPAQLVEDEDYQLRHERVAGIDIAKAKADVCTRLPPARNGGRRASRVEEVPATARAVLALAARLLADGVGLVVMESTSDYWRIWFYLLEAAGLNVQLVNPSQARQLAGRPKTDRLDAQWLARLAEMGLLRPSFVPPPEIRALRDLTRTRLQLVRDRTREWQRLEKLLESALVKLSTAVSSLARVQSARAILEAIAGGETDPKALAALADYRVRGGRAAVAEALEGMALGGHHPMLIRVHLDHITFLDRSVAAVEDEIEAALDAIPAAWGTDASGETGPAAGRGEDAAVLPAAERLAEIPGISLALARAIIAETGLDMTRFPTAAHLVSWAGLAPVSRQSGPRSRKPKKGQGDAYLRGYCTQAANGAASTGTFLGERLRRLSRRAGGNRAKCAVARSILVIVWHLLASPDARFTDLGPHWHQRKTDTDRRTRSLMNQLRALHPDADITITPAA

SEQ ID NO: 95835 - protein, 363 aa, unidentified
MIVIGADTHKATHTCAAVAAATGQLAGELTVAARKPGFIELLAWGRGLDAERIWAIEDCRHVSGALERFLVAAGERVVRVPPKLMGESRRGERSAGKSDPIDALAVARAALREGPETLPAAHLDEAALELKLLLDHREDIVKARSADQQRLRWHLHDLWPELELPAGCLDRPTWLDRLARKLARAEQSARVRVARELVVEIRRRVRRAKELEGEIAALVSRRAPELLEFKGCGTLIAAKLVAETAGAARFASDAKFARLAGVAPVPASSGKRVRHRLDRGGNRQLNCALHRIAVCQGRVHPPAREFLERKQAEGESRREALRCLKRHLARRVWRLLIDSEKEIYPTTVDAQRGMPTSQFAAAT

SEQ ID NO: 95836 - protein, 279 aa, unidentified
MRRPTEKLIAGIDLHSNNLVIGVIDQDGKRISHQKLDCSLKSVEQFLKPYKKRLQSMAVESTYNWYWLVDGLRARGYPVDLANPAKIEQYNGIKHADDKHDAFFLAELQRLKILPTAHVYDPELRPVRDLLRRRTNLVRQRTALILSFKSLYQRTTGQEMPLRDLKAMEPQEAIKLYQHPANQLIAKIQLEQIESLDKGIATIEKAVLGCAREIPMYAKLETLPGVGRILGMTITMEVGDIARFKTDGDFASYCRAVDSRRLSNGSRKGRTTPSAATNI

SEQ ID NO: 95837 - protein, 367 aa, unidentified
MKKVSTIAVKQSRKISEQKLTVGLDLGDRSSWYCVLDQAGAVVLEQRLSTTPKAMGEVFGGIPRSRIALETGMHSPWVSRLLSQLGHEVIVAHARNVRLIAESRRKDDRLDAQTLARLARIDPQLLCPVKHRSAKAQADLTVIRARAGLVRARTALVNTVRGLAKSNGERLRGCNVRNMNPERAEELSPELQAALRPLLAGIESLSEQIRECNERLERLAEENYPEAAQLKQVKGVGTLIALTFLLTLEDRHRFAKSRDVGCYLGLQPGRRNSGQSEPQMHISKEGDPYLRTLLVQGAQHILGPFGVDCDLRRWGLKLAERGGRNGKKRAIVATARKLAVLLHHLWVSGEVYEPLHNSQRSVMETAA

SEQ ID NO: 95838 - protein, 353 aa, unidentified
MKNDSAVTIGCDLGDKRSEVCELTQSGHVLRRATVKTTRAGFTEYFAGREPVVVVMEAGTHSRWASEQVAGLGHRVVVANPRRVALISASDSKNDRKDAEMLARLGRADETLLSPIQHRGTKVQSSLAVLKARDALVASRTQLVNHIRGTLKAAGFRAAGCAAEAFHRKARASVPAEWEMALGPVFEVLERLTESIRHLEKQMDVLAERFPEVELVEQVNGVGRMSALAFILTLEDKERFKKSRDVGAFLGLRPKQDQSGSMDKQLRITKAGNPYLRRLLVCCANYILGPFAADSDLRRWGLELARRGGKNARKRAIVAVARKLSVLLHRLWVTGEVYEPLRNSRIQEQRQAS

SEQ ID NO: 95839 - protein, 331 aa, unidentified
MFPVGIDVSKNTLDLCMLYDGIKGRIKTRNIQNNRHSVENILRWLRLQHCSPEDVHVVMEATGVYHEQLATELHDAGFRVSLANPHRSREFARGMGIMTKTDKVDAYMLACYAFLKKPHRWEPPAPEIRYLGALLRRRDVLLGDALREENRLEKYLSTDTPADIISSCRRMAQLLREEVSNIERQIKAHIKASPALRRDYTLLTSIKSVGPQLGMHMLVVLRSHNFVSAEQAAAFLGVVPIEKRSGTSVRRRPRMSKIGPPQLRAKLYMSALCGKIYNKRMRNIYDEMCLRGKPKMVAIGALMRKLVHWCYGVLKTGTVFNDEDLKPVLST

SEQ ID NO: 95840 - protein, 336 aa, unidentified
MNFVGIDLHKKTITVEALDQARKIVARKTLACADPDKIRSFFEGLRPFQAVMEATASYEWLWNLLEPLAERLLLANPHKLRVIAESKNKSDKLDAHVLAEFVVLDMIPLAYRPSPRQREHRRLVRQRQHLIRRSTAVRNKIRRIVSDYNADRRDLFTGEGLTYLAALELSPSARFVIEQLLAEWRHYEVQLQALDKHLQQFAKTAPVAEQEARAVLKTIPMVGPVTVDVVVSELGDVGRFRSCKRAVAYAGLAPGQRESAGHRHELGITKQGSALLRWALVESAWRLVRSCRRWGSIFEGLHKRRGKKKAIVAVARRLLTVMVAMLRSGQSYRLAA

SEQ ID NO: 95841 - protein, 410 aa, unidentified
MSLFCGIDWATEHHDVAVIDDDGRVVARRRVSNDAAGFAALLALLAEAGDSGADPIPVGIETDRGLWVAALRETGRTIYPINPLAASRYRARYAVSGAKSDATDAVLLANIVRTDPGAHRPLPADTEAAQAIRVLARAQQDAVWARQQIGNQIRDLLKDFYPAALAAFAELPDGGLARRDARTILAAAPTPARAAKLTPARLRRLLIKAGRKRYLDRDTARLREVFADAYLHQPRAVENAMGIHLTTLLGQFDATCTAADELAEAAIAHFEQHPDAEIITSFPGLGMLAGARVLAEIGDDRARFTDARGLKAFAGAAPITRASGKKTVVLHRHIKNRRLAAVGPIWALGSLRASPGARRHYDARRAAGDWNQQAQRHLFNKFLGQLHHCLHTGLLYDEHVAFPPPLKLAA

SEQ ID NO: 95842 - protein, 369 aa, unidentified
MTVYIGVDLHKTQFTVHVRVGNRIESLSEIKQYPTTAAGYTKFLERIAGYKTADFAVKIGVESTGNTRFFKNQVEKAGAEVTVINTLKFKVINESTKKTDKHDASTISWFLSKDMLPESHICSKETENLRRLLKSRERLVRSIVGQKNEVHALLVSMGLDDELRSLQSKKGRQKVLDTLLSHSDLVLEAQSVKLIFQIIEQMIESVKMIEKHLSELTEDDAMVNRLMTIRGCGKITAWIIRAYTEDIGRFANAKKYAAFCGLVPWVQDSNESVRHGKITKRGPQELRTAYVQLVLGIRRCKDTWGWRIMQRLDYMKKNKGSGKSIVAAARKMAEIVWALLTEGQDFDSKKMMGPYKPLPLTEQALAAMN

SEQ ID NO: 95843 - protein, 478 aa, unidentified
MKAQGGADTAAKAARPNRKQRREQQRKIWTDNPGLDVVHPNAAGIDVGNSEHYVAIAPEKSPEAVRRFGCFTADLRDLAQFLKAHGIVSVVMQSTGVYWIPLYDVLEEAGFEVYLVNARDTKNLPGRKSDVQESQWLLKLHTFGLLRNSFHPTSEIRVLRAYWRQRTEHIHTATECVQRMQKALTQMNLQLANVITDIMGLTGQKILRAILAGERDADKLAKLRNWRIQASHEEIVASLTGNWRAELLFTLKQEVDRYDFCQRQIGECDQEIEIHLNTLASRPRETAPGAQPAMPPKKRKTAQGNSPEFGLGQELARIAGVDFTRIDGINVLTAQTIISEVGLDMERWKTEAHFASWLGLCPYNAVSGGKVLRRGTRKVVNRAATAFRIAAFTLRRSDSYLGAQYRRFRGKLGAPKAITAMAHKLAVLFYRMLRFGQEYVDRGQQFYEEKYRQQQISWLNRKAAQLGFSVIPAANDPA

SEQ ID NO: 95844 - protein, 338 aa, unidentified
MPHYIGVDLHTTCFTACVMTKQGESSFQEYKLDELEKFKKSLRGADQVAIEATTNARFFHDQIIGRVKRVVVVNPRQFEVIKRSVKKTDQRDAFNLAQFLRLDLLPEVRMKDETQSQLHSLCQTRQKLVEQRTGLMNKLHNLCVAHGLKEKREAFASEKGLVEVLQREVWSAIEQVEVEVLVAQIRSLNEGIKRLEGEIKQQGAKLEGHDSLTSIKGIGPKAASILLSVIGKIEDFDTEGQLASYFGIVPTVKQSNETLHLGKISKQGSKLGRTTLVQCTLVAKKYSPYLKQYYERIKARRGAGKAIIATARKFLGIIFQTLKNKWVFEDFPNFVLAE

SEQ ID NO: 95845 - protein, 418 aa, unidentified
MKKHSKSSQRSEPTLKRRKARGPVQRDAKEVLAEVLGKLTGKLDAPAVSTSAKENRRRNTVGPNRDRLTVGVDLGDRWSQYCILGLEGETLAEGQLRTTQEDVREFFQALTVARVVIEVGTHSAWMQDVISERGHEVLVANPRLMEGSKRRKRKSDRINANKLARLGRVDPQSLHPIRHRSREVRQDLVVLRARDALVSVRTELINTARGLVKSMGTRLPRCSSPSFAEKVKDAIPVEVREALLPLVQLVETVKDCIARYDQKIEELVREKYGHTTLLRQVKGVGPITSLAYVLTLEDPQRFSSSREVGPYLGLVPKQEDSGDSQPQLGISKAGDRMLRRLLVGSSQYMLGAFGPDTDLRRYGLRLCERGGKNAKKRAVVAVARKLAVLLHHLWVTGDVYEPLHHTGAETRTAQATAA

SEQ ID NO: 95846 - protein, 355 aa, unidentified
MSGAYEGRQIVGMDLHLRRSVLVRMTDTGERLETVRISNDPQYLAQVMARAGEAPEVVLEAAYGWYWAADTLAELGAHVHLAHPLGVKMFSYRRVKNDQRDATDLADLLRMGRLPEAWIAPPATRELRGWVRHRAKLVGLRSSLKCQVHGVLAHAGIWVPMSDLFGVAGQQLLAELSAGTRLSVESRSRLDSALRVIAALEFEIELFTKLVNGRLRTDPAYRAIQAIPGVGPVLAAVFVAEIGDIGRFHRPQQLASWAGLTPKHHESDTTVHRGRITKQGSRLVRWAAVEAVQRVSGHTRLGQHRDRVAARRGRNIGVVAAARELLTLVFYGLRDHHIRALDTPAPPPAANRSAA

SEQ ID NO: 95847 - protein, 261 aa, unidentified
MDIEKRNCKACMMNADGSIVEESEYDNKLTEAEIFAYSPVKKYGKCIAVCESTSNLWLKTYQAFEKYGIGVKLANPLKTKAIAEARIKTDTLDARTLAHLLRSDLVAECYIAPKGIREDRSLLRLRTNFVQDRTRVMNRVHSLLDKYDVKCDYDNIFGVKGTRWLSSLKLSVNDQILLHEYIMQIEFLNTEIKNTESKISYQASKNESAKILMSMTGIDYFSAMLIALEIGDITRFNTPEKLVSWSGLCPSIHQSGNSLYM

SEQ ID NO: 95848 - protein, 306 aa, unidentified
MLTAEADKCKTKVVVNTAAGVQALLAWCAKHGAQPAQLHAILEPTGLYHEQAATALPQVRVSLVNPAQARDFAKALALRSKNDALDSYVLARYGQTLSPALWHPAPLHARQLRALLTRREALSKDLLRELNRKEKSQFSPSAPLVDGSIDKAIAFLREQIKQIERAIDQHIDNHPDLKQDCELLNSIPAIGPQAGNAILAVMHNRHIDSAQSLAAYLGVVPVQRQSGSSLNSCARLSKAGPSQVRATLYMAALVGTRHNPHIRALYQRLLKAGKSKKAALGAAMRKQVHLCFGVLKTASPTSPITP

SEQ ID NO: 95849 - protein, 361 aa, unidentified
MFDERTSVGLDVHARSVVAEAVDWQTGQVFSQRLVPASEQVLAWVRRLPGPAAVTYEAGPTGFSLARAFAAAGLRCVVVAPSKLERPGGDRVKTDRRDARRLAHLLHIGELPAVRVPTVAEEHARDLVRAREDTRGDLMRARHRVSKLLLRQGIVYSGGTAWTVVHHQWLHAQHFDSPDLRIAYREALDAVACCVDRRDRLDTAIEQTAHADPWAGTVARLECVRGIATLTAFGLTVEIGDWHRFTGATIGAYLGLTPSEFSSGSSRSQGPITKAGNTHARRLLVEAAWHHRRPVSGPSRTLRARRAAVPPAVRARARAADARLHQRWLALEARKKRPTVTAVAIARELAGWCWSLAIMDP

SEQ ID NO: 95850 - protein, 384 aa, unidentified
MNRIVKIGMDVHSTNYTLCAMEPVLDGEDRIFANIKVTPDYKNVIQFISKLKNKLGASDTYSIECGYEAGCLGYSLYHQLTDAGVKCTILAPTTMLTPQGKRIKTDKRDALMIAQCLSYGGYHAVHVPDEKDDAIKEYLRMRDDHKLVLKKIKQQINAFCLRHGHFYDGNKWTIKHREWLKTLKLSDLYRETLDEYMTTYEEQESKIERLDRRIEELASDSAYKEKVKKLGCFLGIKTHTALSLIVETGDFKRFAKGNTYAAFLGLAPGESSSGDNVNRTGISKAGNSHLRTLLIEGARGICKGKIGHKSKDLRLRQAGNSAEVIAYADKANVRLRSRYYRFMRHEKKKNVAVAAVARELACFIWGMMTDNISIVPERGKQNVA

SEQ ID NO: 95851 - protein, 407 aa, unidentified
MLFIGDDWAEDHHDVEIVNAAGDRLAARRLPEGVAGLAGLHALIADHLDPDQDAAQVVIGIETDRGPWVQALLAAGYLVYAVNPLQVARYRERHSVSGAKSDPGDAHVLAELVRLDRAHHRPIAGDSALAEHVKILARAHQSMVWSRQRQTNSLRSMLREYYPGALAVFGDDLAGRDALAVLSLAPTPQQGARLSEHQVAAALRRAGRQRNITVRAADIVAGLRAEQLAARPGVVGAYAAAAQALLAVITELSRQTLVLAGEVEAGFGRHPDVEIYLSQPGLGVILGARVLAEFGDDPDRYPDTRARKNYSGMAPVTRTSGKSRAVLARHARNRRLADALYQQAFAALNSSPGARAYYDTHRARGNTHHQALRALANRLVGILHGCLRHKTLYDETQAWAAPTTAAA

SEQ ID NO: 95852 - protein, 371 aa, unidentified
MTTPTLEVTAASHVVAGVDTHSDTHHVAVLDSAGRRLGDHEFPATPAGYEQLHAYVKAFGSIALIGIEGTSSYGAGLTRYLSIRDVPIREIIRPKRAPRRAGKSDPIDAYAAARQALSEPETLPHAKNSDGHTEQIRVLLATRRSAIKARVAAARQIKSLLVTAPDSIRTRWRAVSDKALIAGLAATRPSGAITSVGAATAITLRRLARRCAYLDQEITDVDEELRVLVATAAPAMIATKGYGVVTTATLLITAGANPQRMHSEGSFAALCGASPIPASSGKTTRYRLNRGGDRQANWALHQIALVRLSSDPRTKAYAARLRGTGKTKKDILRCLKRAIAREAFRLLTKPHLVPRTDDLGRVAKCWFGAFG

SEQ ID NO: 95853 - protein, 465 aa, unidentified
MKKKTSKSEKEKGKTSIHEAWEKINPDAAGIDIGSREHWVCIPPGRREKTVRKFGTFTCELEALADWLQECGVKSIAMEATGVYWIPVFQILEARGFHVLLVNARQTKNVAGRKTDVQDCQWIQRLHTYGLLQGSFRPGDPYCVLRTYLRYRDELIGARSTQCQHMQKALQQMNLQLAQVLSDVTGLSGLAIIQAILEGQRHPAKLAALVDVRVRATQATIQKALVGDYRKEHLFELKSAFELYHTYEQKIQACDEQIVAETAGLPDKVDLSSKPLPARKQGHPAHKDKMAGQDMREWVYKKLGADLTAIDGIGITTALVILTEVGPDLSRFPSEKHFASWLGLCPDNRISGGKVLSSRTRRVVNRVSDALRIGATSLERSQTALGAFYRRMKAKLGAAEAVTATAHKLARIVYRLIKHGEAYVRQGTVEAEKKYQERKLYALRKTASALGFELIAKQQVTQGVS

SEQ ID NO: 95854 - protein, 365 aa, unidentified
MQKISTMSTSGKNIFKGQLTIGLDLGDRSSSYCVLDEAGEIVLEQKLPTTPEAMKQTFERTPRSRVAMETGTHSPWVSRVLTALGHEVIVAHAQKVRLIVKSRRKDDRLDARTLARLARIDPELLSPVQHRSAQAQLHLTEIRARAGLVSARTALVNATRGLVKSYGERLRKCGTEQVRRETSSGLSAELREALEPLLQEIESLNERIQEYDRRIAKMAKQTYPETTLLKQVKGVGDLIAMTYVLTIEDPHRFRKSRDAGCFVGLQPGRRNSGESEPQMRISKEGNEYLRTLLVQGAHYILGPFGEDSDLRRWGKKLAARGGKNAKKRAVVAVARKLAVLLHRLWVSGEVYEPLRNSQKVMSAVA

SEQ ID NO: 95855 - protein, 394 aa, unidentified
MIYAGVDIAKTDHVIGAVDERGAEMCRPMPFKNTEAGLERAVAWLEGLAGSPSDVVVGMEATGHYWMACYSFLVARGYSVAVINPMQVKAVRKLKGLDKVKNDRVDAGLIAEALRIGQYDETRLATDEVASLRSLSRYLQSLRGMVAELKTQCICLMDAHFPEYAGIFSDMFGAGSRAVLSKSPLPFELARRRADSLARDIAEASRSGGKSSGYAAKIKAAAKSSIGVRLGQEAASFQVKSLIRQIEFADSECAGVEARLRSLLDEVEPLVLTIPGVSYVTGAQIVSEIGDVSRFRNAPALVSYAGLNSSVSQSGQFDSGGGPITKHGSPYLRRALWLAANRARQYDPGLRAFYDRKRAEGKPHRVAVTAVARKLCHIVFAVMRDQVPYDPGRE

SEQ ID NO: 95856 - protein, 344 aa, unidentified
MNCVGIDVSKGKSMIAVMRPFGEVVVSPFEVRHTASELSKLAGLLKSLDGETRVVMESTGNYHAPVAWLLHDAGLYVSVVNAMLVHDYGNNSLRRGKTDKKDAVKLANYGLDHWLTLPRYVPEEDTRLMLKTCYRQYQQYSKVQTMLKNNLISLLDTTFPDANRLFTSPPRTDGSEKWVDFVAAFWHCECVCGLSEKAFAAKYQKWCRKHGYHFSEDKALDIYASACGHFGVMPKTDTAKLLVEQAIFQLRATSAALAALKQEMQSLAASLPEYPVVMEMFGVGPTLGPQLMAEIGDVRRFHSKKALVAFAGIDAPPYQSGQWMSVAAASPSVVPLLYAGHYSL

SEQ ID NO: 95857 - protein, 342 aa, unidentified
MKYFAGLDVSLEQTSVCIVDAGGTVVREMKTASEAAALRTVLENYVEHLERIGLEAGPLSQHFYSELVEAGLPAICVEARHMAQALRAQTLNKTDRNDARGIAQMMRAGLFKVVHVKTERSQRLNVLLRTRKVLKSKLLDVEADLRGVLKNFGLKVGKVTPRSFEARVRELAAFDPFIAAVVEPVLAARPAMREQYDRLHAMLLQVVRHDPVCQRLMTMPGVGAVVALTYRVAIDVPTRFTKSRTVGAHVGLTPRRYQSGEVDWTGRISKAGDPLLRTSLYEAAQVLLTRVARSSPLRSWAMRLAKRRGRKKAVVALARKIGVILHRMCVDGTDFRWEAMTV

SEQ ID NO: 95858 - protein, 407 aa, unidentified
MTKVIIGVDPHKLSATIEVVDHHEKLLGSGRFATDRLGYTAMRAYAKTWPERIWAIEGSNGAGRPLAQRLLEAGEHVVDVPAKLAARVRLFDTGHNRKTDALDAHSIAIVAVRTKTLRVLRPDGELEALRMLCDRREELTRLRVQTVNRLHRLLAELVPGTAKKDLTALQAKAILATVRPRDIAGKTRRSIAAEELADLLTVEAKMKKATAELKVLVKARGSRLMDLLGVGPVVAARTLADVGDIARFADRNRFASWTGTAPLDASSGEQNRHRLSRAGNRRMNHMIHIAAVSQIRLDTEGRAYYRRKQTAGKTKLEALRCLKRRISDALYRQLLADAEQAQLLSAAQPVDTGPGGHCGASQESSAVDLPPHIDTSDQPLPGPATQTLQPARPTGKTSQPRTPQTTS

SEQ ID NO: 95859 - protein, 349 aa, unidentified
MRSFQPPADTRFYAGVDLHARSLYLVVLDRDGQHRFGRNLPAAPEPFLRAVDPFRDGLLVACECVHPWYWLADTCRDHAIAFVLGHAWAMKAVHGSKTKCDRQDAEAIARLLKGGNFPPAYAYPRERRGLRDLLRARLRLVRQRAELYGHVHTARRQANLPPVSNDVKYKSKRAAITADIADPFVRRRVETDLALLEPLDTTIRQLEAEIEAAAQQHFPTELAVLQSTPGVGPVLSLTILLEVDTIERFDTRQQFCSYARLCGAVQESGGQRVGSGNRKAGNAWLKWAFSEAAVLSAQKDERIGGLLQRLASRLGKPKALSALAHKLGRAFYHMLRTKEVFDMQRFVRH

SEQ ID NO: 95860 - protein, 350 aa, unidentified
MKKICIGIDVSKETLDVTVIHIESYELVEKLGYSKFDNRPSGFRSMTAWIRKVIKSRGQMDEALFCMETTGSYDLPLCHWLHKNGLNVWRESALQIHCSKGFQRSKSDKEDSEIIAQYAARHQNRYTAFVPDAEAIADLKELICYRDSLVERRKECKVRLANKKETLVNKNSKAWKCIERLSKAEIKRLDKVIGECDEEIRNLMKEDEEMEKNYQHLTSIVGIGLINGAALIAYTGNFKKITTPNKMSCYCGCFTFYEDSGTSVHRKSPYRNACCKMLKGYLRMAAKSAMLANTELRKYSERLREKGKPYAVILNNVANKLLHIMFSLVKHDYDYEYNHEVVRRMEREIA

SEQ ID NO: 95861 - protein, 422 aa, unidentified
MHKQEESDYAAFVGIDWGDKQHDICLWVPGHERRERVVLEHRPRSIQAWAEQLRTRFGGARVAVSLELSQGPLVSALLEYEFLVLYPVQPSTVANYRRAFTPSRAKDDPTDAEFALEVLVHHRDKLKRLEPERPAMRALRSLVEARRDLVHDRTRLTNRITAALKAYFPQVLEWFRDKDAIIFADFLERWPTLQAAQRARRETLEAFFRAGNVRYKKTIERRINAIRDETPLHTDDAVTTPSQLLVETLLAQLRVLSPGIARFDAEIANLAPQLPDYDIFAALPGAGPTLAPRLLAAFGERRERFPSAAALQKYAGIAPVIERSGNKCWIHWRYSCPKFLRQTFIEWVGQTIPRSFWAKAFYETCRARGSRHQAALRSLAFKWIRILHRCWVDRVPYDESRYLMALQKRGAPLLKHAAQNAV

SEQ ID NO: 95862 - protein, 664 aa, unidentified
MSRSCQNRRRAAARTATNQDAGCAVHTAAMPTEGPVPSTTDPRTSRSSAAPGDTPAATPVAIGIGIDTSRYGHHAIFLDADLQSAAPELKFVESAQGYQQLQSRLAALRHKHGPVHFHFRLDVAGSYADNLLAFLHGLPEPRTISCGDPQRNKNYRAAIFGHKKSDATEANATARYALTEKPKPMPVVAPAVQQLCQIASRLESQARHCTRVVNQLHNLLGRTFPELALLVKDLSAGWVLTLLDRYPTAAKLAAARSSSLEKIPYLPHEHIASLLEQARTSIASLTGPVTEELVRELVGQLQDAHVRHQALEKLLVSAYRQLPEPNHLDSIIGFGEVTAAILTAKMVTTGRFVEPAKLTGYFGIYPVEASSGIDRDGQSRLPLRMVMSRRGNDLVRRYLWMAALSAAQHNPAVRPLYQRVRAKHPDQPGIAIGHAMRKLLHLALAVWQTGKPFDPEHYPWDQAAHLPGSQKPATAEPVAPSPTHERTGPNAQAAGHKNPVTTPVRSVVTAACVPTSVTEAASAGNDSARSVASEHPEATACDMPMSQDAQAEATALAWIDFAHLKTQLPLQRVLEHLNLLTDLRGRSRQRKGPCPVHAASGKSRTFSVNLDKNLFQCFDPHCGSKGDVIDLWAALHKLSLRDAAADLIQTFNLEPASRTEKRHG

SEQ ID NO: 95863 - protein, 405 aa, unidentified
MMTPTRRRVTGGFDTHAETNVGAVFDTISLQLIDRASFPTTAAGHQAALEWMRSHGTLDAVGVESTGSYGAGLARHLTKAGVRVVEVNRPEKLGRRLDGKDDFVDAEAAARAVLSGRASAIPKSGDGPVEAIRALEITHESATHDRTEAINQFKALVVTAPAGFRDAFSTKSFHRQLTAAVRFRTTVDDVIEQELRVALKLLAQRIRFLEDQIEVIEARLRPIIAEHFPALLGLEGVGPHTATQLLMTVGDNPERLHSDAAFAKLCGACPQPASSGKTIRFRLDRGGDRRANKALFRIVIVRMRYHEPTRHYVARRLAEGKTRREIIRCLKRFVAREIYAAIINPPDTIPTGAQIRTARLAAGVSMTDLGRALDITPTAMSRLERGLDHNTERAKQALNLLSQPT

SEQ ID NO: 95864 - protein, 339 aa, unidentified
MNNSVIGLDIAKNIFHLFTLLDDGKTLKKKLKRHELLAFFANYPASIIGIEACGSSHHWARELTKLGHEVILLNARFVKNYVVGNKTDFNDAEAIHEAVLRPNKRVVAIKTVAQQDIQLVHNIRKDLVDQRTALVNQTRGLLSERGIVINQGIEQLREQLPLIIEDAENSLTDLSRELFAEQYEKIKTLDAEIKAQDQRINRLCNANDLSKRFLDVPGVGPLTATIVAADIGDGGKGYKSSRDYAASLGVVPKQHSSADKQHYLGISKRGNRYIRTLLIHGARAVLKNCGKKTDKLSLWLQALVARRGFNKAAVALANKNARILWAMASNGKDYEVLAA

SEQ ID NO: 95865 - protein, 341 aa, unidentified
MEQATTIGLDIAKHVFQLHGADAAGHVLFRKRITRVRLLSFLAAQTRCVVAMEACAGAHYWAREIAKLGHHVRLIAPAYVKPFIKRQKNDAADAEAICEAAQRPSMRFVPVKTEEQQANGIVFRARDLLVRQRTQCVNALRGHLMEYGYVFPKGITHVEALVALVEDLQSSLPDSVRVILKLLVDTFTALEAQIAVLDAEINQRSKSDPTARRLMTIPGVGPIASTAITALVPAAEGFPAGRDFAAWLGLTPLQKSTGGKQKLGAVSKRGERTIRRLLIIGASAVVQQASRRGAPKGSWLAQMLARKPKMLVTVALANKTARIIWALLVKGGTYRTPAAAA

SEQ ID NO: 95866 - protein, 326 aa, unidentified
MKQEMSILGIDIAKRVLHAVGMDERGKIVLRKRLSRHDLIPFMAKLPPVLIGLEACGSAHDWTRRFRAYGHEVKLMAPQFVKPYVKSNKNDSRDAEAIAEAATRPTMRFVMTKDVDQQDAQALHRVRERLIGERTALVNAVHGLMHEDGIVIPKGVAKLRQAVVGKLEAEKDKLTPLSQEMFWKLVEEFAALEEQLAYYQEKLAALAKMHPECQRLMTIRRIGPLSATALVAAVSDASAFKNGRQCAAWLGLVPRQYSPGGKERLLGMSKRGDSSLRKLLIHGARATLRWVGLKTDRRSQWIRQLSERRGKNRTAVAVANKNARIV

SEQ ID NO: 95867 - protein, 346 aa, unidentified
MLHAGLDLSRRKVDVCLLSGAGEIVDEWASPPDADGLRGLAARAAMHGGPVRGVIESMNGERFVHDRLEERGWEVLIADATKVKGLAPLACKTDKIDARVLAALSARDLVPEIWLPDPSIRRERELARFRLHLVRHRTTLKNRIHATLVAFGHPCPVSDLFGHAGRELLDRLEIPDPWRSNVDVSLGLIDDLELQIARLTVELKRQGADHRYIPLLVTAPGFGWINAFTVASEIGDIERFASPAKLCGYTGLCPRVRQSGGVDARGPLSKHGPKYLRWALFEAALNACKHPYYAERYQHTKRRLGRQRGPKVAQIDLARRLTEAIWHMLTRNQPFAPAGAPFRLAA

SEQ ID NO: 95868 - protein, 371 aa, unidentified
MKKDSTTKFIGLDVHSKTISVAIADEGREGEVRHYGTIENTIEAIDKVIKKLTATGVELKFIYEAGPCGFALYRYLTGNGFTCIVISPAMIPRRKNVRIKNDRRDAMTLARLYRAGELTGIYVPEPEDEAIRDLARTRDDARVAERKAKQRLNSFLLRHNLIYPGKTKWNRTYFNWLGSVGMKYPAQKIALQEYIETVNECTGRVARLTEQIGLAVEEWKMAPMVKALQALRGVSLICATVTVAELGDLSRFQNPKELMAYLGLVPSEHSSGETIRRGGITKTGNGHARRVLVEGAWTYKHHARITSPLIKRQRDLPKSICQISWKAQLRLCARYRKMVARKKPNNVVVIAIARELAAFMWAIAQEVRAAA

SEQ ID NO: 95869 - protein, 313 aa, unidentified
MTAPTVFVGIDVSKDSLDVALRPSGERWQVAHDSRGIAGLLQRLGPGPEALVVLEATGGYEQALAAALASAGVAVVVANPRQVRDFARATGQLAKTDAIDAAVLALFAERVRPEPRPLPDEARQGLEALVTRRRQLIEMLIAEQNRLLHARRAVRRSLTDHIRWLERQLGGVDKDLDQAVRSSPLWRAQDDLLQSVPGIGPITSRTLLAELPELGRLSRKEIAALVGVAPLARDSGTLRGHRTIWGGRASVRAVLFMAASAATRWNPVIRTFYQRLRAAGKPAKVALTACMRKLLTIVNTMMRSQTPWRVVTA

SEQ ID NO: 95870 - protein, 366 aa, unidentified
MKKKDTRHSLKQKSVRGMRGITIGLDLGDKTSRYCAIDSNGQIVSQGGVATTRTAMREKFSGLEHCRIALEVGPHSPWVSRLLAESGHEVIVANPRQLKLITESSRKCDPVDAETLARLARVDPVLLRPIRHRSEHAQMDLMVIRARAALVVARTSLVNTVRGLAKSVGERLPKVDAEALDIEDAKALPDALREVLKPILQSIEQLTVKIKAADKELEQIARTRYPETKLLMQVSGVGTLIALTFVLTVEDNTRFRKSRDVGCFLGLRPRRADSGEHRPQLPITKEGDVYLRALLVQGAHCILSRQGPDTDLKRWGTRIAGGGGKNAKKRAIVAVARKLAVLLHRLWTTGEVYEPLRNSNTHPVAA

SEQ ID NO: 95871 - protein, 338 aa, unidentified
MHRAGLAFASMSQNNKTINDNKLSFYAGIDVAKATLQLSINATSWTLSNDPKGCIRILKLIAEAEATRPGYKIHVIVEATGGYEAALVETLHRANQRLSVIQPSRVRHFANAKNKRAKSDPIDAAILAQFGEAIQPPPTLPPNAAQIHLVRLVARRAQLIETRITELNRAAHYRDKLLHKQSQQLLALLNRQVQQCEHAIAAQLAADQEMKTRAERVQQVPGIGPVVAAILQAQMPELGALRDTEAAALAGLAPYNRDSGPRKGTRSIWGGRASVRCALYMAALSAVRHDPILRNFYTRLRAAGKKPLVALTAVMRKLVVLLNHMLSKPTFKLAVRPN

SEQ ID NO: 95872 - protein, 351 aa, unidentified
MSIIGGLDVHRRQITYDWIDTDTGQTRQGQLAPASREHLRGWLEQFTGQQAAFALEGCTGWRYVVEELQLAGITAHLAEPADTRALRGRKRHAKTDRADARHLRELLMGGRLPESWIPPAHVLEARTQIRLYKALVDQRTAWQQRIHAVLFHHGVPAESDLLVAERRQRLTQGAGLTVAAHQAVLLALRMIDAIDAELDLLRVELAHLARRQPGCAALRDLYGVGPITAVAIWAEFGDVRRFSSSRHAVRHTGLDVTVYASDDKRAPGHLARQGPAVLRWALFEAAQCAARAGSPDHAYYTQVKARLGGNRAALSVARKLARRAYHLLRGLGDDALAPMASGSDQPAAAVA

SEQ ID NO: 95873 - protein, 360 aa, unidentified
MKRVSTKSVSVVSGNKVFIGIDVHKDSWHITARTDGEEVFNGRIPASYHSFLRLLERFKDCQIRVAYEAGPCGFSLYDKLMEDGIDTSVVPPSLIPIESGNRVKTDKRDSRKLARLLESDMLRKVFVLTEEERMHRELIRTRRQLVDHRGSIARQIKSKLLFYTISSPFPSRYGWGRPYLQWLRGIVCQSHYLKESFEILIDLYEYLTKGIKRITKSVIDLSRTDKYAQRMRLIRSIPGIGILTGMEILVELQDFTRFKTSEEIASYIGLTPSEYSTGPYVRQGRITRCGNKRVRVALIESSWILVGKDPCMRAKYLKLKSSKGAKRAIVAIARKLIIRIRAMLLQNVPYRTDGSMLKAA

SEQ ID NO: 95874 - protein, 419 aa, unidentified
MNYVGFDWASRAHDVTVLDEAGGVLDRWAFPHSETGWVTTLDRLARHGSAAEVPVIIERTSGLIVDRLLAAGHPVVPVHPTAFYAARPRWGASGAKSDPGDSYKLADYLRTDGHRLRRLTPTDPGLHELQALVRLRDDQVRARTAATNQLTAILDTYWPGPKQLFMSLASQIALAFLTDYPTPTSAAHLGEARMAAFCRRHAYRGGKSPAELLSRLRAAPVAPVGLPPATLAAMVTAQVTLLKTLQTVISDVERLIAVRVVAHPRSNLFENLPGVGMINLAQLLAEVGPILDRVDSAEQAATECGAAPVTRSSGQTRGVYFRWAANTRARKAITSFAHNARMQDDWAAALYADARARGKRNPHATRIVARAWLRVIWACWTSGQRYNPDRHHSSRFLHRCHPAGAQARSRWSPPPEERS

SEQ ID NO: 95875 - protein, 391 aa, unidentified
MTVASGWSSGWTRTSGPVTIEVMTADETVVGGGRYATDAAGFRAMLKSLRAWPERVWAIEGCEGIGRHIARRLIADGEQVIDVPPKLSARARVFATGQGRKTDATDAHSVALVGTRMAGLRPVVADEQLEVLRLLVDRRRSLGEEHTRKVSQLHALLLELIPGGAKKDLSAAQARRLLAGVRPRDAVGKTRKRVAMELVVDLEKIYTRTKAADKELKQLVKATGTGLLDLHGIGPSGAARLLVEVGDITRFPDRGHFASWTGTAPIDASSGDHVRHRLSRGGNRQINRVLHIMAVVQLRNPTEGRAYFDRKKAAGKTSMEAMRCVKRRLSDIVYKTMLVDLVTTQTTGPGGQPGNDSDSSATGSQPTTGSSDKSLPGPATTDPRPAVPAVS

SEQ ID NO: 95876 - protein, 340 aa, unidentified
MTITTVGIDLAKNVFAVHGVDQNGRTVLVKPKVSRAALPELIASLPPCVIGMEACSGAHYWARLFRQYGHEPRLMAAKFVSPYRMAGKSGKNDAADAQAICEAVRRPHMRFVPVKDESQQAMQCLHRTRQGFIEEKTATYNRLRGLISEFGVIAPQSTDALRHMVSVQRSSLPLQVQQCVDDLLEHIDRIEANITEYDRILSRMAKTDHRSQRLMELKGVGPTTACALVASIGNAHDFKNGRQLAAWLGLTPSQYSSGGKSKLGRITKAGDSYLRTLLVQGARSVLIGAEKRTDSFSRWVCMLVERRGYWRAVVAIAAKNARLCWASLHYGDDFRLYSAN

SEQ ID NO: 95877 - protein, 402 aa, unidentified
MNAVGIDVSKGKSMVAIMRPFGEIVSAPFEIKHTASDINSLVELINSVEGESRIVMEHTGRYYEVLAHQLSKANLFVSAINPKLIKDFDNDSLRKVKSDKADAIKIARYALDKWQNLKQYNVMDELRNQLKTMNRQFGFYMKHKTAMKNNLIGILDQTYPGVNTYFDSPARSDGSQKWVDFASTYWHVDCVRKMSLNAFIVHYQNWCKRKKYNFSQSKAEEIYGKAKELVPVLPKDDITKLIIKQAVNQLNSASTTVESLRTLMNETASKLPEYPIVMAMKGVGASLGPQLMAEIGDVSRFTHKGAITAFAGVDPGVNESGSYEQKSVPTSKRGSSDLRKTLFQVMDVLIKTHPQDDPVYQFLDKKRAQGKPYYVYMTAGANKFLRIYYGQVKEYLSSLPES

SEQ ID NO: 95878 - protein, 316 aa, unidentified
MIVLGIDIAKRKFDCALLLGERFRTKVFENNSSGIELCVNWIARHAGGSVHACIEATGPYAQAVAETLFDAGHRVSLINPARSRAFAQSLGARSKTDAVDARILARLCQALNPEPWMPAPRSVRELQELVRRLDALIQMHTQETNRLGSAHERVRGYIEESIVFLERAIREIKQAINQHIDPHPDLRTQRDLLQSIPGVGVATCAWLIAELNAKRFVCARSAAAFSGLTPAHWLSGALQRKARLSKHGNAQLRKALYWPAITALRCNPIVRALAQRLSARGKHKMVMVAAAMRKLIHIAFGVLKSGKPFNPALAGA

SEQ ID NO: 95879 - protein, 334 aa, unidentified
MKKRYFMGIDMAKATFDFCLLSSAGACLWRGRFCNDARGIERFLAQLRARGWKLSQIHFALEATGVYGKALIAALHRADLAVSVLNPAQVKYFAFSVLRRTKNDRVDAEIIARFCRERKPLATRPLRPIEEQLKVLVHERESRVGEQTRERNRAKKDPFQIELPKLIGRQRQQRLKQLAKEIAQLDAAIDSRIASDECLRTQSQLLCSIPGIAELTAAKLLSELAGKEFQSARQLAAYAGLTPAESRSGCSLYGKTHLSKIGNAFLRKALYLPAAVARRWCKPLKPWIAILESRKLHVLAIRGAIMRKLLHIAFGVLKHQKPFNPLLVSFPKTV

SEQ ID NO: 95880 - protein, 435 aa, unidentified
MEKIRTNVGGIDIGAKKVFTSIEGQPVVSHFTFTEDFYKLRDYLLENNTKSVAMEATGVYWVILHEILEDSGIDVWLVDGRQTKQVPGRKTDVKDCQWIQELHSYGLLNKCLVVDADIKEMRVYLRLREDQIESSSRHINKMQKALTVMNIRLKEVLSQIHGASGIAIIKSILKGERDRQVLLSLCHRSVLKNKKELVLKALEGKYTNAGLFALEQAYDGYKYCQQKVDECDQQLNIVINRIGKSGGGLVLKKSRKVIRHHKPKVTNLGANLLSIFDNKDATLISGITDYTWMQLLAETGPDLTKWPSEKHFTSWLGLSPGQHNSGKMRRNARKKGKPKAGQIFRIIAQGLINSKDIAIGSFGRRLRGRKGPKIAIKAMARKLAVLYWRVMVKGLDYAEKGIRQYEEQLMFNKIKTVNKLAKELNLNITDKQPVT

SEQ ID NO: 95881 - protein, 317 aa, unidentified
MTVVGIDVAKASLAVALRTPTGRVRQKQCPNTPAGHAELLRWLRRHTDGAVHVGLEATGGYQDAVALALHDAGHTVSVLNPAALEAYSRSQLRRAKTDPTDAALIADYVRTQVPPGWSPPPTEMRQLQALVRRLDALLGMRTQERNRLEPAAAIVRPSIEATLTHLEAAITVIKAQIAAHIDQCPTLRQSRDLIVSIPGIGATTAAIILGELLQVTRFASARQLAAFSGLVPHVRHSGTSVRGRGTLSKLGAGRLRKALFFPALVAMRYNPVLRPFAARLRAAGKPPMVIVAAVMRKLVHQIYGILRSGRAYDPAHA

SEQ ID NO: 95882 - protein, 410 aa, unidentified
MEIILRCCAGLDVHKDGVEACVRRIEAGDRLEQEVRHWSTLTRDLQGLAQWLKAQGVTHVAMESTGVYWKPIFNILESEFEVLLVNPKALKHVPGRKTDVQDCQWIAQLLQYGLLKGSFIPPRGQRELRDLTRQRSQVIGEHSRISNRIQKVLEDANIKLGSVASEAIGVSGRLMLRAIIAGENDPQQLAELAKGRLREKIPQLQQALYGKVTEHHRWLLALLWDELVAAETFIARLDQRIEQLTRPQQPVLEKLDAIPGIDRRVAEVVLAEVGTDMRPFPSDGHLASWAGLCPGNNESAGKRKSGKTTKGSRWLRQALVQAAWAASHKKDSYFQAHAQNLMRRRGKKRGLVAVAHSLLLVMYHMLKEGNEYCDLGRDFLDRIRSQHLIRYHVKRLEQLGLTVSLSAEAA

SEQ ID NO: 95883 - protein, 408 aa, unidentified
MEVLHARCAGLDVHKDTVVVCVRLAAGEEVQQETRSFSTTTQGLLTLADWLVASRVTHAAMEATGVYWKPVWHVLESACELVLANAAHVRNMPGRKTDVNDSVWIADLLAHGLVRASFVPPTPVLELRDLTRTRKQLVREIAQHTLRTQKVLEDANIKVASLISDLLGLSGRAILEALADGEADPERLVDMTQGRLKAKRPALIQALQGHLTEHHRFLIRLHLGQIDALQRAVTEIESRLGEVLVPFRWATRLLTTMPGVSDIVAQVLVAEIGMDMGRFPTAGHLVSWAGLCPHMDQSAGKRRSTRVRHGAPWLKTVLVQAAWAGSRKRDSYLRAQFLRLKGRRGAKKAIIAVAASMLTAAYYMLRDGVEYHDLGVDHFDRRDRTKVAHRLIRRLEQLGLRVKIETAA

SEQ ID NO: 95884 - protein, 345 aa, unidentified
MNFIGLDVGKLYCQLCEISETGEIWETRLRTDRDRLRAIFGGRPHARVLLESGTSSEWIARVLEQLGHEVVVADPNYAPMYASRSRRIKTDRRDAHALAEACRLGAYRPAHRTTDPRRHIRALITVREHLVRTRTRWILLTRALLRREGLHPRTGHAESFVARVLELELPPIILAEVEPLLDLLGPLNDQVDNVDAELARLAEQDDAARRLMTMPGVGPVVSLGFVAIVDRIDRFRNAHQLESYLGLVPREWSSSEVQRRGPITKTGNKRMRWLLVQTARAVMRAPTRLTTRPLWEWADRIAARRSNRVAAVALARRIAGILYAMWRDGTDYHLPSRKPAVVPST

SEQ ID NO: 95885 - protein, 372 aa, unidentified
MENVSIFVGLDAHKDSVDIALVEGERNSAVRYYGTIGGDLLDLDKAVRKLKKAHPEASFHFVYEAGPCGYGIYRYLTKAGHECMVVAPSMIPKRSGNRIKTDRRDAIMLASLHRAGELMPVFVPREEDEAMRDLVRARQDAVKAARVAKQQLQGFLLRHGIKFAGKGDWRKSHVTWLAGLTMSIPAQQIVLQEYINTVKDCTERVARLTFQIQEVLPSWELAPVVKALQAMRGVSLQVAVTTVTELGDLKRFDNPRQLMSYLGLVPSEHSSGGSRRTGSITKAGNGHVRKALVEAAQTYRLKARIGKELLARQEGLPKQICDIAWKAQVRLCSRFRKMEARGKKYQTIICAIAREICAFMWAIAREIKPTTA

SEQ ID NO: 95886 - protein, 379 aa, unidentified
MEITTKPQPSADIEHATLFVALELSKAKWLVALYAPDREKISEYTIDGGDAPALLALIEKRCAQAHKKLGRPMRVMSCYEAGYDGFWLHRFVVSKDIDNRVLDAASILVSRRGRRAKTDRLDVAGLLRSLMALARGETQVARVVHVPSVEDEDRRRLSRERRRLIAERVAHVNRIKGLLMLHGVRDFVPTRRNWPQQLSTLECAEGSKLPARIRTEITRECHRLHMVIEMIKQVEAEQAELTEQVPGPAKALMQLKGLGPAISAILSQEVFFRDFANRREIASYLGLAPSPWKSGGIDRDQGISKAGNRHARQAAVELAWLWLRHQPGSALTQWFKVRVGDMCGRIRRITIVALARKLIIALWRYLKHGLVPEGAILKA

SEQ ID NO: 95887 - protein, 331 aa, unidentified
MHYSHYIGVDISKNTLDAAIYAAEMRRSDTKHLTNDKAGLKELVTWAKAAGAKTKGMLICAEHTGVYSNELQLFCEKKGIALCLEGPLQIKRSMGLVRGKDDQIDAIRIAQYAYEHKDKLKLFHRPSGNIITLANLLRERRLYVRQKATLMAQQAEIGSYECATSRNRRESLIDRHAAAVKSVEKQMMEIIKGDKALKKTYDLISSVVGIGPITAIDTIVYTNNFQNFETPRQYASYIGVAPFDHTSGTSVNGRTRVSQFCRKQQKVSITMAARSAIVNDPWMKNYYHRKMKEKGDQRNQHGVVLNAVKFKLVLRMFSVVKSGTPYKVMKY

SEQ ID NO: 95888 - protein, 401 aa, unidentified
MRVVFGIDVSKATSTVAVVVNKNKVAGFEVQNNRSGFDKLLKSLANFQKPEIVFEATGLYSRRLRVFLDDYGYRYTQLNPLASKKQLDRLRPNKSDKNDAFNLAETQFQISRALTYVQAPVYQSLLDWSRFYDQVTVDAVKDKNRLHKALQCTFPEVENLLNAPTGHLYWHLLRQFPISSTVTKLSSTQLSNTIEKLPHVSHQRSIELANRLSQLASESYPCVGEKSAMVEEVCYLATELLRLDTQKTEIINKMAILAQNLPELDILESIPGISINTAVRLIGELGDVRRFKSANKLNAFEGIDLRHFESGEFVAVDHISKRGNPYARKILFRTILNIMTSSRTKPSHINDYIVRKKKQSSGKSSFKKIAIGAIHHLNRTMYHLITTNQKYEYPRAQPKLR

SEQ ID NO: 95889 - protein, 344 aa, unidentified
MTKYAALDVSMEQTAICVVDENGRKVAEGKVPTDPDAIKEWLTVKAGEMERIGMETGPLAVWLWNELTKGGLPIVCLDARHASAALMMMPNKTDRHDAAGLAQIVRTGWFKEVRIKSHGAYVVRALLSARDLLVGLRGKIENEIRGLLKTFGIMFGKKVGGFAHRAEEIVSGELAAAPEIKAIVEAMMEARRSISERIKVLDARVRAAAKQNTMARLFMTAPGVGAVIALSVASTYDDASRFRRSSSAGAYLGLTPRRYESGEVSRNGHVSKRGDKLTRTHLYEAANVILTRQIGFSSLKAWGLRIAKSGGFKKAKVAVARKLAVILHAMWKTNEPFRHAAAAA

SEQ ID NO: 95890 - protein, 361 aa, unidentified
MQSTTIIAFDQHAATTVAAVLVPSQRTPALQSMTSDTATIVRFVERLRRQGAVRCCYEAGPCGFELQRALTAHEVPCDVIAPALIPRRAGDRVKTDRRDAAQLAILYRAGALTPIHIPTDQEEAARDLLRCREDIRADLLRARHRLSKFLLRHGRRFTGTKKAWSKAHDVWLRAQRWPLAALDQTHAAYLRTVDEAVARLRHVEDDLRGLLELEPLRPRVQRLRCFRGIDDLTALTIAAELGDPRRFPSAPRAMAFVGLVPSEHSSGTKRARGAITKTGNAHLRRVLVEAAWHYRHRPFVGAALRRRQRGAPAAIIAQAWTAQQRLHRRYHRLAGRGKVTPLVTTAIARELTGFVWAALIQ

SEQ ID NO: 95891 - protein, 353 aa, unidentified
MAHLEPARVTVGVDTHKHLHVAAARDQLGRRLGVTIAPATTAGYGELLAWARGLGEVQAWGVEGTGSYGAGLVRFLAAAGQRVLEVNRPDRATRRRRGKSDPVDADAAARTVQAGEANGIPKAQNGTVEMTRALRVARQTAVKARTQAINAIKALLVNAPAELREQLDGLPTTRLVRQAAMLDPGEVATPTAACMLAVRSLAERYQHLGAEIQLLTRELDRLTLQHAPALRALLGIGPEVAAELLVCAGDNPARLGSEAAFAALCGTSPVEASSGKTRRHRLNRGGDRHANAALHRIVIVRLRWHQPTRDYVARRTAQGKTKKEILRCLKRYVAREVFAVLRQLAQQDQPTAA

SEQ ID NO: 95892 - protein, 311 aa, unidentified
MKQSVVYIGIDVAKAHLDVAWGGASRRFANDQKGRAALINWIKQSSDPSAVQLICEASGGYEQALLESLKQNNLKATLVQAMRVRQYARAAGILAKTDKIDAKVLAAFGSAMQPKPTQPPSAEQKRLRELEAQRRHLSRVLLGEENRLGQMSCAELRSLNRSLINKINKQIALLDARIECLIAQDRTLCAKAQKLTAISGVGARTAALLLAQMPELGRLNRRQAAALAGLAPFNHDSGSIRGKRAIFGGRPALRSGLYMAALSAARYNPILSNFYRRLRVKGKPHKLALTAVMRKLLLALNSTLKPIARPP

SEQ ID NO: 95893 - protein, 349 aa, unidentified
MNRTTYGLDIAKGVMQLHWVEIETGEIGRKKLARAKLVEYFARLQPVRIAMEACGSAQHWARVLGALGHQVELLPAGQVRAFVRSNKDDAADARAIWLAAQQSDIRRVPIKSVEQQGAMALHRTRQHWVGVRTATVNALRGLLYEFGVVLPGGKQAGLNALGTHRAQIDAKVPDTMRRLIDGQLDTLKDIARRIDQLEAELAARQSQSDQATKLREVPGIGLLGATALAATLGDGSGWKSGREFSASLGIVPAHSGTGGKARVGHLSKRGDPYLRTLLIHGARAVITHAKDKPLWLEQLLARRPLNVAVVALANKMARTAWALVAHGREYQREWKNTAPRSCAAQAAAA

SEQ ID NO: 95894 - protein, 334 aa, unidentified
MSLELLAIDLGKRSFHLYGIDTDGVILSQKVSRAKLADLVGNLAPTAIAMEACASAHYWARCWLAAGREVRLINPRFVKPFVKGSKNDAVDAEAIFEAAMRPTMRFVPVKSTDQQDLQSLHRARDRLICQRTAVINHTRGLLAEYGVVLPQGPWRFMAQAPTAIAGADLSDLARAIFGELMGQLDDLDRRIQKLDAMIVTLCRTNETCRRLAKLPGVGPIIATAIVGSVNDGRQFRSGREMAAWIGLVPRQYTTGGKPRLGGIGRRANHYLRRQLIHGARAIVSRSAKHDDRQSTWLKALIARRGFNRTTVALANKTARIAWVLLSRKQEYAAP

SEQ ID NO: 95895 - protein, 351 aa, unidentified
MSLVMLGVDPHKQSHTATALATGSHQQLATLRVPASPSGYRQLLKWARQFPQRRWAIENARGLGCHLTQWLLIRGETVQDVRTTATARVRELSRGRGRKTDALDAAAAAGIAALQGDAAQLQPEDATVVLAVLEERRSNLVGQRTRSVNQLHAVLRELIPGGAPRKLRADRAAALLRGLRPMTAADRARKQVAWDLVAEVRGLDRRLAMIGQRIQDTVAALGSRLPETVGVGPVIAGRLLGRTGRASRFPTAAHFASYTGAAPVEVASGERARHRLSRAGDRQLNHALHIIALVQVGTPGCPGYHYFRRKLAEGKTTREAMRCLKRRIADHVWRVMLSDEQARNHRQPQAA

SEQ ID NO: 95896 - protein, 399 aa, unidentified
MFHVGLDVHLRKIVMCILDAYGKVYKEASFSDVKALLAVLGALPQELAVCYEASCGYGALYDRLKRLTNVRRIEVAHPGQLRLIFRSKRKNDRVDARKLAMLLFLDQVPQVHVPVQDVRDWRAAIEFRRAQVDRRTAIKNQLRALLRTHGEAGPYRKALWTKSGRAWLEAFELPTPLARLQRTVLLSELDGVGGQIQALEKELNAIGRKHAGVCLLRTIPGVGPRTSEAFVAYVDEVKRFGRSKQVGSYFGLVPSQDQSGASNRLGHITRQGPATVRKLLTEAAWQGVQRSPEIRARFERIAAKDAGRRKIALVATAHWLVRVMFSMLRSGETSRFTRFEKPESGKKRKAKEPKTTAVSPPAASQTAASPPAASQTAASQTAASQTAASQPAASQPAAA

SEQ ID NO: 95897 - protein, 349 aa, unidentified
MSHKLNSAIAVIGMDIGKNSLHVVGQDKRGAIMLRQKWSRGQLETRLANLPPCLIGMEACVGAHHLSRKLRMLGHDARLMPAKYVRPYSKGQKNDFRDAEAIAEAVQRPTMKFVATKTAEQLDLQALHRVRERLVSQRTGIINQIRAFLLERGVAVRQGLRFLRAELPRILATPGDLLSPRMVRVIEDLAGDWRRLDERIEGLSSEIEVLARRDVGCERLMSVPGIGPIISSAMVAAIGTGDAFTKGRDFAAWLGLVPKQISTGDRTILGKISKRGNRYLRVLFVQAAWVVLIKPKSWQRHGLKPWLEAAKKRLHHNVLAIALANKLARIAWSVLAHGRAFEASKIQVA

SEQ ID NO: 95898 - protein, 357 aa, unidentified
MTHSTATVSRITVGLDVGDRRTHFCTIDGDRRVLSRGSLPTTKGGLDEALRPYRGAKLVLEAGSQSPWMSRVLRAQGHEVQVADPRRVQLISQDPRKTDRRDAEMLAKMGAAMPELLGDVHHRGELAQSHLSIVRARDLVVRMRTMAVQQVRSLCKAFGIRLPSSTTGCFSERVVELIPATLRAAVDPILEMIGRFSACVRAFGKTLAEVAEQHYPEVQHLQQVDGVGPVISVAFVLSVEDPKRFSSSRRVGSWLGLCPRSQASGDSNPQLRISKAGDGRLRRLLVQGAQQLLGPFGADCDLRRYGLKLAARGGKAAKKRAAIAVARKLAVLLHRLWVSGANYEPLRNAKGLPATVS

SEQ ID NO: 95899 - protein, 355 aa, unidentified
MTEEKYIGMDVHAATISVAVKNAQGKLLMECVLETKAATILEFIQGLRGTLALTFEEGIMAAWLHDLLKPHVSRLVVCDPRKNALLRDGNQNDRVDARNLAELLRTHQVHAVYHGQHGTRALKELGRSYLTLTKDSTRVMNRIKSVYRSWAIPCAGTSVYSRRHRAEWLAKLVEPGVRIRAEHLYQQLDSLEPVRQAARRELLRESRKHAAVKLLRQIPAIGPIRSALLVAILQTPHRFRTKRQLWAYSGFAVQTYDSGEYRVVRGKLQRNRERITVRGLNRNHNHDLKNLLKGAAISAIERPGPLQDFYAARVEKGMRPSLARLTLARKIAAITLIIWKKGVSFDPKQLQRQAA

SEQ ID NO: 95900 - protein, 394 aa, unidentified
MQRERNQGKGRIIGMDIHPECFSASGLENTNAKTAQELFMHHQVLMENLERWISKNKQPGDLYVMEAGSNSFDTSERLKKHGCNVVVLESFRAGQIGKSYLKDDKVDARKIARIYLSGLAHEVWQPDEITRERREVLASYNKAKTDSTRCRNRIWGWCTGHGVKRPKGLKLTSAKGLEWLLTSREWSHRQKMIIESMHDDLLHACVKRKELQKLMAIEIAEDPEMLKLQQLCGLRLVVIYALFAIIGDISRFRNPKKLVAYIGLQPSVNTSGISVKGGPLKHTGRKDLRSLLVQSAHAIIRMGSAKNPMATWGRALKYRKGGNIAVIAVARKLVTYVWYLLRGFFTPLHEISNSFNRKLQILATNIGTEDRRAMGYESVKVFIKEKRKILLAES

SEQ ID NO: 95901 - protein, 356 aa, unidentified
MVMIGTDSHKRTHTMVALDEVGRRLGTKTVSTNAEGHLALVEWSAQFADHDEHGVRFALEDCRHLTRRLESDLLAAGQRVLRVPTRLMAGARRSSREPGKSDPIDAEAVALAALRHADLPAAELDGPAREVKLLSDHRHDLVVQRSRIAQQVRWHLHELNPDLMIPSRGLRRQNVVRELLAELDRFDGVVARLARRHLLRCQELTTQINNLERELRDLVRQLAPSLLEIPGCGVLSAAVIVGETAGVHRFRDKSAYARFTGTAPVPVWSGSSAGKVRLNRGGNRSVNCALHMIAVTQARGVGPGRPYLDKQLARGKDRVAALRLLRRRLSDVVFTALRADLRASQRTVSAPLQLAA

SEQ ID NO: 95902 - protein, 341 aa, unidentified
MKKFIRIGVDLAKNYFQVHALESENGRAVTRKLKRSKMHEFFSQIEPCLIGMEACGSAHYWGRELKAMGHEVLLMPPAYTKPYVKRGKNDAVDADAICEAMSRPGMRFVPIKSPEQQAMLMLHKTRELLTKQRTMSVNALRGHLSEFGIVAAKGIGRVDELLDLADSDATLPVAAKAGVNVLAQALEGLDTAINALENEIANADAQNEMVRLLDKVPGVGKLIASVIAVSVPDPSVFKSGRDFAAWLGLTPRQNSSGGKQTLGSITKQGNRYIRKMLVLGATSLLNIVGKRKGALHDWIVGLLAKKPARLVTVALANKLARILWAMMKTGECFRTEMFAKA

SEQ ID NO: 95903 - protein, 387 aa, unidentified
MPQQLDDLRRSLTPLEQDSTIVAVIEMSQASWLVAGIVPGIERHPLKKLEPSEVELLRLLMRWRAEATQNGRTITRIAVAFEAGRDGFWLARWLRARGIEAYVIHPTSVAVSREHRRAKTDRLDTGLLKRVFLGWLRGEPDHCHMVAIPTLAEEDAKRPNREREGLVRERTRLVNRVKSCLVRFGVRTFKPTLRNAPDRLATLRTPEGVPLPPNTLLELRRDMARLRFVMDQIKEVEEARAQGLNQAPPDKTHVMVRLLARVIGIGLETADMLVQEVLARTWRDRRAVARYAGLTGSPDESGSRRREKGLAKAGNARVRRGMIQLAWRFLLFQKESALAQWYRARTADARGSTRKTLIVALARKLLIALWRMVTTGEVPAGVVLRAA

SEQ ID NO: 95904 - protein, 336 aa, unidentified
MDTHADLHVAAALDPLGGLLGVREFPATATGYAQLLGWLDGFGPISLVGVEGTGSYGAGLARHLAAAGIRVVEAGRADRQDRHRQGKYDPLDAVSAARAAQSGRASGAPKGRDGAVEAIRALMVAKRSARAERTQAINQARALIVTGPDELRARFAGHTPAQLVEAIAALRPRPGDVPGYATRVALRELGRRAQFLDAQLDRLDELIGPLVTARAPGLLRLHGVGPDTAALLLIAAGDHPERLRSESSWAHLCGVAPIPASSGKVSRHRLNRGGDRQANHALWRIVITRLGSRPGHPATRAYVERRTKEGLSKKEIIRCLKRYVAREVYHQLRTGS

SEQ ID NO: 95905 - protein, 323 aa, unidentified
MNETETEIAHAGIDVAKDSLEVIVSTPRRVLARWQITNDEAGVEQCVVQMQVIAPAPALIVLEATGGLETLIAYRLQTAGFAVAVVNPRQVRAFAQATGVLAKTDALDAGVLAEFGRTINPPVRALPDEKLQAFGALLARRRQLLDMRVAELNRIKQACAQLRPGIQRHIDWLTTEIERTDDELRKIVIDVPDWRDKDTLLQSAKGIGDITSMTLLAELPELGTLTRKQVAALAGVAPFNADSGKHTGKRRCWGGRATLRSALYMATLSAIRHNPTIRDFYNRKRTEGKLKMVAFVAAMRKLLVTLNAMLRDHTTWHVASLTP

SEQ ID NO: 95906 - protein, 387 aa, unidentified
MSATASGVAQAAIDVTLSAIFVSLELSRSSWVITSLSPGKGEKMSKHSLDSSDVKGLLDHFAKLRAKAQARTGQTFPVVAIYEAGLDGFWIHRVLEREGIESHVVDAASVLTSRRRRKAKTDRIDGEALLRTLLAYKRGEPRVCAMVRPPSPDEEDRRRLCRERKTLVCERVAHVNRIKGLLFAQGISDYEPCRRDRRERLEQLATGDGRPLPAHLKAQLSRELDRLELTLQQLKAVEAERDALLAPKGEAAPAPVAALAGLRGIGPEFAAVLWLECFFRSFSNRRQVAAYAGLAPTPWQSGSVDHEQGVAQSGNPKLRSTMVQLAWLWLQHQPTSALSRWFKERVKQNGGRGKKAAIVALARKLLVALWKFVSSGVVIEGAVMKAA

SEQ ID NO: 95907 - protein, 355 aa, unidentified
MKYYTSTTEFNCGIDLHARQMYVCVMDRQGKKLVHTNIKNNDFSFFLKLIQPYRHDLTICCECMFGWYWLSDACQAAGLTFVLAHALYLRAIHGGKNKNDRIDSEKITHLLRSNLIPPAFVYPADKRPLRALLRQRLFFVWNRSELLARINSHQLAHNRVPPKQSRSNRDPWETALLVAEDHPIRQIALKNDLAMIRHYDHQITQLEEELKRLTRKTLARDYSLLQTVPGIGENLGLTILCEIGDIERFPTVKNFLSYCRLVKGTVASAGKIKGLRGGKLGNPYLRWAFGEAAVIAKRDHHIIGPLAQSLEARMGGNKFKANTVVAIKLARGVFFMLKNKTVFDPDRLVKSLSKV

SEQ ID NO: 95908 - protein, 454 aa, unidentified
MAQRNRAVIPKPGKSRAAALTITHPNAAGIDIGSAFHFVAVPPDRDDQPVREFASFTLDLNAIADWLTACGVDTVAMESTGVYWIPLFELLESRGFTVFLVNARHVKNVSGRKSDVLDCQWLQQLMTYGLLRGAFRPAEQVCVLRALYRQRGMLLRSQGRHVQHMQKALTQMNIQLTNVLSDVVGESGQKILRAIVAGERDGQVLGAMKNVRVRASVDEIAKSLQGNWRAEHLFALKQALGAFDFVGTQLAECDAEIELQLQCLQVHDGEPAKGKKRGRARNAPKFDLRTQLFRMCGVDLTRIDGVDVTTALAVVSEVGADMARFPTIKHFTSWLGLCPGTKITGGKVMSGKTKRVVNRAAQALRLAAAALRSSKSALGAYFRRMCSRMDKPKAVTAAAHKIARLIYTMLTKGQEYTDQGQEYYEERYRERVLRALSQRAAKLGMQMVPIAQPA

SEQ ID NO: 95909 - protein, 345 aa, unidentified
MQPMYYIGLDVHKQKISYCVKDVGGKIYAEGWIPATRFDLDRWMKTLPQPWSAALEATMFSGWIYDHLKPHAAELKVAHPLMLRAIAAAKKKNDRIDANKICDCLRCDFLPECYMAPTAIRERRRTLRYRNLLVRQMVQMKIKISTLLMEAGVSYNKQKLHKAGYFRELLASNPDIDESLRSLLRQCREMVVRLGKMETALIHSLQQDPLLVERVERLMSIPAIGPITALTWALEIGEVQRFSSIKKAISYCGLCGDEQRSANSVQRTPISKQRNKHLQTTLIEAAKMAPRYSPTLAQLYDREMQKGNANRATLAVARKLVAYLMAVDRGQTRFLVIDQETRTAA

SEQ ID NO: 95910 - protein, 312 aa, unidentified
MADMVRLAGIDVSKDKLDVYVTPSGESRTVGYDRRGLAGLRRWLVGLGVALVAVEASGGYEREVSEVLEEAGLIVHRLNPLRVRRFAQLKGRLAKTDRLDARTIAEFARTWPQEHQLRRDPRRERLAEHLLVRRHTQDAILDCINQLEHLRDGRLRRLVMARKASMERTLARLDRCLVELIAEHDDLAELSQRLRSVPAVGPVLATTLIALLPELGSLTRRQVASLVGVAPFDRSSGRQIGAKSIQAGRGLVRNALYMAALVASRHNPAIAAFAERLAGKPGKVRLVACMRKLIVTLNAMVRDGSQWQPCTA

SEQ ID NO: 95911 - protein, 342 aa, unidentified
MRAVGIDSHKATLAACAVDEVGQPLAEAAFANGPAGFGELLGWLRGLGGVARVGIEGSAGYGAAAARYLLAAGEAAVEVPPQLSHRERRRSRRAGKSDPGDALAIARVTLREAGLPPVRLADASRELQLLVEAREDLVAEATRVRNRLHADLVVLVPGYGDAAANLVAERHRRTAGRLLRGVPGVQAELARDRLARLARLTVEARSLERRIEALVEGHPLRSLPGAGALVTAKLVGEAGDVARFRSADAFAMLAGVAPIPASSGQVQRMRLNRGGNRQINRALHGIALAQARTHPPAQAFIARKRAEGKTWREALRALKRHIARVVFRLLSGPGRNPLQAGA

SEQ ID NO: 95912 - protein, 323 aa, unidentified
MSEITTVGIDLAKNVCSVHGVDGHGKTVLRKTLSRAKLIELLAQLPACRVGMEACSGAHALARTLQTLGHDARIMAPKFIVPYRKNQKNDGNDAEAICEAVGRPNMRFVPIKSAEQQAVLVVHRVRSELVQSRGGLINQVRGLLTEFGIVMPQGRFSFRHNVGVALDDARLPGLARQILHEVNQRIRVLDEDILSYDRRIEAMVRDSVLMRRIVAVCGVGPITASAIVASVGDAKLFKNGRQFAAWLGLVPRQYSTGGKAILGRITKRGDVYLRTLLIHGARSALITLARRTDRLSRWAAALTERRGFKRACVAMAAKNARII

SEQ ID NO: 95913 - protein, 479 aa, unidentified
MAVTHPSRLNRKQRKELGRRLQSTDPGLDVVHPNAAGIDVGNSTHYVAVRPERDPEPVRRFDCFTADLHRLADWLQQCGVTTVAMQSTGVYWIPLYEILDARGLDVYLVNARHTKNLPGRKTDVQESQWLLKLHTYGLLRNSFHPTAEIRITRTYWRQRGDHVRAISTCIQRMQKALTQMNIQLANVISDLSGWTGMRIVRAILGGERDPHALAALSHPGIHATREAIAKSLEGTWQPDLVFVLQQEVALYDAYQQRIAECDRALQDHLKGFADQTPDRLAAGDEPSVTPRPRRRAGPKRRRKAGSHAPQFDLGRELSRISGVDLTRIDGIDVSVAQTLISEVGLDMTRWPDEHHFASWLGLCPNNRITGGKVIRRGTRPVINRAATALRIAATTLLRSQSYLGAQYRRFRSKLGAPKAIIAMAHKLAVLMYRMLRWGHAYVDKGLQYYEDRHRQQQLRFLQKKAATLGLLLVEPCSVD

SEQ ID NO: 95914 - protein, 346 aa, unidentified
MAIAGAFDLHRRQITFDFIDTETGQVQRGRISPATRVVLRDWLGQFDGRSDVTFAVEGCTGWRFVVEELQAAGITPLLAEPAETAHQRGPKKRAKTDKADARHLRELVTDGRVPVSWIPPQQVNELRALLQLYRDLMQERMAWMQRIHATLFHQGVPGLASRLADPRVRAALHDGGGLSLAGAQAVEIALGRIDDLDAQITPLRRQIAVIARRQPGCAALHDELFGVGTLVAVIIWAFLGDARRFSSSAQAVRFTGLDVTVRASDTKRPPGKLSGQGPPILRWALFEAAHHASRAASPDHDYYSRVAARIDANRAALSVARKLARRSHHILRRLGDQAWEPVPLTR

SEQ ID NO: 95915 - protein, 389 aa, unidentified
MLHDHPSVGPTAILTQFGAIFVSLELSRSKWVVTSLSPGNGEKMSQYSLTAGDSSGLLARFADLKRKAQERTGSDYPIVTIHEAGLDGFWVHRVLQNEGIESHVVDAASIATSRRRRRAKTDKIDGEALLRALLAFKRGEPRVCAMVVAPSPEEEDRRRLCRERQTLIAERIIHVNRIKGLLFAQGVSDYAPLRRNRRKRLEGLRTGDGRPLPVHLKTQISRELDRLELLLDQIHSVEAEQEALLAAESKAAPEGEPRNAVAMLLSVKGIGEHSAAILWSEGLCRQFSNRRQVAAYAGLAATPWRSGAVMHEQGLSKAGNPQLRTTMVQLAWLWLRHQPQSELAKWFRARGERGRKGSIAALARKLLVALWKYVTHGVLIEGAVMKPAA

SEQ ID NO: 95916 - protein, 309 aa, unidentified
MEIVVGIDVSKERLDVAILPQEEVFAVGNDHAGIDELAERLKGIGVDAIALEATGGFEMLAVAGLSAAGLTVLVVNPAQVRAYAHAIGRRAKTDPIDAAVIAAFVLATKPEIRPLRDAETQALSELVARRRQIVQMIVAEENRLRMALAKQAQKSIKRLLTALRRELESLDADLDSHIRKSPVWRVREALLTSVPGVGPTTARTLLAELPELGSLDRRQIASLAGLAPWTRQSGKWKGKSFIGGGRSKVRAVLFMAALVASRYNPDVKAFRDRLVAAGKPKIVATVATMRKLLTILNAIIRDGRPWQNA

SEQ ID NO: 95917 - protein, 365 aa, unidentified
MASVAHLAPIHLGLDVHRDTISVGILGPGEEVPAVDKIAHDEPSVRRLVGRLGDRRRLRACYEAGPTGFELARLLHSMGVSCQVIAPSLIPKAPGDRVKTDKRDCRRLARLYRASELVAIRIPTPTEEAVRDLCRTRGDMVEDRMRARHRLSKFLLRHGQVWRAGKAWTLAHERWLVTQHFTEPALQTTYDHYRAVLASRDAQLEAIQADLAIWQDRAPFAEQVARLAAYRGVTRLGALHLAAEVGDWRRFARASAFMGFCGLVPSEYSSGQTTHRGHITKAGNVHLRTQLVESAWAYQHRPSVGARLASRQQGLDPQVVARAWAAQLRLCGRFRRLAARKPSTNIAAAAIARELAGFLWAEMTA

SEQ ID NO: 95918 - protein, 337 aa, unidentified
MSYLGVDLHTNSFTVCRRTKEGKSSIRTFQIGRIADFRKTLRKRDLLAVEATGNTAWFVSQVTDRVKKVTVVNPFHFEVIRRSVKKTDKNDSKTLALFLSKDMLPEARMKTKENAQLHSLAITRDKLVKQRTALINKIHNVLNSYGIKFKKESLGSEKGLKSVWAYKWDEIVRIELEALVEQIRSLNKSIKTLDKEMTDHGQKLKGHKSLTSIKGIAGRSATVLLTVIGNVNDFADENKLAAYFGIVPRVSDSNETVRHGRITKHGSKLGRTTLVQCTLVAKRYSPYLRGYYERIKNHRGSGKAIIATARKFLGIIYNTLKNGWIFEDFPNFVLVNS

SEQ ID NO: 95919 - protein, 353 aa, unidentified
MEFTMIARPDAACFVGIDLHKDTLTACVLRGRDREVSYVKLACKCRDQIRSFFASLPQPSAVAIETVGFYRWLWTELEPLAGQLVLCDARGARALAGRRIKTDREDALNVALLLADGRLPLAWAPPENVQLLRNWTRHRNGLTRQHAKVLHHVKSTLNRLNFPGPVRLDAAALQRYLLAGVERFSTDDLTMLWQHQRRLIEIEQDRAQSERRLSELMRAPELSRLRTILESVPGVGLVTSATVIAEIGDFSRFADSKAIGRYAGLAPTVYASGNSSRLGHISKTGAPDLRWVLQQAAWTAIRCDAGFKKTWLRIAKTAGKKAAAVAIARKILVLMWTLQRKDEPYKSRDPVAA

SEQ ID NO: 95920 - protein, 317 aa, unidentified
MDTGSAYVGIDVSKRHLDIAVRPGGACWTTETDQASLRTLARRLAKLAPERIVLEATGKYERPLVAVLAAAALPVVVINPRQAHQFGRASGRLAKTDRIDAAVLAHFAEAMHPEVRPIPDAAAQALDELAGRRQQLVAMVVAEENRLDTVSPATARRIKAHVRWLQQELRAVEDALDEAIRTNPVWHARDRLLQSVPGIGPTTARVLIARLAELGTLGGKQIGALVGAAPLNRDSGVMRGKRRVWGGRAAVRQALYMAVLSAARFNPVIRAFYQRLRAAGKPHKVAAIACVRKLLVILNAMLRDQRAWSPREVPMAA

SEQ ID NO: 95921 - protein, 412 aa, unidentified
MTEESFTWFVGVDWGSEKHHACILDTRGTVVGERQFPHSGVGLAELGDWLLSIAGTTATVAVAIEVPHGPVVDSLIDRGFVVYAINPKQLDRLRDRFSVAGAKDDRRDAYVLGDGIRTDRRLFRRLHVADPRIVELRAWSRLTEELQEERVRLGNRVQQQLWRYYPQMQKITNDLAAPWFLELWAMAPTPGKARQLRKSTVEQILKKHRIRRIDADTVLRMLREPAIKVAEGIAEAASIHLRSLIDRLHVVNRELRQAEQKLDQLCAGIGETEGAPGECLQGQDIKILKSVPGIGRINLATLVCEASGPLRSRDYPALRTLCGAAPVTKRSGKSQIVVMRYAAHARLRETVYHWARTATQHDAKSRCRYAALRQRGHSHGRALRGVAGRLLGLTCVLLQRQTMFDPHFGQAG

SEQ ID NO: 95922 - protein, 362 aa, unidentified
MFRPHTLYIRIRIVRKVHEPVFAMRDQDVSDVIKTKNRTAMQYIGIDVSKATFVVAYSSDKGGEIRTFNNTTAGIKQFIGTLPKDGSIHCVMEATGNYSALLLYMLNVAGITVSMENPLKVKNFARAMLSTVKTDKIDARLIALYGEKMNPQPFKVQGEAILRLRQKRTVIRQLTKQITAMSNLRGSLACLPVPDKGATHTVDETIKFLEKRRDRLQSELTDLVEVEFSRQLALLTTIKGIGITLATALILTTGGFTYFQNAKQVSRYLGICPTYEQSGTSVNIRGHINRNGDAYTRGLLYIAAWPASRFNAQCKETYTRLRQNGKSGKLAMIAVANKLVRQAFAVVAHDKEYVDGFVSNRP

SEQ ID NO: 95923 - protein, 336 aa, unidentified
MFQLGIDVSKNTLDLCLLREGVKGRVKTRRIKNDVNAASTVITWLGKQQCAPADVHIIMEATGIYHESLAYGLYRAGAKVSLANPHRSREFARGMDILTKNDQVDAYMLACYGALKVPEPWVPPPESVRYLCALLRRRDALVTDRSREKNRLEKCRATDIPPAIAESIENVLRNLSAEIEHLDELILTHLDQHPELKKDFDLLTSIKSVGFQLGLNMLVILRSHNFDTAEQVAAFLGVVPVERSSGTSVRNKPKLSKNGPPEIRAKLYLSSMCGLRFNPAMKAIYERLCLSGKAKMCAIGALMRKLVHWCYGVLKTQKPFDAEYLSSDARSACKAA

SEQ ID NO: 95924 - protein, 462 aa, unidentified
MARKTKHVKDKGKRAPRSLKIIQTNAAGIDLGSREHWVCGPPGDDGTPNVERFGTTTPELCRLADWLKKQGVETVAMESTGVYWIPLYEILDSRGFEVILVNARHIRNVPGRKTDMIDCQWIQLLHACGLLRGSFRPSDDICRLRALIRERNTMVEQRSDWVRRMQKSLDQMNVCVHHAVSDITGLTGMAIIRAIIDGERNPHALARLRDSRCRKSETQIAEELTGNWRPEHLFNLRQALQVYDRICSVVGEYDSEILTYLAALQPEDATSAPSHPSKSKAKNLTKRGQEPLRQALYRFSGFDLTAIDGIGVDTASVIVSELGLDFTMFPDERHFVSYLRLAPNLSISAGKKVPSKFKATTCTRVSTALRMAALTLRNSKSALGGFYRRMAWRKGASVAVFATARKLAQLIYRLVCYGQAYVDTGAEAYEARFNQRRLKFYTKSLNLMGYTVEPLSQNTVAV

SEQ ID NO: 95925 - protein, 349 aa, unidentified
MGIIGGLDVHRSQITYDWIDTDSGQRQRGRLAPAHREHLRVWLGQFAGQEAAFALEGCTGWRYVVEELQRAGITAHLAEPADTSAARGPKRRAKTDQADARHLRELLAAGRLPQSWIPPPHVLEVPTLVRCYKALTDEHTAWLQRIHATLFHHGVPAQRNLLAPDRRERLERGSGLSPAAHQLVTVALGTLDHLDAERDRLRAELVGVARRQPGCRALDALYGIGPLTAVAIWAELGDVGRFTSSRQAVRHTGLDVTVYSSDGKRTPGHLARQGPPVLRWALFEAAKCAARAASPDHAYYLQVKGRLGGNRATLAVARKLARRCYHTLGTLGDQAYAPPSDSPDLGQVA

SEQ ID NO: 95926 - protein, 479 aa, unidentified
MKTGGWSSWLRRVLLVAALAAVIFGNWTPFGAAAAAFVVAMTSGVGVAPGMAVKKAMRRSPTSNAAPTSKSPPDAPAVASIAPRRRPGERLHEKAALRLRGTLARRILRYHTTPGSKPMTGGRLMTQTTTTSTTTPAPAWTVGLDVGDRVTHVCVLDASGAVVEQARLATTPTAMAQRFAGRPRQRVVLETGTHAPWLARQLRAAGHEVLVANARRVRLISENVAKRDAVDAETLARLGRLDPQLLAPVASRTEATQVQLAQVRARDALVRTRTLLINHVRGAVKSLGGRCPRASAESFARHAAPALPAALDAVLTPVLTEIQALTTAIRTAEAALAPLAEAQPATARLQQVPGVGLLTALTYVLVLEDPMRFRSGRHVGAYLGLTPGRAQSGARDPQQRITKQGDRLLRRLLVGSAQYVLGPFGPDTALRRWGLTLAVRGGRSAKKRAVVAVARKLAALLHTLWTTGAPYVPLPATAA

SEQ ID NO: 95927 - protein, 308 aa, unidentified
MFIGVDVSKATLDVAGDPTGPPQVANDEAGIARLVGRWRTAAPALIVVEASGGYESAVVSACALVALPIVVVNPRQVRDFARALGRLAKTDAIDAATLALFGERVRPEVRALPDAAVQDLRALVQRRRQLVEMLGAERQRHQQATVRRVVHSLARHIAWLERQLGDVDDALRRQIEASPLWRTQDNLLQSVPGIGPITALTLLTDLPELGRLTRRQIAALVGLAPFNRDSGQWRGRRTIGGGRANIRALLYMATLTAVRHNAVLRAFHRRLRDAGKPTKVALVATMRKLLTIINAMVAHQQPWRPAAA

SEQ ID NO: 95928 - protein, 430 aa, unidentified
MKSQTDRNLGTITTATLIVGVDVAKSLQWARFVDYRGMEIGKALSFNTNKKGFESIVAKIEEICNKNVLRQPFNKVIIGMEPTGHYWKTLANYLMKRGYHVVGVNPFHTKKAKELDDNSPTKSDKKDALTIARLIKNGSFFDPYLPEDVYAELRALTNARISLLRRNSAVKNTITAILDEYFPEITTVFKDPIKGKASRQILKDCPFPQEILGLREDGVLVVIRKAVKKTVGMKKVRELIDVAKDSVGVDYGLNASKIRLRYLLDELEVIEKRLLDVEASMSEMLEATEYGDQILSIKGIGVVTASMFLGETGNPLRFSNARQIERYAGYNLVEDSSGKSKSGTVISKRGRKQLRSVLYLMAYTMVGQNAEMKELYNYLKTRKVNPLKKKQALVVISKKIITIIYSLIKKRERYNPAIVFGSVRRELMAA

SEQ ID NO: 95929 - protein, 371 aa, unidentified
MQDTIFVGMDVHKATISVAVADGARGGEVRQLGNFLNRSDHVDKLVQRLSKTDGRRLRFCYEAGPCGYGLHRQITDLGHECVVVAPSLIPMKAGDRIKTDRRDAVMLAKLHRAGELTAVWVPDAAHEAMRDLIRARATAVRVLGKARQHLQGFLLRHGRVYAGKKGWTLPYRRWLTTLRFDHPAQQVVLQDYIHSVHDAEERIGRLMKQIEDLVPTWSMAPVVEAFQAMRGVAFVAAVTVAAEVGDFIRFDNPPQVMAYLGLTPSEHSSGTAIRRGGITKAGNALARRVLIEGAWTYRMQARVSRKLHDRLEGLPQIVRDIAWKAQVRLCARYRRLAATGKPKVVVTTAIAREMVGFLWAIARQAQAGSTA

SEQ ID NO: 95930 - protein, 407 aa, unidentified
MLFVGDDWAQDHHDVYLMDEAGARLAARRLPEGLAGIGQLHELIANHAEDPAEVIIGIETDRGLWVGALAAGGYQVYAINPMAVARYRDRHRVSGAKSDGADAKLLADLVRTDRHNHRALDGDSPQAEAVKVLARAHQSLIWTRARQASMLRSALREYYPAALRAFPNLGDRDRDRDALAVLGRAPTPEQGARLSLSKIAAALKAGGRKRNIDERAREIQAMMRSEHLGAPETLTAAFAATTRATVNILLELTDQISDLETTLADHFEKHPDADIYRSLPGLGVILGARVLGEFGDDPNRFTNAKCRKNYAGTSPLTIASGKKKAVLARHVRNPHLYDALDRWAFATLLCSPGARSYYDQHRANGDTHHQALRALANRLVGILHGCLRHHALYDEHTAWDHRIPTAA

SEQ ID NO: 95931 - protein, 482 aa, unidentified
MKKKNIFQNQSQEILTLFEIAKDRSKVMCVPMDYAKKDHMVMFCNGNGKIIRKPFSIKNSLDGKHYLLDQVTKSCRHHGINLQHVLFGGEDCGSYADNFITALRSDNWLVAGVNAHDAKTYRENMQASTDCLDLLGISKMLLNCRGNCSPAQSGVYLDLRMLVQQRRKLVNMTTGVKNRIHTIVDRIFPGFLDENKSGIAPFSKCSLLLMEDRFSAPQIHRRRGPTLTKLLSRQGVQKPDHCVEKLQKLAAQSLRPPEQHIATLQISLKQQIKLFTCLQESIQQLYEEIAHHLAQTQGAFLTSIQGIGIVLAAGVSAEIGNPDKQKFLSKIVSYSGIIPKVKQTGGIQGKTKISKVGKRCNHILKDYVVQSASHMRLHGPKDLMLDYKRRDAQGQHADFGMARRYLRMAMGLMRTYQIYLPKKLRSPKINMKERAAYYLMVWPKFREKWRMAGSLDIAFDKDMPLGQWRNIIQQLYNIELYL

SEQ ID NO: 95932 - protein, 324 aa, unidentified
MSDSILGIDVSKETLDAYCARGQRKQGRTFANSPDGWKLMRAWLKAMGSKRAHVCMEATGRHSLGVALALHDAGHVVSVVNPAQIRDFARTKLGRNKTDKVDAALIREYAELFKPEPWTPPSPAMRRLCELQTMRAGIIRSRAEWKNRIGSGLGDSTATKLAAATIEHFTSQLEAIDGAIGETIDQDTELRGRRDLLLSVIGVGETLAASLMAEMPEPGVLRRSGEMVAYAGLNPSHHQSGSSIDRPTRISKIGNATLRSSLYMPALSAMRFNPAVAALVARLKIAGRLKPKQIVVAAMRKLLVLCFGVLKTGKRFDPAIAMPA

SEQ ID NO: 95933 - protein, 422 aa, unidentified
MQVLYPRCAAIDVAKKEIAVCVRTPGDEPGGRRSQVRKYKTFYGVLKEMCAWLAECGVTHVAMEATGIYSNPVFHALAESGGFEVIKCNPAHVKNPVPGRKTDAADCCWLAELLECGLVRGSYVPAQKIAELRDLTRYRAKLVGSRTSEIQRLQKTLEDAGIKLDSVASDVLGVSSREMIKALIDGERRGAVLAELARGVLRNKIPDLSMALAGRFSDHHALMCKLHLRHVDELTELIDTVEKQIEVMLVPFRPERELLMTIPGIGPVASAVILSEIGADMSFFPDADHLASWAGLAPANNESGGRRRPAGTRHGCQHLANVLVECAWAASRTRTRPGAQFHRLVRRFGGHRSTRAKKKAAVAVAHTLILIIYCVLDRRLPYDELGEDFYTKHQDPERYKDKLIARLAKLGYTVTLEPAQAA

SEQ ID NO: 95934 - protein, 417 aa, unidentified
MSNPLLVGVDVHRKTNTVCLMDGQGQEVAPRFTVENNRPGTEDFVRQVAAAVAAGDYDAIHIAAEATGLYWWHFFQTLAQDPFLNQWPVELYPLNPRLTANFKKTYIDLDKTDPIDAFVIADRLRLGRDLPAPFRYEERYFPLRCLTRYRFHVVHNLAREKAYCLAIIYLKASEYTRQDKRPFSNVFGAASRAILQEFASIEEIAAIPFDELVEFIDLKGKRRFPDPTENARKLKLVAQDSYPLPETLARPVNLILRMSLKHISFLERQEKRLASAIAERMETIPHTLDTIPGFGPVFSGGIIAEIGNLARFDYHQAKVAKYAGFKWRKIGSADFEAEETRLTRTGNRYLRYYFCEAANQVRMRDPEYAAYYERKYREVRKHQHKRAIVLTARKLVRLVVRLLTTNQPYRPRRRRQR

SEQ ID NO: 95935 - protein, 403 aa, unidentified
MNNVAGIDVSKGKSMVSVLRPFGEVVAKPFSIGHTGSELKELADYLKSLDGETRVVMEHTGRYYEPVARFLHDEGVFVSAVNPKLIKDYGNNTLRKVKTDKADSRKIARYGIDNWAELRQHTPMDTIRMQLKTLNRQQSLYTKTKTMMKNNLIALLDQTYPGVNALFDSPVREDGSQKWVDFATTFWHVDCVRNMSLTAFAERYRKWCKRHGYNFSQSKAVEVHAGAQDLIAMLPRDALTKTMVRQTIDALNAISASMERLKAEMQALAAQLPEYPVVMAMHGVGDSLGPQLMAELGDVTRFTHRNAITAFAGVDPGADQSGTHEAKSTRVSKSGAPELRRALFLVMDCLLKTQPQDDPVYRFMDKKRAEGKPYLVYMTAGANKFLRIYYGRVKEYLASLEGN

SEQ ID NO: 95936 - protein, 340 aa, unidentified
MKGTTMGIDIAKNVFEVYVEDEAGQVLERRRLSRKKLLSWLANRPPATVGMEACGGAHYWARELEQLGHTVRLIAPQYVKPWVQTNKSDAVDARAICRAVQEPGMRFVAIAGEAQQAVQAFHRVRSRLMGNRTALVNQIRGILLEYGVALPQGVASVRKALPLLLAEERWSPLVRQFLVEQQAELLAWDTRIEVVTGHIQRESATQPVCHRLEQVRGIGPLGASALWLKLAGGSYQNGRHVAAALGLVPKHTGTGGKVRLGGISKRGDRYLRQLLIHGARAVVAHVGEKQDGLSRWLRSLVARRGMNKAVVALANKNARVAFALMHGGQPYEVTKMCRAA

SEQ ID NO: 95937 - protein, 407 aa, unidentified
MSDHSVVAGVDTHADTHYAAMISATGEHLGAAQFPATDAGYRALTGFITCQGALLRVGVEGTNSYGAGLARHLRVENIEAVEVIRPARQVRRMRGKSDEIDAYAAAHIALAGNDAVTPKTAAGPVEAIRVTHAARRSAVKARTEKIQQIKSLLVTAPELIRAEYRALTAGRLVDRLAASHPRSGDDVTAACTRVALKRLAVRHQQLDAEIVGHEADLTRLVSTANPALTQAGGIGVITAAQLLATAGDNPDRIGSEAAFAMLCGAAPIPASSGKTNRHRLNRGGDRAANCALHQIAINRLATDPVTRAYAAKRTAEGKTNKDILRCLKRAISREVFHLITNPPPAEDSTDLRLTREHLSLSMAHVAAALDCSIAKISRLERGHISNLRFLHQYRDWLTKQKPRPNAA

SEQ ID NO: 95938 - protein, 338 aa, unidentified
MAQYIGLDVSLKDTFVSVREDGRRTWRGKCPSDPKLLVDVIRKRAAKVVFETGPLSTWYYHELTAAGIPAICIDARQAKKGLDMARNKTDANDADGLAHLAEATFYKEVRVKGYDSMLVRTLVTARTQLLKIQLQLSNQIRGLMKTFCLIVPKSSGHVFEGHVRDLVASNSGFEQIILPLLAVWRKLRAQAAVLSKRLVDTARLSQQCQILTSIPGIGAVTACSFVAAVEDPGNFQRSRSVGAWLGLTTKRYQSGEVDYDGHISRRGDAYLRGLLYEAATVILTRSHAESELRRWGLRLREKIGFKRAAIAVARKLAVTMHAMLKTGELFDRSITRAS

SEQ ID NO: 95939 - protein, 403 aa, unidentified
MNRNAVGIDVSKGKSMAAILRPYGEIVSSPFEIKHTSGNIQSLIQQIKSIEGESRIVMEHTGHYYEPLARELSLAGLFVTAINPKLIKDFGDNSLRKVKSDKADAVKIARYTLDSWTELKQYSLMDEIRNQLKTMNRQFGFYMKHKTAMKNNLIGILDQTYPGVNTYFDSPAREDGSQKWVDFAAAYWHVDCVRKMSLNAFVDHYQKWCKRKKYNFSRDKAEEIYGAARELVPVLPKDDLTKLIVKQAIEQLNTASRTVEELRTLMNETASKLPEYPVVMEMKGVGPSLGPQLMAEIGDVTRFSHKGAITAFAGVDPGVNESGTYEQKSVPTSKRGSSSLRKTLFQVMDCLIKTKPQDDPVYAFIDKKRAQGKPYYVYMTAGTNKFLHIYYGRVKEYLTSLPQ

SEQ ID NO: 95940 - protein, 358 aa, unidentified
MQNKVKTISFQGQNIYVGIDVHLKSWKVTIMLDHSFYKTFSQDPEPGILSDYLHRNFPGGNYCSAYEAGFCGFSVHRELEKYGIKNIVVNPADVPTTDKERKQKEDKRDSHKIARSLRNRELNAIYIPDREMEELRSLVRYRKTLVKDIGRNKSRAKAFLHYYGIHIPAELDSASQHWSARFTLWLKTVETTTDCGGFVLSEIISTTEHLRHRLLKVERQLREISKSGPLAKKIKFLRSIPGIGLIVSMMLLTELVDITRFPNLDHLCSFVGLVPTTKSTSDKEKTGNITPRSNKILRNSIIEAAWISIRHDPSLALRYNELCKRMKPSEAIVRIAKKLLNRIKYVLKNEKEYVYSVV

SEQ ID NO: 95941 - protein, 412 aa, unidentified
MKTVHTKRTGQAGRPSVGADRCVARVVPSLLPKSSNSCQGYPSPHLSQGRASLEQIKSIKEDCLLEAPLIFVGIDVSKAQLDVAIRPSAQSLSVTNDRAGIKSLIKHLKKLRPQLVVLEATGGLQRQVLSALIAGEIPVVMANPRHIRDFAKSIGQLAKTDRIDASVIAHYAEAVRPKPRPLPDEASLELRALSARRRQVVDMIVAEKNRLATASKVVKKRITAHIAYLEQELNDADQDLDRFIEKNAAWKENQQILCSTPSIGPVSSRTLLVELPELGALDRKKISALVGVAPFPRDSATLKGRRTIWGGRASVRSALFMATVVATRFNPVIRDFYKRLKAKGKPSKVCLVACMHKLLTILNAMIKNKIRWSENLLTRPLDMKHSCYISGLRLRLARSCTGEFIPSADCGF

SEQ ID NO: 95942 - protein, 352 aa, unidentified
MLIIGCDFHPGFQQVAIFDKQTGEYQEKRLSHRQEAEQFYRSLAGQKVRVGMEACGHYPWFERLLADLGLELWLGDAAKIRASVVRKQKTDRRDAEHLQVLLREDRFPRIWVPTLEERDARQLLVHRHKQVQARTRTKNQLHALALSQGVQKKRKLWTEAGRAELEKLELLPYAAIRRERLLETLDRLEAEIAALNRQVEAEVQQRPAAVRLMTHPGVGPVTALAMVLTLGPAERFASGRKVGSYFGLIPSEHSSGGRQQLGHISKQGSSFLRFLLVEAGQSAARYDAELGRFYRRLAVRKHRGLAKVAVARKLATRLYLMLRENWNYAQLCKAVVQVSPSHSVEGRQKPSA

SEQ ID NO: 95943 - protein, 346 aa, unidentified
MDQIIRIGMDTSKHFFQLHGVDASERPVLRRKLRRSEMLAFFAKLPPTAVGMEACAASHYWARELGSLGHEVKLIAPQHVKAYVKRNKNDGRDAEGLCEAMSRPTMQFVPVKTEEQQAALMLIGVRQQLMTRRTQLCNAIRGYAAEFGLITAKGLDKIEPLLVRIAQDESLPALAREMFTLQGRDYARQQVELKAVEARLIAWHRANTDSRRLAKIPGIGPIGATALVMKAPDPGLFPSGRHFAAWIGLTPKDHSTAGKTRIGKITRAGDEMLRSVLVAGATAVIQQAKKGRGRPSPWLVALLARKPPKLAAIALANKTARVAWKLLTTGENYDGARMPPASALAA

SEQ ID NO: 95944 - protein, 366 aa, unidentified
MTRYVGLDAHSKSSVYVIQDEQGKIVREGSVPTTLEGLLSLRDRSQLEPGTEVALESGTMAFYVARRLTRLGLVPRVINAYEVRAKALRPNQKSDRRDAIELCEGLRRQSYRSEVHVPSESIEQLRETLGRRRHFVRVKTMQVNAAKRLLRTAGLQPLGRTLGTDAAWSKLRAAVAIDPLLHAFIGAHHAVWGCAHQQVQGLETSLREQQVPLQRDVDRLQTVPGVGPVVALTVLAVFSDVHRFPTAKHAASYAGLVASTFDSGERVQHGHVTRRGSAELRSMLCEAAHHARRPNHPLNPYFASLCARRGYKMAVVAVAHRLCRILYSMLRHGTDFDLSQLAIEQGRFEHRSVRQFRRKGSAVASA

SEQ ID NO: 95945 - protein, 366 aa, unidentified
MKKTSTVQVFKNEIFKEQKLTISLDLGDCWSFYCVLDEAGQVILEQKLPTTPEAMKQTFGKIPRSLIALETGTHSPWVSRQLTELGHEVIVAHAQKVPWITKSNRKDDRHDARTLARLARIDPALLGPVRHRSVQAQLHLTVIRARAELVSARTALVNAARGLVKSYGQRLPKCGTYQVSEKLTEGLSAELREVLVPLLKEIESLNEHIKEYDERMEKIAKEVYPEVSLLKQVKGVGTQIALTYVLTIEDPYRFARSRQVGCFLGLRPGRRNSGESEPQKGISKEGDRYLRTMMVQGAHYILGPFGEDSDLRRWGQKLAERGGKNAKKRAVVAVARKLAILLHRLWVGGEVYEPLRNSQKAMREVA

SEQ ID NO: 95946 - protein, 429 aa, unidentified
MPYRIAGIDVHKKMLAVVVSDVEVDGEFDFERRMLGSNPEQLRALAAWLLEQEVEEVVMESTAQYWKPVWEALEQHWKPIREKQQGARRKAGKLHLAQAESNRGRRGRKRDFADAERLVKRLVARELTLSFVPDPEQRLWRTVTRKKYQLRRDRVRLQNQLESLLEEAHIKLSSLVSDLLGASSRRMLNALAEGETNPAALAALADQKLRATPEQLCDALGACTNLKPVYRRLLKMALEQLQFLEQQIAQLEQELATLLHPYQDAVQRLAEVPGLGVDSAQQIIAEVGPTAATFPSAHKLSSWMGACPGDDESAGVNYSHRSPKGNRQMRRILNQTANAAARSKGSIFEIVYRRSVSRLGHNQAIGAIAHRQCRLIWLILHQGVRYQERGPDATKQSKQRRTARMIRQLRSLGYRVEPPNPQLNQAPVL

SEQ ID NO: 95947 - protein, 430 aa, unidentified
MSSAINTDRKPIAAFVGIDWADKKHDIVLCAAAGNAQFDHRRIDSQPEALIEWASEMQGRFGSQGRILVCLEQSRGTLIYFLMGYGCFELYPINPKQLSSYRGAFRPSGAKDDPVDGKLLCQLISLHHQSLRPWRPDDEATRKLALLCEKRRKAVDSRTTLSNQLKSELKLFFPLALTVLDNDLTTPLAANFLLAWPNFESLKKASANKVRKFFYAHQSRSERKIQERLKRIEAAQPSTRDSAIIETSTIAVRMLAQQLKDLVPFIALYDHQITELFDSHPDSALFRNLPGAGKQLAPRLLTAFGSHRERFTSSLEALSFFGLAPVTEQSGKSHWVHFRWACPKFLRQSFHEFAAQSVRSSPWAAAFYQYQRAHGKGHHAAVRALAYKWIRILFRCWKTRQPYNPELYLSALLQRGSPYAAAVNNSPQKN

SEQ ID NO: 95948 - protein, 374 aa, unidentified
MADIIEAFVAFDTSKLRNAVAIAEAGRTGEVRFLGEIENTGAAVAKLVRKLAGKYGRLTFCYEAGPTGYGLYRQIKSLGHECIVVAPSRILKKPGERVKTNRRDAVSLVKQLRGGDLTAVWVPDPRHEAMRDLTRAREVAVEDLRCKRQQVSAFLLRQGLHYPGERTWTKAHRNWLMSQKLEYAEHRIAFEEMLLAMRQAQERIERLEQAIRVAVPDWSLAEVVTALMAMRGIDFISATALLAEIGDLSRFPTPRELMGYLGLVPSEASTGDTIKRGPITKAGNRRARRILVECSWSYQHPPRVGKEKQERVAAAPQAVREIAWKAQCRLSARYRALTRKGKLKTVAVTAVARELSAFIWAINRQIANPRAVAR

SEQ ID NO: 95949 - protein, 328 aa, unidentified
MCTLGIDVSKNKIDPCLPTAGPGGKKKHKVLTNEPAVARKVVDWLNAQKCVPESVTVVLEATGIYHENLAYGLHEAGVSVCMANPCRVREFAHGMDILNKNDAVDAFVLACYGELKSPAVWVPPSPEVRKLRALLRQRDALREDVQRTVNRLEKANSTSTPQEVIRSLERTKSWLNEELARIEKLITDHTDNDPGLKADLDLLKSIKGVKDQVGREMLALLKDGTFKSASQVAAYLGLTPVEKTSGSSVRGRPHMSKTGPSGVRAKLYVAALTASRWNKQAKAIYERLVAKGKAKKAALGAVMRKLVHLCFGVLKTRLPWDENYVATA

SEQ ID NO: 95950 - protein, 304 aa, unidentified
MNGIGIDVSKRQLDVGTTDGETLQVCNNRSGFSELDVWLKKRPVSQIVLEATGGYERPVLDFLHAVGHPVVRANALRARRLAQGMGQMAKTDRLDAYALAQMAALVKLPAYQPLEPWQQKMREFVRARRQAMHALTIARQQLDMVGDRELRRLLQANITRLQTLVERLGKQIAEQVTQQPQLAVLKSMKGVGPGLQAVLASYLPELGKISGKAIASLVGVAPMSHDSGTMRGKRSIHGGRAEIRQVLYMASMSAMRHEPQLRDFYQSLRARGKEGKVAIVAVMRKMLVILNARVRDAENGLVPA

SEQ ID NO: 95951 - protein, 427 aa, unidentified
MAAREKVGEPEFVAFVGIDWADQKHVWCLQAAHSAKRETGELEHKPEGVEAWVSELCQRFGHGPIAVAVEQVKGALVYMLGKYECLHLYPVPSTMSASMRQALYPSGAKDDPRDADLLLDLLLQNRDKLRRLTPDNEVTRRVQNLVEERRKLVEEKTAQLNRLTGYLKVYFPQMLEWFAKLDTKLACEFLERWPSLEELQAAAPAEVRKFFRQHRGRHPELTEWRLQGIGQAMSAIRDGAVIEAKRMVVQVIARVLRTLLEGIAALDAKITEAAEAHPDFFIFQSFPGAGAALAPRLLAALGSQRDRYASAEEVQKYSGIAPVTERSGKKKWVHFRWACPKFLRQSFHEWAGHSIAQSVWARAYYQQQRQRGKDHHAAVRALAFKWIRIVFRCWQDGVAYDENRYLATLAKRGSPLIPVPAVAAPSL

SEQ ID NO: 95952 - protein, 353 aa, unidentified
MTNDKYVAMDVHKASVVIGMRDGGGKMIGRAVVETKAQTLRDYVKGLSGTVRLTFEEGTQAAWLYDLLKPLVAECIVCDPRRNKLLESGNKSDDVDVEKLSELLYLGRLRAVYHGGQGTRALKELAQNYEALVKDNTRVKNRLKAIFRGRGISYEGSELYEYEQREQWLAQLSERGVRERASQLYEQLAQLEQWVGSARLKMLRESRKQKAKKILEQIPTLGEISVAQLIATVDTPFRFRSKRQFWTYCGLAVVRHTSADYQFAQGELRRRAKPGPTRGLNRNYNRRLKRLFKSAALAGSNKGPFKPYYERLLARGLNPELAQVTLARKIAAVTLTLWKKGASFDREKLVKPE

SEQ ID NO: 95953 - protein, 444 aa, unidentified
MHYQKVLKMPESIPYLSVGFDVGADFTWMSIMLPNGILIGKPFKIIHSDPQSRELAISKIKEAQEMYSLESRCFLESTGIYHIPLLCFLRDKGFDCSVINPIITKNSTNINIRKLHNDKFDSKKAALVGLNVSLKTSIIPEDSIVDLRNLVRDYYYFKDLQSAVALKLTAELKMSFPAYAKVFSKVTTQSSLKLLSSYPLAGDMLEASKDDIVETIRSTARFGEAYALRKYDAVIAAAQDASVFGRALPSNAVRIRLYIDTYQEYQKHLDALLKALHETVERLQDTLIYDQICLLQSLRGIGFLSAVVLIAEMGDFKLFPSPKKLYAYFGLDPAVKQSGKLNGDKVHMSKRGSSLARRVLHMVALNNVKVDKGSGTPVNPVIYDYYTRKCSGKKKPVAMGAVMHKICNIIFAMLRDNKPFEIITPEEHCQRFAAEYPDKIRKAA

SEQ ID NO: 95954 - protein, 328 aa, unidentified
MFYLGMDVAKAKLDCCLLLDEASGKRKTKVVSNTKSGIVDLLAWVAKQNVSPEALHVVMEGTGVYHEQAALALADAGVTVSIVNPAQVKDFGRGLAVRTKTDGVDSLVLARYGALLKPKAWVPPAPEARILQALLARRVAIAQDLQRELNRQEKADATDTPDRIQKSLADSIVFLVKQLAELQQVIDEHIDKHPGLQKDMALLQSIPAVGPQVGGNMLSVMHSHHFNSAEQLAAYLGLVPVERQSGSSVLGRARLSKAGPARIRAVLYMAAIVATRCNPHVKAIYERLLARGKSKMSALGAAMRKLVHLCFGVLKTQQPYEHDHANNA

SEQ ID NO: 95955 - protein, 378 aa, unidentified
MATTRSVLRHELTAKSGDLYLSLDLGDKRWHISIGDGRCGLSHYSVGAGQTDELADCIAKARARLHLSRKAIVHSCYEAGRDGWWLHRWLTEVGVDSIVVDPASIEVNRRARRAKTDRLDADKLLAMLVRHHSGERVWSVLREPSPKDEDARRTHRELQRLTHERVAHTNRIGSLLVLHNLRPNVVIGGRYWSVWWERHRAQVPSSLAAELEREVMRLQLVKQQVRAIEAIRSQELLEGKQPLVAQLTRLRAIGAKGAWVLVKEMFGWRTFANRRELAGSLGLVPTPYASGDSQLEQGISKAGNRRVRGLLVELAWGWLRLQPSSALAQWFDRRFASGGKRLRRIGIVALARRLAIALWRYLKNGEIPAGAQLKPAGA

SEQ ID NO: 95956 - protein, 438 aa, unidentified
MRRKKNKATKKVHFESLSLIHPNAAGIDVGSKEHLVAVPPDRDPQPVRTFQAFTPDLHELAAWLKRCGIETVALESTGIYWISLYEVLEQYGFEVRVVNARHVKNVPGRSKSDVLDCQWIRKLHSFGLLNGSFRPDQQIRKLRTYMRLEDNLVVESTQAVHHMQKALFEMNVQLSNVISDITGESGLRIIEAILAGERDPEQLADLCSTRIKASRQTVAKSLHGNWDEALLFCLKTALETYRFSQKKIQDCDQCIERQLATFEIKAPLPDSKQNLQTQLHQVCGVDLTKIPGIKEQTAKIIISELGLDMTRWNTEKQFSSFLGLCPNNLITGGKIIRRSTRKVYNRAADALRLCAQSLTHCKSALGAKYRRLRTRLGAPKAIVAMAHHLARLVYRMLRYGQDYVEKGIQQSELKFRLQRIKWLKKEAHSLNLELVAAQ

SEQ ID NO: 95957 - protein, 353 aa, unidentified
MFYLGIDVGKFTHSLCLIDESGHHDIWQINNDKSGFESLRKKINSLNLLIESRLLVGMEATGHYFLNIYDFLLHLGLSTEQIALLNPLQVKSFRNTNLRGAKSDNVDAEQIAVLLQFGNFDRCNVSTDHIMNLRELTRLKSDLTANLGNLKRKMIAVVDRIFPEFAKIFANKFGLTVVTLLTDYQTPEEFAALSLEELTALIKGLSKRGVNRDKIQRLHEAARNSIGISFGREGFKIELSILLTQLKSIEEQIDFLEGKIAEMVNELNSPLFTIPGIGKTTGAAILAEIGDINHFASAVKLIAFAGLDPKLKSSGTISGALFGILPWCSAGLMRNSTNNIRIEKNLANLTAMR

SEQ ID NO: 95958 - protein, 385 aa, unidentified
MLVNNSNTLSLDLQASKHISLGIDQGDSQWVMTAFDRSSGKKSRHCFKGATKELDCYRKVSDLSKTGKPVSVCYEAGRSGFTPARVFSSLGCECRVLPYGKLQIISSGKKAKTDNIDSVFLSELNPLDKSIPSVWLPEVKQECLRVIPREEQRLKRDISRNNNRIISILQRWPVQKVVTHLRAAEWRVRIREWKNCAAVPGLLPVSELKRIEMMTDELELLEKHLLEWGCYMDEQEKKERSIAEQTGEKFTIDILREYRGIGEVIARTFSWEIGDFNRFRNGKHFSSYLGLTPTPFASGKMFREQGISKQGNPELRRLAIQLAWLWKHWQPDSKIARKWKEQLKNKGRQRKTAIVAMARQLMVAIYRRIVRGEEIEGAVKNRPMQ

SEQ ID NO: 95959 - protein, 405 aa, unidentified
MKYYLGIDVGKYYHQAILAGSEGKPMTNSLRFSNSFSGYQQLNAYLEKQLLVSEFSKVHAGMEATGPYWLSLYEQLKKLGIHTTVLNPLQVKSYRNEDIRGSKTDSIDCLLIVKILRFGDYKASDLPDGDLLALRQLTRLRADLVKVTSGLKMKLLAIFEQIFPEYPKLFTDMFGPGAQVVLSEAIDPESIALIPTEKLTAILKKSSHGWFGEKKAIEIKQAARDSIGVTIGLDAFTLSAQILLTQINHLDSQVESLNDEITKRLNNYNQSLTSIPGVGETTAAAIISEIGNFDRFKDDKNGAEKLVALAGIDPKLKSSGENKGKAIMSKRGSPYLRNAVRHASFIAATVKKDPMFAGIYQKKIKEGKHFEVALSHVENKLLHVVFSLLKSRKQYEPYAVKAEKF

SEQ ID NO: 95960 - protein, 367 aa, unidentified
MPSMTQPTRPRHHTAESPEGVVLGVDTHKDSHMAAVTTNTGVLLDTRSFPTTQESYRQLLSWARSFGQLQQAGVECTGSYGAALTRYLHSESVTVIEVNQPDKATRRRRGKTDAIDAAAAAHAVLSGRASATAKTSDGPAETIRMFKMAKGSATKSRSQAINQLKAILVSADPALRESLTGLSNPKLIRRCSEWQVEDETGPAAAARHTLRLLARRIQHLTEEINDLTARITTAISACAPRLLERYGVGPDTAAALLITAGDNPERMGSEASFAALCGVSPVEASSGKTQRRRLNRGGDRQSNSALYTIILARLRWDTRTRDYVERRISEGKTRREAVRCLKRYVAREIYQTINPPRQTAVTPASTA

SEQ ID NO: 95961 - protein, 417 aa, unidentified
MQYVPSVLPAEPINGLTCGIDWARDDHAITIVDEHGRQVHRSTVEHSSAGLHELVGLLARTGATEVAIERPDGPVVDALLDAGITVVVISPNQVKNLRGRYGSAGNKDDRFDAFVLADTLRTDRARLRPLVPNSSATVALRAVVRARRELVIHRVAVANQLREHLKRVFPGALGLFEDLDSAISLKFLTRFDCQDRADWLTPKRLGAWLKSVGYTGRTDPATLHTRLTAAPRGATGTEGAAYVCITRALVASLTSLVEQIKTLEKRIGEQLATHADAHTFTSLPRSGTLRAARLLAEIGDCRARFPTPEALMCLAGVAPSTRQSGKMRSVGFRWSCDKQLRDAVCDFANDSRHANPWAADIYNRAIDRGKDHPHAVRILARAWLYVIWHCWQENTAYNPAKHKALQALLEQRENPAA

SEQ ID NO: 95962 - protein, 356 aa, unidentified
MSGLKHQKEKRSMEHFVGMDVSVKDTSICIVDDTGRIVREVKAASEPEALLAVLTNPAYRFKRIGLEAGPLSQWLYSALAEAGLPVICVETRHMRAVLKAQINKTDRNDARGMAQMMRVGLYRPVHVKTLRSQKLRMLLTHRKLLQSKAIAIENDLRGTLRNFGLKVGIVGKVKFETRIKELVENLPDLAVLVEPLLIVRRALREQFCILHRRLLAIVRDDEVCRRLMTAPGVGPVVSLTYRATVDVPARFRKSKSVGAVFGLTCAKYQSGEVDWSGRISRCGDEMMRVMLYEAAQSMMRSKKWSWLKAWAMQIARRCGMKKAIVALARRLAVIMHRMWVDGTEFRWTRDHAAAAA

SEQ ID NO: 95963 - protein, 340 aa, unidentified
MIVCTKFFIGIDVSKPYFDVSLMAVVNHVRQGIETSRFDNTAGGMKLFEKWLKSHKTAFNENTLVVIENTGIYHRLIWAFCSRKHLPIHIGNAARIKWSFGIARGKNDKIDSLRLCNYAFKEAEDLKATPVLNPQLLHLKDFVSARTKLLKQKSSLGVSIKELGNVNDKSHQKLIEKAMKNALDGIAKSIKNIEDQIKKIISENQDFKGNYKLLISIPGIGHVTAVYLIGCTANFAGQPSGKELACYAGVAPFEHSSGISIKGKTRVHRMANKELKRLLHMCALSLIQHNQEFKTYYNRKKDEGKHSMSIINAVRNKIALRVAAVIKNQVSYKNNYNIAA

SEQ ID NO: 95964 - protein, 321 aa, unidentified
MHMAKRTVEYEQVIERGCGLDVHRDTVVVTVMGKGIQTETRTYGTTTSSLKEMGEWLESLQVTDGAMESTGIYWKPVLHVLREYPLNLLVVNARHIKNVPGRKTDKADSQWICKLLISGLLKGSFIPPENIQALRDLHRYKKKLVGTVASEKNRIIRVLEDANIKLSSVVSDTSGVTATYLINGLIEGRNDLEKLVSECYHKKLQATPEQIVEAINGRLTPHLKFLLKSMQKHIQSVEEQIAEIDAEIEKHIKDFEKEIELLQTIPGVGKEGAIGIVAEIGVDMDVFPSEHHLASHSGMCPGNNESAGKKKVQEHDKAINI

SEQ ID NO: 95965 - protein, 338 aa, unidentified
MELYAGIDLHSNNSVVAVLDEQDRTVFAKRLPNDLAAIIAALRSCAGTLHGVAVESTYNWYWLVDGLQDAGLTVHLVNTAAVKQYDGLKHSGDFSDARHLAHLMRLGILPTGYIYPREQRAVRDLLRKRGQLVRQRSTQILSMGNLVARNLGCHASGNEIKRWQSEHIEAMALLDEQREALKANLAVMQCLDQQVKVLERSILAKARLREDYKALKTVSGIGEVLALTIALETGDIGRFEGPGNFASYVRAVDSRRESNGKKKGEGNAKCGNKHLAWAFIEAAHFAVRHDAAIKRWYQKKCACALAVVAIKAVAHKLARACYHVMKDGKPFDVSRAFG

SEQ ID NO: 95966 - protein, 407 aa, unidentified
MRVIGLDLHRDFAVSAVLEDGRVRSGDRITLEHEAVAAFARTLRADDEVVVEATGNTAAVVRLIAPHVRRVAIANPIQVRAIAWAKVKTDKIDAGVLAKLHASGFLPEVWSPDEDTQMLRRLVAERAGVVSHMTRLKNRVHALLHANLIPPYRGTLFGKGGRTWLAKQPIPEDQRRTVARHLDELDRTAVDLAALDRALAQRALADARARHLMTISGVNAVAAMTLLSATGDISRFPSPGKLVSYLGLNPSVRQSGNRPAYHGHITKQGRTYARAMLVEAAWAAAAGPGPLRAFFTRIKDRSGKQVAAVATARKLVVLAWHLLSKEEDYAWARPALVAWKRRRLELQAGEPSRRGGNKPGPASEYSLRQVRDRERHWLGMAEEEYRRFATAWREQPPPGRTGSRRTN

SEQ ID NO: 95967 - protein, 361 aa, unidentified
MGATMTWVGMDVHARSIDAAAVDVLTGELRRVRFGGDGGPVVDWLSGLPQPVHACYEAGPTGFHLYRAAEAAGVRVDVIAPSKTPRASGDRVKTDRKDAELLVRLLMSGGLTTVSVPPSALEAARDLTRAREQVRRDLLRCRHRVSKLLLRQGRVWGGPGGTWTRAHRRWLAAQRFEHPASELAFLDTLAAVDGLVARKSALDECLSRLALDPLWWPTVARLRCFRGIDTLSALALHLEVHDWQRFRRPTQLASWLGLTPSLAQSGQSSAYGPITKTGSGYARRILVEAAKHGGRPPLIGATLQSRQTGQPDHVLQIAWRAQQRLHRQTSRMRERGKPANVVTVAAARELSCFLWAAAVAP

SEQ ID NO: 95968 - protein, 371 aa, unidentified
MEHTRFVGLDIHKERISIAVAESGRSGAVEYLGEIANDPHAISKLCNRLGLPGKPLIFCYEAGPCGYGVHRQLTSLGHRCDVVAPSLIPVKSGDRVKTDRRDATMLARLHRAGELTSVWVPDTDHEAMRDLIRLRSVVRHIVTRARQHLQGFLLRHGRKHGGGTAWRMAYRRWLSTLAFEHPAQQIAFQDYVDAVADAERRLQRVEEQILSLLPEWNLRAVVDALQAMRGIALINAVVLVAEVGDFTRFSNPRELMAYFGLVPGERSSGETVRRGGITKTGNTHARRALVEGAWAYRMKPRIGRHKVDRIDALPKVVRDIGWKAQVRLCARYRRLSARGKTANVVNVAIAREMVGFIWSIACTIQSAPKPA

SEQ ID NO: 95969 - protein, 402 aa, unidentified
MCVTTRTTAWAGIDIGKTHHWICAVDADGRALVSVKVANVEAAIVAALATVTDLADQVVWAVDIVGAPSALILALLARAESPVFYASGRVVNTMSAAYTGEGKTDAKDAYVIAETLRLRRDLPMVDTVTDLTRELALLTAHRSDLIADRVRMINRLRDVMTSVFPTLEQQFDYSSHKGALILLTEYASPKRLRRLGETRLTQWLRRRQVRDAARVAARALAAARGQDIELPGQHVAEMIIAELAASLLQLDQRIHGLDQQIAATFHRHHQAITIESMPGFGPILGAQLLVAAGDLRAYPSAGHLAAAAGLVPVPNDSGRRSGNLHKPRRYSRPLRHVFYLSAQTSMMRAGPNRAYYLKKRAGGHSHAQAVITLARRRIDVLWALLRDDRPFSIDPPSLAAAA

SEQ ID NO: 95970 - protein, 343 aa, unidentified
MQIAVLGIDLGKNSCSLVGLDSHGTVVKRRRMRPANITGFTKGLSPCIIAMEACCGAHHLGRLLAAQGHEVRLMSPEYVRPYVKAQKNDDRDAEAIAEAATRPTMRFVELKSEKQLDMQTLHRARDRLVGERTALVNQLRAILFERGVVIAQGRRNLERELNAMLCEEGALAVSQRLRTLIEGMREEWRVLDQRIGTFDDEFAAHAKTDEAARRLATIPGIGVLNATALAAAIGEGQTFAHGRDLAAWLGLVPRQITTGGKPRLVGITKRGNCYLRKLLIHGARAVLPTLSKSETPLGRWLRALLVRVHKNVAVVALASKLARVAWAVLRHKVTFNSNALALA

SEQ ID NO: 95971 - protein, 367 aa, unidentified
MEKSSTAYVGMDVHKESVDIAIADGREARLFGRVGGDAAAVDRAVRKIRSVHRDVMFVYEAGPCGFWLYRRLAAQGLRCMVVSPSMTPRRAGDRVKTDRRDALQLARLARAGELAPIYVPDAKDEAIRDLVRAREDAVCMQRQARQRLQALLLRNEIRYVGRSAWTQAHRRWIAHLKLPDPAQQIAFEEYVTAVEEGTRRLERLEGSISAQLAHWRWRPVIEALQALRGVSAIHGVRIVAELGDLSRFESPRKLMGYLGLTPSEDSSGGRRRQGGITKAGNSSARRAFIEAAWAYAHPARVSWVIARRHTGLAKSVTDLAWKAQLRLCARFRCLAARRLPRNKVVVAIARELSGFVWAIARQVKPLA

SEQ ID NO: 95972 - protein, 421 aa, unidentified
MNQLTDTEYTAYVGIDWAAAKHDICVQAADGGKREFACISSQPEAIEAWAQDLYQRFGGPIAVALELSKGPIVSALQKYDFLVLYPINPSTLAKYREAFTPSGAKDDPTDAELAVDLITRHPERFNPLKPQSVAMRKLIGLVEQRDKFLSDRGRLVNRLGHALKQYYPQVLEWFSEHHTVVFCDFLNRWPTLTQVKRARKTSLERFFKSHHVHSSALIEKRITAIKAAMALTADAAVIEPHRLQVEVLIEQLRITIKALKRFDDQITITANKLPDYHLLFSPLPGAAKVLAPRLLAAFGEDRQRYPQADALQKYSGIAPVTKRSGKSTWVHWRWQCPTFVRQTFVDWASQTINKSAWAGAYYRQQRAKGCSYQVAVRALAFKWIRILHRCWQDRTPYDESKYLEALRRKGSPLLKYLAHSV

SEQ ID NO: 95973 - protein, 343 aa, unidentified
MQVVRTVGLDIAKSVFQVHGVDGAGQVVIRRQLKRRYVLAFFQKLPPCLVGIEACASSHHWSRELKALGHTVKLMPPAYVKPYVKRQKNDATDAEAICEAVTRANMRFVATKTPEQQSGLTLHRTRHLFIRQQTAVINVIRAHLAEFGIVAPVGRKGVEALLDVVANPTDTRVPAIARACLAALGAQLCRLKEQILEFDRMIIAWHRSHEASKRLDAIPGVGPVLATALIASIAEPKAFRSGRSFSAWIGLVPKQHSSGGKDRLGSISKQGDRYLRSLFMAGALAVIRYAKIHGSRHRPWLTALLARRPSKVAAIALANKIARMVWAMMARGERYKEPVALAA

SEQ ID NO: 95974 - protein, 416 aa, unidentified
MDIVHTHCGGLDVHKKTVVTTIIVPDGQGGLRKETHTFETMTVELLALSDWMLSHGVAHVAMESTGEYWKPIYNILENNFEVLLVNAQHVKHVPGRKTDVKDSEWLAELLRHGLLKSSFIPPIGQRELRELTRHRTNFVRERATLVNRVQKTLESANIKLASVASNVMGVSGREMLEAIIEGKANASEMAELAKGRLREKREQLAKALEGRVKPHHQFVLAELLCQIDSLDETIARFDTEIEKYCRPFEEVVELLDTIPGVARRTAEVIVSEMGSDMSRFPTADHLAAWAGVAPGNNESAGKRYSGKTRKGNQALTSALIQAAHAASHTRSTYLSAQYHRLAGRRGKKRAIVAVAHSILVIAYHLIQRKEPYRELGSDYFDKRKPEATAKRLLKRLSQLGYDVSQVVQSLPAPTLA

SEQ ID NO: 95975 - protein, 321 aa, unidentified
MSAPCAVTVGIDVAKAHVDVSVLGANLDIRRFNNDAEGHSALAVALQSLNVQLVVMQATGGYETELACALQGAGLPVAVVNPRQARDFARSIGRLAKTDAIDARMLAELASVLLRRDDLSRLLRPVPDERQQWLAALVTRRHQLLTMLLSERQRLQITPVGLHPSLLAIIAAIQAQLDDIDAQMVAHVRQHFGELDRLLQSTHGIGPVSSACLIAELPELGRLNRRQIAALVGVAPIACDSGLRNGRRRVQGGRFAIRRVLYMATLTATRYNPAIRAFYQRLKAAGKLSKVALVACMRKLLTMLNVMVKTNTPWDDSLHRA

SEQ ID NO: 95976 - protein, 370 aa, unidentified
MTQCTKTQFVGLDVHKDSIVIAVAQLGREPARVIGTVPHEWNALRKVLDKLGPRCEVACCYEAGPTGYGLARALIAAGWACDVIAPSLIPKKRGERIKTDRRDAVKLAQNHRSGELVAVFIPDEKGEAIRDLERAREDAKKAERVVRHQLSKFLLRNNRRYPGRTTWNAAHQGWIAKLAFAEPAQQYVLSDGLAAVETATLRVSQLTARLRELTVGWSQEPLVKALQTMRGVEFVTAVTLVAEVGDFRRFATAQDFMGYVGLIPSEQTSGPHRRQGPITKTGNAHVRHVLVESAWHYRRQPRMSKALRERSVGVAPQVCAIAWKAQKRLHGRLNRLIGRGKNKGEAVTAVARELAGFVWAISREEKLLVS

SEQ ID NO: 95977 - protein, 351 aa, unidentified
MPHKSTVHAVTAIGIDMGKNTLHMIGLDLRGAIVLREKVLRGRIASRLANLQPCLIGIEAGMATHYVARELAALGHDVKQVPPTYAKPFRQGHKNDFRDAHAVAEAVQRPTTRFVPAKTNEQLDLQALHRVRSRLVSERTAVINQIRGFLLERGIIVRQGLRFLRQQLPDILAKRTDVLSPRMVRIVADLAGDWRQLDERIEPVTDEIETLAKSDDNCRRVMTVPGIGPIISSAMVAAIGSGAAFARGRDYSAWLGLVPKQMSTGDRTILGRISKRGNGYLRTLFMQAARVILLRPANWPKHGFGAWLIRAAQRLHPNVLAAALANKLARIAWTVLAQERSYEARVTKAAA

SEQ ID NO: 95978 - protein, 461 aa, unidentified
MSRNKPAGRQDQSVRKKVDWKALEIVHTEAAGIDVVGSEHWVAINPDRDAKPVRRFGCFTSDLHQLARWLVEKGVRSVAMQSTGVYWMPVFEVLEQHGLEVFLVNARHTKNVPGRKSDIQECQWLLKLHAFGLLNNSFQPTDEIRIARTLWRQRGNLVAEAARAIQRMQKILTERNVQLSTVLSDLSGVSGMNIIGAILKGERNPGTLAALVEPEVKATLRDIALSLEGNWRDELLFVLGQQRELYGFYQDQIADCDVRLRQHLETFGSKIDIETQPIGPKPKGKKGSKNAPHFDLRIELYRITGIDWAQINGIDVLTAQTVIAETGADLSAFPSEKKFASWLGLCPANETSGGKVLKRRTRKVVNRASTAFRNSASTLLRSQSYLGAQYRRLRTRLGAPKAITAMARKLACLFYRLIKHGQQYVDKGIEFYEARCREQQIRSLAQKAQKLGLQLVMPPAA

SEQ ID NO: 95979 - protein, 328 aa, unidentified
MGIDLAKATFDFCLLSRDGAVLWRGRFTNDASAIRQFLAQLEGGRWKPSLIHFALESSGVYGKALIGALHQVALAVSVLNPAQVKYFAFSVLRRTKNDRVDAQIIARFCRERKPLATRPLRPVEEQLKLLVHERESRVGEQNRERSRAKKDPFQISLPALISHQRQYRLNQLQKEITQLDEAINELIASDECLKTQSKLLCSIPGIAETTAAKLLSELAGKEFQSARRLAAYAGLTPSEFLSGVSSYGKTHLSKIGNAFLRKALYLPAAVARRWCKPLRPWVTLLEKRKLTDLAIRGAIMRKLLHIAFGVLKHQTPFDPSLVFMPKTV

SEQ ID NO: 95980 - protein, 327 aa, unidentified
MRFYTTEHRFYCGVDLHARTLAVCILDAQGQVAFQGQLPARPDDFLRAIAPYREGLAVACECMFAWYWLADLCAEQGIPFVLGHALYMKAIHGGKAKNDRIDAAKIADLLRRRTFLVRRRAELLAHLVNTNSQYNLPPLAQKLCYAANRAALDLPARFADPSVRKSVEADLALIDAFDAQVRALELYLTRAAKVDDPRAYQRLRSIPGVGPVLALIFLYEVHDARRFPEVGHFLSYARLVRCAHESAGRKKGSGGHKVGNAHLKWACGEAACLLVRSSEQAKRWLARREKRHGKAKALGALAARLGRAVYHLLRKGEAFDPRRFFAS

SEQ ID NO: 95981 - protein, 433 aa, unidentified
MGLIVPTTIQPEREDQPLPYEWFVGIDWGSQQHQVCVLDRARRLVGARAVDHDGASLAQLAAWLWTLSVGQPQRVSVAIEVPRGAIVEGLLERGFHVFAINPKQLDRFRDRHSVAGAKDDRRDAFVLADSVRTDRPSFRRLQLDAPHLLLLRELSRVEETLLEEFRRSANRLREQLHRLYPQMLQRCSAADEPWLWDLINLAPTPAHAMLLSEEQVQRVLKAHHIRRLKATEVLACLQAPALPVAPGTPEAAQAHCGFLLPCLRVLAEQMQACSQRVSALLHTLAQEPGEGEGPSDVAIVQSLPGVGRKITAWLFAEAAQALAERDFQVVRTHGGVAPVTRQSGKRRQVVMRRGCNPRLRHALYHMARVAMQRDVHFSQVYTALRAKGQRHGQALRNIGDRLLRILMAMLRHRTCYDASRIRCEPVVQLGQKM

SEQ ID NO: 95982 - protein, 352 aa, unidentified
MRTSQKTAGIITTIGIDLGKNTFHLVGFDQRGVIILQQKVSRAQLERRLANIPRCLIGMEACSGSHHIGRQLAALGHDVRLIPAQYVKPFLKGHKNDYRDAEAIAEAVQRPTMHFVAIKTPEQMDLLALHRVRSRLVSQRTGVTNQIRGFLIERGITVRQGVAPLRKALPDILSSQTGPLSPRMVSLIVDLVQDWRRLDERIAAVSAEIEALAQQDDSCQRLMTVPGIGPIVSSAVVAAIGNGAGFQQGRDFGAWLGLVPKQESTGDRTILGKISKRGNKYLRTLFVQAAHVVLERRPRAAMRGLWPWIEQASKRLHRNMLAIALANKLARIAWAVLARGRAYQPKVAANAA

SEQ ID NO: 95983 - protein, 554 aa, unidentified
MAAVMIGIDPHKASHTAVAIGAAEEPLGQLQVRASASQAERLLGWAAAWPERAWAIEGAGGLGHLLAQQLLAAGERVLDVPPKLGARVRLLATGDTNKNDPNDARSVAVAALRSAGVRAARRDDHAAVLRVWSKRHRDLGRTRTQVVCRLHAVLCDLVAGGVSKHITAAHAARLVELITPSGAVEAARCELAAAFTEDLRGIDDRIRRTRKKLAIAVQAAGTSLTGLFGVGPVIAAAVIGDVRAVARFPGRDHFAAYNGTAPIEVSSGDRKVYRLSRRGNRRLNHAIHMAAVTQIRHRHSEGRAYFDKKLAEGKTRKEALRALKRQISDAIFARLQADARRAAAGVKGPGGQPGNDSDSSAAGSHPAHRLFGQATPGPRHHPTTAARIRGRAGRSPAAATLPPATPQVQVERPQRKRGRTTWGCSEAAATLGRGEGHEAKLRGEAPALEDHLTCREKDRPNPLTQTQRGFRSVTRRGWFDGALCRTRVKVRCVVVIVPRRLRLSRRMETTRSWLHSVSARLPCRFARETEHASDVLAAARGCGERDVQDAGEKP

SEQ ID NO: 95984 - protein, 355 aa, unidentified
MDSKKYIGMDVHKESISIAVRNAAGKVVMECVIETKASMILQFIDGLRGDLHVTFEEGTSAAWLYDLLKPHVTKVVVCDPRKNASMREGNQSDKIDARRLAELLRLNHLNPVYHGEHGLRSLKELVRSYLTITKDLGRVMSRVKAIYRSWAIPCTGKQVYAPRHRAEWLGKIGEPGVRRRAEFYYQQLDALRTVRQQVRRELLAEGKKHQAWKRLCQIPSIGPIRSAVLLGILQTPHRFRTKRQLWTYSGFGIETQSSADHRSVNGQLQRAKKQISIRGLNRNHNHDLKNLFKGAAIVASSKPGPFQEFYTALLTKGIRPEMARLTLARKIATIVLIVWKTGACFDAQHLKPQTA

SEQ ID NO: 95985 - protein, 349 aa, unidentified
MVVVGIDAHKRTHTAVAVDERGKRLAIKTVAATSAGHLELVRWAQGLGEHRFAVEDCRHISRRLERDLIGAGESLTRVPPKLMAQMRRSARERGKSDPIDAMSVARAAQREDDLPTARLDGQERQVRLLCDHREDLVAERTRSQNRLHWHLHELDPSLVLKPGSLDRYVVLDRIGALCADHEGTVAQIAAELVERIRVLTRRINQLEREIASLVAVLAPTLLELQGCGPLSAAKIVGETAGIDRFGDRARFARFNGSAPIPVWSSNKTRFRLNRGGNRQVNAALHRIAITQLQRGPGKEYVERRIALGNTKTQAIRALRRRISDEVYRRLISDHAALEASRSTCLSEAA

SEQ ID NO: 95986 - protein, 335 aa, unidentified
MNKFSHFLGIDVSKDSFDACLIDVKQKVIMNEKFSMDSDEFEKFIQKLQMFEQDEILVVLESTGIYHTNLLFHLEDKGFKTAVVNPMLIHNFTKSVTLRKSKTDKIDAFRIASFALYNQNNIDLNKTSTASARNISRERDRLAKETAKIKTEIKNHLQILFPELVNNYNVFTKTMLLLLLKAPGAFPIKKLKPIQIERIFNKTGGNKVQISPKNLIKMAKRSFGIEDEYRQSILIMKIEMLLFIQKQKSELDKKIKEYIDKNLKQEFDIITSIDGIGQTTAEKFLIEIGNINRFKSHNQLRAFIGTDPSIKQSGSSVNVNGKISKRGNSHLRRTI

SEQ ID NO: 95987 - protein, 335 aa, unidentified
MDVQYYIGIDVSKATLDWAVFNGKTIVLQTQSLNSVAAIKATIKALKSLPGFTNTQSVFCLEHTGVYNAHILDQLMAHPLPTWLESSLHIKQAGGLQRGKSDSIDAQRIAEYAYRFRDRMRLWQPPRQLLQELVILSALRQRLLLVRQQLQVPVNEQAAFVSTKLQKQLTRHCQASLKSINADLEQVSRQMDELIHQDQQLCELFKLMTSVPGVGPAVATEVILATDEFKNFSEPKKLACHAGVAPFEHSSGSSIRGRSRVNQHARKRLKFLFHLAAMSAIRVKGELQTYYQRKVAEGKNKMSILNAVRNKLIHRICAVVKRKQKYDIFYPLSFV

SEQ ID NO: 95988 - protein, 463 aa, unidentified
MARNNKSKQRTKPVRALKTIQPDAAGIDLGSREHWVAGPPLDDNTPNVQRFGTTTPELLRLADWLKEQEVKTVAMESTGVYWIPLFEILDSRGYEVILANARQVSHVPGRKTDMLDCQWLQLLHACGLLRGSFRPSDEICRLRALLRERNSMVDQRSDWTRRMQKSLDQMNVCVHHAVSDITGVTGMAIIRAIVDGERDPRTLAQMRDRRCKKTEEQIAEELTGNWRPEHLFNLRLALKMYDQFCQVVAEYDAEILAYIKSLPSCVDDDQSAPAPVSKSKARDIAKKGQEPMRQALFQLTGFDLTTIDGIGVDTAAVIISELGFDYRAFPDEAHFVSYLRLAPNLSISAGKKVPNKIKGTTTSRVAGALRMAALAVRNSKTALGAFYRRISRRKGASVAVFATARKIAQIIYRLVCHGQAYIDIGAKAYEAQFNNRRLKYYTKALKDMGYKVKPLTAPEDKAA

SEQ ID NO: 95989 - protein, 397 aa, unidentified
MNAVGIDVSKGKSTVTIRKPGDVVLMSPCDIPHTQSAINDLIKQIKSLEGETKVCMEHTGRYYEPVATWLSDAGIFVSAVNPILIRDFGDDSLRTPKTDKADSKKIARYTLDRWAKLKQYGIMDKTRNQLKTMNRQFGFYMAQKTAMKNNLIALIDQTYPGANDFFDSPARNDGSQKWVDFIHTYWHVDCVRSKSLNAFTEHYQNWCKRKNYNFSAEKAAKISVFPKNDITKMLIWQAVALLNTASKTVESLRSKMNELASTLPEYPVVMDMNGVGATLGPQLIAEIGDVSRFTHREALTAFAGVDPGKNDSGKHIQNSVRTSKKGSPYLRKTLFQIMDSLIKRSPVDDPVYAFMDKKRSEGKPYYVYMTAGANKFLRIYYGRVREYLSNLSNNETI

SEQ ID NO: 95990 - protein, 406 aa, unidentified
MIFVGIDWAEAHHDVCVLDHGGRVLGKGRVPDSVKGVGQLHAMVGEHAEEPTEVVVGIEIDRGLLVDALLAAGYRLYSINPFAVSRYRDRHASSGAKSDPGDAKVLADLVRTDRHNHREVAGDSELAEAIKVLSRAHQNLIWSRLRQVNQLRSTLREFYPGALRAFRTSQLASVEACSVLAMAPTPTWAREKLTLPRVRRSLAASGRKRNLDRRAREILQALQAPELSATPLVEQAYGDVVGSLVVVIDGLTHQIAKLEADLAERLEGHPDAEIITSLPGLSSVLGARVLAEFGDDPTRYEDARARRRYAGTAPITRASGTRLVVLARVARNRRLFDTCYLWAFSSISVSPGARRFYDSHRARGKTHHQALRAVANRWVGILHGCLVHHEAYREEVAWVSPVDVAA

SEQ ID NO: 95991 - protein, 422 aa, unidentified
MNEDDAKRQEEQRCWVGLDWGGEGHAVAVVNDAREVLGEFKTGTSLTELEKLGKHLRAFGAVGGIAIEATRNPVVDYLVSAGFTVYPINPKLSKNWRACNSVAGVKNDERDGLVLAVELAGRHASLRPLKQEKPPVAELAGLCEKLRELIDERTALLQRLKATLGQYYPGVLGFFSDWTSPVAWRFVKQFPRPQALAHARKETLIRFLKANRIGIRPIWLERIEARGEVARWPHRADSVALEAMALATIAQLQALQPHIDKMDRLISQDAANLPHAHLIESLPGAGKRLAPALAAITAAVASGEGEVEGIRCVSGVAPVEEQSGKRRRVRVRRRCNKHWRDIMHLFARCSTVSCAWAKAFYDMHREQGDRHASALRKLADKWLKIINRMIETGEPYDDERYVRALRRNGSPVYLRLGGKTCA

SEQ ID NO: 95992 - protein, 405 aa, unidentified
MDGATPARVAGLDWASRLHMVCVLDPDGQVRARFQVPHTGKDLRGLTRRLAKLAVGRVAIERPDGPVVQALLDAGFEVVVLPSRQVKHLRGRYGSAGNKDDRFDAYVLADVLRTDGHRLHPLRPDSPETAGLRAVSRARKQLVDQRVALANQLRANLEVAFPGAAGLFAEVDSPIALRFLARFPSAERAAWLTQARLGGFLRRVGYCGRVPTAELYQRLVHAPAGLQGSHGDACAAVTLSLVATLRAVRAQIEELDGEILERLAAHADGHIFTSLPRSGRVRAAALLAEIGDCRQRFPDPTALECLSGAAPSTRQSGTHTTVTFRFACDKKLRQAVMDFAGDSRHANPWAAHLYNQARARGHRHPHAVRILARAWLRVIWRCWQDGTAYDPARHGAYQRLIAKEA

SEQ ID NO: 95993 - protein, 350 aa, unidentified
MLIIGCDYHPGFQQIACVDTETGEVVERRLAHRDEAEQFYQDLKQRNTTVRLGMESSGHARWFERLLRDLQFELWIGDAAEIRTKRVRKQKTDRQDAQLLLRLMMEDRFPRIWVPDAADRDLRQLLWHRHRLVQMRTRVMNQLHVVALNEGLRRKKALWRPAGRNELESLKLAPWASRRRQDLLDLLDQLTPKIQELTRALEQEVESRPVTRRLMTHPGVGPLTALAYELVIGTPERFHCGKQIASYVGLVPREESSGDRRRVGHISKQGNVLLRFLLVEAAQVTVRSHPAWRSTFFHLAMRRGRKIAKVAMARKLAVHLYWIWRQGLDYGQLQKLGSHAGEPGNRHGVQ

SEQ ID NO: 95994 - protein, 450 aa, unidentified
MAKRKKKGKTVKTLHTLQPNAAGIDIGATEIYIAVPEDRCSETVRHFGTFTEDLHQAAQWMKQCNIESIAMESTGVYWIPVFQILDRYGFDVSLVNARHVKNVPGRKTDVQDCQWLQYLHSVGLLRGSFRPGQDICAVRSLLRHRDTMVKSASSHVQHIQKALTQMNFQIHNVISDIVGVTGLAIIDAIVAGERDREKLADLTNPRIKADRQTILKSLEGDFRPEHLFTLKQALSSYRHYQQMIRDCDLEIGNHLNSFDSHPDFDETSLPPSNRSKRKSKDTEPAFDLKSHLHRLFGTDLTQIDGVSTLTGQVILTEIGPDLSMFPTANHFCAWLGLSPQNKISGGKILSSKTRPGSNRAAHALRLSANALFRSKSYLGNYYRRMRSRHGAPKAITATAHKLARIIYHLIKNRKPFDETVFAEQERKHQERMKRSLIKRAKSFGLQVVPA

SEQ ID NO: 95995 - protein, 412 aa, unidentified
MRVIIERCCGLDVHQETVVACLLIGAPGDRPTKEVRTFRTVTRDLEVLRDWLAAAGVTHVGMESTGVYWRPVYAVLEGHFDLIVGNARHIRNVPGRKTDVKDAEWIADLVRHGLIAKSFVPPRPLREMRELLRYRRKLTESQAAERNRLLKLLETANIKLASVMSDVFGVSGRAMLRALIEGRASVEAMADLARGQLRRKRSDLILALEGRMEEHHRFLLATQLRRLEAIEQDIATLDLRITERLEPYRMPHALLMQIPGVDWLVAAVIIAEIGVDMSVFLSVYHLSAWAGVCPGSHESAGRQKSGRARKGNVHLRTILVGAAISAARTKGSYLKDKFHRLKARRGAMRAALAIAHKILVSAYHMLAKGLAYRDLGEAYLDQISETRTVANMKRRLERLGYHVTLERTTQAA

SEQ ID NO: 95996 - protein, 356 aa, unidentified
MKELSFKGQEIYVGIDVHLKQWNVAIYTEKSFHKVFQQPADASVLGNYLRRNFPDADYRTVYEAGLTGFSTHRQLENEGFHNIVVHPADVPTMDKERRQKRDKSDAMKLGKALRSGDLSAVYVPSLKVQQDRELIRYRCDKLIPKLTRVKNQIKSFLHLYGIDIPAEFKTGPSHWSKAWVAWLHSIQLTHISGQQVLEHLLEELAFCQTRLRQVDRQIVALSRQEFYRDRVKLLRSVPGIGLLIAMVILTEIDRMDRFESLDKLCHYVGLVPNVYASDVKERVGHQTRRGNSLLRRLLLQSAWVAKNRDPALLLKFDELTKRMNANKAIVRIQKKLLSRIRRVMLTGEPYECGIVQ

SEQ ID NO: 95997 - protein, 351 aa, unidentified
MNFIGIDLHKKTISACVMNQDRKVLKRQTLPCREPKQIVAFFRQWGEFQAVVEATASYEWLWQLLEPLAQRLVLAHPKKLRVIAESKNKSDKLDAQVLADFLALNMIPEAYRPTLRQRQHRALVRQRCFVKKNLTRVRNKIRRLVSDYNADRRDLFTQEGLRYLREAEKKFSKADRFVLHQLMRQWKYHQQQLQVVNRRLKTFAGKAPPKEKEIRAVLGSMPSVGPTTIEIVLSEIGDIERFRSNKRVVAYAGLAPGHRESAGHKKDLGITKEGSGLLRWALVQTAWRTLRCSVRWRWVYENLKKRRGSKRAIVAVARRLLTVMAALWRTGQRYRLEGGDPASIPALVPAR

SEQ ID NO: 95998 - protein, 336 aa, unidentified
MTIIRVGLDTSKHVFQIHGVDENEQAVLRRQIRRGAVEKFFAKLPSTRIGIEACGASHHWARLLRGLGHEVLLMPPQYIKAYVKRGKNDKIDAEAICEAMSRPTMRFVPVKTAEQQAALTMLGVRDLLVKQRTMLINAIRGHAAEFGVTTAKGPKQIAELLARLASDEDVPGLAREMIGVLASQLNGLDIKLKALEARLMTWHRQDQTSQCLATIPGIGPIGGVSFALKVPDAKAFRSGRRFAAWVGITPREDSTAGRQKLGRISRAGDEDLRRLLVIGATAVIRAAKPGRTAPWLMGLLARKPKKVAAVALANKMARIVWAMMVSGETYRRPAQA

SEQ ID NO: 95999 - protein, 380 aa, unidentified
MTWWGLSGAGFGPTPGNMNSVYHTELSSHEGTRRQFNGGKADIKLGIDVHQDFYVVVEQVDGSNPKPPQRFQKQAFLHWATKLKQSGAEVYAVYEACGFGFTLQRQLSELGIHCYVVCPQKLDEQNRRVKTDGLDAKALCLKLDRFVEGNRHALALVRVPSEEEEQARALHREREQLVNVRKVLEAQGRSLLVNHGMEPVQGWWKKRAFATLAAPEWIKELLGNSQPVVLLLQEKIDQLTRQLQNAANAEPPRGLGKMTSVIIDREIGGWDRFNNRRQIASYTGLCPGEYSSGNTRLQSCVTKHGNPRLRAALVELAWRLVRLQPNYKPVRKWRQILAKGALATGAARKKAIVAVARQLAVDLWRIKTGRLRAKELGLIN

SEQ ID NO: 96000 - protein, 391 aa, unidentified
MILVGIDVAKDKHDCFITNSDGEVIFDPFTIANNKAGFNDLLKKIQSVSKDLSKVKVGLEATGHYSYNILGFVLDKGFPTYVINPLHTNLFRKGQSLRKTKTDRIDARTIANMLLWDQSLQPYSLESYHNEELKSLTRYRFSKVQERSKLKTSVARLVNILFPELEPLVPTLFTASSLSLLSELPGASYVADCHLTRLTHLLQEASKGHYGREKAIEIRDAAKNSIGSVMPAKSLELKHTIALIRILDDEIREIESEIKTLMDKTNSTITSIPGINYRIGSMILAEIGDFKKFKSPDQILAYAGLSPSTYQSGQLTSSYAHMEKRGSKYLRYALFNAAIYVCHWDPVFKAYLDKKQKEGKHYYVAISHAAKKLVRLIYAMEISGRPYFKVA

SEQ ID NO: 96001 - protein, 344 aa, unidentified
MSEVITIGLDIAKYVFHAHGVDERGRAMFSKRISRRKLLDFFAAQPSCTVALEACGGAHHWARQLSRLGHEVRLIPPAYVKPFVKRQKSDAIDAEAICEAAQRPGMRFVVVKSEQQQAAGLVFRTRDLLVRQRTQLINAIRGHLTEYGWVSPKGPSHVARLADLIEEEEMVSSLPEAAHAMFRLMLDLFAGLNGKIADLDKEIARRAREDEVSRRLMSIPGIGPISATAIAALAPPAETFTKGRDFAAWLGLTPLQRSTGGKQKLGATSKMGERTLRRLLIIGSSAVVQQASKRGVPRGSWLDQMLARKPRMLVTVALANKMARIIWALLVKQENYRAPVAAEA

SEQ ID NO: 96002 - protein, 402 aa, unidentified
MVFVGIDWSEKWHDVSLMDESGRLLGRRRVDDSAAGLTRLQSLIAEHAEDPAEVAIGVETPEGLMLRALQAAGYTIYPVNPLSASRYRDRHSVSKKKSDQGDAMMLADLVRTDRHKLRPLAEDSQLAEAIKVLARSHKSLIWTRQQLGNQLRSTLREFYPGALQAFGEDLCEADSLALLERAPTPAQGRALSLAKITSALRKARRHNPEERAVAIRDALRAPQLEQPAVVAQARGVTVADLAGLIRDIGARIDHQEQELDRSLKAHPDAEIYLSLPGLGPVLSARVLAEFGDDPNGYHDGRARKNYAGTSPITKASGRTKVVLARFIRNDRLADACQRWAFSALSASPGARRYYDLQRARKKDHEEALRILANRLVGILHGCLRHRQLYQEDIAWPSMEAAA

SEQ ID NO: 96003 - protein, 358 aa, unidentified
MKQHNTGKKTRNRQTIGMDVGDKVSHYCVLNREGEIVEEARVGSTKKALEQTFGALPHSRIALEAGTHSGWMSRLLHSLGHEVIVANARQLRLISESSRKDDRTDARTLARLARADPELLRPIRHRSEQAQQHLTVIRVRAALLEARTALINAARGLVKVFGERLPACDADYLGGKQLEPLPVELRTRLRPLVEEVESLTKKIQESNREIEQIAREHYPETGLLRQVSGVGPLIALTYVLTVDDPRRFAKSRDVGCYVGLRPKRSQSGESQPQLRITKEGDRYLRAMLVQGAHYILGWRGPDTDLRRWGLHLAARGGKSAKKRAIVAVARKLAVLLHKLWTTGEVYEPLRQAALRAAA

SEQ ID NO: 96004 - protein, 353 aa, unidentified
MLYLGVDIHKNSCWVTVLEEEGREREQRKLSMDRKELLEYFGKIPKPAKLAVEATFNWYYFLDLIEPLGFELHLVHPQKTKAIASAKIKHDKLDSRVLAQLLRADFIAEAWIAPRRVREERQLLRHRTRTVRWATRAKNGVHGILNREGIVAPLDSLFGPQGRAFLGEVKLKEFDRWEVDDQLARLDLLQGQIDTLDQEVVKRGKADEVTQALDAIPGIGPFIALLLVAEIGEVRRFPSAKHLVSYTGLAPSLYASGERRWTGQITKQGSSLLRWALVQAAHRAAVSARFAGYYEHQAKRHGKAKAAVALARKLATISYYRWRAVEARRSPVGGDKFGSAPRLAHGQNTDPQV

SEQ ID NO: 96005 - protein, 334 aa, unidentified
MQNVTLIGIDLGKHSFHVHCQEKSGKALLRKKFTRARLMEFLAGSPSATVVMEACAGAHFMARRIAAFGHEAKLISPQFVRPFVKSNKNDFVDAEAICEAASRPSMRFVQPRTEAQQAMRALHRVRESLVRDRVKTTNQMHAFLLEFGISMPIGTVVIKRFSTVLAENELPPYLAQLLMRLHAHYLYLVEQITELETALEQELRRDETGQRLQTIPGVGPITASVLSSQLDDGKQYGCSRDFAASTGLVPRQYSTGGKNTLLGISKRGDKNLRRLLVQCARVFIQRIDYQSGRLAEWVKAQLERKHSNVVACALANKLARIAWAITTRQTVFER

SEQ ID NO: 96006 - protein, 369 aa, unidentified
MGDGITYVGLDVHKDGIVVAVAEGGLRGEVRDYGRIANTPAALRRLAHKLDREGVTLRFCYEAGPCGYGIQRQLSALGQECIVVAPSLIPKRMGDRVKTDRRDAANLARLHRAGELTAVWVPDPGHEAMRDLVRARLDAVRALRRARQQLSGFLLRQGCHYGRPAWTKLHRRWLAGLKFEQAVHHIVLEDYIAAVEAAQDRRDRLTAQIAAMLSDWTLAPVVAALQTMRGMALVNAATLIAELGDLARFANPRQLMAYLGLVPSEHSSGASVKRGSLTKAGNSAARRLLIEAAWTYRFPARISRELRLRQEAQSRAIREIAWKAQLRLCARYRKLARSGKPANVVTAAIARELAGFVWAIARRVPPAVS

SEQ ID NO: 96007 - protein, 411 aa, unidentified
MQIKAFQPRERGGQPCILPEAPSSGHSEPSVHGAGRSPATAGTETGGRSNNLRPSKAVTKRDRRRSCHKSPNSRLNRRHSGGSSSYLQGRDFSVSQGYDKYVGIDVAKESLDVSGLTADSPSQFENTAAGRAKLLSLLPQAGACLLVAEATGGYERELVAEVVAAGHHIAVVNPRQVRDFAKAIGLLAKTDRIDAGAIARFGEATRPTPQGFSEQQEQLRELIVRRRQLVDHRTAEKNRCEQAHSTLVRNSVRKSIEGIDKDLKRIDRAIIQLVESNDDWRGRYERLKSVPGVGAQTAATLMAELPELGRLNRQQVAALVGVAPFNRDSGQFRGRRTIWGGRATVRSGLYMAALSAKKHNPVIRAFAARLLAKGKPPKVVLTACMRKLLVILNAMLRSDEMWGPRLATLAP

SEQ ID NO: 96008 - protein, 366 aa, unidentified
MGWMAPLRHRRAKLVFSKNHQEREPSMSEITTIGLDLAKYVFQVHGVDAQGAVVLRKQLRRGQVLALFSRLPRCVVGMEACATAHYWARELGALGHEVRLMPAQYVKAYIKRNKNDAADAEAICEAVSRPTMRFVPVKTAEQQGAVLLHRGRERLVRQRTMLANALRAHLAEFGVVAPQGLRNVAKLIAIVRDANDARLPALARQVLQVLALQIEQLEAAVSALEQELMAWHKSNAVSQRLATIPGIGPIIATAIAATVVEPSGFRSGREFAAWLGLVPRQNSTGGKPRLGGITKRGNRYLRRLLINGASANLLRSKATKADPWVIGLRRRRPPLVVAVALANKTARIAWAVMLREREYQPRAVAA

SEQ ID NO: 96009 - protein, 321 aa, unidentified
MDYLGLDIAKANFDAALLIATEKRHGRFANSEAGFIQLLAWLARHRPQGGHDLHACMEATGNWGLDLAAFLVGAGITVSIVNPRQIKSFGESELARNKTDKLDAALIARFCRAHTLLPWVPPLPGMRELREMVRRCAALKAMRTQEINRQKAGFASAGVAASLARGLAHLDAEIATVTDEIHAMIAGNPELQARFCLLRSIPGLGEVTAAVILAELPNITEFTPKALAAFAGLSPQESSSGNRRLQGGISRIGNARLRAALFMCALSARRHNPALKQFVQRMTSAAKPNKVILVAIARRLLVFAHAVLRSQQPFQSQGQAA

SEQ ID NO: 96010 - protein, 371 aa, unidentified
MDESSKTLYVGLDVHKDSIAVAYAPEDRGAEVVSLGAVGTRQCDIDKLIRKLQSKGATLVFVYEAGPCGYWLYRYLSRKGLACHVVAPSLIPRKAGDRVKTDRRDAITLARLMRSGDLSSIYVPGIEDEALRDLSRGREDAMQDLKRSKRRLKSFLLRQDIRYEGRASWNPAHLRWLSEVVCPTPPQQIVFQEYVRAVTEQQERLQRLERELHEAVKGWRLYPVVEAIQALRGVELTGAVILMTELGDITRFDTPRKLMSYLGLTPSEYSSGERRRQGGITKAGNSHARRALVEGAWAYRYPAKVSRHLQLRLEKLPAEVQAIGWKAQVRLCKRYRQLTARGKHVNQVVVAIAREMAAFAWAIARIVPLAS

SEQ ID NO: 96011 - protein, 341 aa, unidentified
MEQATTIGLDIAKHVFQLHGADAAGHVLFRKRITRVKLLSFLAAQTRCVVAMEACAGAHYWAREIAKLGHHVRLIAPAYVKPFIKRQKNDAADAEAICEAAQRPSMRFVPVKTEEQQANGIVFRARDLLVRQRTQCVNALRGHLMEYGYVFPKGITHVEALVALVEDLQSSLPDSVRVILKLLVDTFTALEAQIAVLDAEINQRSKSDPTARRLMTIPGVGPITSTAITALVPAAEGFPAGRDFAAWLGLTPLQKSTGGKQKLGAVSKRGERTIRRLLIIGASAVVQQASRRGAPKGSWLAQMLARKPKMLVTVALANKMARIIWALLVKGGTYRAPAVAA

SEQ ID NO: 96012 - protein, 454 aa, unidentified
MQLWCGIDWAENHHDVSVVDETGTQLARMRIEDTVAGFSQLMSILTEQQRSSAEPITVAIETAKGLLPAALRAAGVPLVAINPLAVSRYRDRHSPSRAKSDAGDALVLANILRTDPHSHRPLPADSELAQSIHVLARAHQDAIWDRMQIASKLRSVLRQYYPSFLAAFPDLASREARAVLHLAPSPAQGQLVRKSALTAALRRAGRTRGIPAAVAVIHAALRREQLHQPPLVEAAMAEHATALLHALDAAVTAVARLEESLTTAFNQHPDAGIITSFPGLGTVLGARILAEIGDDRTRFATARGLKAFAGTAPITRASGMKTIVTRRVVRNKRLGQAAYLWALPMIAHSPAAHAHFTARREHGDSYSAAARNLTNRGIGMLHHCLQTRQHYDETRAFPGHPNQRVTPDRPLAGQAYQETGAHPHPAPGHNDQRPVTSIAPPASQACQKTEAQPA

SEQ ID NO: 96013 - protein, 340 aa, unidentified
MEKRFIGIDLHRNRFTCCMRLENERTYVTEWELEDLGKFVKKLRPGDEIAVEITGNTRLFFDAVAGHVARVVVVNTNQFKVIRQSVKKTDPHDARALALYLSKNMLPEVRMKDKEHGQLASLTQTRDTLVKLRTALKNKINNILSARGLNLAKEALSSEKKLNEVVELPFDEIVRIELRVIVEQIRSLNKSIAELEKTIGEEGSKLEGHKGLSSIKGIGKITGAILLSVIGDVNDFADEGRLASYFGIVPRVSNSNETEHSGRIHKRGTKLGRTALVQSALIAANYSPYLKRFYEQVKARRGAGKAIIALARKFLGIIYRTLKNKWVFEDFPSFVLAEAS

SEQ ID NO: 96014 - protein, 425 aa, unidentified
MKSTQNEKISQIKFETLVVGIDIGKETHYARAFDYRGIELARLLKFSNTDQGFERLDQWMRDICKQQEKTEIIAGFEPTGHYWFVLGDHLKRQGHKLAIVNPFHVKRTKELDDNSPTKNDRKDPKTIAMLVKDGRYREVYIPDDIYQELREAVSERERLQEQLTSIHNRVVRWLDIRFPEFTTVFKDWRRNASLITLRSFPTPEKVMEMGIDKIVETWRKQMKRASLKRAEALVKAASRSVGRTSGKVASEASLQNLLAEYDLYCQQYDKLEQLMQELLMQVPNADKLLDIKGVGLITAATFVGEVGDISRFQDPRQIQKLAGLNLVENSSGKHKGKTTISRRGRKRLRHSLFFSMIAMLGKNQEFRLLHQRNLMRENNPLNKMQSIIALCGKLIRVFFAILTKGVDYSPEKMLRDMEQSVRVAA

SEQ ID NO: 96015 - protein, 421 aa, unidentified
MTVTSSNTPPPVLVAIDISKLKHDVFVKHPDGKTNTFKVANNFSDFEKFCAYLASLKSTCRIALEPTADYHRLIAWRLLQCGYDVRLASSIACARTREAIFNSRDKNDVKDTKVIMYLLESGIVQHYHDPLANNLNDIQEIANTYAVIAYRRTQVLHSLKNHYLALYFPEIEKYLISTRALWFTKTFSRFPTPGSISKLSEKKFIAIANPLVGRKQHKKQWLQELYITATHSIGLPVSETSVAAEMFVLMLSEYERLTTIRMNIQEKARSVLSSNPDYELLQSIPGVGPIIALSILAEGGDLRRFKHHKQFLKFCGFDLATHQSGKYKSNSSLSKRGNARLRLVFWQAATIAIRQTENSFRNKYTRYITANTDTADNRRKARVAVAAKLARVAYSIVKSGNPYRPYFESALPGGKIPLIGP

SEQ ID NO: 96016 - protein, 325 aa, unidentified
MSSFSNYVGIDVAKKDFYACFAENSESRKFSNTAIGINSFIRHLSKNNFQIQNTVIGLESTGSYHLRLCVQCTTLGFQVKVINPLIVKKQNQTNLRRVKNDPQDASLVRYCLTTGAGYVFAETADTLLLKSLVRQRNSLATMLFKNKRQQDDIGYKEECLKSKFNPVYQEIGVILSEKIKELERQLKTFRKPEQKLLQTIPGVGPITAISFIAEVGDVRRFNHSKQLVAFVGLDSRVHQSGTSVRGKGYISKRGNKILRTRLYNAASVAVLHPNLFQKFFQKKRSEGKPYKVALVATMHKMTNVIHSVWTNNKPFTDHTNKPKKD

SEQ ID NO: 96017 - protein, 395 aa, unidentified
MDVHRDTVVATVSGIGVSIETRTYTTYTNDLYKLREWLLSVGVTHLAMESTGIYWKPIYNILEDDFEVILINASHVKNIPGHKTDKKDSRWLAKLLLSGLLKASFIPCKEIRNLRDLTRYRKKLVRQATADRNRFERILQDANFKISNVITDIFGKSGMKLIDALLNDTTDFDTLYQLCHGRIQKKKDILRESLMGKLTVHHKYMLTTIRQNLYATMSKIDMIDAQIQVIASPYRTELAMLQTIPGINSISAACLLSEIGADMSTFPTVHHLASWAGICPGNNESAGRIMSGRITKGNQYLKPTLVECAWSATRVKDCYLRRKYESLVGRRGKKRALIAVGHKILIAAYHIIKDKVAYKDLGYDYVDARRKTNQVQSYLDKLRNLGVSVEITAIQ

SEQ ID NO: 96018 - protein, 405 aa, unidentified
MNEFNPEQQRIETASALEVVRNAGVNAGNGERHAAYVGLDVHKETIAVAVAEPGREEPIYHGEIANKPKTVEKMLAKLSEAYDGGLLLLCYEAGPCGYVLYRRILASGHDCQVVAPSRIPKAPGERIKNDRRDALKLARLLRGGDLTAVWVPDQEQERMRDLSRARDDMKGQERKARQQLNAFLLRHGYHWPRGKSRWTPAHENWLAGLKMEHPWQQVVLEEYIAAERAAGERVAQLTDHLMRALPEWSLAPVVDSLIALRGVDKLAAIVLLAELGDISRFESPKQLMAFLGLVPSEHSTGTRRRQGGITLTGNAHARRMLVESAWSYRFPARWTKHLKGKACNASAEAKQIAWKAQTRLCGRYRTLTRAGKNTKLVCVAIARELAGFIWDIVRQEMPRLAVQEG

SEQ ID NO: 96019 - protein, 316 aa, unidentified
MTTQLFVGIDISKKHLDVAISPGEQTFTCPNTEAGIQKIVRRLQELNPQIILLEATGGYEFLLIAALREAELPACFINPKLVRNFARGAGIAAKTDRLDAQVLALYACRMRPQPRTLPTQQQQELKLLLTRRRQMLEMIQMENNRLDPTPLPRIAQSIRQTIQSLEAQLAALNREIDDFFQQHPLWVGLEQTLTSVLGVGHLSALILIAYLPELGRLNRKEIAALAGVAPFNRDSGQWRGQRHIEGGRSALRQGLYMATLVATRFNPVIQACYQRLLAKGKAKKVALIACMRKLLTILNAMVRKQQLWCPPALINS

SEQ ID NO: 96020 - protein, 374 aa, unidentified
MSINNNNFTGISQVYNIGLDVHKKNWTVCIRNSGLFLKKYSMNPSPAELYNYLKRNYPDGTYYSVYEAGYCGYWIDRELKKLGINNIIVSPSDVPTSSRDKYEKTDPRDARNLAMHLQNGTIKGIYIPNEFQLHLRSLSRLRCQLIKQQTRLKNQIKAYLYFYGISLPENSVMLHWTGKFIEHLRSFEFSHSSGKLQLEIYITSLLEVRRQILNTVSLLRKTIKENHLDEPILKLCKIPGIGFITAATLYTELMDIRRFSSFDKLVSFVGLSPSKRSSAETEKILGISFHYNKYLRSLLIESAWIAVRVDPSLTNLYGQYIRRMSKQEAIIRIAKKLLSRIRFVWVNNKEYQNYGDSLEVVNKEQKKIILKKLN

SEQ ID NO: 96021 - protein, 375 aa, unidentified
MNNNNTLYVGLDVHKESITVAYAINSEPVELMGKIGTSPTDIQNLCKRLRSKSSQVSIVYEAGPCGYGLYRRLVKSGFDCMVCAPSLIPKKPGERVKTDRRDAIRLVRSLRAGDLSAVYVPGVEDEAFRDLSRAWASARDDLRHTRQRLKSFLLVHGGHYVGRADWGPAHRRWLSKYSFESPWRQLAFDEHRRTIEDRQAQCERLESALKEAVTEWRLYPVVEALQAMRGIQFITAVGLISELGDLTRFEHPRQLMSWFGITPSEYSSGGSRHQGSITKAGNSYARKLLVEAAWSYRHPARISPAIQKRQENLPRPVIDRAWDAQLRLCKRYRKLQAKEKNVNITIVAVARELAGFIWDMGRIAMSVAQQPQCHK

SEQ ID NO: 96022 - protein, 339 aa, unidentified
MELKRVSIDTSKHVFTIHGVDQTEHPVLRREIRRTQFETFFAKLGPTEVALEACAGSHHWGRLLSRLGHRVKLIPPQYVKPFVKRSKNDRNDAEAIGEAASRPAMRTVPVKTTEEQAATIIVKHREMLVAQRTQAINALRGHAAEFGIIAAKGCPNVAALLTVLAADEAIPVSARTMFGEMGQHVGDLDGEIAALDRRLLDQHKVNPVSQLLAAIPGVGPITAITMALTVDPGHFESGRHLAAWLGLTPREHSTAGKHRPGKISKAGNERLRQLLVVGAMSVIRVAKPGRQSASGWLLQLLERKPRKLAAVALANKMARIIWAMMARGEAYRRQPVTAA

SEQ ID NO: 96023 - protein, 355 aa, unidentified
MKATHILGIDISKDKFDVCLRPTEATEARLQHAQFENNPKGFKKLQRWLAQKPLGGLHACLEATSRYGDGLALFLHEQQHTVSVVNPRRIRKYADSQLVRSQNDRLDAQIIADFCATQTPRPWQPTETAVRQLQDLSRLRQFFVAQSQRLQNRLQTESPALARLLRRHLGQAQKTIQELETRITQHLQAHDPLANKVALVDSIGGIGLVSAAAAVAELPPVERLDHAGQAVAFAGLDPKKKDSGSSVRGKGHLSRMGSRPLRAALYMAAVAALTHNPLVRAQAQRLRAKGHSGKTVVCAAMRKLVRLIYGVLKTGQPFDPKWRQRNRAVRCERAGASGGDERPSTPLASPPVAAA

SEQ ID NO: 96024 - protein, 387 aa, unidentified
MAAAVDRPEAPSPIRTDLGAIFVSLELSRSTWLITSLSPGGAKLSKHSVRGSDVAALLERFAHLKEKARARTGEVFPLIVIQEAGLDGFWIHRVLQSEGIESHVVDPASIATSRRRRRAKTDRIDGEALIRALLAYKRGEPRVCTMVKAPTPEEEDRRRVCRERQVLIAERVQHVNRVKGLLFCQGITGYEPLRRDRRERLEELQTGDNRPLPDHLKSQLRRELDRLELLMKQIKAVEVERDALLTGEHASTPALAAMLHDVKGIGPEFAGILWAEGLFRHFENRRQVAAYAGLAPTPWQSGSVVREQGVSKAGNPRLRTTLIQLAWLWVRHQPRSALTLWFEERVKRNSGRLKRMTIVALARKLLVALWKYVTAGVVIEGAVLKAG

SEQ ID NO: 96025 - protein, 415 aa, unidentified
MNDLIRIGMDTSKSVFVLHGVNAAERPVLRKRLRRRQVIEFFAKLPSTQVGMEACGGAHHWGRELGALGHEVKLLPAQRVKPYVARNKNDAADAEAICEAMSRPRMTFVPVKTAEQQAALMLVGMRDQLVARRTQVSNTIRGYAAEFGLVAATGLDKLEPLLARIATDATLPALARELFAVLGEEYAELKLKLGQIEAQLMAWHRQNELSRRLAEIPSVGPIGAALMAMKVVHPRAFRSGRDFAAWLGLTPKDHSTAGKLRLGVITRAGDEALRRVLVLGATAVIQQVRRGRGHPSSWLVALLKRKPPKLAAVALANKTARIAWKLMVSGERYHGARATDAAHGNACSEGASSQPRKAGAVLAAVKARPISTAARRTGSATAGLDGGCARRATTIAVGTKKRSAVEQRNESQRHD

SEQ ID NO: 96026 - protein, 342 aa, unidentified
MNITTIGLDIAKQVFHVIGADERGHQGLKKCLRRGKVLEYFANLPACVVGIEACGGAQYWARELKASGHDVRLMNPRYVKPFLRGNKNDYNDAGALCEAVVHPRMRFVPLKTPEQLDLQALHRIREGLVKDRTVLVNRTRGLLGERGIVVPKGIGSFRRRLPEVLEDGDNGLSDLFRGLVAQTYRQIRDLDEQIAHHEATLVRTSATHEVCRRLDEIPGVGAIIATALVAAAGNAESFRNGRQFSAWMGLVPRQHSTGGKPRLLGISKRGDKRLRTLIIHGARAVVRHAGHKTDPLSLWIQALQARKGTNVAVVALANKIARIAWVIIRREERYQPTLATRS

SEQ ID NO: 96027 - protein, 429 aa, unidentified
MYPQTIPVMGIDVSKDKSDYCILDTDNRVVRRGVVKHTLDSMNKFLNMLSVTCSELDAKPVCIMEATAHYHRILYKQLVDNGYTVMVINPIQSGSIKNVDIRNIKNDKVDAYRLAYLYRLGKLKASNIPEGVLSQLRSLSRFHMTLTDDIADHIIRLRACVEQSFPGFEEVFSKLKGKTPLAVLEKYPTPAAVLSASDDELIELMSKASRKGVCYAKPRVKNLKSAAETALKIGLDRPEDEILIPALIAIIHQLQESLNKADAEIAELIKNNDHLKEQTDLLKSIPGVGDHSAAALLAEIGDISLFSNAKQLTAYFGLDPAQRQSGKFNGTRTKLSKRDSSYLRRVISMVAVKNAFKQKNGTYVNPVLAEYYKNKCEYKEKKTALCAVMRKLVHIIFAVLRDRKPFELRTPEEHERLIFEKNRMLWLSA

SEQ ID NO: 96028 - protein, 366 aa, unidentified
MNYNTVYVGMDVHKESFTLCSCKYEDKKASHYQRTPASYKNVLRYLAFLRTIYGEDTRFVCGYEAGCLGYSLYHQLENFNVECVILAPTTMLEQRSKRRIKRDAEIIARSLAQHNYSPVHIPTETDNQTKEFIRMRDDHKAELKKIKQQILAFCLRQGYQYDGSGNWTAKHVKWLRSLKTEGLYKEILDEYLLTYTILTDKLNRLDQRIEELASEEEYKEPVSKLTCFLGIKTHTALSVIVEVGDFQRFASARKFAGYLGLVPGQHSSGDDRNGLGITKAGNTHVRRLLVESAQSYTRGKIGYKSRVLRSRQAGNSPQIINYADRANERLRRRYYQMVLKDGKKYKYCKNSSCKRACLFHMGNDDR

SEQ ID NO: 96029 - protein, 369 aa, unidentified
MPHVTSIGLDVHARSVAAAAFNPFTGEVVHRDFGTDAAEIAEWALGFEEPRACYESGPTGFHMARELRELGLDCAVAAVSKMQRPAADARRKNDRRDAEFIARMLATHNIVEVPLPDAAVEAARDLDRALDDATAEYRRARQRLNMFLIRLGHVWDERNADGARKGSWTRAHWRWISGIRLEGPQRDVLEYYVTAARCAESDRRQLEKEVLALARTDRWRPAVEALSCIKGIDTLTAFRLAAEAGSFTRFRTAPAFASWCGLIPSERSSGETERRGGITKTGNRLARTALVESAWHYLTCTPRPKAPAPGADVPAAIRARADDCTARLCRRREALAAAGKSPCKANAAVARELACWVWEIGCRAEGTLG

SEQ ID NO: 96030 - protein, 349 aa, unidentified
MIRNKPRGATVYGIDLGKNIFHVVGTDSAGNVVQRVKFRRDTLRAFFERAERAVVGMEACPGSQWLARKLQAMGHTVRIIPAQFVKPYVKSHKNDTIDAAAIAEAVTRPTMRFVQVKQPEQVDLQSLHRIRDQMVGSRTRLICQMRAFCLEYGVAIRQGAGLFKSDLPRVIADECNDLTPTMRRLLNELFEDLMRLEKRIAQVTREIEALAARDEKARRLMTIPGIGPLGATALLAASGNGQQFKKARDLAAWLGLVPQQYSTGGKPQMFGISKRGNCYLRRLLIHGARSCVMHLDRSRDRLGAWLRQLHSRMHVNKVTVALAAKIARIAWVVLNRPGAIYERRDPALA

SEQ ID NO: 96031 - protein, 421 aa, unidentified
MTKNINRANGKKQDSAAENGNLIKIRKPTRSGNITGCAEVELGRQQRLGVLSLLQKLEQAKQAPKADPVPENVEYYIGVDIGDKKSDYCILDKNTTIAATGKLATTTTEFGSHFRAIPRSRIALEVGTHSPWISALLEGIGHEVFVANPRKMGGGKKKTRQKNDKIDAETLARQAKSDPKLLYPIRHRGEEARHALVLLRARQTLVRARSRLICGVRGLVKSDGHRLPGCSAQSFHRMEQTHVPEALRETLEPIFEQIGMLTKQIHKYTADVERMGRHAYPETDILRQVDGVGPVTSLAYILTIENPGRFAKSRDVGAYTGLVPRMFDSGDSHPQLRITKTGDKMLRELLVECAQHMLSRHGKDSDLRRMGLKLAARGGKNAKKRAVVAVARKTAILLHRLWSTGEVYEPLRNSQRNEHVA

SEQ ID NO: 96032 - protein, 336 aa, unidentified
MTYCGIDLASQASAVCVLNEQGGILREQMVATEEGDLQTALDGLGRLRCVVEAAPLAEWVAQMLEELGHEVIVIDPRRAKAVIQTKNKTDKLDARNLAKLAQTGWYTAVHRKSPAARLQRTHLQARQGLVTTAKAQASRIRGLLRAHGIKVGKVSAGQFVARVHTLIAQHAPVLGPILAPLVTIYQHAQQAAKTLEQTVQRHAQQDPVCQRLMQVPGVGPLVASTYVATLDDPTRFPKSTQVAAYLGLVPRVYQSGETNYHGRISKEGDKLLRWLLVEAANVLLTRTKRSCALKRWGQKLAKKRGQGKANVAVARKLAILLHRLWRTEADFTPVAR

SEQ ID NO: 96033 - protein, 562 aa, unidentified
MATTSCRRRRRSARYQSVAKPSGSIHPRVQKATPEHFGIVAVDCAKARSKWLLADFYGRVLVEPTLLEHTRQGFQQAIAAVRQAIATHDLRDLVVAIEQTGVYHQPVKHVFTTAGFETRNVHPLTTKQFRIPADPGIKTDDTDLLAIHRAAANGFGLIEPKRDELYTELRLLARHRRDLVVKNATLRNQIHLELDAVFPGLSAAVGNIFDHEPTLVIARHVRSAQEIRALGLEGLARLLDDKGVRYQRRSLAKILAWADQAHEGIECSKIHKKIFEDLDDERRARLRLIRSLEREMAALLVRTPYVLLLSFPGINVVSAAEFAGEMGPIENYPSDGAITGRAGLFPSRYQSDRVDHSDGPLVRRANHALRYVILLIADNLLLCNDHFRSLGQRWQAQGVDPRIRCVRVAKRFCRIAYQMVAGRQVFRHPSCRQRHKILDKLVKFHIDHDLDIMMMSNDLHAAVQWIPQAEAAAEAEPLQARLTPRSSPVPARSPAPVPQANPLTTKPVPACAQTPPRVATRPEATSRRSSGPRPLSEILPEVLVRLGVKLVESSAKGETDLT

SEQ ID NO: 96034 - protein, 361 aa, unidentified
MQPTQVQDFTRDGEVLAVALELATKQWKVALDDGRRKAPMVKVVAHSRPEGRIAEVLAVIAAAKQKWGLAAGIRLVVVMEAGQDGFWIQRALSARGIEAVVADPASIPVERKARRAKTDRLDAILLVQTLRAWLRGERNRLRVVRVPPVAAEGLRHYARERGTLQKEIGQHRDRLRKLLRLVGNWDELEHDLAGRLERGEVRCHDGSALPAAQQERMRRECARLQQAERQLVELEKALVAQLPEREQQRLLQLMQLKAVGRVGALRLLLELFWRKFNNRRELGACVGLVSQPYDSGESRVDQGISKAGNQRVRALLIEMAWMWLKYQPQSELADGFVSTRAARGRASAASGWRLWRWRASW

SEQ ID NO: 96035 - protein, 428 aa, unidentified
MDEVDRNRLEEFRQLRQAIRQSEEHLIVGIDIAKDRHHAFFGTATGKTLLRRLVFSNDSEGFGKLLDQAEALRVRHGLKKVVYGMEPTGNYHKPLGEYLIHMGRTVVLVSGVTVKHNRESLDGRWDKHDDKDSANVADLISQGKYLYYEYPTAELRGLRGLLSLKRRLKRQEQSYRVRIRNHLIAQYFPEMDRDYNRLGAEGLSIMKWCFPPSQMTELDVAPFIERVTSRRISTEKKRRLEAIWEKAGESIGCDAVPGVEHEAKVMVEGLRQIREMIKEIDGKIQELCESFPEYRSLLSIPGFGPDVSAKVLGAIGDPDRFQNGKQVLKLAGLDLSANRSGKDSPKAIPQISKQGKADLRYALYQAAFIASTKNRDFMRYYTSKLRGREKEKGIHTKMLIKLSAKMLLIAWTVMRKKETFNPTYLKAE

SEQ ID NO: 96036 - protein, 312 aa, unidentified
MKEAVFVGVDVSKDRLDVAVMPGGVQAFKNEVAGIKALTAVLLGERVELIVLEATGGLEIPLAAALSTAGLPVAVVNPRQVRDFAKATGRLAKTDRLDAQVLAHFGKAVHPAVQRPKDEQTRALEETLTRRQQLIEMLVAEKNRLSRAGGRPATDIRAHIGWLEKRLGRIDDDLTTQIKQSPIWREKDNLLQSVPGVGAVLSTSLLAHLPELGTLSHKQIAMLVGVAPLNSDSGKSRGRRIIWGGRSNVRKCLYMATVSATRCNPAIQKFFRRLRDAGKPGKVALVACMHKLLIILNAMMRAGEPWRAGSIA

SEQ ID NO: 96037 - protein, 350 aa, unidentified
MERVSEMKTTTMGIDLAKSVFQLHGVDARGHEVVRRSLKRAQMRAYFARLEPCLIGMEACGSAHYWARELAALGHTVRLMAPQFVKPYVKSQKNDAADAEAICEAVARPNMRFVAVKTVDQQAVLALHRSRAGFVKARTAQANQMRGLLGEFGLVVPQGIASLYRTLPAILEEADNSLPGPMRALLRRLLEHLKGLDLQVAELEAEIVAWHRQNEASRALAEIPGIGPLGASALVASVGDVHGFARGRQMAAWLGLVPRQHSSGGKSVLLGITKRGDSYLRMLLIHGARAVIRAFERKANPPEGWLKRLLARRHKNVAAVALANKMARIAWAVLAHGDRFRPDYSAAGAA

SEQ ID NO: 96038 - protein, 400 aa, unidentified
MLSIGIDVSKGKSTVCGMKPGGEIVYTPFEVQHTREGMSELVSLLRGSGEEVRVVLESTGSYHCPVVAALLENGIFVSVVNSLRMKRFCSQSIRRVKTDQIDAMQIALYGLAYWQELQPTRLPENTYRELQLLARQYYQMTSILIKAKVDFNALCDQVLPGMQELMNDHAGRHKLSDFVLRYRHTTHILEMGETRFRKDYCKWAEKKGYRNCERMAALIFATAQNGIPVLPNAPSTQIVITEAIRVLHTVEASRDAILTQMQALAKTLPEYSLVREMPCIGDTLAPRLIAEIGDVRRFHSKRALIAYAGIDAPPYQSGKFRANNRHISKRGNRYLRKTGYEVMQSYVMHKPANDPIFTFIEKKRSEGKCGKLAMVAGLNKFLRVYYGKVTELYRSLPAIE

SEQ ID NO: 96039 - protein, 345 aa, unidentified
MTEAYDGRQVVGMDLHRRRSVLVRMTEDGRKLETVRIENSPAALRAVIARAGEHPRVVIEATYGWYWAADVLEAAGAEVHLAHPLGVKAFSYRRVKNDERDCTDLADLLRMGKLPEAWIAPPPVRELREVTRYRHKLVGQRTSCKDQVHAVLAKAGIPVTRTGMFGSGGGIWLDGLPLPQPYAGKVASLRALIAVLDGEIARLEEQAAAMLAGDRGYAAIRQLPGIGPVLGAVIAAEIGDITRFRKPGQLASWAGLTPRHYESDTRVIRGHVSKQGSRMLRWAVVEAIQRAPAETKPGLVKDAILARRGDDARGIAKTAAARILLTQVFYAMRDGYLRRAIRQAA

SEQ ID NO: 96040 - protein, 340 aa, unidentified
MSIVTIGLDLAKNVFQVHGVDADGGVVLRKKLRRSEVLRFFEALPRCVVGMEACATAHHWARTLSALGHEVRLMPPAYVKAYVRRQKNDAADAQAICEAVTRPTMRFVPIKSAERQSVLVLHRSRDLLVRQRTMLINAVRGHCAEFGLIAPQGALRMTDLVMQIRSADKAYLPLIVKSAMLLMVAQLDALMAQINRLGRALLAWHRQDEASQRLTSIPGVGVITATALAATVTDPTHFRSGREFAAFLGLVPRQNSSGGKERLGRISKMGDRYLRKLLVVGATSVIRRARTSTLGAAVWIRSLLERRPARVVTVAMANKTARIAWALLARGDVYRAPSHA

SEQ ID NO: 96041 - protein, 350 aa, unidentified
MDNTFPPLGIDVSKGTLDVRLLSQHRPGPPRRFATTTDGLTLLAQWLESQGTSRVHACLEATGTYSDAVATFLCEHAHQVSVINPARVTAFRLSEGMRTKTDRHDALVLARFCEQKRPALWRPTPVEIQRLQSLLGRLDDLQLTVHQERTRFENLRLDAQIRQEIGAHVSWLQQQRERTLQCAITHVQQYPHLQQACDRLDSIPGIACLTAMRLYSVYFDQHRFRGAPQLVAYAGLCPAQRLSGTSVHGKPSIAMAGNAQVRQWLYMSALSVLRYDPDFAQWAGELKARGKCGRVIVVAIMRKLLHVVHGVLTSDEDYDPRKAFPTHEHSTGVQAPMPTDQEHVASARKE

SEQ ID NO: 96042 - protein, 345 aa, unidentified
MPIVGGLDIHRKQITFDYLDTATGEVGRGQIAPADRAHLRAWLARFAGRDDAAFALEGCTGWRYVAEELAGAGVTAHVAEPADTAFARGRKRHAKTDRTDSRHLRVLLEQGRLPECWIPPAQILECRALLEAYHDLRREHTAWIERIHAVFFHQGAPRLGEGALRTEHGLAALREAAAIHLSPAGQLQVATALDMLAAIEARMDTLRQQLLHAARHLAGARALQARLYGVGPLAGLAMTCWLGGAGRFSSARKAVRFAGLDVTVYSSDGKRPPGHLSRQGPEILRWVAYEAGKTHGRASAPGHDYYAAVKDRQDGKISALAQARRLIRQACHILAELGDDALAAA

SEQ ID NO: 96043 - protein, 326 aa, unidentified
MQGKEASEQEANVKSSAGVDVCKDWLDAHVWPCDKRLRVANTPEGIRKLKRWLQRFDLSVVIIEATGKWHRLLWRSLFQSNIPVAVIDPYKARMFAKALGILAKTDQIDASVLSRYGFMVRPAVRAPQPQTIEQLAELVTGRDTAVAEQTRLQNQLSAATVDFFRKQLRQRLAHLDKSIDQLEREIGARIAAEPELARRYEIVISIPGIGPIVAATLVVRLAELGGLPDKEITMLAGLAPIADSSGKHDGKRVIWGGRAAVRRMLYLAALSAKQWNPTLKPFFDRLIENGKETKVALIAVARKLVILANTLIAEDRTWQKIPPQNA

SEQ ID NO: 96044 - protein, 343 aa, unidentified
MQIRSVGIDLGKTTFHLVALGDGGKVLLRRTFTQKQLLTFTANLQTSLIGLEACSGAHFLGRALRKQGHDVKLIPAQFVKPFVKSNKNDFLDAEAIAEAVDRQNMRFVPIKTDDQLDLQAIHRVRDRLISRRTAVINQLRAFLLERGMVFAKSPAKLRRELPDVLENADQNLTPRMRDLLALLWGEWKELEQQVEGLNREVEQIACTDAACQRLRQIPGIGPLIATAIVAAIGNGAAFRKGREFAAWMGLVPRQYSTGGKAKLFGISKRGNRYLRKILIHGARAAVIRLKRERAPMGSWMTALEARAPRNVLIVAMANKLARIAWAVLSTGEDYRALSSPTTA

SEQ ID NO: 96045 - protein, 332 aa, unidentified
MVFNHYLGIDISKKTLDAALLLKEGVIEGQTKVSNDKKGFRDLLSWIKKLKVKLDDVLVCAEHTGIYGYDLQVYLDEKAINYAMVPALEIKKSLGIRRGKNDMVDALRIAEYAYIRRESIVLTHRPAETIFQLKALLTERKLYVRTRAGLLARKDAMEKYESREGRKRREDAINKFSSYIESLEGQIEEVISNDPDVSRNYQLVRSVKGIGLINAVNTIVYTNNFTSFQTARQYACYIGIAPFEHTSGTSIKGKTMVSSLGNHQLKCELTMAARNAVCTDPWLRGYYKRKMSEKGNMRGAYGIVLNAVKFKLVVRMFAVIKSGTPYKTLTYC

SEQ ID NO: 96046 - protein, 344 aa, unidentified
MNSTTIAVDVAKSVFEVAVSEQPGQVRERQRLSRERFRRFLTERPAATVLMEACGSAHHWARHAQAQGHRAVLVPPHVVRPYVLRNKTDRTDAKGLLEAFRNEDVHPVPVKSETQQALAALHRLRSTWLATRTARINTVRGVLREFGLILPLGAHHVVPQVRTLLEEADSGVPGLLRPALAAAVEEIRAIEARMRAVEQQLEAGAAQTLSVRQLRTIPGIGLLTATALVAAVGDVQRFPSARHFASYLGLTPREDSTGPRRRLGAISKRGDTYLRMLLIHGARAVLWHAKTKTAPPPDRLRAWALQVERLRGHNKAAVALANKLARIVWAVWRHGNDYVGTPAV

SEQ ID NO: 96047 - protein, 318 aa, unidentified
MDEVFVGIDVSKDRLDVHVRPSRESFWVSRDGDGLEDLIERLRGMAPWLIAVEATGGFEMIVAAAIAGAGLSLAVVNPAQVRHFAQAAGQRAKTDPLDAEMIARFAEAVRPVPRPVPDEATRLLSELVGRRRQLIEMLVAERQRALHAANARVRKSLTRHITVLEKEVGRIDGDIDILIRGSPCWREAENLLVTVPGVGKTLARTLLAVLPELGRLGRREVASLVGVAPYTRQSGRWRGKSMIGGGRADARAAMDMAALTASHRNPMLAPFYQRLISAGKPKMVALIAVARKLLTILNAMLRDQRPWTEGFAHANASI

SEQ ID NO: 96048 - protein, 339 aa, unidentified
MNTSVVGLDIAKHIFHLVTQGTDGKMIKKKLKRSELLTFFANYPASIIGMEACGSAHHWARELTRLGHEVILLNARYVKSFVVGNKNDYNDATAIFDAVARPNKRVVAVKTVAQQDIQMVHSIRKELVDKRTALVNQTRGLLGERGIVINQGITQLRQQLPLILEDAENGLTDLSRELFAEQNEKLKALDDDIKAQDQRINRLCNANELSKRLLDVPGVGPLTATMVAADIGDGGKGYQSSRDYAASIGVVPRQHSSGDKQIYLGISKRGNRYLRTLLIHGARAVLKNCAHKTDKLSLWLQALIERRGFNKAAVALANKNARILWAMASNGKDYETLTA

SEQ ID NO: 96049 - protein, 371 aa, unidentified
MKKNSTAQRSPKRAAAREEGPITIGMDLGDKVSRYCVLGGQEGDQVTEGSVGMNKKAMLQKFARMRRCRLAMEVGTQSGWVSRLLSRLGFEVIVANARQVQLISASSRKNDRMDARLLARLARVDPQLLRPIRHRSEQGQADLMTIRVRATLMETRTKLVNAARGLAKTVGERLPACDADALDVKKMEGLPELLCDRLRPLLEEVESLTAQIKKLDTTIEQIARTSYPETELLRQVSGVGILIALTFVLTVGDRERFLKSRDVGCYLGLRPKQSESGQSQPELSITKEGDRYLRTLLVQGAHLIVNRRGPDTDLKRWGLKLASHGGKNAKKRAIVAVARKLAVLLHRLWVSGEVYEPLRNSQAAQSSPRAA

SEQ ID NO: 96050 - protein, 452 aa, unidentified
MEVFMSTIPAPPAEPVFAAFAAIDWAKQEHVVAFVPAAGDRIEISKLKNTPEAVEVWSASLRQRFPAAPIAVAIEQKRGGVIYMLSKYDHLVLYPVPPTMSAAFRRAFFPSGAKDDNGDTLLLLDLLRHHRDRLSPLRPDTPATRLLRFLTQDRRSLVQQKVSALQQITDCTAQYFPQLRTWFGPLDTPWIESLLERWPSLQQLQRSHPGTLKRFLAEHRSWDDDRIAELIRQIHAAVPATHDEVVLEACSRKTAACLPQLRCLRDQIAAYDKRIAAVTAEHPDAPIFQSFPGAGVALVPRLIAAFGTDRNQWRDAADLQRFSGIAPILVRSGNSSRVAMRRACPKFLRQTFHEFAAHSIRFCPWAKLLYQSHLRPDKKNHNAAVRVVAFQWIRIAFRCWLNREPYDERIFLAAQTRRNSPFAGKAASERGIEVQTQTGMKKLTAKVTPGSR

SEQ ID NO: 96051 - protein, 307 aa, unidentified
MTQNYIGVDLSKDWLDIFDPRAGHARVANTAPGVRAWLRRLGPGELPVFEATSGCDGHILREAERAGRPVCRLNPLHAWHFAQSLNLPKTDRVDAAMLARLGAERGLAPSAPLDIERAELAELNGRRDQLKRMETQEKNRLGKAFSSTIKADIRANLRGLARRIARIEAEIATFLKAHPASARAVALLESIPGIGRVVSVTLLAAMPELGGCDRRAIASLGGVAPKARESGKWRGHRAVGAGRRHVRRALYMAALSALRHGSFCADFVRGLRDKGKPGKVIAIAVARKMLTIANAILRDQTPFKAPT

SEQ ID NO: 96052 - protein, 313 aa, unidentified
MLYVGIDIAKNKHDVTALNVPGKTVLKPLTFSNNKAGFELLDLSLRQLNQDCLIALENTGHYAFNLLNFLHEQGYKVYTYTPLLIKEFAKSLSLRKTKTDKKDAHGIALKLLSDPNREQFQHDNRQVELKILARHIHRLKKKQSDWKVQYTRCLDIIFPELDKIVGKHSEYTYQLLTRYPNPQKRLEAGFDKLIEIKRLTASKIQDILSVAPRSIGTTSPAREFEIIKHYKRLIDKAETCVNDLMAEFNSVITTVTGIGGRLGAVILAEIRNIHAFDNPAQLQAFAGLDSSIYQSGQIDLAGRMIKRGSPHLR

SEQ ID NO: 96053 - protein, 316 aa, unidentified
MEQVQSNTKVAGVDVGKHQLDVAVHGLEDATQVDNGPAGLAELVAWLKAREVGRVGLEATGGYERAARSALEAAGLEVVVHQPMEVKLFAKLKRRRAKNDRLDARLIAAATAQVEAVKAAQDPRLVELAERLTAYEQITDKAAELKTFLEHVTLKDVAKALKTQIASLTRLKAKLAAQVLAQIKANPDLLARFRLLISLPGVGPIVAATLVVRMPELGQMRRGQAAALAGVAPYDRDSGQWKGQRFIAGGRTRPRRMLYLAAISAKRHDPSLKAFADQLVARGKPAKLVVVAVMRKLIEAANLVLSRQQPWIRQPT

SEQ ID NO: 96054 - protein, 451 aa, unidentified
MAKRAEKRERRSMVLQPDAAGIDIGAEEIFVAVPPDRDEESTRRFSSFTCDLHALADWLGRCRIQTVAMESTGVYWIPLFQILEERGFKVYLVNAHYLKSVPGRKSDVSDCQWIQYLHSVGLLRASFRPPDAICAVRTLWRHRGSLLEMAAEHILHMQKALSQMNLQLHHVLSDITGTSGQAILDAILSGQRDPVELAQLCHSRVKSPRDKVAQALVGDYRPEHLFTLKQSLEGYRYYQKLILELDQETARLMQALPSATEHPMPPRTKATAYHRQGNDPQFDLRSELYRIAGVDLTDIPGVSAATAQVILTEIGTDVSRFRHASAFASWLGLCPEKRVSGGKVLSCKTRQVKHRAATALRMGANSLRCAKGYFGEFFRRMRAKLGTAQAITATAHKIARILYHVLSTKEPYAETVFHRCDEQAQRRAEMRLRKQATLLGFQLLPITTTGE

SEQ ID NO: 96055 - protein, 314 aa, unidentified
MDGPTSAASAATFTGIEVSKAALDVALRPSGELWRCATDEGGIAELVGRLQPLEPRVIVLEATGGLERLAVAALAVAALALAGLPVAVVNPRQARDFAKATGRLATSDALDAAVLAHFAEAIHPAPRPLPDAASQALSALVERRRQVVGLLSAEQNRFPQALPAVRPKVAAHIQWLEQALHERDAERDAERDAELDQTLRSSPLWRERDQLLRSVPGVGPTVSLPLLAHLPELGHGSVKPIATLVGLAPRNRASGSWRGTRALWGGRRQVRTALYMAAHGRLGRRAPQLGAAHLLHAAAGSRQAETGRPDCLYA

SEQ ID NO: 96056 - protein, 414 aa, unidentified
MDVVVERCAGLDVHRDSVVATVRVPGKGKSRRRREQQTHRFGATIAQLETLADWLAGFEVTLVGMEATGVYWKPVFAVLERRFECWLLNAQHLHNVPGRKSDVIDSAWCCQLLEHGLVRPSFVPPPDIRRLRDLTRLRTTQMEERSRAIQRLEKVLQDAGIKFSSVASKTYSASARAMLDALLAGVNDPDELAQLAKGRMRAKIPQLQEALANRFQLAHHGVLVAGLLAHIDALDQTVATLDARIAAATEPHAELVKLLCTIPGVGRYIAEVLIAECGLDMTVFPTCQHLASWAGICPGTNQSAGKRGSGKTRHGDHWLRTALSEAARAAARTKGTYLASHYWQIRGRRGDAKAIGATRHDILIAYYHIVRDRVPFRELGPDWLARRHSPQHRTRRLVKQLEALGHKVTLEGAA

SEQ ID NO: 96057 - protein, 354 aa, unidentified
MKEYHIGVDMHKQSSQIGVIDGKGRKVENNRISNDPVQLRDYFSSFPKGTPVTLEATTGYEWMCDLLTEMDFQVLLANPRKVRLIAEATIKTDTIDAWTLAQLERTNFLPTAYLPPEEIRATRELLRHRLKLVCFRKGLKNRIHATLTKRGVLFYPVKDLFGKAGREFLASLDLPAVYRTEVDSYLALIDHINTFITQRERDIKKQVKENNPDAQLLLTIPGISYFSALLLAAEIGTIARFANVRKLVSYAGLTSTLRESCDVTHQGHLKKDSNKYIRWILIEAVTAAIRFDPKLYAFYRKILARKGKLKARVAVAHKMLVSIYFMLKNHSSYQPSKLGKTFVRVSPLRLSGRH

SEQ ID NO: 96058 - protein, 355 aa, unidentified
MKNQALQYLAMDVHQATVVASVRNEQGAITMRATVATEARAILSLIRAVGARVMVAFEEGTQAQWLHDLILPHAEGVVVCNVRGKSELTNKSDRIDADALSELLRLGALKAVYHGAPSMLTLKELVRNYNAVVEDATRAMLRIKALFRARAIPTPGTSIYRVSDRAGWLDQLTIQGARMRAESLFKQLDLLRELRPKAKRAMIVEARKQSGWKPLRSIPFLGEVRTAQLMAIIATPHRFRTKRNIWPYAGLAVVTRSSADQEFAGGKLRRRNRPPQTRGLNRNHNPMLKSIFKGAATTAAAKPGPLKDIYDACVARGTKPDMARVTLARKIASIALRLWKKGELWDPTKLTMQTT

SEQ ID NO: 96059 - protein, 334 aa, unidentified
MQNITLIGIDLGKHSFHVHCQDKSGKALLHKKFTRSKLIEFLSGCTSATVVMEACAGAHFMARRIADLGHEAKLISPQFVRPFVKSNKNDFVDAEAICEAASRPSMRFVQPRTEAQQAMRALHRVRESLVRDKVKTTNQMHAFLLEFGISMPIGAAVIKRLSTVLAENELPPYLVQLLMRLHTHYLYLVEQITELEMALEQELSRDETGQRLQTIPGIGPITASVLSSQLGDGKQYGCSRDFAASTGLVPRQYSTGGKNTLLGISKRGDKNLRRLLVQCARSFIQRIENQSGKLADWVKAQLARKHSGVVCCALANKLARIAWAITTRQTVFER

SEQ ID NO: 96060 - protein, 347 aa, unidentified
MVTLGGDCHKRTHTLVAVDDNGRELGTKTVAAVAVGHLEALRWARQWVERRWALENCRHLSRRLEADLLLAGEIVVQVSPKLMAGVRRSAREWGKSDPIDALAVARAALRESELPVACLEGTSREVKLLLDHRDDLVGERTRVQNRLRWHIHELEPGFDVPARSLDRKVVLNRVAKALAVHRGVAADIAVELLGRVRELTARINELEHQLHVMVAQLAPNLLELDGCAALGAAKLIGETASICRFRTPAQFAMHNGSAPIPVWSGSHERHRLNRGGNRQLNAALHRIAITQMRVGGRGHDYVQHRQASGDTKREAIRALRRRISDEVFRRMWQDHLAAATVQPSAAA

SEQ ID NO: 96061 - protein, 340 aa, unidentified
MRQLYVASDLHGNNNLLGIIDGEGKRIFKKKLPNDPLLINDILDPFKEEIVGIVVESTYNWYWLVDALMEEGYKVHLANPAAIQQYSGLKHADDKHDAFWLAEMLRLGILPEGYIYPKEERPVRDLLRKRGHLVKLRTSLILSLENIISRNFGRKLPVNDVKRLRKDHVTPLFEGKEDLALAGKVSKETIDFLTHQIRQIEGVVEKRITLKEQYRNLLTLHGVGKILGLTIMLETGPIGRFETVGDYTSYCRKVPSQWISNGKKKGSGNRKNGNKYLSWAYAEASDFARRLHPESRAYYNRKMQKSNPAVAHSALSHKLARAAYYIMRDQVAFRPEKLFG

SEQ ID NO: 96062 - protein, 421 aa, unidentified
MKRVRERVAGLDVHKDSVVACAQVVEGTEVVGHKRRFGTTTAQVAALAEWLTGLGVSTVVMEATGVYWKPVYYGLEGLFDELWLCNPQHVKNVPGRKTDMADAEWLADVAAHGMVRPSLVPEPAMREVRDLTRYRRSLVDQRVREIQRLDKALQDAGIKLSSVASRLMTKSGRAMVEALVRGERDPKVLASLAQGVMRKKIPALEEALVGRFAAHHAVVAAQVLAHVDFLDASVARLDEAIAERMRPFEPQVNLLSGITGWGTKTAWVFLAETGADMGRFPSAAHLASWCRMCPANNESAGKHRAVSKKPGKTWLGRALVEAAKSASHTKGTYLGAQYHHIARRRGPNKATVAVAHSMVVIAWHILTTGEQFSDLGPGHFAPSLDPQHLARRKLADLRSFGWEVTVNDDGTMTLSPPSLAA

SEQ ID NO: 96063 - protein, 343 aa, unidentified
MQTVTTIGLDIAKSVFQVHGVDAAGQVVVRRQLKRRYVLAFFDKLPPCLIGIEACASSHHWSRELQALGHKVRLMPAAYVRPYVKRQKNDAADAEAICEAVTRANMRFVETKTPEQQSCLMLHRTRHLFIRQQTAVINAIRAHLAEFGIVAPVGRNGVEELLGVVADASDKRLPEIARACLAALGAQLRMLKAQILEFDRMINAWHRSNETSKRLDEIPGVGPALATALVASVADPRAFRSGRDFSAWIGLVPKQHSSGGKDKLGGISKQGDRYLRSLFTAGALAVIRYAKIHGAKHRPWLTALLARRPTKVAAVALANKIARMAWALMARGERYKEPVALAA

SEQ ID NO: 96064 - protein, 339 aa, unidentified
MTTQICGIDIGKTVFHLVGLSKEGHIVVKKRFNRKQLLTYTVNLPACLIGIEACAGAHFLARALIAQGHTVKLMPAEYVRPFVKSNKNDYVDAEAIAEAVQRPTMRFVPIKNEAQLDLQALHRVRDRWIGRRTAVINQLRGFLLEHGITITAGPAHLKRQLPSILEDAGNLLSTRMRTLLMELREEWEKLEEQIEATNRELAQSAKKDDGCQRLLTIPGIGPLTATALTAAIGNGTAFRKSRDLAAWLGLVPRQHSTGGKARLLGISKRGNPYLRRLFIHGGRAVLARVKREDHSFGSWLDRLEERSPRNVAVVAMANKLARIAWSVLTSGRPYCATAA

SEQ ID NO: 96065 - protein, 340 aa, unidentified
MEVIIGIDPHKASHTAVALADTEVELARLQLSSSRSQIDRLLAWAKPFPQHRWAIEGAEGLGFLLAQQLVAADEVVVDVPATLAARTRLLGNGRTNKNDPNDALSVAVTALRHRELRTVTTAGYSELLRLLAKRHIDLSNQRTRLVARLHALATELSPGGIAKKLNSTDAAKFLATVTPTDAVAQLRWDLIAELADDIARLEAQTKQSERRLRDAVAASGSTVTNIYGIGPIIAAMLIGNTGDIARFANRDRYAAYNGTAPVEFSSSGRIVHRVSERGNRTLNHALHLAAMCQLRQRHSDGRAYFERRVADGKTNKEAIRALKRQISNNVYRHLVADAAS

SEQ ID NO: 96066 - protein, 363 aa, unidentified
MVGVDVHKYSHTAVAIDCFGQELGEHEFSNDYLVEFVTWLNSLGLRENLLVALEDVNGYGCHIVKYLANEKIIMRYVPGILTERHRKQSIHREKSDRVDALRVAKVILTNYEETLPAKESIANQNERTVATSLDFFLVERRSLVSEKTILKNQLHAMLHQCLGDHYTDQFTKPFNTKSIIYYLKTLKPKTATDTEQLALIMSIRRRLERLKLLTNQIKEIDQEMAKVAKSSKAINSLRSEIKGCGHITACTLLAEVTTIKRFQNKAQFARYSGIAPIHKSSGSHNRLYTSPYGNRKVNRALHTIALYQISRTKDPTGLGRIYYDKKLKEGKTKLWALRCLKRQLANRVFQTLKQEYLTHPETN

SEQ ID NO: 96067 - protein, 399 aa, unidentified
MNKLFVGIDIGSKNNVCYLMRSDGSKHSSFSVPNNGDGAKLIVDRVISVLLAQNIPSVVIGMEATSVYGDNLMYFLRESGSLGRFDRHLHMLNPKQVKKFKDIYLDMQKNDYIDSFVIADTLRFGRITKEVYMDDYRYQSLKLLTRARHQAVQALTREKQRFLNGLFISFSGLAQEKIFSDKFGATSMAIIDEFSSLDELAYMNPDELADFIRKCGKNHFENPDEIADAGQRAAKSSYRPPQVIADSARQMLAISMSTIRLLQKQVKEYNKVIEKYLAAIPQTLTSVKGIGSVYAAGIIAEVGDINRFQSQASLAKYAGLVWSQHQSSEFEAEDRHMIKGGNHHLKYYLCEAANSLRRYDPEFKRFYDLKSKEAKTHNQACTRSYCQKAGQVSLFTAED

SEQ ID NO: 96068 - protein, 418 aa, unidentified
MQKHVFRIVAGVDIHKKTAVVTVRTHRDGLADELETRTFETFRDGLVVMARWLEERNVDVVGIESTGVFWIPVLRTIQETAAKLLVWLINPLHVKSRAPRGRKTDRQDSILISELIMYGQVTPSYVPSWEQNEIRKLTRHRTTLTADQTRYKNRIIKELECSGVKLSSVVTDCLGKSGRAIIDALLEGKQTPAEIAQLARGTLRKKIALITRAVEGAFTPSTATVLRQLLKNFDRIAQQIADLDHQIRQLMAPHAAELELVKTIPGIDDVSAAAALAETGPDMSLFPGAHNLTSWAGVSPGSNESAGKTKKAPTRKGNKFLRTVLVQCSWAAVRANTCHWKATFHKLTARLGPKKAIVAITRKMLTAFYFILRDRIPFSPPDKLPIPPDVRRRMIRSLTAKLQALGLEVSLTPAAAVS

SEQ ID NO: 96069 - protein, 368 aa, unidentified
MSKSIRFVGLDVHKDSIMIAVAEDDRCPAEVYGEIPNDWQTLRKTLRRLAKGYSLHCCYEAGPCGYGLYRKMRKAKINVVVIAPSLVPKQSGNRVKTDRRDARKLAHFLRSGDLTPIFVPDEEAEAIRDLERAREDAKNAQRVVRQQLGNFLLRHDRRWGKSNWTREHLAWIGGQKFEHPAQQRVLTDYLKAVEDATLREAELTQDLAEVVKDTSLYPLIQALQAFRGIRLITAVTIAAELADLKRFSSARQLMAFLGLVPSEHSSGQSQQRGRITRTGNSHVRRVLVEAAWSYRYQPRMSKAIRLRNEGLAPGVQRLAWKAQKRLHQRLNHLTKKGKRHEKAIIAVARELAGFVWALGQEAELLGKT

SEQ ID NO: 96070 - protein, 387 aa, unidentified
MATVVIGVDPAKRSNTIEVIDSDENVLLMARFENSSADYRKMRGLVKRWPERKWAVEGATGVGLNLAQRLVSDGEHVVDVPSKLSTRVRAIDTGHGRKNDPSDAHAVAVVGLRTAGLRVVTVDDEAVVMRLLSQRRRDLVRSRTQAVNRLHQALMQLIPAGARKKLTAAKAKEKLATVRPRDAAGKARRQLAADLIDDVIVLDRKLDAIDKRIAEAVKASDTTLTDIVGVGPVTAAAILGEVGDVARFTTADRFASYTGTAPLEVSSGDVVRHRLSRAGNRRLNNALHIVALSNKRHDARGKAYYERKLAAGKGKKGSLRCLKRRLSDVVFRTLVEDRARANPGGQMGATLTASAVDQIPKANTSDKPQPGFVTEATPTRPPAKAAS

SEQ ID NO: 96071 - protein, 410 aa, unidentified
MQTLVERGCGLDVHQATVLACLLIVLKNGRVHKQMRTFGTTTRELLTLRDWLLSEGCTHVAMESTGVYWKPVYAILEGALEIVVANAQHVKKVPGRKTDVKDAEWIADLLCHGLLRSSFVPPKPIRELRDLMRYRRKLTESQAAERNRLLKLLETTNIKLASVASDVFGVSGRLMLEALAQGKATPQEMAELAKGLLRKKIPELEPALEGRLEEHHRFLLELQLRRLEAGEEDLAALQQCIQEKLKPYAKQLALLDEIPGVDWTVAAVIIAELGVDMSVFGSASQLASWAGVCPGNNESAGKRRSSRVPKGNVYLKTALVEAANAATRAKGTYLRDKFFRLKARRGYKRALVAVAHKILVATYHMLSQEVRYNDLGDLYLDRLNKHHLTRNLVHRLERLGYTVTLEQKAA

SEQ ID NO: 96072 - protein, 461 aa, unidentified
MANKGRKGRAAGGESVEGFSVLRTDVAGIDVGSEEHWVCAPALTGVGREVAVFAATTPGVEQLAAWLKERGVTAVALESTGVYWIAPHEILERRGFDVLLVDTRDLARVPGRKKSDRRDCEWIQRLHSCGLLRGAFRPVEQVCVLRTLVRDKATLVAERGDWVRRMQKSLDQMNVRIHRAVADLDGATGMAILRAIVAGERDPRQLATLRDPRCRKSEAEIADQLSGHWREDHLFSLKQAVKMYDAITETIQAYEREILRQLEDMARADRRNDQAPPPINPQKAKGIKYRGEDPLRHALYRMSGVDVTAIDAIGVETVSVVLSEYGPDLSQFPTEKQFVSHVGLAPHKPISGGKVVKNKKKPGSATARVGAALRMAALSLRHSQTALGGYYRQVARRAGADVAVFATARKLAQYIYRLLRWGQPYVDEGAATYERRYQLARVKRLSATAKDLGYTLVSVEA

SEQ ID NO: 96073 - protein, 360 aa, unidentified
MDKYIGFDIDSKKTIACVVQKGNKDRFTTLKTDINRMKDFLNGQRRDGEKLHLTFEISGEAGYRHDALINLVDSITVSNPTKMTWIYRTAKKNDRIDSRKQAVLLSIGEVPKVYIPNREVRQWRVTIQHRRKMVSSITQVKNRIRMLLKANGFVKAAYRGSWWKVANRVWMRGLCEQAEINSEELWRMNLIDMLEELWLLEGQLKRTTKYLDGYLDKQPGGELLMSIPGVGPRTTEAVLAYTDDIRRFGRSKQYCAYFGLTPRLDESGSSRRLGHISKQGPSVVRWLIVESAWRAIKKSPGLRAFYERVMCGQAGRKKIAIVAVARKLLSIMRAMMMTSELFNEHLVCRECGMTGIRRTA

SEQ ID NO: 96074 - protein, 320 aa, unidentified
MVKMKQYTPRYAGIDVSKAHLDVYLHPEGSHRRFNNDKTGWCALRLWLADAHLDGVVYEATGRYHKGIERYLGGHGFPIARLDARRARRFAEALGINAKTDPVDARMLAQFGAYLKPPVITLPEPALELLKELVAARRGLVAQGTRIANKRKTVVSRLLKRQLRQSAEQVGRQIARIDAECHEQARADPALAQRLAILMSITAIGKVTAMTLLADMPELGTLNDKQAASLMGVAPVARDSGTFQGKRHIRGGRAQVRQAVYMAALVATRFNADMKRKYQTLIENGKPPKLALTVVMRKLIILANALIRDNRKWQEIRPCS

SEQ ID NO: 96075 - protein, 406 aa, unidentified
MSDIFALDVSMGKSYCVWYRGKHCLKEFSLVHTKAGFNALRDMIKKAQKPIIYFEATGIYSRVIEHFCETNGLRFCRLNPLELHLKSESLRRVKTDQKDAHRIALTVQENAFRLTVPWKKDYLQLHELSRFYNQLNADWNYRLNHLHTALEQVFPELKQLFVNRTSKLALNIVELFPHPALVRPYSRVKLKNILMASTDKRISKVKAYKYADRLINLAQKSYPAVSGDAIQVEEVRYYACQLIALTHKREEVIKRMESIAQRLPEYILYCSFPGIGKQTAAQLMGELGDISRFDNANQLNAFVGIDIRRYQSGTYLGQDHINKRGNPIARKLLYFTVGNMIRQQHANSNHIVDYYYRLKEKRPHPKLNKVAMVACMNKTLKCLLSMIKHHEKYHYRYTDSMVPVKA

SEQ ID NO: 96076 - protein, 429 aa, unidentified
MNSTQNKKIDQVKETTMIVGIDVGSEKHYFRAFNWRGIELTRKPVAFSNSMEGFNSFYNTIVELMQKRELEEALVGIEPTGHYWFDLGQFMGEKNIKFVMVNPHHVHKTKELDDNSPSKNDRKDPRVIAGLVRDGRYFYSYMPTGVYAELRNASNRRFVLVEEQTRAKNRLQKWIAVYFPEYKGTYTHIDAKGGLLVLKQAPTPEEIVRLGVEGIIKIWKDAKLRGNGHKKAMLILNAAMKSIGLKAGLTEARMEIQDLIEDYELQTKRLERVNDLIKELCQQIRYADKPLEIKGIGITTVAGFIAEVGNITRFDSTKELQKLAGLELVADSSGKHNGKTKISKRGRKRLRYLLFEAAISVVGKNEEFKEIHRYYTTREKNPLKKMQSLIAVACKLIRVFHVILTKGISYDASKMLKDIRHPGEQLKAA

SEQ ID NO: 96077 - protein, 402 aa, unidentified
MNSVGIDISKGRSTVAVMRPFGEVVISPFEVRHTDSELSKLARQLKSLDGETRVVMEATGNYHAPVAKLLHDAGLYVSVVNAKLVHGYGNNELRRVKTDRKDAVKLANYGLDRWLTLPRYVPEENTRLLLKNCYRQYRQYSKVQTVLKNNLISLLDTVFPNVNRLFSSPVRGDGSEKWVDFVAEFWHCRCVTEKSEKAFTNKYQRWCKTHGYNFSEAKAHTIHAKASGHIGIMPKSETTKLLVEQAVVQLRTTSTTLTALKREMLTLAAQLPEYPAVMGMFGVGPTLGPQLIAEIGDVRRFYSKKALVAYAGLDAPPNDSGDVTGKHKSMSKIGASSLRRTLFLVMSVYLQNAPLDEPIYQFMDRKRAEGKPYRVYMMASANKFLRIYYATVKAYLESLEQV

SEQ ID NO: 96078 - protein, 394 aa, unidentified
MKLVGIDVGKNSHHFCVMDKETGELNVTPSSFSNNKEGFDFLINSLKPYSKKSILLGMEDTGHYHVALLKFLLSNGYTVALINPKTTDLTRKMEGGITKNDKLDTITICDVLDTPERKKQYRITKVDRFDLYEQRQLTRHHHNLKEELNVYCNRLQKSIDLVFPEFNTLFSSKYSIVYMNLLKTFGSAEAIASTDIRTIRKCFEVKGRGGRISLTPEKLKECAKNSIGISSEVETIQIKHLVNQITLIKEQIAEIDKKIEEFSIKNNSPILSIPGISHFSGTSILAELGDIGNYSKPSQIIKFAGVAPYHYESSQYNAQHTAITKKGSKYLRKTLYQIILPVINNNPVLKKYYLLKISQGKGHRCAQGHCIRKLLRIIYHLLETGQSFDPALLR

SEQ ID NO: 96079 - protein, 421 aa, unidentified
MIVEDEEDIYYERCAGIDVHKKFLVVCLRIGRKAEIREFGTLTHEIRDMVAWLKTNGCQMVAMESSGSYWKPLYNIFEQERLPAMVCNAYHIKNVPGRKTDVNDAQWIARCLSRGLLNASFVPDRAQRELRDMTRFRKSQIEDRARNLNRLQKFLEGANIKLGDYVSEIEGKSATELLELVIGKPDFTVEDVAARMSGRMKATAEELFASLEGSITPTQREFFTHVMKVIREQTAQIEKTDELIQRGLSENFKAAVKVLSDIPGIAKVSAEQIIAETSTDMSRFKDQHSFSKWAGVCPGNNESAGKRKSGKTPPGNKALKSTLTQCAKSAVKNKKSFFSAQYSRLVSHRGKNRATMAVAHSILIAIYFVLSGYQFHDLGADYYNQFNREKKINSHVKHLSKLGVNIPDDVLRGALAESPPG

SEQ ID NO: 96080 - protein, 345 aa, unidentified
MDHFAGLDVSVKETSVCIVDEAGRIVREVKVASEPEALLKVLGNPAYRCRRIGLEAGPLSQWLFSALAEAGLLVICVETRHMRAVLKAQINKTDRNDARGMAQMMRVGLYRPVHVKTLRSQKLRMLLTHRKLLQSKAIAIDNDLRGTLRNFGLKVGMVGATKFEARIKELIEDLPDLAVLVEPLLIVRRTLREQLGILHRRLLAVARDDDVCRRLMTVPGVGPVVALTYRATVDVPARFRRSKSVGAVFGLTCAKYQSGEIDRSGAISRCGDEMMRTLLYEAAQSMLFHSTRWSWLKAWAMQIARHRGMKKAVVALARRLAVIMHRIWVDGTEFRWTREQATAAA

SEQ ID NO: 96081 - protein, 388 aa, unidentified
MIYVGIDIAKLNHFAAAISSKGGILIEPFKFSNDYDGFYLLLSKLAPLDQDSIIIGLESTAHYGDNLVRFLISKDFKVCVLNPLSTSAMRKNNVRKTKTDKVDTFVIAKTLMLQDPLRFISLKDLDYIELKELGRFRQKTVKQRTRLKIQLTSYMDQVFPELQHFFKSGVHQNSVYTLLKEAPTPNDIASMHMTHLTHLLQTASHGHFGKDTARGLRILAQKSVGIHDSSLSIQITQTIEQIELLDSQLFHTELEMANLVTCLHSVIMTIPGIGTTNGGMILGEIGDIHRFPTPGKLLAFAGLDPSVYQSGNFQAKKTRMSKRGSRVLRYALVNAAHNVVKNNATFKAYYDAKRAEGRTHYNALGHCAGKLVRVIWKMLTDEVEFNLE

SEQ ID NO: 96082 - protein, 355 aa, unidentified
MNDAKYIGLDVHQATISVAVRDSEGKLVMEAILETKAETILQFVRGLRGSLHVTFEEGTCAAWLYALLKPHVTQVLVCDPRKNALLKVGNKNDRIDSRKLAELLRANLLSSVFHEDTGLRAVKELARSYLTMTKDLTRVMVRLKALYRSWAIPCATKQVYAPRHRAEWLAKIREASVHRRAELYYQQLDALRSLQQQVKKELLIEGRKHNATKLLRQIPSIGPIRAVLLLALLQTPHRFRTKRQLWSYCGLALETRTSGEYRMVHGQLQRSKKPVAIRGLNKNHNHDLKNLFKGAALRAAAVEKPFQEFYAALVAKGIKPEMARLTLARKIAAITLIVWKKGARFDAEQLKQQAA

SEQ ID NO: 96083 - protein, 348 aa, unidentified
MTLTIVETRAVTGGVDTHADTHVAAALDPIGGLLGVEEFPATGAGYARLLDWLRGFGSVCLVGIEGTGSYGAGLARHIAAAGVRVVEVDRADRQDRRRQGKSDPLDAVSAARAAQSGRARGRPKGRDGQVEAIRALMVAKRSARSERIQTINQARSLIVTGPDELRARYARHAADDLVAGLASLRPRPGDTVGYATRMALRELGRRTQFPDAQLERLDELIVPLVTARAPGLLALYGVGPDTAAMLLVAAGDHPERLRSEAAWAHLCAAAPIPASSGKVTRHRLNPGGDRQANHALYRIVITRMSSHPPTRAYVERRGQEGLPKKEIIRCLKRYVAREVYRHLRPPAG

SEQ ID NO: 96084 - protein, 343 aa, unidentified
MTHYVGLDVSQKLTTICIVDYTGRRVWRGQCTSDPEHIERVVRRHAEGGARIGIETGPMTPWLVHELRSRGLEVTCLDARHARAALKMQINKTDQNDAEGLAQIMRTGWYRSVHVKSFDSHRARALLGARVQLIGTTTRLSNHIRGVLKTFGLLPGSMRGVPFDRRVEAMLVDREDIAMIIRPMLVAWRQLRQQIITFDKAVRLLVKSSPACRHLIGIPGIGVLSVLAYVSMIEDPVRFGRSRCVGAHLGLTPKQYQSGEIDRSGRISKCGDTLVRTLMYEAAAVLMTRVKRTCGLKEWAQAIARRSGAGKARVALARKLSVIMHSIWRSGEPFRWSEQPVAA

SEQ ID NO: 96085 - protein, 430 aa, unidentified
MEEVDEQELHVERLAALDLGKAVLEACVRVPHDSKPGRRMQEVRTYPTTTAGLLQMADWFRCWGVTRVVMESTSDYWKGVYYLLEAEGFECWLVNARDVKNVPGRAKSDKLDVAWLAKVGERGMCRPSLVQPKPIRELRNLTRYRRSLIRDRTREMQRVEKLLEDAQIKLSSVVSKLFGVSGRAMLDALAAGQTDPKALARLAKGRLCPKVPQLQEALRGFFTDHHASILAMMLANIDRLSAQVATLDTMIEQAVVPFTHQAQQLAEITGAGPIAAQELIAEVGVDMDRFPSDAHLVSWAKFCPQTHESAGKKKNKGRAKGNPWLAATLGNIAASAARTGEGFLGARHRRIARRRGPQKAIVATGNAVLVIVYHLLSDPTARFRDLGADYFTTRIDKNRRARNLAAALQAVTGQKITIRDGQAIIEPQAA

SEQ ID NO: 96086 - protein, 340 aa, unidentified
MGEITTIGLDLAKQVFQVHGIDADGTTVLRKQLRRSQVLSFFSRLAPCLVGMEACATAHYWGRELAALGHEVRLMPAQYVKAYIKRNKNDAADAEAICEAVVRPTMRFVPAKTAEQQAALLLHRGRERLVRQRTGLVNALRGHLAEFGVIAPQGLRNVGKLIAVVRDVGDARLPDLARQVLEVLAAQIEQLEGAVAAVEKQLMAWHKSNPVSQRLATIPGIGPIIASAIAASVAEPGGFRSGREFAAWLGLVPRQNSTGGKHRLGGISKRGNQYLRRLLINGASANLLRSKATKADPWVIGLRRRRPSLVVAVALANKTARIAWAAMQRNENYQRMAAAA

SEQ ID NO: 96087 - protein, 333 aa, unidentified
MTSYRLFVGLDIAAATFAASWMTPVGRPCQALTIPQTADGWADLVRRLRAVEADPAQILVVMEATGSYWVGLATTLAAKGIVVSVINPTQAHHFAKALLKHAKTDAIDAQTLTLLAAKLTPTPWTPPPAIYHEIQQRLAHRDTLVDIRQQIRNQLHALVPLPIVSTSVTAQLEALDSTISAQIATLEDELVQVLTSDAAWQSTADHLRSIPGIGLLTTCWLLVTTLNFTACANATAASAYAGLAPYQQQSGTSLQKKARLRHTGNQRLRTALYMATLSACRLNPAVKQLYGLTPSSVSPDATPLKSRYSGFCIDIKNIIGTRYPKCQWFYASP

SEQ ID NO: 96088 - protein, 454 aa, unidentified
MKRIRPKRGGTLRPQLRPDAAGIDVGARELVVAVPPDCATAGSLTVRTFTSFTDDLHALADWLTQCGIQTVAMESTGVYWVPIFQILEARGFEVCLINARQAASIGGRSKTDVCDAQWLQYLHACGLLRASHRPPAQVCAVRCVLRHRDRTVRAAAASTQHMQKAMNLMNLQLHHVISDLTGKTGLAIVDAILAGERDPAVLAALRDHRIKADRRTIERSLRGDWQPEHLFALRQARATYAHHQTQLRECDVEIERLLEAFDIAAEPATELPPPTTSHRKPQRQEFAFDARASLHRILGVDLTQIPGLSSLTAHGLIAETGLTMEKFASARHFASWLGLCPDNRISGGTLLGTRTRDVPSRAAHMFRLAAQALHAAKSALGDYFRRMRARLGAPEAITATAHKLARIYYAIVKHRTPYDETKLIGTPEVQARQHRQRLEKQAAKLGFALTPLTP

SEQ ID NO: 96089 - protein, 402 aa, unidentified
MMHREPGEVVGGVDTHLEVHVAAVIDHIGQILATRSFPATPAGYRQLLAWMRRHGELGRVGVEGTGAYGAGLTRHLIGEGVEVVEVDRPDRQRRRRRGKSDTTDAEAAARAVLSGDATVTPKTGDGHVEGLRALRIARRSALKARTQTALQIRDLILTAPDHLRTQLQPLETPERAERCARFRCGDPTDPVQAIKRALRLLGRRYQQLSGEIAELDDLIAELCAQINPALLGARGVGPEVAATLLVIAGDNPERLHSDAALAALCGASPIEASSGRVVRHRLNRGGNREGNNALWRIVLVRMATCPRTKAYVERRTAEGRSKKEIIRCLQRYVARELHTLLVDNHTVITGTDLRQRRQQAQLTLDDAADALDTWPIAISRLERGLTHNTDLASRYHAWLDTA

SEQ ID NO: 96090 - protein, 337 aa, unidentified
MSEVSTVGIDLAKSVFQVHGSDAGGGVVFRKKLRRDQVLAFFSQLPACVVAMEACASAHYWAREIAAFGHDTRLIPPAYVKPFVKRQKNDMADAEAICEAAQRPTMRFVQGKSAEAQASAVVFRTRDLLIRQRTQLINALRGHLMEFGYIVGQGVGHVGKLVDIVGDLASDIPAEARPVLAVITDSPQVLQSQIALLDREIASRAKTDPVAKRLMTIPGVGPVIATALVPLAPAAVTFRRGRDFAAWLGLVPRQHSSGGKERLGRTTKMGERSLRRLLIIGASSATKAAARDPDNASAWLKSPRSSVPSRRADLSNTGMCVSMPLSSTSQARFSADP

SEQ ID NO: 96091 - protein, 347 aa, unidentified
MNHYAGLDVSLEETAICVVDSTGQIVKEARAASEPETLIAALREIDLPLERVGLEACSLTAWLHDELHSAGLPAVCIETRHANAAMKTMPNKTDRNDARALAQIMRTGWYRQVHVKSRQCRLWRSLLVARRTVLNEMRSIENVVRAVLREGGLKLGTPSRAAFAERVRDLMAEDASVKPLVDPLLTILVTMLDQFARLTKQVLDIVRREKVCRRLMSVPGVGPITALAFRATIDRPDRFRRSRDVGAHLGLTPARYQSGETDVSGRISRCGDELARTALYEAAHTLLVRSRKWSSLRAWGMKVAKTRGMARARVAVARKLAVILHRMWSDETEFRFGRNPAAALAAA

SEQ ID NO: 96092 - protein, 337 aa, unidentified
MSKITLIGIDTAKHVFHLVGIDQHGHYVYRKQLSRARLLSVLAQLEPCEVVLEACAASHHWGRQIERLGHRARLLAPQHVKPYRRGQKNDYRDAEAIISAALAPGIHFVGIKGVAQQAEQALHRVRSRLLSQRNAAANELRGLLGEYGLVFAKGIKPLRAGAVRFVDSGEAAALGLAELVWDILDELERLQLRFDAYKDRIAQRVDADETSRRLCTELNGVGVLSASALRVKVAEVRDFANGRHFAAYVGLAPGHRGTGGQVTIGKLQRKHDRYLRQLLIHGARAAVRHLGDKQDPQSRWLRELKARRGFNIAAVALAHKNARQAWAILGQEQTAQG

SEQ ID NO: 96093 - protein, 338 aa, unidentified
MEAYAGIDLHSSNSYIGIIDEHDRRHFSKRLPNSLTQILVALEPFKKDLKAIVVESTYNWYWLVDGLQEEGYKVHLANPSAIKQYEGLKHTDDKSDSFWLAHLKRLNILPEGYIYPKEERPIRDILRRRLLFVGQRTAQILSLQSSIARNLSLKMSGRAIKKLKGEDTEELFDSPFLVLAAKSNIAVIQSLTKTIKAIENAVKSQAKLRKEFQLLKTIPGIGDILTLTIMLEVGDINRFSKVGNYSSYCRCVKSARFSDGKKKGENNRKNGNRYLSWAYVEAANFAIRFSPEAQKFYQRKMAKTNKIVAIKALSNKLARASYYIMRDQVAYDADKLFG

SEQ ID NO: 96094 - protein, 421 aa, unidentified
MKFKSQDKQNQLIENITFNHIVVGVDIAQEAHVARAVNFRGVALGNPLEFSNDEDGFKSLDRWIRDLLASYKLSQVIVGMEPTGHYWLSLAGWLKNKEIETVLVNPHLVKKNKENRDNTRSKSDKKDALVIADMVKNGYYSPVRFHSSEYEELRVLMANRDTVVKRLVSAVNQIHRWVDIVFPELRQVFKILTCKGALLTLRLFPLPSDLCKLSPGDVIKGWQKSMKRHSGVRRAHLLIDLAKQTVGSKQATLAYKLHLEQLLEEYDLATKQLQRIEKEAKEVVERIPYSGKILAITGISAIALAGVLGEAGDIRGYAHGNALLRHAGLNITEASSGKWKGQLTLSKRGRPRLRHFLYLITMSMVMNNQEFKALHHHNVEVKKLKKMKSIMKLCSKLARLLVGLAQSNEAYNPTKILALVA

SEQ ID NO: 96095 - protein, 439 aa, unidentified
MAFAGGRAQADYMARVRGIPPEQCLVVPIDVGKHSAVSLVADHEGRVVHDPITFPMTARGTRTLVSAAGAAERATTAGSVRFGIEAAGHYHRVLASTLHASGLDVVELNPAAVKLARSQLGQARVKTDVRDCLAMVELLVRGQGWPLHRHDDQVALQAMWVAQRRRKLDAVQALTNQVHALADLAFPAIAATFKTGFDSPTLRMLLSTITGPDELAAMDVEQLVAHAATHGRRMLRPKARQVVAAAQDALRLPDGQQSTAQCLLAREIAALEQLRNEIRYCDEQLAAILPSTPAGVLASVPGIGVATASYYGAALGDPWRFTNADAAYRYSGLSPSSYDSAGRHHAKTQISRQGAVELRRAMITLGTSMALSHPDFVAYRRRLLAAGKKPMVVAVALGHRSHRLAFAMMRSQIPYDDQRWTAAVAKGRSVKATEATATT

SEQ ID NO: 96096 - protein, 487 aa, unidentified
MAKRNQSTFERLQRGEKLSRRERKQIERQLQAAEPGWEIVHRNVAGIDVGNESHFVAVDPRQADQPVREFGSWTAGLHQMVDWLRTCQVQRVVLQTTGVYWIPVQDVLEKAGFEVAVVDARGTKNLPGRKSDVQECQWIRKLDIYGLLRGCFQLSDSIRSIRTIWRLRQRWVEETGRSIQQMQKALTVMNVQLANAISDLSGQTGMAILRAIVGGERNPWTLAKLRDARIQSSEDEIAHSLQGNWRDDVLFELEQVLAAYDFQLQQIEKCEQQLEKYMKAQPSRPAVDPVPAQAASGPEEAPKKPNKKVRRGQAPRKNRIGFDLEPELARVMGADLTVIDGIKLMTVQTIYSELGPDLSAFPTENHFASWLMLAPKRDVSGGKVIRHVWVKGRNRVANALRMAAESLTHSQSYLGARYRSLRGRLGAPKAIKAMARYLACLVYRMLTKGQDWVDRGATYYEQRRQQRELIHLQHKAEALGLQLVPAE

SEQ ID NO: 96097 - protein, 321 aa, unidentified
MPTAPVTVYAGVDVAKASLQLHLQGRQAEFPNQPAGLAKLRQQLQTIPHVHVVCEATGGYERPLVQALHQAQIPVSVTNPAQVRAAAQAQGQRAKTDRIDAALLTDYGQRYQPKPTPPTAPSQDQLVALTQWLTQLIQAQALAKTQAEHHEAAFVCKQHAKLLAHFQSQIAAVEKQIRALVAQDAVLEQRVECLDQITGVGPRTAWLVLAHMPELGQINRQEVAALAGLAPWTRDSGTMKGMRCIGGGRPEVRLALYMAALTAARFNPVLQPFYQRLRAKEKPAKVALTAVMRRLLVYMNHQLKALPAIQAATKTENAKIP

SEQ ID NO: 96098 - protein, 377 aa, unidentified
MSEHGITFVGMDAHKKAINVAMLLPGCPEPEEWQVANEPAAIRRLAKRLARAAPGEVRCCYEAGPCGYVLQRELEAAGGVVCDVVAPSLIPVKPGERIKTDRRDAYKLARLLRSDDLTAVHPPTPADEAVRDLCRCREDAREDLLRARQRLGKFLLRRGCMYTIGKRACGELHRRWVKGLTLEHAADQVTLEDYITAVEQMEERQRSLDRRLATLAEQDPYRAPVGWLRCFHGIDTVTAIALVAELHDFRRFTTARALMAYLGLVPSEHSSGERHRRGAITKAGNVHVRRLLVEAAWHYRHRPRIGVELRRRRMDQPSAIIAIADRAQQRLHRRFWALTNRGKPSHKAVVAVARELIGFVWAALYPATVGQPVGGRS

SEQ ID NO: 96099 - protein, 413 aa, unidentified
MLKIVYPICCGMDVHKSFVVACIATTDDKGVTTYKKKRFSTFTSDLRRCATWLAENNCTDVCMESTGKYWIPIYNTLESTCQIILAHPKYVKSIRGKKTDEKDAKWIADIFKHSLVSGSFIPPADIRQLRDLMRYRWKLTHYTVGEKNRAQNCLTVSNIKLDDVFSDVFGKTASAITDRLLESNEPFNVAPYLNKRIKTPVEKIQAAVDGEMCAEQAEKLRIIRSHMSSLELCKANLESLILSTAQKYLPQLELVMTVPGIQAYSAIGIISEIGVDMSVFPTSKHLCSWAGLTPQNNESAGKKKTTRISRAGAYIKPLLVQCALTVCKSNKHPEIKNRYLSLKKRRGHKKAIIAIARMLLTAIYNILKKNEPYNPELYLRCNSTPPEHRAVSVEEAIFILQRQGYLVTPSVPG

SEQ ID NO: 96100 - protein, 459 aa, unidentified
MESVYSRCAGLDVHKKSVSACIRIQQDNKTISETAMFGTFTRDLERLRDWLISHKVQQVAMESTGVFWIPVWNVLERAAEAGFELTLINPQHAHALPGRKSDRLDCERIAELHQYGLLQGSFIPPAPVRELRDLTRRRTHLQQDRNRVVNRIARLLETVNIKLGSVVSDLTGKTSQLILAAVAKGNCDPEELVKLAQASLKNKRALLISSLEGFSSEHFRWLLSEALRDLTLLDRTLEQVDRRLAKALQPHADLLLRLCTIPGFDFTAAATVLAEVGFDVKRFPDPAHLASWAGLCPGCNESAGKRTSSRTRRGNRYLRRLLTQSAWSILRKKNCFLTALFFRIASRGGQKKAAMAVAHRILIIVWHIIAEGGVYKEIGAHPGDRKNPDRAARRLARRLAQLGFQVELKPRSEPKPVACKPEKAAKPPKPKFQKMLVRRKPRAPNPITPTTSLTTESPT

SEQ ID NO: 96101 - protein, 388 aa, unidentified
MTQAPGAVRIPTVVDYERTLILAIELSNTSWVLAAQIPGLPGVKAKRSIKPTPEALMAAIDGYRVRAEKAGRNVNRVIAVYEAGWSGFWLVRWLAKYGIETQVIQPSSVPVDRRARRAKSDGIDAELLLRTLLAWLRGEPRVCSMVPIPAETDEDARRRVRERAELVAERVGLVNRIGAVLATLGVGEYNPLRRDRRQRLDELRTALGDPLPTHARAKIVRMLDRLELLLTQITELEQSRDAVLEDENPDRAASMIQQLAKLRGVGVQSATVLVREGFVREFANGKALGSYAGLTATPFSSGGIEREQGIGKAGNARLRTVMVELAWLWQRYQPASAQVSWFRERISGTGRRMRKVMVVALARKLLIALWRFATQGVVPEGAVMKPAS

SEQ ID NO: 96102 - protein, 407 aa, unidentified
MGDRITYVGLDVHKEGIVVAVAEGGIRGEVREYGRIANTAAALDRLVRKLGGTGARLRFCYEAGPCGYGIQRHLSARGHECVVVAPSLIPKRAGDRVKTDRRDAVGLARLHRAGELTAVWVPDVGHEAMRDLVRARLDAVHALRRARQQLSGFLLRQGCHYGRPAWTKLHRRWLAGLKFEQEVHHIVLEDYIATVEAAKARRDRLTAQIEAMLPDWTLAPVVAALQTMRGMALVNAATLIAELGDLSRFANPRQLMAYLGLVPSEHSSGASVRRGGLTKAGNSAARRLLIEAAWCYRFPARVSRELLLRQEEQPKPIREIAWKAQLRLCTRYRKLARSGKPANVVTAAIARELAMVSRWKGKGDHATLLKEEASFLKKHGAISIRCGHCLPVRMRVNSSVLRLAPIG

SEQ ID NO: 96103 - protein, 387 aa, unidentified
MPQPNDQSRSLAALDQDSTLIAVIEISQSSWLVAGMVPGINRQPLKKLAADEVALLQLLYRWRDEATRAGRTIDRVAVAYEAGRDGFWLARWLRGRGIEAHVIHPTSVAVSREHRRAKTDRLDTELLKRAFLGWLRGEQRHCSMAMIPTPEEEDAKRPNRERENLVSDRTRIVNRMKSSLARLGIRGFKPTLRKAPERLARLLTPEGALLPPNTLAELKRDVARLRFIMDQIREIEAARLVRLEHNPEQGSHAMVRLLAQVIGIGIETADMLVHEVFVRNLRDRKAVARYGGLTGSPDESGAKRREKGLARAGNARVRRGMIQLAWRFLMFQKESALAQWYRARTADARGATRKTMIVALARKLLVALWQLVTTGEVPEGVVMRRAA

SEQ ID NO: 96104 - protein, 400 aa, unidentified
MRVVGMDIHRSFAQVAILDDGSIVSERRVELVRDRFLRFAASLRRDDEVVIEATGNSTAVERLLRPYVKRVIVANSRLVKAIAWARVKSDKVDAATLARLHAGGLLPEVWVADDSTTVRRRQIAERMGVLAQLVRTKGRIQAILHANLIPKYDGHLFGSAGRKWLAQLPLASEERAMIGRYVAELERVTAQLAELDKTLAQQSLDDPRALRLMTIPGVSSVVASTILASIGDIQRFPTPEKLSSYFGLTPRIRQSGDHPARHGRITKQGNSDARRMLVEAAWSAKLAPGPLRAFFARVHKKRGAPAAAVATARKLTVMIWHILSSGQDYAYARPSFTAMKLRRVELKAGAAKAYGKAGRGHDYWIKEVRDREAEYVERAERAYERMVGVWKQNPQRVARE

SEQ ID NO: 96105 - protein, 338 aa, unidentified
MKVYAGIDLHSSNNYVGIINDQDQRVYQKRLPNQVEHILEALEPFKESMEGVVVESTYNWYWLVDGLQAHGYKLHLANPSAIKQYEGLKHTDDKWDSFWLAHMLRLQILPEGYIYPKEERPVRDLLRRRLLFVRHRTAHILSLQSAITRNCGYTLSARDIKKLDTPDADTLFDNSFLTLAAGNSIAAIRFLKLRIAEIEKAVKTHIHVTPEFKYLLTIPGIGTILGLTIMLEVGDIARFPHVGNYSSYCRCVKSERLSNSKKKGEGNRKNGNKYLSWAYVEAANFAIRHYPEFQSFYNRKKAKKNGIVAIKALSNKLARASYYIMRDQVPYDPKKLFS

SEQ ID NO: 96106 - protein, 350 aa, unidentified
MLIIGADYHPGFQQIAFVDTETGELQERRLEQREEAETFYRNLAAQGMKVRVGMEASGHARWFERLLSELGFELWIGDGAEIRTKRVRKQKTDRQDAQLILRLMREDRFPRIWVASWENRDLRQLLWHRHRMVEMRTRIMNQLQVVALNEGVRRKKALWRPAGRIQLESWMLAPWARRRRQDLLELLDRLNPTIGQLTKAVEEEAEKCPEAQRLRTHPGVGPLTALAFVLVIGRAERFGCGKQIASYLGLVPSEESSGDRRQLGHISKQGNSRLRCLLVEAAQVTVRSDSEWRGRFFHLAMRRGRKIAKVAMARRLAVRLYWMWRRRWNYEQLTKFGSHAGQPGHPHGVQ

SEQ ID NO: 96107 - protein, 414 aa, unidentified
MDVLHERCAGLDISKKDAKACVRTPSTKRRGSFTTETTTWGSTTNAVLALRDHLLTAQVTLVVIEATSDYWKPFYYVLAEGLNVILVNARQVKNLPGRKTDVSDAAWLAQLGAHGLVRPSFVPPEPVRALRDLTRARTTATRERSRVVQRLEKLLEDTGIKLSAVASDIMGVSGRAMLEALIHGEADPQVLADLAKRKLRSKIPELTEALTGRFREHHAFLARLYLDQYDQLTTMVDQLTGRIEEAMAPFRGALDLLDTIPGINQATAEVIIAETGGNMTRFASAKHLASWAGVCPGHHESAGRTKNTKVRPGNPYLKGALGLAALGAVRTKDTYLQARYKRLTARRGPLKALVAVEHSIITAIWHMLTDNVAYHELGGTYFTQRDPERATRRAINQLNQLGYTVTLNPREDAA

SEQ ID NO: 96108 - protein, 456 aa, unidentified
MNIYLGIDISKGYADFALIDEQRQPIVKNFQLDDTPDGHSSLGEFIRELFKQHPDLTLLATAESTGGYENNWLDCLKKLQRCYAIKVARLNPKGVHHHHEAKLNRAITDAISARLIADYTMSHQEIIRFDQPDETYSLRKQWTLIKLLSKQKTQLLNQLDNLVYQSNTELMVYCRSYWPVWLLQLLGKFPTAKELAQSNVDQLAKIPYLGTDKARKILNQARQSVASATDPVSGEMIKTIIEEIIHKEKLIATCKKSLIENCSLPDVELLASIPGIGKFSAVGLIIEIGTWLRFASAAKMASFFGLHPMLRQSGDKTWVARMSKQGSSEVRALLFICALVAIRHNPIIKDLYAHSLAKGKSKMSALGICMHKLLRIVYGVLKSGKAFDPAIDQANKTRKPDQRKPKKQETRRLQPVDENAPVSARQNKKRKEQNQSQGELVTICEIKAPALSHCST

SEQ ID NO: 96109 - protein, 315 aa, unidentified
MRSTAAQSVGVDISKDALDVAIHPGGENFRITNNPEGHRALIKRLKGFDIARIVFEATGAYHRLLQQALVEAGLPWVKVNPRQARRFAQATGKLAKTDRCDALLLARMGTALDLEPRAPAGKTVEAMKELVNARDALVKDRVAALNRQAVAVSPLIKRQLAQRLRQINGQIEAVDKHLKMLRDADSDLCQRFDILTSIPGLGEATANVLVVETPELGRLENAQAASLVGLAPLARDSGKTHGKRSIRGGRPRARQALYMPALNAIRCNPEFKTKYQAMIKAGKPAKVAIVAIMRKLLILANALIRAQRKWAPAAP

SEQ ID NO: 96110 - protein, 358 aa, unidentified
MKYVGIDVHKKMCQAAVLDEDGELLDEIRFANDLESIEEFAGKLTTFHDNVKAVVESTGNLWIPIHDRLEEHGFDVALSNPSKTRLIAEAKVKTDKVDARTLAGLLRADMLPTCYVPGEELRSRRELLRHRLNLVKNRTEVKNRIHGLLDKHGLRMPGTTAFSKDNIEWLRELSLGFMDNAILRSDLAVLEAVDAQVTIIEEKIAALAVEDRSVRLLMTMTGVGYFTAMLVVSEVGDVGRFRGDKEFASWMGLVPSVRQSGEKTRIGGVSGPGNKRLRWALVESAQTAVRHDSRLGGMYERVSRRRGSGCAIVAVAHEMARIMYFMLVREEPYRGENRGLTERKLKNMGKKALDGLRN

SEQ ID NO: 96111 - protein, 339 aa, unidentified
MNCTVIGLDLAKRIFQLHWVDMETGEICRQQLKRHQMTAFFANRKACTIAMEACGSAHYWGRKFTSQGHTIRLIAAQFVRPFVKSNKTDAADAQAIWEAAQRPDMKFVALKTEEQQSVLTLHRIREQLVKVRTMQINQLRGLLYEFGVDLPQGRQKVMARVTEELAKLEDRVSGLVIDAIQQQIRRIKTLDQDIDEIEKKLLLWKKENNACQKLMNIPGVGILSATAAVATIGDAKTFKSGREFAAFLGLVPRQSGTGGRVKLLGISKRGDVYMRTLLIHGARSVIQHQKKNSPWLEKLLLRKPHNVVAVALANKMARIIWALLAHDRTFEKDYAAGTA

SEQ ID NO: 96112 - protein, 384 aa, unidentified
MVHVLAGAAERSEAGPARTAGDRSIIPGTGNAQSAGQLDRRRSVETSPNSRLSRSPRRRMSSYSQGRDSFNMNAITSFVGIDISKNHLDVHILNGKVFRCDNTTAHRPLLLENLPPPGTCLIVVEATGGYERALVCDLVAAGHAVSVVNPRQVRDYAKALGFLSKTDRIDAFVIARFAEHVQPRPVAQTQEKQAQLDELVTRRRQLVEHRTAETNRKSLCINKEVRHSVQLFIDTINKDLKRIDNEILKLVESDDDWQQRYELLKSVPGVGKVTAAALVAELPELGHLNRQEIAALVGVAPMNHDSGQHRGQRRIKGGRASLRANLYMAALVGIRRNPVLKEFYQRLKAQGKKSKVALTACMRKLLVILNAMVKNNTPWNLAHE

SEQ ID NO: 96113 - protein, 348 aa, unidentified
MIIIGADFHPEFQQIALLDTESGEFQERRLQHREEAERFYRELAAQGAQVRVGMEASGQAGWFERLIGELQFELWIGDAAEIQCRRPRKQKTDRQDAELILKLIVKDDFPRIWVPSWENRDLRQLLWHRHRMVQARTRIMNQLQAVALNEGLRCKKRLWRKHGREQLESIRLAPWACRRRRDLLELLDRLNPTIAELTQAIEREAEKRPAVQRLMTHPGVGALTALAFVLIIGTPERFGCGKQVTSYLGLVPLEKSSGNRRRLGHITKQGSSMLRFLLVEAAQVTVRSDPGWRSKYFHLMLRRGRKTAKVAMARTLAVRLYWMWRKQWDYEQSLSSVRTQDSPDIAMV

SEQ ID NO: 96114 - protein, 346 aa, unidentified
MEHYVGLDVSLKLTAICIVDRTGKIEREGVVASDPETIAAFVKSHAPHVVRVGLETGATSTWLWTELSKMGLPVICIDARHAKAALKLQINKSDRNDAVGIARIMQCGWYKEVRVKDLDSHAIKALLVSRALLVKIKRDIENQIRGLLKNLGLVIGRAKMNVFSMRAAELAEARPELAAAVEPLLKAREAVGRQIADLDRKVMRLARNDAQVRRFMTAPGVGPITALCFLATIDDPTRFKRSRSVGAYAGLTTRRYASGEIDWTGRISKCGDKMLRSYLYEAANVLLTRVAKWSALKAWGIRLAKRSGLRKAKVAVARKLAVILHRMWIEGTEFNWSSKEAANQPA

SEQ ID NO: 96115 - protein, 342 aa, unidentified
MEEVVTIGLDIAKSVFQVHGVNSAGDAVLRRQLKRARMLPFFAKLPPCLIGIEACNNSHYWARELAALGHDVKLMPAQYVKPYVKRQKNDAADAEAICEAVTRPTMRFVAVKSPEQQSLMMLHRVRLMLNRQRTQISNAIRAHISEFGVVAPVGRLGVERLLEVVEDEDDDRIPDDARVCLKMLAAQLAVVKQQVLENDRRVLASARRTELGRRLMDIPGVGPLLASAFVASVADPTVFKTGRDLAAWIGLVPKQNSSGGKDRLGSITRAGNRYLRQMLVVGAMAVIRYAERHGTKRPWLVELLARRPAKVAAVALANKNARMVWALMTSGERYREPQAKAA

SEQ ID NO: 96116 - protein, 333 aa, unidentified
MYYSGIDLHSDNSYITTVDESGTVVKRKRVENNNELVLDYFHSLPGPHQAVVESTTGWYWLNDLLGDNNIELVLAHAKYLKAISYAKVKTDKVDSQTLAVLLRQGLIPRAHKISRELRGLRDTMRIRLRLVQQRTACLLRLYSIQAKFNGSVPDPYRFQLAVLEHTRDTFNDQILALEKSLNPVLIPNDDVQRLLQVPGIGKLSAFTIYLEIDGIERFVSDKHFASYCRLVPAADNSNRTVHHRSSKDGNKYLKIAFSDAAVHAIQYYTEYKRFYQKLARRSSEATARTVVAKELAKIVYYVLKNKTTYKGLKGQPISRQKSQQWPRLSSPHS

SEQ ID NO: 96117 - protein, 342 aa, unidentified
MRVSYVGVDLGSSNFHQVALNHRGTPTLNREFTTSEANLIKAFADQHGEIHVHLEAGELAPWASEIIRPLVTRVVCSHPQTNAWIARDRDKCDRIDAYKLASLLRMNEFKEVHYPREQSRRDFKTLVQHYDELTQQQARLKTKLKARLRMQGVIVRGEEVFSARGRKAVLEQVKSQMVRTAIKQLYAVLDQSVASQTEAQRLMLRAAQGLPEIRIMRTAPGVGPIGACRFSAYVHTPQRFSSTRKLWKYCRLSVSHRSSNGKPLRRPRLDRMGCGRLKDVSRKAFEAALRRRDNNGFKRAYQRALETTHDATHARLTVQRKIVSTLRAMWINQTPYCDELMR

SEQ ID NO: 96118 - protein, 342 aa, unidentified
MEISTIGIDLSKTTFHLIGLSPRGEIVLRKKLSRKQLLTFTATRTPLLIGMEACAGAHYLARALRDQGHDARLMPAQYVKPYVKTNKNDYLDAEAIAEAVQRPTMRFVPIKSDEQLDLQALHRVRDRWVARRTAVMNQIRGFLLERGIAIRKGPSYLVSQLQIVFSDGDSLFSGRLLHLIRELKLEWDELERKIEEASAELARIAKQDDGCHRLMEVPGFGPIVSTALVAAIGNGISFRKGRDLAAWLGLVPRQHSTGGKTRLLGISKLGNEYLRRMMLHGARSVVMQMERNPSALGEWLTNLSARRHRNVTVVALANKMARIAWAILSKGTHYSAPAFVTA

SEQ ID NO: 96119 - protein, 470 aa, unidentified
MKKHQERKTKFKGSKPIHDSQPDAAGIDVGANEIWVAVAADRSQAPVKRFGAFTQELKAIVQWLLDCRVRSVAMESTGVYWIPLYQLLEDAGLKVCLVNARHVKNVPGRKSDVRDCQWLQYLHSVGLLMGSFRPPQAICAARSIYRYRQNLLSMASQHTQHMQAALDQMNIKLHHVIDDLSGVTGQAIIEAILAGQRDANQLAKLRDKRIQASEATIVKALEGDWRSEHLFVLAAALENWKQVQQQIQKCDQQLLVYSRQFEACTTVAQPIKVMHLKPELEGAKRGEARAQKPRKKTSKNQPEGSWREELERFFGVDLTAIPGISVLSGLTLMTELGNDLSAFKTAHHFASWLCLCPDNETSASKVLRRRTRRSQNRVRQALRMAASTLHHNKSYLGEKYRRLRAKLGAPKAITAMAHQLARIIWTLITRRLPFDLSIFALEQRANEQRRLKGLSKTARQMGFQLIPIPA

SEQ ID NO: 96120 - protein, 340 aa, unidentified
MDHYAGIDVSLECSSVCVVDASGKILRETKVASEPEAVIAWFRSLGFGVERIGLEAGPLSQWLFAAMKAAGLAVELLETRHVRKAFEAMPVKSDRNDARGIAQLMRLGWFRPVHCKSMSAQETRAILTARKLVQSKLRDVENSLRGILRGFGLKVGKTTERTFAGRIEELVTDHPHLERIADALLSVREALRKEFTAFEKQTHKMVRSDMQARLLTSVPAVGPIIALTYASAIDDPARFRSSKRVGAHFGLTPKRHQSGETDYTGRISKIGDGSVRTALYEAAHLMLTKPIKGCSQLKSWAMRIARRAGMSKAKVALARRLAVIMHRMLADATPFNAATA

SEQ ID NO: 96121 - protein, 393 aa, unidentified
MPRKRILVKSIDTSISYQVIGIDLAKHLVSACLITGAGEIFGIDRLTYDDLLKSAERMSPTLFCMEPCPEVHYLAEKLQGYGHHTKVIDGAAVKEYIKTHFGGQKTDLNDAQAIAFLSLDTNLPEITPKNTSNSVLSSIQAVREQFRKEYIQSFVSLKGICQRWGHPISKGVMNKNKVEELVSESKKIPQEVKDWLLELLQSCRELQKRLNKISKYLKEYADNDEICQKIMSVPGIGPITATRLKATIGDIQRFEKPKSIVAYYGLVPKSKATGHNEKKGGITRRGDRVARSLLIEGAGVVLNLAAKGFLRSKPLNKWIEKKRKLKMPWGKLCCALAAKMLRIVRAILIQGTSFNAKIAGVARCSLPKESRNNVMGNNKLSEIPSPNGSVYIH

SEQ ID NO: 96122 - protein, 344 aa, unidentified
MGEITTVGLDLAKRVVQVHGEDAEGHSMVRRTLKREAVLGWFAQRPRCVVGMEACASAHHFARELAALGHTPRIIAAEFVRPFRLSGKNDANDAAAICAAVRQPQMRFVTVKTTEQQARLAVHRLRQGLQEERTAALNRLRGLLAEFGCVYPNSASAALAGARAALADEALPTALRQCLARQLTHLRELEAHLADCDREVAHDANADMRAQRLARLSGIGVLTASAMAATVVDPQQFRCGRQFAAWLGLTPRQYSTGGKSRLGRITRRGDAYLRTLLVQGARSALQAALRTTPERRTRLAAWIVATYGRIGYHKTLVAIANKHARLAWALLMKDEPLRAHAAAN

SEQ ID NO: 96123 - protein, 333 aa, unidentified
MAKSTAMRMVGVDVSARWLDAARGAADEAPTGQQFANTAAGQRQLARWATQGGRAARVVLEATGLYSLDVALTLQRTARVEVMVLNPRVSKEFAGAYGQRARTDATAAVSLREFAARMPFTAWVPPSAAALAVRALMRRVVALVEMRVQEANRLHAVERTAALPAVLGEDLRAHQRELTRRLRRLEQEALAVVEAAPELRSRYRRLRSVAGIGQRSALLLLAELAVLPPELGARQWVAHAGIDPRPIRSGSSVHPPVRISKRGNVYLRRALFMPALVAVRCNPAVQRFAAALAPRGKAPLQVLVAVMRKLLHAIYGMLRTDTDFDGEKFRRAA

SEQ ID NO: 96124 - protein, 352 aa, unidentified
MNKGSKLDFTGQHIYVGMDIHKKSWSVSIYTEHFEHKTFTQPPEVKKLTNYLQRNFPGATYHCVYEAGFSGFWIHDRLTEEGIHCMVVNPADVPTKHKEKAGKADKVDCRKLARNLRSGDIKGIYVPFRVQAEDRHLIRTRQSMVRKQTRCKNQIKAILFFYGILIPEEGHWSRNFINWIETIRMERASGDLALKVHLEELKHLRQIIAGLNKAILALSRADTYRDKVLLLRTVPGISTLTAMTLLTELYDISRFSSLDKLASYAGLVPDIKSSGEKEHTSGITHRRNPALRAVLIEASWVAARKDPALIMAFHKFSLRMKKTAAIVHIARKLLNRVRFVLMNQERYVPAVV

SEQ ID NO: 96125 - protein, 382 aa, unidentified
MNKNSTEIRRFVGLDVHATTIAAAIAENQEAVRRMGIIPNREESVRKLVKQLNRGGPWTACYEAGPTGYTLYWQLTRLGVPCVVIAPTLVPTKAGDRVKTDRRDADRLAACFRAGQLTPVWVPDEEHEALRDLVRAREAAKQDQLRARHRLGKFLLRHGKRPPQTMRAWTRSYLEWIKHEVSFTHRPLQMTLEDYINEVEHAGVRIERLEKAIDEAVAQAPQDMQELIRALQALRGIAKIGAVTIVAEVGTLSRFDHPSQLMGYSGAVSSEHSSGGKVRRGAITKTGNAHIRRVIVEAAWSQRHKPVLSQLMRKRQEGLSAEVQEIATKARHRLHLRYIRLLGKGKLKQQVVTAVAREMLGFIWAIGVSVEHAQVEKARGAA

SEQ ID NO: 96126 - protein, 345 aa, unidentified
MLAEEVAYVLGVDTHTDSHAIAIVETGRQKVEGSVSIPATRRGYRQALRLARLRAPGQRLWALEGTGSYGSGLARFLDSRGERVLEVERPRREGSRGRLKSDPLDAERAARAALSGAAGVAPRLSPQTQALRALLVAREGAVTASRAARNELGALILTAPPELRERLQGLPRAALIETCARLRPGTDSERAAVALALRSLALRVRHLNEEAKGLEQELATRVQALAPALLARRGVGPICASWLLVAWSEPGRLRSEAAFARLAGVAPIPASSGKLVRHRLDRGGDRRLNRALHTIVLGLRRTDAETQAYIARRVSEGKTQREAVRCLKRYLARSLFRQLEAMPRA

SEQ ID NO: 96127 - protein, 335 aa, unidentified
MQIYGIDLAKEKFDVSFFDLTSKKVSNQPSHKVVTNNLKGIGKFFKGLPSDAVLVAEHTGVYGDTLLKCCMDCNVKIAFVGGYVIHRYRATPDRAKTDVLDCALLRDFGERYPDKLKYKTFPEEALYELRQLARHREMLVEQRKQQITADRSEDCRPIRSLAVKRSMDRIKEMLDTEIAETEKEMLKVINGHESIHHNYELVKSVDGVGLITAVELLVKTENFTKITTARQYAAYAGTAPYEKSSGKMDKGAHISKIGNRRSKTLLYICAESARLHNKEIKLYYERRTLIDKKPRHYVLNAIANKLLRIIFTLVEKGEVYDVNYIRQDPRLVKHN

SEQ ID NO: 96128 - protein, 392 aa, unidentified
MPYILALDVSMGHSYSVLYKDDTCLFEDEIEHTQRGFHALLEEIQHLPERPLIVFEATGIYSRPVEKFFQDHHFSYCLLNPLEAKKQMEENTLRSWKTDKSDAHRLAQTHLKNQRQPKEVQSNFYLEMRDLARFYQEIEKKITRLRMDLHNCLQLTFPELEQFFSNRLTPYALTLIRLFPHPDFVLASTRTKIKNKLINETREKISANRAEQKADQIIHYAQCAYPAVEKDSIHCQKTIYYAELLQDLLEQKKALATQMIKKAEASPCFLLYQTFPGIGALTAALLLGELGDITRFKTHKQLNAFVGIDIRRYHSGKYTGQDRINKRGNPKARKIIFFTIRNMIRQQRAAPNHIVDYYYKLKKQPIPKKDGSIIYGTDESELILQPHFHFRY

SEQ ID NO: 96129 - protein, 315 aa, unidentified
MADPVTVGIDASKGHLDVAARPGGRFRVANDPGGLAELVARLRRLTPSLVVLEATGGYEADALAALLAAGIPAAVVNPRQVRQFAAGVGQHAKTDPIDAAVLAHFAAVVAPPPAAPADPERVVLAALLDRRRQLLGMRVAEGNRLRPGLPASIRAGIEAHLAWLDEQIAAIDREVAAAVSRTPAWRERDRLLRSIPGVGPVVRRTLLADLPELGTRPPGKLAARAGLAPFAADSGRRRGERHIRGGRREVRRALYLGALAVARVPGPLRDFAQRLKARGKPSKVALIAVARKLLVIANAVIREGRAWDPKLATAA

SEQ ID NO: 96130 - protein, 340 aa, unidentified
MENIALIGIDLGKNSFHIHCQDRRGKAVYRKKFTRPKLIEFLATCPATTIAMEACGGSHFMARKLEELGHSPKLISPQFVRPFVKSNKNDFVDAEAICEAASRPSMRFVQPRTESQQAMRALHRVRESLVQDKVKTTNQMHAFLLEFGISVPRGAAVISRLSTLLEDNSLPLYLSQLLLKLQQHYHYLVEQIKDLESQLKRKLDEDEVGQRLLSIPCVGTLTASTISTEIGDGKQYASSRDFAAATGLVPRQYSTGGRTTLLGISKRGNKKIRTLLVQCARVFIQKLEHQSGKLADWVRDLLCRKSNFVVTCALANKLARIAWALTARQQTYGNRSPGGC

SEQ ID NO: 96131 - protein, 397 aa, unidentified
MVNLGIDLHKTQFTICVRDKSGNKFEKYPTTPEGYTAFLKKVSSWQKRGNEVRAGVESTGNTRYFRDRLEAAGVKVTVINTLKLKVVTESVKKTDKHDAATIAEFLEKDMLPISQLCSRESEKLRRLLKARTTLVRAQVVMKNQIHGLLTSEGMEDVRGSLQSKKGRQRELDALNKCKNGLEAQTLVETIDSLDKSVKGIEVHLRSLTKDDKMVSLLMSIPGCGEKSAWTIRAYTDDIKRFSSAKKYAAYCGLAPWVQNSNETVRHGRITKRGPEELRTALVQVVMGMRRMKVKTTEWRMMQRYEAMKKTKGSGKAIIATARKLATIIWHMLSEEVEFDIGMMVDRKLAKESEAMSNTARLVEEAVCEKQVQPASRKVTGRKIKKPGVASKKRKKVG

SEQ ID NO: 96132 - protein, 322 aa, unidentified
MNKYKETFGVDIGKDVFDVHGSNKGHDQYKNDETGFKKYLKELPKGSLAVMEATGYYHYRLTQFLYKNGVLVSVVNPLSIKRFIQMELAKVKTDKSDEKAICEYALINDVPIYNALTDTQSECLRLFRLLDTYLKQRTATKNKIHGEAVLGIPSKFVYRSLIRNKKQLNKEVAAIESKILSLVKEDRQEQLTLLMSITGIGQKTALFLIVVTDGFGKFETAAQLCSYVGMTPTIRESGSSVRGRARISKAGNRKLRDLLFLCSFNACKHNKACKEVYERIVNKGKSKKLALIAVANKLLKQSFAIAKSGRPYDETYVSILPR

SEQ ID NO: 96133 - protein, 392 aa, unidentified
MVVSVGIDVSKDKHDCFIVNSEGEVLADVFIIPNNMDGFHYLLQRIQDCTNTQDKIKVGLEATGHYSYNLLGFLLDNGLSTYVLNPLRTNLYRKSLSLRKTKTDRVDARTIASMLLSDAGLKPYTDTAYHNEELKSLTRYRFDKVKARSKLKSSISRLVCILFPELEKLVPSLHLASVYALLEEFPGAKQVAGAHLTRLKTLLETVSNGRYKRDMALEIRNAARNSIGSRMPAKSLELQHTIRLIRELNAEITEIEEQIQSIMAELHSPITTIPGLGFRMAAMILAEVGDFTRFESPDKLLAYAGMSPSIYQSGQLKNCYSHMEKRGSRYLRYALYNATKYVCQWDPTFSDYLAKKRAEGKHYNVALSHAAKKLVRLIFAMEKSRTTYRLAA

SEQ ID NO: 96134 - protein, 340 aa, unidentified
MSMYFVGIDISKYKHDCCIISAADQQIVSKFTVKNDKDGFEHLLTTLNSLSNPEDIKIGFESTAHYALNLELFLENAHHSFMEVNPVLIKEYKKSTTLRRTKTDSVDCESIARWLMTVEYKPHSKGFYHSYSLKSLTRLRDRLIRQRSFYLVKITNVLDHTFPEFKPFFNERLSKTAIYLLENYGSAEKMAHMNSASYDKLRCASRGKFSIQQFLRLKELAANTVGVNNSIFDIELNSLLTLYNSLCKEIKTLEAEITKLIEEVHPHYMSIPGIGPISAAVIYAEYGDISNFSNPGQMLAFAGIEPGINDSGTESHGGRMVKHGSSQLRYVLLNASFNPF

SEQ ID NO: 96135 - protein, 371 aa, unidentified
MPDVISIAPADVRLWVALDVHKFSIVAATLPPADGRTEVARIETTEKAIRRFIDRLGGPEGLAVCYEAGPGGFALWRLLTTIGVACDVIAPSLVPVRAGDRVKTDRRDAKQLVALHRGGLLRYVAPPTPELEGLRDLLRCRDDLRCARTAARHRVAKTLLRHGRVYRDGVKAWTQRHRAWVARQRLDDPLAQLALEQMLIHLDGIDRQLAALDGRLEQIAADPRWAWQVQRLRAFRGISTLTALGLIAEIGDFSRFSHPRELASWLGITPSEYSSGDSQHRGHITKTGNRHARRLLIEAAWHYRHAPRRPATGPQPSDRAWQAQIRLHHRHRHLTDRGKRSTVAIVAIARELAAFLWTDLTNQPAQEVLAA

SEQ ID NO: 96136 - protein, 346 aa, unidentified
MTIVEDARVVTGGVDTHAGTHVAAALDGAGGLLGVREFPATAAGYAGLLGWLGGFGMVTLVGVEGTGSYGAGLTRHLAAAGVRVVEVDRPDRQGRRRAGKSDPLDAVSAARAAHSGRATGAPRGRDGQVEAIRVLMVARRSARAERIQAINQARALIVTGPGPLRERFAGHNAAQLVAGLAALRPRPGDVPGYATSVALRELGRRARFLDAQIARLDELMVPLVTTRAPGLLALPGVGPFTAALLLITAGDHPQRLHSEAAWAHLCGVAPIPASSGKVTRQRLSRGGDRQANHALWQIVIVRMATHPATRAYVARRSAGGLSKKEIIRCLKRYLARQVYPYLRQAR

SEQ ID NO: 96137 - protein, 385 aa, unidentified
MAVRSKSSRRRKARPHVFQKPRGVLHPRVQAVGPEHFAIVCVDCAKARSKIMLADFYGRVLIEPTTVAHNQFDLDAGVRSVRDAMVQHELKDVIVVVERTGRYHKVVQRIFTKAGFEVRVVHPFATKQFRQPANPGNKTDDTDLYAIHRATVTGFGLSEPKPDPLFAHLKVLVRHRRSLVRSRVTIQLKMRDHLEACMPGYSDCVSDLFDSDVAMWVAKNLGSAEAITDAGVTGLVRRLSEAGVRKNVPVVEKIVAWARSAPTADEAASLHHRFFVELDEDQTSKRRMIEGLEAEIAEQLVLTPYVLLLAIAGISVVSAAQFAGEAGPMERYPSARAITGRAGLYPSRYQSDEVDRRDGKLIRCANRDLRYALTLMSYKLRKCNE

SEQ ID NO: 96138 - protein, 349 aa, unidentified
MLHVGLDLSRKRVDVCLISDQGELIAHFPVPADRDGLYGLTRRVAVYEEPVRGVVESMNGARFVHDELVGHGWEVLIADAQKVKGLAPLACKTDKVDARVLAELSFRDLVPAIWLPTPELRREREISRWRLHLVKHRSILKNRVHSTLIAFGHQVPMADLFGLAGRQLLHGLDIPEPWRGHADASVGLIDDLDRRIGQIEKELRRSGADHRYLPLLLTVPGIGWITGFTIASEIGDINRFSSPVKLTGYTGLCPRVKQSGEMDQRGPVSKHGPRYLRWGLMEAAIAASSHPLYKERYQRTKRRLGRQRGAKVAQIELARKLTEAIWYMLTRNQPFKPFAPAGALFRLTA

SEQ ID NO: 96139 - protein, 349 aa, unidentified
MTIVETGVVCGGVDTHLEVHVAAAIDGNGGVLGVESFTVSDAGYAELLEWLAGFGAVIRVGVEGTGSYGAGLARFLRAWDVEVVEVDRPNRQARHRHGKSDPLDAVAAARAALSGSARGRAKHRDGPVEAMRVLLVAGRSARRQRTASLVQMRQLCFCGPEPIRARFAGLTVFQLVNQAAALRPRAHAPVDVDYITLLTLRSLARRVLGLADELDWIEDELEPLVAGFARDLLDVFGVGVATAATLLVAAGDNPERLPSEAAWAHLCGVAPIPASSGKVTRHRLNRGGDRQANAALHRIVLVRMRHDTVTRTYVARRRAEGRTNLEIMRCLKRYVAREVYRTLPRTRLA

SEQ ID NO: 96140 - protein, 424 aa, unidentified
MKRTQNEKILQIKFETLIVGIDVGKQTHYARAFDFRGLELAKLLRFSNSRQGYEDLESWMQGIMKEHGKTEAIVGFEPTGHYWFTLGDHLQSQGHRLGIVNPFHVKCTKELDDNSPTKNDRKDPKTIAMLVKDGRYRDVYIPEDLFQELREAVNERERLLEQLIVLSNQVLRWLDIRFPEFSGVFKDWSRNAAWLTLRHHSTPKKVVTAGVEGLMRTWRQEMKRPSLKKAERLVKAASESIGRTAGSEVAEAALQNILTQYELIDRQKQETEMLMQELLLKVPNASKLMDIKGIGMVTAAVIVSEIGDIRRFRDPRQIQKMAGLNLRENSSGKHKGKTTISKRGRKRLREGLFRAMITMLATNQEFRVLHRRNLTRENNPLTKMESVIALCGKLIRVIFAILTKGNDYDAKKMLDDMNRSMKAA

SEQ ID NO: 96141 - protein, 391 aa, unidentified
MGKTEFAVSVTDAARMCLLRPLLRCPMTGPSLAGVVDRIVRLLPAQARVKVAVEAAGHYHRPLLSAAVWPAGWEVLELNPGHVAEQRRVMGRRRTKTDTIDLEAMTELALGGRGLPVAAGAPVLAELRAWSAHRRVRVEVRTATKNQLLGQLDRTFPGLTLALPDVLGTKSGRLVAAEFADPRRLAALGSARLIRFAAARGLQIRRHTADKLVAAARDALPMPDAAVARKVLAADLALLADLDGQIEAAAGELGRLVAASPFKTLTTVPGWGPVRVGNYAGALGDPGRFPGPEQIYRSAGLNPGQYESAGKRRDGKISREGSVELRRALIDLGVGLWLSDPGARQYAGSLRARGKHGGVIACALAHRANRIAFALVRDQASYDPARWIRED

SEQ ID NO: 96142 - protein, 366 aa, unidentified
MDAIYIGVDFHSRQQTICYLTTETGELVIRELKHQDKEQVRAFYRQFQGSVIVGLEASGYSPWFEALLEELGCVVWLGDATEIRRRARWRYKDDRRDAELIWDLMVHQEFPRLHQPTLPSREILRMLRYRQKLVKVRTMTKNSLQAIAMQAGLAKGHQLFTAAGQVEFKAVAMSPVLQYQRDHWFELLKPLNQELLETMKWCKAAAKGEAAIARLRTHPGIGLLTSLCLLHTLQPVSRFRNQRKVVAYAGFDPMVRRSADSAIHLGISKAGSRMLRYLLVEAVHTAIRNDEDLKRFYQRLAERRGRPKAKVAAARKLLIRAYILLRDEIDYAEFKRRAVAARLARRSQGPPSVPEVLIGQSASPGA

SEQ ID NO: 96143 - protein, 404 aa, unidentified
MLYASLDWADDHHDVAIIDEAGRKLASKRVKHTKEGLDELILFLEGFTGPTHKEQIACIAETNRGLLIAALLEAGFSVYPVNPKVADRRRGASGAKTDQIDAYLLAKLGRAELVDLRQLRPDSPIIAELKELTRDQDALVHMQTRLVNQLTACLKAYYPVALELFTKLQQRSTLLFLQAFPTPEKAAAASVHQMEQVLKAAGHSTAHKVATRIHETLSQPHLTANAITTRTKSRLALALIAQLLPLLEQIAAYEKEIERLFLTHEDHALFESLPGAGKRLAPRLLAELGDDRSRYTDCTQIQALAGTAPVLYQSGNYLKAHRRHACLKPLRNTLYQFARTSRQQERWADEYYQRKRAEGKSHSVALRALSNVWVRIVYRMWVTSTCYDPAIFGAAQQAHAPRAA

SEQ ID NO: 96144 - protein, 341 aa, unidentified
MKTQSRVGVDLHQRFCYLTAVDASGRKYKQGQVGNRPEALRSWLREIPGPRQVVVEASGFWPAFARAVEGEADRLVMVHPQRVKAIASARLKNDRVDSETLAHLSRADLLPEAWMANQRTQQLRQLTRLRITLGRQRATAKNQLQAVLHAEGFQRPVTDVFGKCGRAWLAGLALSPAGRMVVDTWLKVVDHLDGLIGEQTRELERMAKDDVRARWLQTVPGIGAYSAMVILAEVGEIERFPSKRALASYAGLTPAVRESAGRKKRGSIGHHGSARLRWIMVQVAQVAARHSPAAKAWVQRLKQKKPAQVAMIALARKLLTAVWALLRHGVRFEESVFAARN

SEQ ID NO: 96145 - protein, 263 aa, unidentified
MPARRKKPRSGAVSLPHTIDPNAAGIDIGATEIYIAVPADRDPHPVRRFATFTEDLIAAADWLKRCGIKTVAMESTGVYWIPLFQILEARGLKVCLVNARHVKNVPGRKCDVCDCQWLQHLHSAGLLRASFRPSSQVCAVSSLVRYRDSPGAEAVPEPQAELKRKPRRNEMSFDLRTQLHRIFAVDLTEIPGINTLTAYALFTEVGRDLSAFRNVAAFTSWMGLCPDNRVSGGKILHARTRKVNNRVARALRMAAQALSRSHG

SEQ ID NO: 96146 - protein, 343 aa, unidentified
MQTITTIGFDIAKSVFQVHGVDAAGEVVIRRQLKRRYVLAFFEKLPPCLVGIEACASSHYWSRELQVLGHTVRLMPPAYVKPYVKRQKNDAADAEAICEAVTRANMRFVPTKTPEQQSCLMLHRTRHLFIRQQTAVINSIRAHLAEFGIVAPVGRKGVTELLHVVADPSDKRVPEVARACLAALGTQLLSLKQQILEFDRLIMAWHRSNQTSKRLHYIPGVGPMLATALVASVADPRTFRSGRSFSAWVGLVPKQHSSGGKDRLGSISKQGDRYLRSLFVAGALAVIRYAKIHGTKHRPWLTALLARRPTKVAAIALANKIARMAWAMMAKGERYKQPVALAA

SEQ ID NO: 96147 - protein, 405 aa, unidentified
MFVGIDWASTEHAVCVLDQTGKTVRAFRIPHSAAGFGDLVARLRRLGAPAGLPVALERPDGRLVDRLLEAGHPVVPVRSNAIKAWREGEVVSGAKSDAGDAKVIAEYLRLRHHQLRTLTPFSDATRALRAVVRARGELVRQRVAAINQLTATLDTFWPGAKAIFPDVEREIALAFLERYPTPESAAGLGEQRMAAFLTRHRYCGRTPAAELLARLRAAPAGLAGGPEATARRDAVLAFVSVLRALNQAIRDLDRSVIARLGEHPDSRIFASLPRSGQINAAQMLACWGDCRDAYDDPEAVAALAGIVPVTRQSGKHAAVSFRWACNKRFRNAMTTFAHNSRLASPWAAQVYANAIARGHDHPHATRVLARAWVRVIWRCWIDQVPYDPVKHRAAQRLAEEAAAAA

SEQ ID NO: 96148 - protein, 329 aa, unidentified
MEQEYIGIDLHKAFFQVCVVNGIGERQWEQRWPTTDEGIAGLVARCGASSRVAVEASSPTWAFVDRIVDHVGAVHVVDSRKTRLKAGYAAKTDRLDAQRLADALRRDSVVGIYYPPPPIRDLRELCRYRCHLARTQASLKQRIHALLLRQGVREPRVSKLFGKRGTQWLDTLRVDGWAGASLNGLRQLLADVRTQLVPVLATIRSTAGADPIARALDARPGFGPVFSVTLRAEVGIMTRFPDGPHLASYAGLVPRVERSGWRQWSGRITKAGSPWLRWVLIEAAIHQLRRPDDFGRWARRLAVRKGILKARVAIARALCDELFDAWPRA

SEQ ID NO: 96149 - protein, 351 aa, unidentified
MKIIGCDFHPSWQNISCLDTETGEVVEKKLVHATEDAHRFYRELPAPALVGIEATGNSQWFVEMVRECGHEVWVGDAAAIRASYVRKQKTDKRDAAHILKLLVEERFPKIWMPSSAERDQRQLLIHRHKLVEVRSRVKNGLQHLALNQGLQKKRKLWSKAGQQHLHELELKPWADRRRRDLFELLKKLDGQIGELDRAVKEAAEQNTHAQLLMTQPGVGPITALAFVLTLGDVTRFQRSKQVASYLGLIPSEHSSGGKQKLGSITKQGNRFLRSLLVEAAQSAVRFDPHFRKEYQHRCHSMPRGVAKVAAARKLVVRMYWMWKTQTPYPAIVHVESSPRVPLADATVRPLG

SEQ ID NO: 96150 - protein, 373 aa, unidentified
MNYSTVYVGMDVHKENFSLCCYTNEKEKAEYAQKVEGHYSKVLNYLEAMRFHYGKDVLFICGYEAGCLGFTLYRDLTAHNVKCIILAPTTMAVPAGKKRIKTDKRDAALIARCLAHHDYSEVHVPTEKDEQIKEFIRMRDDHKLALKKVKQQILSFCLRHGIQYDGTKSHWTQAHINWLRSLKLDGVDQETLDEYLLSYDYFTKKLERIDNRIKEFAEDKDYKENVHKLECFLGIKTITALSVIVETGDFKRFASAPQYAAYLGLVPGEDSSGGDQNRLPITKAGNRHLRMLLVEAAQCYGRGQIGFKSKALAARQIGNPSAAVEYADKANERLRRKYYRMTLKNGKKANVAKTAVARELACFLWGMMTENYA

SEQ ID NO: 96151 - protein, 421 aa, unidentified
MNSPPLEQLIGPQVAQSPLIGGLPQPPRFVGLDVHKDYATVAILDAQLNTVSQPRRVSIGELEGWTRRNLKPTDKVVLEATTNAWHLFDLLQPLVASVTVADPRKTKMLMNKRVKTDNGDAIQLARLLAVGMVPEVWVPPHEVRELRSLVAHRRRLVRHHTQAQNRLRSALNRHSLLPPEGEPFSACHRSWWEALELSSSEKLRVRQDLAMLDYLKPLIEEATAELTRLSTVEPWADQVPFLLQIAGIGVLSAMTLLAAIGDVSRFPSAKQLVGYSGLGASVHASGQTYRTGKITKEGRREMRATSVECAWRAVDNSAYWKEEFERLADRIGKLKAIVAIARKMLVVVWHVLTKKEADRHAQPEKVASKFLHWAYDLRREGRQGIRAGEFAGCKLKEIRMKETVYSVRRSGRTVRLGPEDE

SEQ ID NO: 96152 - protein, 346 aa, unidentified
MKVLIGVDPHKVSVAVAAVEEATGELLERASFPQDRAGLRYLERWAKRFPERRWAVENAGGLGRHLAVRLAGSGELVVDVPPKLSARVRVLSTGNARKNDGVDALATALAASRNERLASVDPEAASEALRLLSERREDLVAERTRALNRLHALLRDLIPGGVARSLSAERAARILRGIRPKGASARLRRGLASEVLRDVRTLDRKIADLDGRIEAEVEATATTLTEIFGIGPILAARIIGTVGDVGRFPSKGHFASYAGTAPLEASSGEVVRHRLSMAGNRHLNYALHMVAVCQARSDARGGVYYRKKIGEGKSRKEALRCLKRRVCDAVFKSLMADSLVPSRSAA

SEQ ID NO: 96153 - protein, 323 aa, unidentified
MATAATDGEVFVGIDVAQDELVAAIRPGDGVTRWPNDEAGHEGLARHLRDRHPALVVLEATGGLEQAASAALAEAGLPVVIANPKQVRDFARGVGKLAKTDPIDAAILARFGEVVRPAPRPAAGEAGRALRALVARRRQVRDRRVADQQRRLRADPAVRPFLDRAIAAATEELAELDAVIAARLAADPSWRATRAVLESVPGVGPVVAATLVAELPELGALGAKQVAALAGLAPRTRESGKSRGAASIGGGRRGVRCALYLAAVTGIRWNPTIRAFYEHLLASHKPKKLALVAAARKLLGILNAMVRDGTLWDPPARESAPTP

SEQ ID NO: 96154 - protein, 340 aa, unidentified
MKKLYAGIDLHSNNIYLGIIDQDDQRVHKKRLPNMQDVILAELEPFKEKIVGVVVESTFNWYWLVDCLMDVGYKVHLANPAGIQKYKGLKYSDDQYDSFWLAHLLRLNILPEGYIYPKEDRPVRDLLRKRGHLVRLRTSLINSLQGIVSRNCGTMLGANKIKQIKENHITPFLAGEEDLALSGAVSKDSIDYLGQQIRKIEVAVSNKAKVKKPFMGLQTIPGIGKILSLTIMLETGSIKRFAKVGNFSSYCRKVPTSWTSNNKKKGKGNSKNGNKYLAWAFSEAAEFCRRYDKVAKAFYNRKAARTNRMVAHTALAHKLARAAYYIMRDNVEFDSRKLFA

SEQ ID NO: 96155 - protein, 422 aa, unidentified
MLEQTRDEQEIIERVAALDIGKAELVCCVRVPDPGGGRRRVQEVTTYSTMTRSLQVMVDRLTDLGVTRVVMEATSSYWKPPFYLLEAHGFETWLVNAKDVKHLPGRPKTDRLDAVWLCKVAERQMLRPSFVPPIPIRRLRDLTRYRMSLVSDQGAEKNRVEKLLEDAQLKLSVVASDIFGMSGRDMMAALIAGERSPQALAQLARSRMRGKIPQLEEAFVGQFTDHHGYLLTKMLARIDALSVDIADLDTKIEARLAPFADTVARLDEIPGVGAVTAAVIIAEVGLDMTRFPTPAHLSSWARFAPGVKESAGRKKGTGSTGHGDRYLARVLGEAAVAASRTNTFLGERYRRIARRRGKKKAIVAVGRSILLIVWSLLSDPETRYYDLGPGFYDSRINPERKKRNHIRQLEALGYKVIVEPAA

SEQ ID NO: 96156 - protein, 409 aa, unidentified
MHVMNPRCAGLDLGKDMIAAAIRIQDGVAVTRECRTYGTTSRDLLELASWLLSHRITHVVMEATGSYWKSVWHLFEGQFDLTLANPAHIRNLPGRKSDVNDATWMADLLAHGLIRGSFVPPPEIGALRELTRTRKQFVREVVRHTQRIQKILDIAGLKITGLITDVLGVSGRAIVKALIAGESKPERLADLAHPRLQVKRERLVEALYGRLTVQQRHLLGMHLGLVEALEASIAQLDHEIEKAVDPFRALVDRLTKVPGLSDTNVPALLGEIGVDMTPFKTHRHLLSWTRVCPRLDESAGKVHSTRTQKGAAWIKTLMVQAAWAAIRNKNSYLHAQFLRLRARRGGKKAIVAVAASILTAVYYMIRDGSPYRDLGVDHFNGRDRSRTARRFVTRLQQLGYNVQITKAVA

SEQ ID NO: 96157 - protein, 385 aa, unidentified
MPQTPDIFSVLEYDRTLVLAIELSSKCWVVAAQVPGLPHAKAKRTVKPTVEALMAAIDGYRSRAAAAGRIVERVIATYEAGWSGFWLARWLARRGIETYVIQPSSVPVDRRARRAKSDGIDAELLLRTLLAWLRGEPRVCSMVPIPSEADEDARRSIRERTELVAERVSLVNRIGAVLATLGVQGYDPLRRDRRQRLDASCTALGNPLPTNARAKIARMLDRLELLLQQIAELDRQRDAVLEDDAPDKAGEMIQQLATLRGIGVQSATVLVREAFVRDFANGKALGSYAGLSATPYSSGSVNREQGIGKAGTRRLRTVMVELAWLWQRYQPDSANVRWYRERAGTTGTRMRKVMVVALARKLLISLWRFVTQGLVPDGAVMKPAS

SEQ ID NO: 96158 - protein, 353 aa, unidentified
MLAGIDTHKDTLAVGIIDGHGRPVAIHDLPNTEAAFDAVEALLTAHRVTRVGIEGSGNYGRGVALRLVLAGGVEVVEVPPSMTSRERSARPGQGKTDPIDAVAIARITAREPMLPPVRLAVGEAADVRALVDYRAQLVEESTALANRCHGELHGLLPGYHARIPNLTTRASLEKAMALVEADERVRADLTRRRLRRMLEIDAEIRELTKQLGRVLVSIGTSLTQIYGVGPVIGATILGEVVDVRRYRSRHAFAAANGTAPIPASSGRTSRHRLNRSGNRKMNRALYTVAITQIRAETEGRAYYRRKLAEGKTQREALRCLKRRLSDLIYRTLHDDLAAVQDAPATPPDLAIAS

SEQ ID NO: 96159 - protein, 387 aa, unidentified
MPQPNDLSRSLVALDQDSTIIAVVEMSQSSWLVAGMLPGIERQPRKKLEPSAERLLGLLHRWRDEAVKAGRKITRIALAFEAGRDGFWLARWLRVHGVEAHVIHPSSVAVSREHRRAKTDRLDTELLKRGFLGWLRGERGHCTMARIPTIAEEDAKRPNRERECLVRERTRIVNRMKGTLARLGIRNFKPTLRKAAERVTTLHTPEGSALPPNVSAELQRNMARLGFVVSQIKEIEAARQKRLEQEPETEPHAMVRHLARVVGLGVETADILVNEVLSRPMRDRKAVARYAGLTGSPDESGAKRREQGLAKAGNARVRRGMIQLAWRFLRFQKESALALWYRARTADSRVGTRKTMIVALARKLLIALWRFVTTGETLEGVVLRPAG

SEQ ID NO: 96160 - protein, 400 aa, unidentified
MNAVGIDVSKGKSTVAIMRPFGEVVAEPFEVLHTDTELRKLACFLEKLPGETKIVMEYTGNYWQPIANVLHDAGIFVSIVNALLIYKYGNNSIRKGKTDKLDAVKIANYCLDRWTVLERYTPVDQIRQALKTCRRQYDQYIRLKVNLKNNLIALLDGTFPGLNILFKSAPRDMDGHEKWVDFAEKFWHRECICGNSEKAFTNQYKKWCAKAGYRFKEEKASSIYAHAVSQVNTLPMTDSIKCLVTLAVSQLNTIIETISVIQHEMLTLAAQLPEYPVVMRMFGVGPVLGPQLMAEIGDVRRFDRKQSLVAFAGVDAPPCQSGTFESKNRHISKRGSPRLRKTLFQVMSTIIQHAPTDDPVFQFLDRKRREGKHYYVYMTAAANKFLRIYYGTVMAYLKKL

SEQ ID NO: 96161 - protein, 315 aa, unidentified
MITSYQNFIGIDIGKFKNVAAVHNQKNTIKFDNNSAGWQQLFQEFSNILPNAFVTLENTGKYELGLAHFLVGKNVAIHRANTRKVKSFTLSHGTLAKSDQSDARTLAQYGFERYSTLSLFVPMSKEQTTLVALCQRRDDITQMRVQEKCRLAAPENDYIKESCQKAVDFFNNQIDELNDSIQKIIDGNAELQKRQKIIRTVPGIGIKLSQDFVCLMPELGHLNKKEVASLAGVAPHPKESGKTIGYRRITGGRSNVRRKLFTAAMAAAKSKSAPGAFYSKLVESGKKKMVAITALMRKIIVIANARLKEAINLHI

SEQ ID NO: 96162 - protein, 353 aa, unidentified
MLMLADTIDAVVGGDTHRDSHALEIASPAGTPIATLEIDNDEPGFAQALAWILTHAPGPNIVVALEGTRSYGIGLARAVQAAGLPVIEVVRPRREDRRRGKSDPIDAHLAVLHALRMPADRLPTPRADGDREALRILLAARRDLTLTKTAQINRLRALLLGGDDTDRAVARGALTEVRVRTIARRRGRPSDTLEQQIRRGEAQRLVRAIREATQALAQNKKQLAALVTALAPTLMDATGVGPVSAAQALVSWSHRGRCRNDAAFAALAGACPIPASSGRVIRHRLNRGGDRQLNRALHDILLTRWRICPRTHAYIARRRAEGKTDPEIRRCLKRHIARELFRTMQAATALDAT

SEQ ID NO: 96163 - protein, 332 aa, unidentified
MNEITTVGLDLAKHVFQVHAVDAEGDTVLRKQLRRGQVLAFFSRLPRCLVGMEACATAHYWARELRALGHEVRLMPAQYVKAYVKRNKNDAADAEAICEAVGRPTMRFVPVKTAEQQAAVLLHRGRERLVRQRTMLVNALRAHLAEFGVIAPQGLRNVGRLIAIIRDDDDARLPGLARQVLQVLAVQIEQLEAAIAALEKRLMGWHKSNPVSQRLATIPGIGPIIATAIAAMVAEPSGFRSGREFAAWLGLVPRQNSTGGKNRLGGISKRGNQYLRRLLINGASANLLRSKATNADPWVIGLRRRRPSLVVAVALANKTARIAWAVMHRQEN

SEQ ID NO: 96164 - protein, 349 aa, unidentified
MNEPYAGRQIVGFDLHRRRSVLVRMTEAGERLETVRISNDPEYLREVMTRAGEAPEVVLEACYGWYWAADTLAELGATVHLAHPLGVKMFSYRRLKNDERDAADLADLLRMGRLPEAWIAPPATRELRGWVRHRAKLVGLRSNLKCQVHGILANAGITVPMSDLFGASGQRLLATADLATESRSRIDSLQRMITALDFEVELFAKLVAGRLRTHPGYQAIQLIPGVGPILAAVFVAEIGDITRFRRPEQLASWAGLTPKHHESDTTVHRGRIPKQGSRLVRWAAIEAVQRLPGHTRIGQVRDRVAARRGRNIGVVAAARELTELVFYGLRDHRVHALAVHSPARTPLPA

SEQ ID NO: 96165 - protein, 417 aa, unidentified
MEEMLERCCGLDVHKDSITACIMVGHGKQRFKEIRTFPTFTSDIRALATWLRSHQIEFVAMESTGIYWKPVFNILEEGFDLYLVNAQHVKQVPGRKTDVKDSEWLCKLLKCGLLRKSFIPPKAIMRLRELTRYRQKLVRQLGSEKNRLIKALENANIKLSSVFSDVFGKTCWDIVSKIVAGETDLEKLTCNINKHVRASRNDIKKALDGSLESEDMKMLSMMMDHVRYLQKIIADVEMMIDRHLEPFQAEVKLLVTIPGVQKVGAAVIISEIGVNMDQFKGDSQLVAWAGLCPGNNESAGKIRSSRIRKGNTHLKTGLVQLAWASSRTKNTYLSSKYRALSRRKGNKKAIIAIARKLLVICYHMLKKKSSFLELGPLFLDSLESGRKAKYHLKRLQELGYEVEVREKHKEESEQMAV

SEQ ID NO: 96166 - protein, 420 aa, unidentified
MTTSNSTRAAAVLVAIDIAKVRNEVLIEAPGHKRRRRLLVLNNRAEHDHLIEVLQAYGRPVVCAFEATGNYHRPIAWRLAEAGFEVRLVSSLALARTREALHNSWDKNDPKDAQVMLHMLRIQATQVYHDPLRAGINDVQELSKTHEAIARAKTEIQHRILTHYLPLYFPEIDRFRGNSRSDWFFAFLHAFPTPASIMVLTKEEFVTAAWDVVGRKVSKTQILMDIYETARSSIGLPLPLDAPAIRMFRMVIDEARSLIRQRNEIEAQADELLRHSPDYQLLRQIPGIGPINALTIIAEAGDLRRFGHHRQFLKFCGLDLSTQQSGQYRGQTRLSKFGNARLRRTLWIAGQVAIRQRENGFRHKFERYIARDRDNPDLRRKAMTAITAKMARVVHAVIKGGSDYRPFIEGRVPGGRTSVS

SEQ ID NO: 96167 - protein, 351 aa, unidentified
MNNATARKRTQITIGLDLGDRRHTYYVLDGAGKMAREGSLGNTREQLATMARSYPGATVVMEAGTHSPWVSRFLQELGLRVIVANPRKTRAIYQNERKSDRRDAMMLARLARMDPTLLHPVEHGSQEAQQDMLQLKLRDSLVRARVALINAVRFTLKSLGYPVSNPSSERFHKLVLSEVPESIGEMIAHNVAAIAELTQRIKALDVSISRLAAERYPETIYLQQVSGVGPITSLYFVLKVGTPGRFQRTRDIGAFLGLCPRRDQSGETDKELRISKCGDQYLRGLLVNAAQYILGPFGTDSALREHGLRLAQEGTARAKKRAVVAVARKLAVLLLTLWKSREPYESFPTMA

SEQ ID NO: 96168 - protein, 394 aa, unidentified
MKLVGIDIGKHKHFVSIVDKLTGEVILQPVAFSNNAQGFEFLISQIALYPVDSVLIGMEDTGHYHFALLRFLLQKNYSVALINPKTTDLNRRMDGGITKNDKLDTLNICDILSSNKLKKPYRLTSSKKFDLYEQKQLTRLHHSLKEQINVLSNRLQKCIDLVFPEYNSLFKSKYGKVYMSILKQFGSAKAIAQADIRTLRKCFDITGRGNRISLTAEKLKESAKTSVGISSLADEMQIKHLIAHIELLNDQLKEIDKKIEEFSTDLNSPIISVPGISHFSGTSILAEYGDIFNYSKPSKIIKAAGVAPFHYESSQYEAKHSAITKQGSSYLRKTLYQVIVPVIRFNKVFKDYYDLKRSQGKSHRCAQGHCIRKLLRVIYHLVTTNQQFDASLLR

SEQ ID NO: 96169 - protein, 372 aa, unidentified
MAQSTALFVGLDVHKDSIAVAHAAGGSAEPPVFVGAIGPRQADLDQLLRRLQGKTSALTFVYEAGPSGYGLYRYLTAKGLPCQVVAPSLIPKKPGDRVKTDRRDAVELARLLRSGDLTAVYVPSVEDEALRDLCRARDAARVTGKDAKLRLKAFLLRLGRHYVGRATWNDAHRRYLAKVVCPTPAQQIVFQESVRAVDEQVDRIQRLDAELLERAPAWRLYPVVQALQALRGVQFLVAITVVAELGDLTRFDNPRQLAAFVGLIPSEYSSGGSRRQGGITKAGNGRARRALIEAAWAYRHPAKVSAHIQSRIDRLPKPIQDLGWKAQVRLCKRFRRLVARGKHPNVAVTAVARELIAFMWAIAKEVPVRVPA

SEQ ID NO: 96170 - protein, 315 aa, unidentified
MDVLGIDVSKADFQACLLQGKRLARQTFVNSPVGYRRLHSWLKNRRVFKVHACMEATGSYWTGLAKALHDAGMTVSVVNPSRTALFARSQLRRTKTDRVDAEMIAQFCLTQRPLAWTPPAPEILELRGLLSYRDELVAARTRLKQISAEIHATKALRRLQSDHLDNVNDAIAEVESQIRKLLKVSDGLHSAVATLEGVRGIGFITAVSIAAKLPVERLRDGKAAAAYVGLTPRERQSGTSVQGKPRICKTGNASLRRDLYMPALVAIRHNPILAAFAARLRERGKPPKVIIAAVMRKLIVLAFTLLKHPRPALIA

SEQ ID NO: 96171 - protein, 342 aa, unidentified
MKEYVGLDVSKEETSFCAMDETGKILAQGKASSDPESLFEAHKAHTLCPERIVLETGTLSNWLARGLRAYGLPVDVIDARQAHAVMKLQHNKTDANDAVLLAEIARTGFCRPVPVSSEASQKQRILIKARRHLVGQKRSTENAIRGFLSSLGLRFPKGSGKLAERVRLALEERPDLKPMIEPLLASAAALQGQIKRLDTDVRTAARASPASRLLMTVPGVGPITALAFAATIGDAERFSKSRNVGAYLGLTTRRNQSGEMDYSGRISKFGDRLLRSLLYEAANSLLTVVRKAHPLKDWARRIKKRSSHKKACVALARRLAVIMHRMLITGEAFRWPEKEAAA

SEQ ID NO: 96172 - protein, 367 aa, unidentified
MINNFIFVGCDSHDKTLVTRIAHNQDKSERKTFSASRAGRRKLIEHLKGRSDQTGAKVVVAYEASGNGFILCDDLKKAGMECHVIAPTKIERSSKQKRNKNDDRDAERLLEMLRGHYLGGNKLPAVWIPDHQTRDDREIVAGRQDLSEKQSKIKTQVQMLLKRHGLERPEGIGSGWTKKYRRWLEGLSEDAGTGLGIRIRLKSLLRQLRFLEEEIQCADEGMKELASTARWKPIVDELMKEKGIALKTALKYATDIGDFGRFRRGRQVGAYFGLTPSSAESGENDDRKGHITRQGPASSRKILCQATWSRVRHDKQEREVYMRIVEKNPKKKKIALVASTRRLAVRLWHIGRQAQLKMQSVSAGSTE

SEQ ID NO: 96173 - protein, 346 aa, unidentified
MLYAGLDLSPQRLEVCVLDEDGRTVETLAVRPDADALRTLAAQIARYGEPVSAAIESMTGARFIHDQLELAGWDVEIADAAKTKGLAPLAAKTDKIDAHVLAELARRDLVPAIWLPDPSVRAERERARFRLHLVRHRTALKSRIHATLMTFGHPVPVSDLFGLRGRELLDSLAILEPWATTLARSLALVDELDGEIARSEAELRRLGADHPYVPLLTSIPGISWILGYTIASEIGDISRFASPKKLAGYTGLCPRVYQSGAMDRRGALAKTGPKYLRWALIEAATQAVRDPRYGARYQRTKRRLGKQRGSKIARVELARELTTAIWYMLTRQEPFRAVGPTCGLVA

SEQ ID NO: 96174 - protein, 399 aa, unidentified
MRHTEQAWAGIDAGKGHHHVVVIDREGTRLLSRRVANTEPDLVELIDTVRSSADDLTWAIDLTDGPATLVIALLLTRGHRLLHVPGIAVNRAADTYRGEGKTDAKDAAIIADQARMRRDLRLLRLDDPTIAELQMLTTHRADLAGDRTRAINRLRGRLAAACPALEAALDFTNQGPLVLISQFPTATAIRTAGPDELHRWLRSQHVRSAATLAARAHAAAASQHIQIPGEDTAGLLIARLAATVLELNTQLADLDTRIAGRFHTHPDAAVLTSMVGIGELLGAEFLAATGGNLETFASADHLAGYAGLAPTPRDSGNRVGNLHRPRRYNRQLQRVFYTSALISIQRSPASRSYYQRKRAEGKRHRQAVLALARRRVNVLWAMLRDQRCYEEPISASTAA

SEQ ID NO: 96175 - protein, 369 aa, unidentified
MKKTNEDIWSNGNQHASVTDNGKRVLRLGLDVHYRQVTVAIQEDGGRIKAAGRMKHPVFLDWIQKKLDQGWEIYSCYEAGASGYWLHRRLEQVGVQNLVVVPKAMGQGGKKQKTDKRDAGELCDSLDRYLRGHDKALSVVRVPTQEQEQKRALIRYHRQIMADRGRCEARGKGLLCAQGIEVQGLWWEGHGWLEVQSDPQLKDWMKEQLIGWRNKILSLDEEQSGLRERIAALAPALLPKGVGAYSAAVVYYEMRGFERFKNRRQVGSMTGLCPGVHLSDGRGKEGSINRCGIGIVRWTLVEMVWRLMIWQPQYPPVRRLAAGLVKGKRAKKRLVVQAARRVAIDLWRLSTGQTTPEKLGLIMHDTSVK

SEQ ID NO: 96176 - protein, 460 aa, unidentified
MAQKRKNAPGKGHKGQPHSLNPIQPNAAGIDLGSREHCVAGPPLPDGSPNVKHFGTTTPELLRLAGWLDQQKITTVAMESTGVYWIPLFEILDSRGFDVQLVNSRQIAHVPGRKTDMIDCQWIQLLHACGLLRGSFRPNDDICRLRALMRERNTIVDQRSDWVRRMQKSLDQMNVCVHHAVSDITGLTGMAIIRAIVGGERDPSVLASLRDCRCQKSEARIAEELTGNWRPEHLFNLGQALKVYDQLCGVIADYDAEILKHIDSLQPPDSKDSPAPPPASKAKATKFLRLGQEPMRQALYRMSGFDLTSIDGLGVDTALVIMSELGPDLSAFPDEGHFVSYLRLAPNISISAGKKVPSKFRAVTSTRVCNALRMAATSLRNSKTALGAFYRRISRRKGASVAVFATARKLAQLIYRLVRYGQAYVDIGSEIYEARFAQRRLASYTRDLKKMGYKIEPLVA

SEQ ID NO: 96177 - protein, 449 aa, unidentified
MRRSTLESVPAVPNAAEREFDWYVGIDGGGATHQVCVLDAAGRRAGERAVAHAGADLAALAAWLHEVAGPSLARVAVGLESRHAGPVALCLEHGAAVFAINPKQLERFRERASAAGAKDDRRDAYVAASALRTDRGAFHRVTPDDARVVALRELSRTADELREDARRLSNRLRAQLERYFPQMLTLVPAADEPWLWTLLERVPTPAAAARVREAAVARVLTAHRIRRVSAAEVLTALRAPALVVAPGTVEAVSAHVALLVPHLQLVSEHHRRCLAQLEAAVAALAGPGPGADPPSRPAPNAPPDAPPDAPPDALGTAVRLVRSLPGVGGVIAGALVAEAAGALLAGDYHALRTQGGTAPVTKQSGKQRLVAMRHACNQRLRTALYHWARVSTQHDAAARQYYATLRGRGHSHPRALRSVADRWLRILTAMLATGTPYDSTRFASGVATP

SEQ ID NO: 96178 - protein, 362 aa, unidentified
MRFYNQPHTFYCGVDLHARTMYLCILDQGGTIVLHKEVPAEAGAFLEAIAPFRDGLVVACECLFCWYWLADLCQAENITFVLGHAPYLPSPAGRGAGGEGGGKSKDDEIDSQKIAQLLRGGTPGAHAARLAYAYPKGLRETRDLLRRRMYLVHKRAEVVAHLVNTNSQYNLPPFGKKLIYARNRQALKIADRFADASVRKSIELDLGLLDSLDELIGDVELYLDRTVKVDDADTFYRLRSIAGVGKILALVLLYEIHRIDRFADEGDFLSYARLVRCQHRSANKIVGTGGKKIGNAHRKWAFSEVVCLLIRSCPAVKARQARQEKKRGKKKTLAVLAAKLGRAVCLMLHRKVAFDVRRFLGQ

SEQ ID NO: 96179 - protein, 427 aa, unidentified
MRSIALDVHRDFCEVAIKDESGLRLAGRVKSSVEQLERFAQSLAPDDEVALEATGGALAIARILEPHVGRVLIANTRKLSAIAESKVKTDKVDASTLCELLAAGFLPAVWSPDEFTRALRRRCQRRSKLVRSRTRSKNECHAVLQRNLKGRPPMSDVFGKGGREWLAALELPADESETLQCCLREVDFLDNEIGLIERELARQALSSEEIRRLMSVPGVSLVSAAAFVAAVGDIHRFASPKKLVSYLGLDPRVRQSGEGPARHGHISKQGSAEARHMLCEAAWVAVRTPGPLRAFHERVRARRGAQVALVASARKLGVLFWHLLTREEDYAFGRPSLTRRKLRALELKTREGWRRGRYSGPRVNESRKEREREAEFAEQMESAYRRLVEDWQPKAPKSGAGATRGRASSKPSSGKQRGRASVPNSAL

SEQ ID NO: 96180 - protein, 334 aa, unidentified
MENIALIGIDLGKNSFHIHCQDRRGKAVYRKKFTRPKLIEFLATCPATTIAMEACGGSHFMARKLEELGHSPKLISPQFVRPFVKSNKYDFVDAEAICEAASRPSMRFVQPRTESQQAMRALHRVRESLVQDKVKTTNQMHAFLLEFGISVPRGAAVISRLSTILEDNSLPLYLSQLLLKLQQHYHYLVEQIKDLESQLKRKLDEDEVGQRLLSIPCVGTLTASTISTEIGDGKQYASSRDFAAATVLVPRQYSTGGRTTLLGISKRGNKKIRTLLVQCARVFIQKLEHQSGKLADWVRDLLCRKINFVVTCSLANKLARIAWSLTARQQTYEA

SEQ ID NO: 96181 - protein, 428 aa, unidentified
MDFTQNNRLEQITDETLIIGIDVAKHKHVARAIDDRGRDLAKRLVFESGLTGFKELLDWTQNLSEETNRPDLIFGMEPTGHYWLNLAYYLTAQELHAVVVNPTKVNRTKELDDDSPTKNDTKDAKVIAQVVRAGRYHDPILPEGIYAELREGMKLHDMMQKDLSSIKAQVQNALDRYFPEFTSVFKDWTKKTPIHFLKKGYLPADIASCSEEELMVEVKVAAKRGVGIKRVRALKHAAETSVGLTVGLAMARQEISYLIDQYLAIEERIEAHEARLEELVRQVPGASQMIAIKGIGVMTVAGFFAEVGDLSNYKDPRQIIKLAGYNLQLNQSGIFKGQTTITKRGRRRLRSILYLAARPLSANNEGFKQLHHYYKNRANNPLTGKESFVALGRKLIKIFYVMGTRNCVFDGKRMMRDIPQLKSLQEAA

SEQ ID NO: 96182 - protein, 342 aa, unidentified
MEHFAGLDVSVKDTSVCIVDETGKIVREVKVASEPDALLAVLTNPAYHLKRIGLEAGPLSQWLYSALAEPGLPVICVETRHMQAVLKAQINKTDRNDARGIAQMMRAGLYRPVHVKTLRSQKLRMLLTHRKLLQSKAIAIENDLRATLRNFGLKVGIAGKVKFEARIKELVENLPDLVVLVEPLLIVRRVLREQIVALHRRLLAIVRDDDVCRRLMTVPGVGPVVSLTYRATVDVPARFRKSKAVGAVFGLTCSKYQSGEVDRNGRISRCGDEMMRVMLYEAAQSMLRSKKWSWLKAWAMQIARRRGMKKAIVALARRLVVIMHRIWVDGTEFRWTRETAAA

SEQ ID NO: 96183 - protein, 387 aa, unidentified
MANGLAERNVSVSEASIVMGIELSKKGWLVALRGPLEDKISLHRLSAGDAKGLLALAGRMQSAATAALGTVVTIASCYEAGYDGFWLHRVLTAANIENHVIDPASIHVDRRARRIKTDRIDAQALLRTLLAHRRGEGRVWSVVQPPTPEDEDRKRPHRERQNLLKERGRHVNRIKGLCAQQGILDYEPMRADRHERLAELETGDGRRLKSLLLAEIRREIARLEFLLAQIAELEMTRETAIKTASSDDTATVQSQQMRSLRRLTAIGPETSTVLANEVFYRRFRSRRHLAGYVGLTPSPHMSGGLSREQGISKSGNRRARTALVEAAWLWLRYQPKSALAKWFTQRVGGQRGRLRRIMVVALARKLLVALWRYVETGLVPTGATLRA

SEQ ID NO: 96184 - protein, 340 aa, unidentified
MRRLYAGSDLHGNNNLIGIVDGEGKRIFKKRLPNEPQLILEVLKAYKEDMVGIVVESTYNWYWLVDALMDEGYKVHLANPSAIEQYSGLKHADDKHDAFWLAEMLRLGILPEGYIYPKEERPVRDLLRKRGHLVRLRTSLMISLQNILSRNLGRNMNVNDIKAVKEDRVSPLLEKNEDLALAGRVSKEAMDHLTHQISKVEWVVQKKIQLKPGYQYLPSVFGVGKILSLTIMLETGPISRFPTVGDYVSYCRKVPSQWMSNGKWKGSGNRKNGNKYLAWAYSEASEFARRFYPEARAYYQRKMHKTNAPVAHSALAHKLARAAYYVMRDQVPFRPEKLFG

SEQ ID NO: 96185 - protein, 393 aa, unidentified
MTACVRVPGTHGDRTQHVRTFDTTTAGLLVLRDWLAAHAVTHVAMESTGVYWRPVYYVLEDAFACILANAAQIAQVPGRKTDVKDCVWIAQLLEHGLLRASFVPPAPIRELRDLTRYRKVLIQERTRHANRLHKVLEDAGIKLTSVASRLLGVSGRAMLDALVAGTTDPEVLADLARGRLRQKLPALRQALVGRFRSHHAFLVSQLLAHVDYLDEAIQTVGGHIDEVMVPFTDELARLDTIRGINKRTAEVIIAEIGVDMTVFPTAKHLASWAGLCPGNNESAGKHRSGKTRPANRWLRAALIEAALAASTRAAPGAFAARYRRIMPHRGHKKAIVAVAHAMLVTIYHQLTRQTTYHDPGTDYYDRRHAERLRRRALQTLERQGYRVTLEPAA

SEQ ID NO: 96186 - protein, 337 aa, unidentified
MNVTTIGFDIAKGVIQVHGVDAAGMVALRKRMSRKGALSFFAGVKPCLVGMEACGGAHHWARELTALGHQVKLISPLYVKPYVKRSKTAADAAAICEAVSRPHMRFVPVKSQEEQALAQAYKTRGLLVAQRTALVNALRAHLTEFGIVAPLGPAGAARLIGLVRAKQEPLPDLAYETLATLADMIETTQARIAVFDAQLERLAAKDEASRRLMRVPGVGPVAAGTIRALAGDVRRFKRGRDFAAWLGLTPRQNSSGDKVRIGAISKAGNRELRTLLVMGQLAVLRYVRAKPAKASAWLAGMIKRRPPLVVAVAMAAKTARIIWAMLARGEAYRPHPA

SEQ ID NO: 96187 - protein, 395 aa, unidentified
MGIDLHKETHTAVMLDCWNRKLGEITFENKPSEFSKLTRKVSRFVTEGKEPVYGLENAYGYGRALAVWLIEKGFAVKDVNTALSYAQRKSVPMYQKSDSYDAEAVALVLINMLDKLPDAIPDDKYWTLSQLVNRRDNICTHLHRLKNQLHEQLCMAYPSYKLFFSDISRATALYFFMEYPSPAHLLGKTAEELAEELRPVSHNNCSVKRAEKILSLVRADGDTKRDHQESRDTITRSLVSGLEHYRVQLEEVNQAIKMLMPEFDCTLMTMPGIDLITAANMLSEIGNISRFSSAAKLAKFAGIAPVNFSSAGKGKDMCPKQGNRRLQAIFYFLAIQMIQISINGTPRNPVFREYYLRKVEEGKNKQQALICIARRLINIVYGMLKNHTEYREPEQ

SEQ ID NO: 96188 - protein, 407 aa, unidentified
MAGLQIVYERCAGCDVHKKSVVVHVVIPSYSETRTFGTTTRELLSLLDWLAGSQITHVAMESTGVYWKPLYNLLETTGMIVYVVNAAHLKAVPGRKTDVQDAEWICDLMRHGLLKASLIPSRPQRELRELVRYRISLVNERAAEANRIQKVLEGGNVKLGSVISDILGKSGRAMLGALAEGERSPEDIAGLAHPRLKATREELTEALHGRLTSHQHLMLRLQLDHVRYLDQQIEAVEAEVATRLVPFASQKTQLDTIPGVSERVAEVIVAEVGTDMTRFPSAAHLTSWGGMCPGSNESGGKRRTARTRKGSPTLRRTLTEAGQAAGKTKDTYLGAVYHRIKARRGGKKAAIAVGRRILEIAYYVLRDGVAYEELGANYYDERKQDAVVRNAVKRLERLGYKVTVEAA

SEQ ID NO: 96189 - protein, 339 aa, unidentified
MNCTVIGLDLAKNVFQLHGVDIETGEIFRRQLRRHQVSEYFANRQPCLIAMEACGSAHYWGRKFISMGHEVRLIAGQFVRPFVKSNKTDTADAHAIWEAAQRPDMKFVSLKTEEQQSVLALHRMREQLVKMRTMQINQLRGILYEFGADLPQGRRKGMAKIGEELAQLEDRLSTMVIETIRKQIHRIEELNKDIAEIEKRLQLWKADDDACQKIIEIPGVGILTATAAVATMGDAKAFKSGREFAAFLGLVPRQSGTGGRVKLLGISKRGDVYLRTLLIHGARAVIQNQKNHASWLDKLLLRKHRNVVAVALANKIARTIWALLAHHRIYEKNYSATAM

SEQ ID NO: 96190 - protein, 358 aa, unidentified
MEYFAGLDVAMEETAICVIDREGKVALETTATTDPDAIVTVLRPYVAKLRRVGHEAGSLSPWLQVELKQRGVPAVCLEAWHARAALSAMRNKTDRADARGIAHIMRTGWFREVHVKSEESYRLRLLLTQRRNLKRKFLDIENAIRHSIKTFGLRVGHVSRGQFEARVRELVANDPLIAGLTDCMLRARAALWQEYVRLHKVVVDVVRRDELCRRLMRIPGVGPISALAFKTAIDDPRRFRQAKTVGAYLGLTSRRWQSGTSIDIAGRISKAGDGDVRHTLYEAANIMLTRFRGFCSLKAWGLRIAKRRGHKRACVAVARKLAGIMFAMWRDGSEFQFKAQRQADGNATGMPKLIGTAA

SEQ ID NO: 96191 - protein, 429 aa, unidentified
MNERTLCFGVDVHREQLVLRAADQATGLERGSLLRVPNNRLGAEQAITWLRQLAAGTDGGSYDRLVGGLEATGLLWLPFHVYLTESAALQPFHLQLVCFNPKLIADFKKGVVLADDKDDARDAWGIVERVRFGHLPTSYVPGAFWQGLRRLTRYRFHLAQMIARESTRFGTHVFLKWSDWQRLAPFSDVLGATSATLLTQYSTANLMALSLPQLTDLIDQLGKRRFSDPQATARKVQQALAQSYPVPPPLEEAIMTVLTVQLDHIHAGEKLIKRLDHDIAHFIQAVPNPLLSVRGLGPIITAGILAEVTDIARFPGDPQLAKYAGLAWRKHASAGFVAQDTRLSKVGNVYLRYYLVQGANLLRQYNLDYQAYYWRKVEETPKHKHKRALVLTARKLTRLVYALLTKNQPFVARRTDDDSPEAVAVPQAA

SEQ ID NO: 96192 - protein, 339 aa, unidentified
MKYTPVGVDIAKHLIQVHFIDENTGEVVDKQLRGRDFLEYFSNRESCLIGMEACGGSQHWARELTKLGHKVRLLQARFVKAFVMGNKNDVMDARAIWMAVQQPGKEIAVKTEEQQSVLVLHRTRMQLVKFRTAQINALHGTLLEFGETIHKGRAAMEREFPEALERMKERLPPYLITVLENQYKRLNELDSLIEDIEKQLASVAKQNETCKRLLDIPGVGPLIATAAVATMGEASAFKSGREFAAYVGLVPKQTGSGGKIRLLGISKRGDTYLRTLFIHGARAAALLTKEPGPWITELKKRRPASVAIVAMANKLARTVWAIAAHDRKYVRNHVSIRPY

SEQ ID NO: 96193 - protein, 359 aa, unidentified
MNATTVGVDLAKNVFELVVADRHWKVTERARLTRPQFQRWFANRDVSLVVMEACGSAHHWARHLQSMNIPVRLLPPRYVRAYVKRNKTDAADAAALLEAARCADIQPVRVKSLEQQALQSLHRVRSQWMATRTSRINSLRGFCREFGMAISVGSRLGVEQISRLLADPDAAIPELLRPSMKLLVEEIRLLEVRIAQLEVQLGAAAKQSAACETLLSVPGVGLLTATAMVAATGGSIAHFKDARHFASWFGLTPKEHSSGSTRHLGRISKRGDRYLRMLLTHGARSVLRAATVAERAKRPLDPLRQWALNVQSRSNHNKATCALANKLARICFATLRDQEPYEKTRVNKKAERTAYSTVH

SEQ ID NO: 96194 - protein, 352 aa, unidentified
MEKITTVGLDLAKQVMAVHAVDARGQAVLRKVVRRDALLAWSAALPPCVMAMEACGGAHHWARELVRQGHTVRIMAAEFVKPFRKSGKNDANDAEAICTAVRQANMRFVAIKSVEQQAALCVHRLRQGLVEERTALINRLRGLLTEFGVVAPLSPEKLRRELARCQDPEDARLPPTLRQLVGDQLAALDQLEVRLAAYAEQIAAQARGSEVAKRLQTIAGVGPTTAAAMAATVGQPQEFRNGRQFAAWLGLTPKQHSTGGKTRLGRITKRGDAYLRTLLILGAKSALQAALRKPPETRHRLQQWIVAVFSRIGYHKTLVAIANKHARIIWVLLVKGEDFDVRRLTPKVAAAA

SEQ ID NO: 96195 - protein, 431 aa, unidentified
MTMKVVRFNCAGLDVHSKIIVATVGITDKATMITEYHQKEFGTLNPDLCALAKWLLSYECRDVCMESTGKYWIPPFNALESFGINITLAHPKYTRAIKGKKTDKKDSKWICDLYKHDLVRGSFIPPKDIRELRELSRYYIKLVAMRSSESLRFQNCMTVSNLQIHQIFSDPLGKSSQRVLREVLRTENPNEEEILKLIHKSCKKRGQVMDAINGSKIEPDARFKMNTTLEHINEIDKHIEACFKEMLVRASKLSNRFIHITSIPGISETSAVIIISEIGVNMEAWESGKQLACWAGLTPGNNESANKKKSVRITKAGQYLKPILVQCALAAIGCKNNSYFRIKYQRIKKRRGHKKAIIAIARMMLISIYHMIKTGEMFNPTDYEELVNPKPKKSKVFTIESALSFLKDSGYDISTFQRTSPGGLDSIQPAC

SEQ ID NO: 96196 - protein, 316 aa, unidentified
MDNKSSVYGVDVSKATLVVGEYDSGSMFTLSNTPEQIARWVSSIAEGSIVAMEATGAYHQVLATLAHAARMRVYVLNPRALKHYAEAIGQRGKTDPVDTRMITRYAMHEHSKLFAWEPPAPGAEKLAQLLQRRDRLVTACQMVAQSLAGVSALKAQREQLLANIKRMIRNTELLMRAELARAPHLAEVHQRLTSIVGVGFVVAAQLVVALTRLRFPRLESFIAYTGLDPRPDDSGQRRGRRRLSKRGPQLLRCRLYNAGMAAAHSKLFKPLYLALRARGLRSTEAIVILARKLARIAFALYRSGETFDAAKHLQTA

SEQ ID NO: 96197 - protein, 340 aa, unidentified
MGKFTEKKFFVGVDISKDQLDLALLIQGQNDQFFNLTVGNNFKGFDSITDWLKKNKAKPEDCLFCMEHTGTYGLLLFAWLSQVGIDYCVEPGLKIKRSSGVTRGKNDPVDARRIADYACTRKAKLEPFCLPTGLMLQIKQLLTYRDQLVRICSSLKNSLQSHQEYQRVSGLKSISEDIKAQISDFEDREKRIELQITDLIKSDKSLYKNYKLATSVKGVAFVIATYMLVTTNNFTSFENSRKYACYSGIAPFEHTSGTSIKVKSRVSNLANKKIKALLSNGANAACRCDPELRNYYKRKIAEGKDHKLVMNSISYKLVNRVFAVVKRQTPYVSIYQQNFS

SEQ ID NO: 96198 - protein, 344 aa, unidentified
MSTRQKSLYCGIDLHSSNAVYVITDSSDKVLLKRRLPNDLSTILATLDPFRKQLTTVAVESTYNWYWLVDGLMEAGYPVKLANPAAIDQYDGIKQADDLTDAAFLAHLARLDILPTGYIYPKEERPVRDLLRRRTLLVRQRTAIKLSLQNMFMRQAALNLNWRAIRRLSVKERSDVLGDKDYLLFVSKEQLELIEQLNAHITQFEKKVLERTELKTEYEYLLTIPGVGVILGLTIMLETGEIDRFANVGNYTSYCRCVRANKISNGKSKGKNNGKNGNPHLAWAFVEAVHHAIRACPQAKQFYTRKKSKRNGALASKALAAKWSKAAYYVMKRQEAFDLKRVFG

SEQ ID NO: 96199 - protein, 344 aa, unidentified
MDVTTIGIDLAKHVFQVHAVDAAGSVIVRKALRRAHVLPFFAKLSPCLVGMEACGTSHHWARELVALGHTVKMMPPAYVKAYVKRGKTNAADAEAICEAVTRPTMSFVPIKSREQQAALSMHRARDLLVKQRTQSVNMMRGLLAEFGINIPEGLERALLMARELVDGETPAVPAAAAKIIFALSQQALDTHAHIREIDHALAALQRSDEVARRLATIPGIGPIGATALAASVTDPGQFRSGRHFAAWLGLTPLQNSSGGKERLGRISKMGDKYLRKLLVIGATSLVQRARSKPESVHPHLVSLLARKPARVATVAMANKTARIVWAVMTRDEVYRADHMPVLSA

SEQ ID NO: 96200 - protein, 342 aa, unidentified
MNIITVGIDLAKNVFAVHGVNDNGKPALVKPKVSRADLLPLIAQLPPCLIGMEACSGAHHWARLFRQHGHTVKLMAPKFVAPYRMTGRRGKNDAADAAAICEAVTRPAMLFVPIKEEHQQIILCLHRTRQGFVEERTASYNRLRGLIAEFGIVLPQKVTCLRREIGAHLEDLPGYANRCVADLLTHADRLDERIAEYDRAIAQAARDDAASRRLMKLPGIGPTTASALLASIGGGHDFTSGRQVAAWIGLVPGQYSSGGKARLGRITKAGDNYLRSLLVMGARAVLNSLGDKQDRFSRWARSLQERRGYWRAVIAIAAKNARLAWAVLKYGEDFKLEPAKSE

SEQ ID NO: 96201 - protein, 316 aa, unidentified
MTSLCVAGIDVSKARLDVFVLPQRLAFECTNDEAGITMLRQKLQGLGVERVVLEATGGLEYCAARALADAELSVERVQPGRIRAFRTVLGKRAKSDPLDAKLAARFAQAMPEEQARSIPNHQAEAIRSLSARRRQLVDLLVQEKTRLKMSRDRFVLESLKITITHLKQERARIEALLQSAIEKDAAIARKNALLRTIPGIGPVVATTLVTDLPELGRLNRHEVASLGGLAPHPERSGISRPGDHIGGGRACVRTALYMAAVCAIRCNPGLKTFYKRLVQGGKPHKVAVVAVARKLIVLANTLIRTDAPWNPAFGIG

SEQ ID NO: 96202 - protein, 422 aa, unidentified
MKKRRYKATNVKRVNWERIGAQTEGQRIIFGVDVAKEDFFAVLMNADYSVIETLKWVHPQQTRALVAHLLDDLKGAHLEVAMEPSGTYGDALRGYLSERGVSVYQVSPKRVHDVAEVYDGVPSLHDAKAAYLIGRLHLEGVSKPWPALSKARRDQQALIAELEMFESARQRNLNRLEAALSRHWPELEHILDPTCVSVLSLIGEYGSAQEIAAHRSEAQQLLQRIGRSRLAAEKVQRVLDSSATTLGIACTEGERYFLQMLGRELVRSHQRVQEIEHRIAHAVAADALLTHMATVIGKTTSVVLSATVGTPVEYPNPYSYLKALGLNLKERSSGKHKGQLKITKRGPGQARRCLYFAALRWLYRDRVIGAWYQQKIKRDGNRKGKAIVAIMRKLVLALWHVAQGEVFDSRKLFNTQALGLAA

SEQ ID NO: 96203 - protein, 402 aa, unidentified
MNKFNPTTTKVSTTSALGTILTVQSALDKYAAYIGLDTHKDTIVVAIALPGRALAYIDSELANNEKNISKLIRRLSKQFAGQLLLFCYEAGPCGYGIQRQILASGHDCEVIAPSKTPKKPGEKVKTDRIDACKLAQYLRSGDLTAIWIPDHEQEAMRDLTRARSDMKSQELKARQQLNAFVLRHGHSWPSNKTRWTQSHYNWLESLKFNHDWLQVVLQEYINAVKAASGRVKDVTDQMERVLPQWSMAPVVDSLIALRGIDKLAAMVLLAELGDISRFDSPKQLMAYLGLVPSEHTTGSKRRQGSITRTGNSHARRMLVESAWSYRFPARQTMHLKRKATKASDEAKTIAWRAQKRLCGRYATLIQAGKNTKQTTVAIARELIGFIWDIVCHEMPKVKIVVQ

SEQ ID NO: 96204 - protein, 368 aa, unidentified
MSTPKRSRSQWPSKAGRSARFGVIPNRLESIRKLVHKLGPVKQLRACYEAGPTGYVLYWQLTQLGVACEVIAPSLVPTKAGDRVKTDRRDAAKLARGYRAGELTAVWVPDAAHEALRDLVRVREAARKDQMKARHRLGKFLLRHGRRPPEGTKAWTQKHREWIKSHVRFEQPALETTLADYLEEVDHMAARIVKLEKAIDEAVSQAPAEIGVVIEALQALRGVAQTTAASIVCELGSLSRFPSPRELMGYSGLVACEYSSGSRVQRGGITKTGNGHLRRVLVEAAWAYQHRPNGIGFLLRRQKTLAISEEAKKIAWKAQQRLHKRYQAMAARGKNKNQIVTAIGRELLGFIWAIAVAAEKQHKLAQAA

SEQ ID NO: 96205 - protein, 338 aa, unidentified
MQVATMGFDIAKNSFQVHGADDRGKVVLRRKLSRGKVLEFFANLPRCLIGMEACAGAHYWARELIKFGHDVRLMPPQYVKPYVKTNKHDAADAEACCEAVQRPGMRFVPVKSERQQSLLMLHRIRDRLIAERTATINAIRGLMAEFGIVAAQRGAGLKELLAIISDLEDERLPPLARELLVGQAEHLRAIEARIADLDGRLVRQARDDEASRGLTDVPGIGPVIATAMVATIGDATLFASSRSFAAWLGLTPRQHATGGRERLLGISKRGDGYVRRQLMHGARSLVRVAKGRDGKLWSWINDLLARRPFNVVVAAVANKLARIVWAILSRGEVYRVTA

SEQ ID NO: 96206 - protein, 344 aa, unidentified
MDHYAGIDVSLECSSVCVVDASGKIVREAKVASEPEALIGWFGSLGLGLARVGLEAGTLSQWLYAAMKQAGLAVELLETRHVYEAFKSMPVKSDRNDARKIAQLMRLGWFRPVHCKSITAQEIRAMLTARKLVQSKLLDVENSLRGILRGFGLKVGKTTRTNFTGRIEELVKGHPNLQTIAAALLRARAVLLAEFNGFEKRVRALSRLHDQARLLMSTPAVGPIVSLTFACAIDDPSRFTSSKQAGPHFGLTPKKYQSGETDYTGRISKHGDASVREVLYEAAHIMLTKPIKGCSELKSWAMRIARRAGTNKAKVALARKLAVIMLRMLKDNVPFNPVAKAATA

SEQ ID NO: 96207 - protein, 310 aa, unidentified
MQSPLYIGVDVAKAEVVVACAHNTFPVRSVANELGELKTFLNTLPPGSIIAMEATGSYHMALADLAHGLGFHVYVLNPRDLFYYARGVGLRAKTDRVDACMIARYVLSEGSRLHRYQPPTLAQRQLDELLKCRATVVRQKGALQQSCAQLAMCEQEIREVLEKYDALLEKMDDELVQLMKSIPERMQQQKLLQTIVGVGPLTAAWLTNLFERVAFRSSDAVVAFVGLDPRACDSGQKRGRRRLSKRGPAEGRRLLFTAGMAAAKSRRWKAQYEQYRARGLATTEAVLLLARKILRIAFAMYRSGESFRPG

SEQ ID NO: 96208 - protein, 400 aa, unidentified
MISVGIDVSKEKSTVCILKPYGEIVSKPFEVYHVEQELSELATMLLRLNDEVRIIMEATGIYHLPVLSYFKERGFFVAVINPFEMKEYRCQGLRRVKTDKQDAIAISHYGIDHWYRLKEYEVQENIYTELKLLGRQYCHYMRMRVESVLELTHLLDYTMPGIKTLLQGWNEKNGKDKLGDFAEEYWHYDNITKKSEKQFIDSYLKWAKKKGYHQNQDKAIKIYALAKEGIPTVSSNTPSTKMLVQEAVRVLREVDHTLMTILTQMRSLAKSLPEYPIVRAMGGVGDVLAPKLIAEIGDVRRFHSGKALIAYAGIDAPPYQSGRLVGTERKISKRGSSNLRKIGYEVMRSLKTHKAPEDAAVYEFILKKEREGKSKRAAKIAGLNKFLRIYYARVMEVYRK

SEQ ID NO: 96209 - protein, 341 aa, unidentified
MKTETFAGLDVHRKLVVATAVNPLGKRIRQASFGPDPKELTRFLSRLPKPTKVVLEACSVWERYYEAAVSTGAEVVVSHPLRTRLIAEASIKTDKVDSAALANLLRLDSIPLTFVPPPEVRALRRLYLERDFYARMKSSIMRHAYARLAERGVDYGKGALQHRPQREKLRKHGIPEFDRAIDTMDDLERKCKELDAEIHAAFLKSEDAQLLKSIPGIGELMAVGIAGFLCPIDRFPNVDKLTSYVGLCPTTHQSADTLYHGKLKKDVNRSLRALLVAASWTHRVHAPKGEVAKLVRRVVRRKGKMRGTVVGAHKLLRIIYAILKQRRPYLSNAPEGFASGQ

SEQ ID NO: 96210 - protein, 578 aa, unidentified
MLAPTPSLGQVARIGVGIDISRYGHYAAFLRDDLQPAAAELQFAESAAGCAALRQRLERLAEGHPDVAFVVRLDAAGQYADNLLHFLHGLATPPAHVGGSLAALAVTVSCGDPQRNKNYRAALFGSQKSDPVEARAAARFALTERPASDTPMSLELRTLHQVASRLQAVVRQRTRLINQLHHLLALAFPELALLTKNIATGWVLELVHRYPTAPLLAQESSDDLQNIPYLPDAQLQPLLDAARTSIGSLRGATIEELVRDQVRQLRDVSARQKRLESLLISAYRALPEPNHLDSIPGIGDVTAAILTAFILDIDRFDRPGKLVAYFGVMPIEVSSGIDRDGHARSPRRHVMSRRGNDLVRRYLWMAALSAVRFNPAVRALYARVVAKHPDRKAVAIGHAMRKLLHLAFAIWKTRRPFDANRANGTAPVASGSAEESQTAGRKPDEPARTAVTAACDEILPRPDSLGGSLAIDFAHLKRQLPPARVLDHLGLAARLKGVGAQRRGPCPIHRGDGRGRTFSVELEKHAFQCFAKECGAKGDVIDLWAGVHRQSLREAALDLVRTFHLEPMPTKGTEKRNG

SEQ ID NO: 96211 - protein, 316 aa, unidentified
MAHDAYVGVDVSKKQLDVVTLPGGEWQSFENNGEGIQALCAQLLVLRPKLIVMEASGKYERELAIALVLAGLAVAVVNPRQVRDFAKAMGKLAKTDRIDAGVLALFGERMRPEPRGVPEKEVREMDALITRRSQLKEMITAEKNRMGTAPGAMKASIQAHVRWMEAQLAEIEGELDTVVEKSPIWRAKEELLTSVPGVGSGTARTLIAKLPELGHVTAKQATALAGLAPFARESGRYKGQRRIWGGRSSVRCALYMATLSAIRWNPVIKAHYDQLRARGKLFKVAMVACMRKLLTLLDAMVRKNERWAIHASKATA

SEQ ID NO: 96212 - protein, 352 aa, unidentified
MDEKYVAMDVHKASVVIGVRNAAGKMISRATVETKAQTLKDYVRGLSGTIHLTFEEGTQSAWLYDLLRPLVAECIVCDPRRNKLLEDGNKSDEIDVDKLSELLYLGRLRPVYHGNHGTRALKELAHNYEALVKDQTRVKNRLKAIFRGRGISYEGEEIYDCQQTEPWLAKLSERGVRERARQLYQQLDQLAGWVATARRQMLAESRRHQAKKILQLIPTLGEISVAELIATVDTPHRFRSKRQFWTYCGLAVVRHTSADYHFEQGELRRRAKAGPTRGLNRNYNRRLKRIFKSAALTGSTKGPFKSYYQGLLGRGLSSELAQVTLARKIAAITLTLWKKGERFDPEKLVKPD

SEQ ID NO: 96213 - protein, 412 aa, unidentified
MQDILTCAMGLDVHRDIIVACLVKGAVDAEPEAETRTFSTLIPEMQKLRDWVIESECRNIAMESTGIYWQPIYEMLESCFDGEISILVVNARHMKNVPGRKTDMKDAQWIATLLRAGLLKGSFIPDKAFRELRHLTRYRKSVVHDITAQKNRIDKFLQSSGFRFTAFLSDTFGASGRNIIRHLIEHGSIDREALDKCLKTKTRNRIDEILVALNGSLSEHQCRFLNMVFRHLEDLEAHKHTVEDEITEEVLKHTDTLNLLCSIPGIDVTAAAAIIAEIGTDMSSFPDSQHICSWAGLSPGNNESAGKRKSVHINKGNPYLKSMLCEVAWIMASHRKLYLSGWYWKVKQRKGAKRATIALARKILSIIYTMLKTGTPYNEECFEQRRLRCERKRANRLVNELQKLGYVVVAPD

SEQ ID NO: 96214 - protein, 414 aa, unidentified
MKRQENKACGADIHKRFLMACILSRDGSKVLNRFDMTVEGVLSFASWLKDNKCKKVAVESTGNYWHLVYQVLDDEFEFILGNAFKTRRHSGAKTDKRDAEWLAELCLNNQIEPSRILPKEDRELRALTRARKGYVDFRSKIKARTIQELEACTIKLASELSDVFGKSGRHVLQGLVDGRSADVIVESIPSKKVKKNKEKIKQAIIAGLSPISIFLIKSHIQMIDEVDKKLVQLDALISRLLKGRKRDIEIAMSMPGIGLVSAAAILSEIGDYRNFASGKKLAAFSGLDPSVYESAGKRYNGKITKMGSKYLRRMIIECAHALSRTKAKTQLKRFFLRIMARRGKNIATVALARKMLVVLHHLLINQEMYKDDGLAKPKNVKVSFSEEANYPSLDEMIEVLVGAGYFVKKDSQGG

SEQ ID NO: 96215 - protein, 338 aa, unidentified
MTILTVGIDLAKNVFAVHGVDAAGTVLLRQPKVARAKLNALVAALPPCTIGIEACSGAHHWARQFQAHGHSVRLMAPKLVTPYRMSGKRGKNDAADAAAICEAVARPNMRFVPVKSEDQQSRLMVHRARQGYVAARTACLNRIRGLLSEFGHVLPLKADVVRAQAREHLEDLPGYANLVIGDLLSEVSHLDERIKQYDKHIHAMAKDCTAAKQLMQLMGVGETTATAIVAMAGNGREFDSGRQFAAWIGLVPGQYSSGGKARLGRITKAGDPYLRSLLVLGARAVLNAAQNKTDSLSRWAMALWQRRGYWKAVVAIAAKNARMAWAVLNKGETFKLPA

SEQ ID NO: 96216 - protein, 401 aa, unidentified
MAKLWAGIDAGKAHHHCVVIDADGNRLFSQKIPNDEPALLELIAAVLKLGDGDEVIWATDLNHGGPALLIALLVAHGQSILYIPGRIVHHASKLYRGEGKTDAKDAAVIADQARMRRDLQPLRAGDEISTGLRILTARRADKSADRVRAINRLQAQLLEYFPALERAFDYSRSKAALLLLTKHRTPDGIRRTGQARLHAWLKKHGTRSSAAVAQAAVDAAKSQHTTVPAQHMGELIVAALAREIITLNEELAELDALISVKVTEHRHTRTLLSVPGFGPVLAAEFLGATGGDLTVFQTADRFAGVAGLAPAPRDSGRITGNHHRPRRYDRRLLRVFYLSGLSALKSCPASRAYYDRKRGEGKTHVQAMLSLARRRLNVLWAMLRDGTTYTPVPAEAQPLAA

SEQ ID NO: 96217 - protein, 423 aa, unidentified
MEVLYKRCAGLDVHKDTVVACARLAQGESARARMETVTFGTTTRALLELSDWLTEREITHVVMESTGVYWKPVWHVLEGGFELVLGNAAYLRNVPGRKSDVADAAWLADLLAHGLVRASFVPVAEQAEVRDLTRMRKQCVREQTRQVQRMQKVLEDANIKLDSVISNITGKSGRAMLLAIIGGETDPAKLAALADGRLKATPEALTEALRGKVTDHHRFMLKLHLDHYDAICRQVETIDARIETALEPIADSVARLQTMPGVSEVAASAIVAEIGVDMGKFPSAGHLLSWAGLVPRMDESAGKRRDTRTRKGNPALKTMLVQCAWSAVRTKKSYYKAKFHRIRARRGASKAIVAVAASMLTAAYHILRDETEHKDLGVDYFDQHDQAKAVKRLERRIRELGYEVQVSKASGDGDGAADGRKTQ

SEQ ID NO: 96218 - protein, 358 aa, unidentified
MATHSLSNLQSFVAPYHAEPFWIGIDVHKRSYHLALLRADAKTFTLVTPAIPEKLVEQLRQLEIKIAGVAYEAGPTGFSLARALQTEKIPVIVAAPSKIPRSISAGAKTDRLDCLKLAQFVSKGLLRPIAVPTPQEEAERALCRRRHQLVDSIRRSKQRIKGFLLYHGFKETESLRRWHTDYPDQIAALPLEAEGRLTIESHLRELTFFENELRSVIEHLEEMNQHPRHRPVIKSLTSVPGVGKIVATTFHTEIFRPERFDRAEEVASYLGLAPNVRQSGERASCGHLAPVGQTRLRSLLIQAAWIWRAKDPYAQEVYHRLLSKTGIPQKAIAALARRLAIILWRLSIEQRAYRPLEA

SEQ ID NO: 96219 - protein, 401 aa, unidentified
MSTRQARIWVGIDAGKGHHWAVAVDADGETLFSTKVINDEAQILTLIETARERADEVRWAVDISGRASTLLLALLVAHGQHVVYVPGRTVNRMSGAYRGEGKTDARDARVIADQARMRPKDFAPLTTPPELVTTLRVLTNYRADLIADRVRLINRLRDLLVGICPALERAFDYSAAKGPVVMLTEYQTPAALRRVGVKRLTTWLERRKVRSASTVAAKAVEAAQSQMTELPGEKRAAKLVCDLAHQLLALDERIKDNDREIRETFRTDERAEIIESMPGMGPILGAEFVAIVGDLSGYRDAGRLASHAGLAPVARDSGRRTGNYHRPKRYNRRLRHIFYLAAQTAMMRPGPSRDYYLKKRAEGLIHTQALLALARRRVDVLWAMLRDKRLFTSTPPVTQAA

SEQ ID NO: 96220 - protein, 342 aa, unidentified
MDHFAGLDVSVKETSVCIVDDTGRIVREVKVASEPDTLLAVLKNPTYHFKRIGLEAGPLSQWLSSALADAELPVICVETRHMQAVLKAQINKTDRNDARGIAQMMRVGLYRPVHVKTLRSQKLRMLLTHRKLLQSKAIAIENDLRATLRNFGLKVGMVGTVKFEARIKELIENLPDLAALVEPLLVVRRVLREQIILLHRRLLAIVRDDEVCRRLMTTPGVGPVVALTYRATVDVPARFRKSKAVGAVFGLTCSKYQSGEIDRNGRISRCGDEMMRVMLYEAAQSMLRSKKWSWLKAWAMQIARRRGMKKAIVALARRLAVIMHRIWVDGTEFRWTREAATA

SEQ ID NO: 96221 - protein, 476 aa, unidentified
MSKGSGTTRGDRRRNERRARLRRVLPRDGAVIGIDLAEEKQAIAVIDHDLRVLARKTVRVKVFRLGEALDWAVAQARAKGFGPVSVACEPTGPRWLQVQQLCAERGLPLVCIQPLVSHIAREQQDFTSHKTDEADCVMIARLAVELHCYLPEQLDETWAHLRHLGRRRNQLITAATASVQRIRDFLSVAWPVAAETCVRPFESVTWLAAMQVVMSRCGADPAKLAPCGVEAFAVLVRRAVPCWGGVRPSGRVCQAVFAALTDTQGVVASHRRGLLRRCTDELDDLQRTRARLRAVEADMVTVLAQLGLVRLADIPGLTAVGAAAILAEAGDPRRYDSSSSLVKHAGLSPADNASGAFSGQAHISRRGRPGLRLTVWRAVWAVLIHNPVMAAKYQAMTQAADTAAAQAASASADAGSRQVSAAAAAARARRAKARVACAASLLRWIYSMVVHGTGWDPAVASGTACQHAPRRQLEAA

SEQ ID NO: 96222 - protein, 365 aa, unidentified
MGESSKTLYVGLDVHKDSIAVAYAPEDRGAEVASLGSIGTRQCDIDKLIRKLQSKGATLVFVSEAGPCGYWLYRYLTRKGLSCHVVAPSLIPKKPGDRVKTDRRDAMRSGDLTAVYVPQIEDEAIRDLSRGREDAMRDLKATKHRLKAFLLRQDIRYEGRANWNAAHLRWLSEVVCPTRAQQIVFQEYVRAVTEQHERLQRLETELHEEVKGWRLYPVVEAIQALRGVELTGAVIVIAELGDLTRFDTPRKLMSYLGLTPSEYSSGERRRQGGITKAGNSHARRALVEGAWAYRYPAKVSRHLQLRLEKLPAEVQAISWKAQVRLCKRYRQLTARGKHVNQVVVAIAREMAAFAWAIARTVPLAP

SEQ ID NO: 96223 - protein, 414 aa, unidentified
MEKLLERCAALDVHKRQVTACAHVPDRKGERAELRAEFETMTPDLLALRDWLKGLGVTHVAMEATGVYWKPVYYLLEDDFELLLVNASHVKNVPGRKTDVADAQWLCQLLEHGLLRGSFVPPKPIRELRDLTRYRKSLVWERQREANRLQKLLEDANIKLASVATRVLGASGRAMLAELCEGRNDPEALAELARGKLRRKLPELRKALTGRFSSHHALLVSHLLSHIDYLDETIAALSAEIEERLRPFEREVQLLTTIPGVAQRTAEVILAELGPDMRRFPDHRHVAGWAAICPGNEESAGKRKTGKTRKGDSWLRTALIEAANSAAARTRDTYLNAQYVRIKRRRGHSKAIVAVAHSILVAAYYILRNAQLYEDLGGDYFLRRETPERLTRRLVRQLERLGQSVTLEPALEAR

SEQ ID NO: 96224 - protein, 352 aa, unidentified
MNGLKYIGMDVHKATTVIAVLNFAGKVVGEAIIETTASSILDFIKSQRGTLHVAFEEGTQAAWLYDLIRPHVAAVVVCDPRKIAKQGNKADKPDAKRLAELLRTNALTPVYHGEQSTKAVKELTQSYTSVVEDGTRIKNRLKALFRGRGIDCSGSAVYSPDERKQWLAKLDTAAVRARAARLWEELDCVERLCEEAQQELVAEARKHAATTILRSIPGIGPVRAAVILGVAGTPHRFRTKRQFWTYCGLSIVTATSSEYEMVDGRVCRSKRRPLVRGLNHNYSRALKSAFKSAARTAASGPWKSHFDAMVASGAQESLALLTLARKIASITLALWKRGERYDQKKLKMLHAA

SEQ ID NO: 96225 - protein, 313 aa, unidentified
MSFIGIDVAKAQLEFVVRPSGETGTVPNDDAGISALLTRCQALAPALLVLEATGGYEAAAVAALAAAGLPVVVANPRQVRDFAKATGQLAKTDALDAQVLALFAERVRPTPRPLPDEAVQALDALLTRRRQLLGMLTAERNRLLVAAPAVRRDLQRHIRFLERRVHEADGELHTAVKASPAWRVKDDLLQSVPGVGPVVSLTLLAELPELGRLSHKEIAALVGVAPLNRDSGTLRGKRLVYGGRAPVRAALYMAALVASRCNPVIRAFYERLRAAGKPAKVALTACMRKLLTILNAMARSGASWQPARTLVRT

SEQ ID NO: 96226 - protein, 409 aa, unidentified
MRVFCRIDWAETHHDVAVVDAEGRLLARRRIRDDAAGYQQLLQLLAEAGDTATEPIPVAIETSRGLLVAFLRATGRRVYAINPLAVSRYRDRHGVAGAKSDHADAVVLAGILRTDAATHRPLLADSELVQAIAVLARAQQDAVWSRQQLAMKLRSLLREFFPAALAAFHRKHVGLTAPEARAVLAAAPTPTQAASLTTAQLRRLLRCAGRQRNLDAWTKRLRASFHADQPRQLPLVEQAMGQQVLALLAQLQAACQAADDLAEATVAQFRRHPDYQIITSFPGLGELTGARVLAELGDDRSRFADARGVKAYAGAAPLTRASGKRLQVLARKVKNQRLAAVGYVWAFAALTASPGARAHYDRRKHAGDRHAAAQRNLFNRLLGMLHHCLATRQTYSEAKAFPAPEALAA

SEQ ID NO: 96227 - protein, 398 aa, unidentified
MHYFIGADSGSQKHSIHIMSENGERVKEFEIKNNLEGFKELGTFVKNYEHVHLCFETTHGPLVDYLRNKNIKMYSVNPLKVKRFKQTSNVTGDKDDRIDACTLSEYLKQHHAKMRPMVFSSQEIEELNMHRISHDRITKEHTRYTNRLTFLFRQYFPLYGELFSGTAVNILLHMVLHYPTWSELKRASEEEIVSFLTTHHYRVRRNIKRTLDKIRRYDQAVAPEVEVVLSQEAQLVAKMLFLLKEQLRKIEHKMELILTQHPLGEVFKSLPGAGKILAGKLCALFGDNKSRFHTANEVQALFGTAPMNYKSGNYHRVMMRKACNKKARSTLYQFAFTSMQFCSWGKQYYDSQRAKGKTHSVSVRALSNKWLNIIFSMWKNEERYQEQTYTERKIKNVA

SEQ ID NO: 96228 - protein, 432 aa, unidentified
MKRKNQYSQINVNEISIQELVRYRIGQNVVAGVDVGKAELVLCLVWPDREFERPWRVKSPGQIGLVISKLLELNRVCPVTVVMESSGTYGDAFRQGLDDAGLAVHRVSGKAVKDDSEGFDGVPSNHDGKDAAIIGTLCVNGRSRVWPWHGAAADESAQDESAQKDRAIRYWVRQLDTAQRIRQMWCGKLEGMLARHWPEVGRLTNQSGPTLTAALAHWGDPRALADDADAAERLAKIGGHYLLMEKIDRLIESARTTVGVRMNVWAVREMKDIAGAIVEQRRNIQQCRRELKKLTKDHQPIQSQASAVGLVTACVLWMCLGDPQRYGSAGAYRKAMGLNLTERSSGMYKGKLKLSKRGQRLPRKWLYFSSLRWMREPSVKIWLENKKRRDGGKGGKAATGIMRRLAAAAWHAGQGEVFDPKRLFPGSGVFSC

SEQ ID NO: 96229 - protein, 342 aa, unidentified
MQISTIGIDIGKSSFHFVGFDARGGIVVRRQCSRTQLIRELAKVPPCLVGMEACCGAHHLGRILIAQGHDVRLIPPQYVKPFVKSQKNDLLDAEAIGEAVQRPTMRFVPLKTMEQLDLQAIHRLRTRLVARRTAVINQMRGFLLERGVTFPIGRRALVERFPEVLDNPALGLSVRFCRLLQQLRDEWRLLDSAIQEVDQEIHTLAHDDEACDRLMQVPGIGPLTATALVAAIGNGAAFAKGRDLAAWLGLVPRQHSTGGKTVLRGISKRGNAYLRCLFIHGARAVCRHHRQKPHRLGRWLANLEARAHPNVVAVALANKLVRTAWAVLQRNSHYYGRLLANA

SEQ ID NO: 96230 - protein, 376 aa, unidentified
MKIVGCDFHPSWQQVAVFDPETGEIAELKLLNGEGGEAERFYRELGAPALIGIEACGNSQWFIELAERLGHVVWVGDAAQIRASYVRKQKTDRRDAGHILKLLMESRFPRLWTPNAEQRDLRQLLIHRHKLVEIRTRVKNGLQHLALNRGFPKQSSRLCGVRGRAYMEKLPLAGWTARRREDLLKLLAELDKHVDELDEAVERAAKEHPQARLLMTQPGVGPITSLAFVLTIGDVRRFKHSNQVASYLGLIPREHSSGGKQRLGSISKQGNRFMRQLLVESVQTVNRLDEGFRKQYAARCHHKAKGVAKVAAARKLAVRLYWMLRQNVGYPEIARIESSPRVALRGEFGVPGKRTSLAGVNESHLATVNGRSRIQQ

SEQ ID NO: 96231 - protein, 341 aa, unidentified
MYCIGLDISKKSISVHIPLNSLDLEIENSSKGLKSFYSKLKKLYKKELDKIVFVYEPTGSYSTLITKFCALKNIKTFIINPKQSSNFAKALGYRSKSDKIDAKMLSLSISIAKESEIKVPVINKTAEDIKELMSYYMFTLKQRVAVQNHHEALRVKEGNSYALKDLKKRVKDMKVKEEEIIQKIDEIINEDEELLNSYNNIKTIPGIGTITAIVLLHLFIKYPQANQKQIVSLVGLDPVIKESGTSLKGKPKISKSGSRLYRGVLFMATMVSIKFNKQMKDFYDRLKEHGKHSTVAQIAVMRKLIVIAYSLYKNGTQYDAQLYQRACGITQSKSEKEEVFA

SEQ ID NO: 96232 - protein, 416 aa, unidentified
MNKHIENTKTESTKKQAVKTEIESSITKINSGSREIRQLARQLNDSLLEHVDNSKTVKATISNALWVGIDLGDKKSNYCFLDTKGNIVAEGTLATTQAELTSLFSAIAKCTIAIEVGMHSPWVNDLLEAHGHKVFVANPRKMESIHKNRRKNDKVDARTLARLVRADPALLYPIRHRGVEARNDLVLLRARDALVAARTKLINCVRGQVKSVGGRLPKCSAESFHNTVADKLPDSLRYTLLPLVFQIGEMTARIRTYDAGVNRMIKQKYPEADCLQQVGGIGPITSLTYVLTLEKPERFAKSRDVGCYLGLVPRQDESGDTSKQLRITKTGDAMLRKLMVSCAQYLLGPFGEDCDLQRFGLKLAARGGKNAKKRAVVAVARKLAVLLHRLWLTGEVYEPLHNVHLQKEALVMAVNE

SEQ ID NO: 96233 - protein, 414 aa, unidentified
MEVIHSRCAGIDVSKRDAKVCVRIQGSGARPTRTTVTTWAAVTSRILELRDHLQNEQVSLVVMEATSDYWRPFYYLLEDDGLQVVLVNSRDARNVPGRKTDVSDAAWLADLGAHGLVRASFVPPPPIQELRDLTRARTIITRERTREIQRLEKLLEDACIKLSSVASDITGVSGRLMLQALIDGQEDPAALAQLAKRKLRAKIPELTEALNGRFKDHHRYMTALYLRRIDAHTADINDLSARIEAAMEPFRGARDLLTSIPGFNTTVAEVFIAETGADMTVFRTAGHLASWAGTSPGANESAGRVKSAKARPGDSYLKGALGIAALTAVRSNNTYFSAKYRRILSRRGPMKALVAVERAMLTAAWHMLTTGEFYKDPGAGYFTNHAPARVKARALGQLESLGYHVTLEPFPQTG

SEQ ID NO: 96234 - protein, 460 aa, unidentified
MDVEKRNTSEYDKTTDLAVGKSYTNGEVFQMKFNTQNTKIEAVTEKTLVVGIDVGSEFHYARAFDWRGIEYSKKPFKFSNTEPGFAEFKTWILHIQTEHDKEAVLPGMEPTGHYWFNLGKFLQDNGMRPVLVNPHHVKKSKELDDNNPTKNDRKDPKVIAGLINAGRYSYPYLPDGVYADLRTASNLRFQMQSELTRAQNRISRWFSIYFPEYRDVYGKPDAKSGMMILKVAPLPEDIVTLGVDGVNRIWREAKLKAVGLKRAKTLVSAAEHSIGSKEGATAARLEIRMLLEDYESRAARLDEIMTLIETLVAQIPMAEKLMDIKGVGIKTVSGFLAEVGDIRRFDNPKQLQKLAGLAIKENSSGKHKGETTISKRGRKRLRYLLFEVAMSLVAKNAEFAQLHHYYTTRPINPLKKMQSLMAVACKLIRIFYAMLTKKVDYDPQKMISDIRRPEAYLQAA

SEQ ID NO: 96235 - protein, 316 aa, unidentified
MTRKRAKLFIGIDVSKQLLEVAAHQHDYQFRCANKASAFAELLAELIALRPALIVLEATGGLERAVVAALQGAGLPAVVVNPRQVRDFARALGQLAKTDRLDARVLAAFAAAIKPPPRPIKNNAERELEALAGRRDQLVEMLTDEKNRLVSAATDSLRDEIKEHIDWLTDRIAELDQQLKKLLQSSAQWQAKDQILQSTPGIGAVVSASLLAQLPELGTLNRQQISKLVGVAPLNRDSGQQRGSRHIFGGRAHVRKLLYMAALSARRCNPVIKQFYERLRAKQKPFKVAITACMRKLLTIINFMVRNGSPWKSAET

SEQ ID NO: 96236 - protein, 410 aa, unidentified
MTKIIVAQNAPVLVAIDIAKARHEVLIAIPDKKRRRRLTVLNELADFNRLIDTLRDYGCPVRVAFEATGNYHRALAYHLATAGFEVKLVSSVALARTREALNNSWDKNDPKDAQVILHMMEIGNEQFYHDPLVHGTNDIQELSKTHDIVSKSKTELWHRVLTHYLPLYFPEADRFHRSSRSDWFFAFLERYPSPHFITAMGKDAFTTDAWDVIGRKVAKERLLADIYETAKSSVGLPVAPDSDAISMFRLVLGEGRSLIAQRNQIEDRAVALLKDLPDYQLLTSIPGTSPINALTILAEAGDLRRFGHHRQFLKFCGMDLATIQSGTFRGQTKLSKYGNARLRRTLWMAGQVAILQRTNSFRDKFERYIAKDRQNTHLRRKAYTAIAAKMARTVHGIIKHGEPYRPFFEG

SEQ ID NO: 96237 - protein, 327 aa, unidentified
MTQTIMGLDVSKHTLDASLLHDGKTYYQVVQNDLSGFQQLSAWLKAKKCQQVHICLEATGQYGFAVAEYLYYCKYEVSVVNPARIKAYAASRLKRHKTDKADAFLIAEFCQKEKPALWCPPSPVFSALKALVHCLDDFMAMQQQERNRTEFSSNNPLVESFVIEHIAYMDAKIKMLHSAIHEQIQQDPQLKHCCELLESIPGIGELTAARLLAEIRNFHDFRNARQLTAYAGLNPRQYQSGSSVRRKSRLSKTGNASLRRALFMPAIVAKNHNPVIHDFCQRLADRGLSKMAVVGAAMRKLLVLSFGVIKTELPFDPNFAQEEVSFT

SEQ ID NO: 96238 - protein, 326 aa, unidentified
MEKLYGGIDIHKENLAGCIMDGDGNITREHIFPSSKKAVERFLCGIPSPGITIALEACGMWRGVHKILTEMGYEVRLANPKKTHDIAGSKKMDKIDAKTLANLLRTKYLPEVWIPDENVLRLRDIARHKSNLTRLKVSVQSRIKGYLLRKGVKYCKQLWNEKTLSKIAEDDPDIKNLINVYWSLKNEENEVMKRIRKIARNMKEATLLMSMIGVAEFSSLMIMGEIGDIKRFETPKELVSYAGLCRGIYQTGSTNRAVKNNAVNKWLKWIIYECSGRATMLDPRFQKYYYKMKQRKGEKVARRACARKMLTIIWYMLTNEEPYRAS

SEQ ID NO: 96239 - protein, 440 aa, unidentified
MNEEDRSRLEEFRQFRKEIRGSAEYLVVGIDVAKEKHHAFFGTATGKTLFRRLVFENNLEGFRKLLVQAEAMKVQAGLTKVVFGMEPTGNYHKPLGEHLIRCGHGVVLVSGVAAHENRKTLDGRWDTNDTRDAANVGDLMSQGKCLFYEFPVGALQDLRNLLSLKRRLKRMEHGHRVRIRNHLVAKYFPELDRYYEQSEPTALAIVRWCLDPSEIAGLEYKEFAGMVGSIRGRSSQERRLEAIWKMAVDSVGCEAGPVVEFEAQVMVEGLKQIRGDIRAIEEKIQEICSPFPEYEFLLSIPGFGPDVSSKVLGAIGDPFRFQNGKQVLKMAGLDLNAERSGKNSESAVPVISKKGKADLRYALYQAAFIASIRNQDFIVYYTNQLRGREREPGIKTKMRVKLAAKLLIIAWTLMKKKESFHSRHLRVAGQSLPGAAGRES

SEQ ID NO: 96240 - protein, 414 aa, unidentified
MVVTHLFREVETESRPSLHITFQGGDSMSTQYFCGADVSKNSFSIAVKNETFILENSFSMDSKGFESMDKILSPYKDKLLIGMESTGIYHSNLFYFLKNKSYNCFVMNPYKMRQFFNFISDKPTKTDKKDAKAISMCVEFNRDKIETLSSQQKYQVRYLVREKETLAHQIAKTKTEIRTILCLVFPEIEKFSIFGSGMLSLLYNFPSAACIRSIPEKEFIKTGEKLINTRGRKLNIAMTSIYQLATTSIACCYPVYEQLLKMKIDTLNILTQQAQIIKQLIEKQAEKYFHREIEILTSIPGIGKESAMYFLSEVVDIKRFNGWRKLIGFCGLDPVIKQSGNYNGKWKLSKRGNKHARRIAFIMAGCVKRSCPYFRQYYIKKRNEGKSYTEAVVATSTKLLRTIYTLLKEDRLFI

SEQ ID NO: 96241 - protein, 402 aa, unidentified
MNAVGIDVSKGKSMVAIMRPFGEIVSAPFEIKHTASGINSLVELINSVEGESRIVMEHTGRYYEVLAHQLSEANLFVSAINPKLIKDFDNDSLRKVKSDKADAVKIARYALDKWQNLKQYNVMDELRNQLKTMNRQFGFYIKHKTAMKNNLIGILDQTYPGVNTYFDSPARSDGSQKWVDFASTYWHVDCVRKMSLNSFIDHYQNWCKRKKYNFSQSKAEEIYGKAKELVPVLSKDAITKLIIKQAVDQLNSASTTVESLRTLMNETASKLPEYPVVMAMKGVGTSLGPQLIAEIGDVSRFTHKSAITAFAGVDPGVNESGSYEQKSVPTSKRGSSDLRKTLFQVMDVLIKTHPQDDPVYQFLDKKRAQGKPYYVYMTAGANKFLRIYYGRVKEYLSSLPES

SEQ ID NO: 96242 - protein, 421 aa, unidentified
MRAIGLDVHRDFCEVAISEAGEVRSAGRVAARPDALELFAQSLTSDDQVVLEVTGNAWEIARIIEGHVKRVIVVSPSDTGIRQARAKTDRLDARTLAKLLAAGSLDSVWMPDERTRVMRRRLARRSQLVAARTRAKNEVHAILMRRLKGRPEVSDLFGKQGRAWLAELELPVEERETLDSGLRQIDFLDGEVALVERAIAHDALNWPDARRLMTVPGVNVIVAVTFLATVGDIHRFPDRRKLVAYLGLDPKVRQSGDAPAAHGHISKQGSSQARHALVEASWSAVRTPGPLHAFYQRIRARRGHQVAICAAARKLACMFWAMLWRQQDYAFGQPSMTARKIRRLEITAGAPRRQNSRGVWAAAIAMREAERDLARQAEQAYAQTIRDRQAAGAIKAGASATPGHASKKPSKGTAARQTTSP

SEQ ID NO: 96243 - protein, 345 aa, unidentified
MKNYYIGLDVHCNKTELAIEQNRKIIGNYSVPTSIRAIREVLGQFDGHKHVTFEEGTMSGWLYRNLKDHVKYATSCDPRRNKMIFDNADDKNDPIDARKLAQLLRGRFIRPVYHSEDEDRVEFKYWVGMYHSRVLSATRNINKLRAHCRLYGIKIPSAVMRRPDERVKWLGSLKNEHLASRLELIWMSLDSARYQVHKAKAQLLRLSRKYPIIKHWSQLPGVGIIRSVTLFAYLDTPFRFKTKSKLWKYCGLGLVRDSSGNDKNGQPRKGKLKLGWYCNKRLKDVVMGAAMSAIHGKDNYFKDMYENMRQSGKFHSNARRAVARKMLTIMWGMWKSGNKLNPDLM

SEQ ID NO: 96244 - protein, 347 aa, unidentified
MTITVLGIDLGKNTCSVAGLDETGRVVLRRRVTREGVILLGAKLPACIMALEACCGAHHLGRVLRDQGHEVRLMSPEYVQPYVKAQKNDERDAEAIAEAATRPTMRFVELKTEAQLDAQILHRARSRLVGQRTALINQLRAVLLERGIVVAKGRQKLDRYLGTILDDGSEPPPTLSARTRLLIEDMRLEWRELDRRIAALTAEFVVEARENHAARRLASIPGFGALNATALIAAIGTGETFRSARDLAAWLGLVPRQATTGGKPRLLGITKRGNTYLRTLLIHGARAALPSLSASPTTMGEWLRTLLGRAHKNKVVVALAGKLARIAWAVLRSGNSYTGTISRSATT

SEQ ID NO: 96245 - protein, 383 aa, unidentified
MASMTSAIPTAQPDRVVIGGIDTHKDIDVAALLDCAGMVLGTAEFPTTRAGYRQLLGWMGSAGHLGRVGVEGTGSYGAGICRQLSAAGVEVVEVNRPDRSQRRRRGKSDALDAAAAAEAARSRNRIAIPKSRDGQVEALRVLRLTRVSAVKARTKALQLLQQLIVTAPEQLRDQVGELPRMRLIRCCAAWRPHSHDAADPTVATRIALKKLARRYLQLAEEISDSDTLLDGLVTDLAPQLIAVTGIGTDTAGQFLLTAGDNPERVHSEPAFAMLCGVAPLPASSGKTQRHRLNRGGDRQANRALHVIATTRKRCDHRTQAYLKKKIAEGHTRREATRSLKTPHRPRGLLPAQPGTSHRPVPPSRPASRRADAVKVEPPRAERP

SEQ ID NO: 96246 - protein, 337 aa, unidentified
MNIIGCDFHSRFQQIAMLDTETGEIVERRLEHENGEARKFYGALSSPARIGIEATGYARWFERMLQEQKHELWVGDAAQIRAAMVRKQKTDSRDALHILELLLSNRFPKIYISKLEDRDVWQLLRHRCKLVRWQTSIRNQLHALAMGEGVCRKKKLWSRGGRKELDSLSLDAWASRRRSDLLELLDRLAPCIQELDQAVEEAAKDCPAAVLLQRQAGVGPVTSLAFALMVGPVERFGNSRRLVSYVGLNPREESSGGKQRMGAISKQGNSMVRWLLLQAAQTASRYDEDLRRDYRRLVSRRGRAVAKVAIARKLAVRLYWMLRQASEQLNAADSHAG

SEQ ID NO: 96247 - protein, 421 aa, unidentified
MQVLYERCAAVDVGKDVVAVAVRVPGDGPDGRKTVKRTFRTFYGVLREAARWLTDQRVTHVAMEATGIYSMPVYHALVEHGDFEEVVVCNAGHVKNVPGRKTDLSDAEWLVHLLECGLLRGSFIPPVEIKAARDVIRYRTKLTESRTSELQRLGNVLQDAGIKIDSVASTITTMSARAMVEALIDGERRPKTLADLAKGRMRAKIPDLARALEGRFGDHHALMCRLHLDHLDHLDEMIAKLDAQVEEMMEPFRPQRELLITIPGIGQMSSAVVISEIGDDVAAYFPTAEQLASWTGLCPGNHESAGKRYRGKRRKGNQHLQPWLVECAWAAVRTDGYLREFYRRQVRVHGGFRSPTAKKKAIVAVAHKLAVIIWHVLTTGRPYEDLGADYFTTRIDPEKEKNRLVAKLEAQGYTVTLEPAA

SEQ ID NO: 96248 - protein, 318 aa, unidentified
MSDKTTIGIDVAKNTLEVFIDTTGQLLHLENSAAGILELQAALSGLSVTGIIMEATSRYHCTAELMLSAAGLPVAVINPRQIKNFARAMGKVAKSDPIDARIICEYGRRMTPQFRPAKSEQQQDLAVLLTRRRQLVQNRVMESNRCKERCGAYVEQGIMRHIEWLDVEIDVLDAEIKQRLRQDDDLAAKRLLLDKVKGIGPITQATLLIQLPELGCLTRRQISALVGVCPYDRDSGQLRGKRAIWGGRSGLRATLFMAMLSAVRYNPQIKAFFNGLLARGKPKKVALTACIRKFVTILNAMFRDQKDWVYEGASSLTP

SEQ ID NO: 96249 - protein, 388 aa, unidentified
MSQANDLSRSLVALEQDKTLIAVIEMSQSNWLAAAIVPGIERQPLKKVDPDADVLLKLLHRWCGEAVRAGHEIKRIAVAYEAGRDGFWLARWLRAHDIDAYVIHPSSVAVSREHRRAKTDRLDTELLMRAFLGWLRGERRHCSMAAIPTIEDEDARRPNRERENLVGERTRLVNRIKATLARFGIRTKPTLRKAEEKLAGLRTAEQTSLPANTLGELRRSMARLRIVCEHIKQIEHERLRQLEATASVAKGPHAMVRLIARIIGVGIETADMLVNEILSRHLRDCKAVARYAGLTGSPDESGRKRREKGLARAGNARVRRGMIQLAWRFLMFQKDSALAQWYRERTANGRGDTRKTMIVALARKLLVSLWRMVTSGEVPEGVLLRQTA

SEQ ID NO: 96250 - protein, 367 aa, unidentified
MKKVSIRAAGQSRNISQQKLTIGLDLGDRNSWYCVVDEAGQIQLEQRVRTSANALQEVFGALPRSRIALEIGTHSPWISRLLRQWGHEVIVANARKVRLIGESRQKDDRLDAQTLARLARIDPELLYPVKHRSAQAQADLTVIRARAGLVRARTGLVNTARGLAKSYGERLRSCNVRNLNPEKAESLSPELQAALEPLLKAIESLSERIVEYNERVENLAQQSYPQVALLKQIKGVGTLIALTFLLTLEDPHRFRKSRDVGCYLGLQPGRRNSGQSEPQMHISKEGDPYLRTLLVQGAQHILGPFGVDCDLRRWGLKLAERGGRNGKKRAIVATARKLAVLLHHLWISGEAYEPLHNSSRTTVAAAA

SEQ ID NO: 96251 - protein, 409 aa, unidentified
MNDQSNPVERVIGLDGHPDSFTAASLRGSTPAQAWTEKLFNKVPLAQLQSWARKHTTPNDLIVLEASGNSFHLVRVLAALDRRALVLESTQLGKLKEAHANNDKISAVRIAKAYSAGTAREVWVPDPKTQERRDWFHAHQKAVRRSTQVRNRLLSYLSDHGVRLKKGTRLVLEPELADAQLRQRADWSPRQWQVIQGMLMELRHAEEQRWHWRSLIAQEVAADPALLALIRLYGVRELIAFALGAIIGDIQRFAEPRKLVKYVGLNPAFDDSGQGKWEGGIGGHGRKDLRSLLTEAAQSILRSGSPLAHWGKKLWGRKGSRNLAVAAIARKLTVAVWYLMNGRWTPLREIDQRLSQKVSLMITHVGAAALQNLGATRKEFRERVCQSLQTARDYVLDPHRKFTPKPQRA

SEQ ID NO: 96252 - protein, 351 aa, unidentified
MMIIGVDYHPSFQAIAFLIEETGECGEQELNHSDGQAEKFYRDLKQQGICVRVGMEATGYSRWFERLLAELGFELWIGDPAEIKAKRVKKQKFDREDARLLRRLMLENNFPQIWVPSPENRDLRQLLWHRHRLVQMRTRMMNQLQALAMNEGYRWKKKLFSEQGRAQLEKLVLAPWASRRRQELLELLDRLNPTIEELTAAAEREARKRPEVLRLMSHPGVGPLTALAYVLIIGTPERFDCGKQIGTYVGMIPSEDSSAGKQRLGHISKQGNSLLRFLLVEAAQAAARINPEWRRRYTHLAMRRHKSIAKVAMGRKLGVRLYWMWRNGCEYSQSLEFGSYVGQLGTGHGVK

SEQ ID NO: 96253 - protein, 340 aa, unidentified
MPLYGGIDLHANNSVVVLLNAQDQVIYQKRLSNDLPTILEALAPHPGEIEGLVVESTYNWYWLVDGLMEAGYRVHLANPAAMQQYSGLKYSDDHSDARWLAHLLRLGVLPKGYIYPKAERAVRDLLRKRAHLVRQHTSNVLSVQNIMVRNTGVRLSVKRLRELTKQELEGLLPEVDQVLAVTSSLAVLDCLSQQIKTLEQTVHKRLKHTPAYERLLTVDGIGTILAQTITLESGDMGRFPTVGNYASYCRCVNSIKISNGKRKGQGNVKNGNPYLGWAYMEAAQFALRFNVRAQRFYQRKLAKSNNNTSLARKTVAHKLARACYYIMRDLVPFDAMKAFG

SEQ ID NO: 96254 - protein, 321 aa, unidentified
MEHELHYIGIDTAKEKLDVDVLRPDGRHRTKKFANTTKGHDELVSWLKGHKIDHAHICIEATGTYMEPVAECLYDAGYIVSVINPALGKAFAQSEGLRNKTDTVDARMLAEFCRQKRPAAWEAPHPLERALRALVVRHQALTDMHTQELNRTETAREVQRPSIDAHLLWLEAELKRLEKQIKDLTDDDPDMKHRRKLLESIPGIGEKTSAVLLAYIGLKDRFAHARQFAAFAGLTPRRYESGSSVRGASRMSKAGHVSLRRALYMPAMVATSKTEWGRAFRDRLAANGKKGKVILGAMMRKLAPGGVWSAEVRRAVRCVTA

SEQ ID NO: 96255 - protein, 345 aa, unidentified
MPIVGGLDIHRKQITFDYLDTETGQVQRGQISPADREHLRAWLARFAGRQDVAFAVEGCAGWRYVAEELAAAGIAAHLAEPADTAFARGRKRHAKTDRTDARHLRVLLAEGRLPECWIPPARILECRALLETYNDLRRERTAWAQRIHAVLFHQGAPALGEGALRTEKGVTALREVAAAHLSPAGQLQVATALEVIDALEARLHVVRHQLTDAARHLAGARALAARLYGVGPVTALAITCWLGGAGRFSSSRQAVRFAGLDITVSSSDRKGPPGKLSRQGPPVLRWAVYEAGKAHARTSAPDHRYYATVKDRKNSKRACLSEARKILRQAHHILAELGDDALAAA

SEQ ID NO: 96256 - protein, 373 aa, unidentified
MHKYIWVGLDVHKAAIAVAVATGEEAPRSLGTIPNDPEAVAKLMRKLGPLGRLRVCYEAGACGYVLYRQLATMGIHCIVVAPTLVPVRAGDRVKTDRRDALKLTRLLRSGELVAVAVPDEAHEALRDLVRAREAVHKDLRRARHRLQKFLLRQGHRCPLRTKAWGVRYLAWVSRLNFAHAAQSVVHREYLAEVERLGERRTRLDRELELAIAQAPAAIQTVVRALQVLRGVACVTAVTAVTEVGQFGRFPRARQLMAYSGLVPRESSSGDTVWRGAITKTGNAHLRRVLIEAAWQYRHQPRAGATLRQRRKGQAPELCVIAEKAEHRLHLRYRRLLARGKSKGKVVTAIGRELLGFMWAVAVHAEGATLPAAA

SEQ ID NO: 96257 - protein, 355 aa, unidentified
MDSKKYIGMDVHKESISIAVRNAAGKIVMESVIETKANMILQFIDGLRGDLHITFEEGTSAAWLYDLLKPHVTKVVVCDPRKNKSMREGNQNDKIDARRLAELLRLNHLNPVYHGEHGLRTLKELVRSYLTVTKDLGRVMSRVKAIYRSWAIACTGKQVYALRHRAEWLGKITEPGVRRRAEFYYQQLDALRLLRQEVRRDLLAESKKHKTWKRLRQIPSIGPIRSAVLLGILQTPHRFRTKRQLWTYSGFGIETHSSADHRRVDGQLQRAKKQVSIRGLNRNCNHDLKNLFKGAAIVASSKPGPFQEFYTALLTKGIRPEMARLTLARKIATIVLIIWKRGACFDAQHLKPQTA

SEQ ID NO: 96258 - protein, 424 aa, unidentified
MKVTYQTCCGVDVHKSFLVATIVKTTGGIEPSYQKKRFSTFNSSILEFKQWLLDNDCHDVCMESTGKYWVPVFNLLEDEINVVIANPKWVKAVKGNKDDTKDSKWIGDLFRLGLVKGSYIPCKIVRILREYTRYRYKLVSCRSSEKNRYQNTLTVCNVALDSVVSDIFGKSSMSIIDYLLEQSGTSINHEEIASKLLRSLKSKEDAVIESVEGYQMTDAPKYRVRLVRAHMDYITAEINDVDKMIENMIFSNPDFENAVQFLCTIPSVKRDSAITIISEIGTDMSQFGGSKRLCCWAGLTPGSNESAGKKKSVRITRAGVYLKPALVQCAHAAVKSDKSPYYKKKYDSLVKRRGKKRAIIAIARMILTAIYQMLSTGEQWNPSDLYKIDMPVALVEKQKAKAIKQAKKLLKREGILPPDEPLAS

SEQ ID NO: 96259 - protein, 360 aa, unidentified
MSDGSKGRPKITAGLDIGDRYSYLCLLDSESGEVIEEGRLRTTPEAFRRRFASELPMRIAIEAGTHSPWVSRVLEECAHEVLVANARKIRLIYANKRKTDEIDAENLARLARVDPKLLYPLKHRGEDSQAHIAIIRSREALVGSRTQLVNHVRGAVKSFGHRLPKCPASGFHNKAPEHIPEALWPALGPILEQIGSLTERIRQYDRKLQKISKEHYPETGHLRQVEGVGPLTALTFVLTLEDPYRFEKSRSVGAYLGLVPARDQSGDRDPQKRISKEGDQMLRKLLVSGAHYILGPFGSDSDLRRHGQKMATRGAKNSKKRAAVAVARKLCVLLHSLWVSGEVYEPLRNTHRREQREEAA

SEQ ID NO: 96260 - protein, 451 aa, unidentified
MTRPREKPTGLPIIHDRAAGIDIGARFHVAAVPPDLCDDAVQTFQAFTADIERMADWLVSMGIKTVVMESTGVYWVPVYEVLEDRGLEVIVANAREARAVPGRKSDVNDAQWLQRLHACGLLRASFRPGRDIAALRAYLRLRERHLEYGAAHIQHMQKALTFMNLQLHHVVSDVTGVTGMKIIRAIVKGERDPQVLATMRDVRCKASTETVRAALVGNYQPEHVFALTQALALYDFYQARVQECDAEIERALAVLNAERETPASPLPEPRHRTKQPNAVNFDTRPLLYQLTGVDLTQIHGVGPYLALRLIGECGTDLSRWPTAKHFTSWLTLSPGCKISGGKVLSAHTRKTTNRITAHLRLAAVTVGRTDTALGAFYRRLAARIGKAKAVTATARKIAVLFYNAMRFGMAYQDPGADYYESKYRERVVKQLHRRAAEFGFTLQGVTPQGVS

SEQ ID NO: 96261 - protein, 350 aa, unidentified
MLIIGCDFHTRYQQIAMMDTETGELVERRLEHANGEARAFYASLPKPVLVGIEATGPIRWFERMLAELGHELWIGDSAKIRASEVRKQKTDQRDALLILDLLLTKRFPRIWVPTPAERDLRQLLWHRHKLVCLRTMLGNQLHALAMSEGLCRKKKLFTKKGRVELVHLGLAPWASRRREELLKLLDQLEPAIAELDRAVLEQAQRRPDAVLLMTHPGIGPVTSLAFVLAIGPITRFAGSKKIASYLGLNPSEESSGGRRRLGAISKQGNTMVRWLLIEAVYPAVRKDPALRQDYQRLKFRRGHAVAKVAIARKLAVRMYWMLRSGAEYARLVRRQGSPGATLVDASSSLG

SEQ ID NO: 96262 - protein, 401 aa, unidentified
MNTTTILYVGIDVSKDKSDICIKDQSGNDLIKRFKITNTKADLAKLYETIERIKFKTQENCDVVFGMEATGIYSLPLYSALRRDGYKVKLYNPIQTNGFRKMRIRKTKTDPIDASIIADMMRSSETPQVNEIKDLNLYQLRELVRIRHRLIEKQTVCKIQMIRNIDMIWPNYVSLMPKVFGTTSIKVLKKYTVPSKLIEKSFEQFYELVRKTSRSRISRTKAEEIYANAGNILIIPEIEPIVSIEIKTLITQLELYDGQIQSVDDKIDEMMKLIDSKIMSIPGIGGILGPMILGEVGNIDRFSNAKKLVAFAGLDSVISQSGRFENKTGKISKRGSPLLRQALFLAANIARMHDDVLKRFYEKKRSEGKHHYSALNAIAAKLLRIVYSVLKNNREYQPQMN

SEQ ID NO: 96263 - protein, 360 aa, unidentified
MTTVSMHDADIDHQVEDVVLGVDTHKDIHVAAVLTLTGGVIAHASFPTTAAGYQHLIAWARSFGVAQRAGVEGTGSYGFALARRLQAEGLTVLEVNRPDRAVRRRRGKTDTIDAENAARAVLAGEATAVPKAADGPAEMLRVFKIAKDSAIKARTQSINQLKALLVSAEPALRDQLTRLSNPRLITACAALDPSTAFATAHATLYTLKLLAERIQYLTAQLDELAKHITSAVEAAAPALLQQPGIGPDSAAVLLITAGDNPERLTSEASFAALCGVSPIEASSGKSNRRRLNRGGDRQANAALYRIALSRLRWDPRTQDYLAKRTSQGKTRREIIRCLKRYIAREVHRLILNSSSPSPQT

SEQ ID NO: 96264 - protein, 400 aa, unidentified
MLSIGIDVSKGKSTVCGMKPGGEIVYAPFEVQHTREGMSELVSLLHNSGEEVRAVLESTGSYHCPVVAALLENGIFVSVVNSLRMKRFCSQSIRKVKTDRIDAMQIALYGLAYWQELQPTRLPEDTYRELQLLARQYYQMTSMLIKAKVDFNALCDQVLPGMQELMSDHAGRHKLSDFVLRYRHTTHILEMGETRFRKDYCKWAEKKGYRNCERMAALIFATAQNGIPVLPNAPSTQIVITEAIRVLHTVEASRDAILTQMQALAKTLPEYSLVREMPCIGDTLAPRLIAEIGDVRRFHSKRALIAYAGIDAPPYQSGKFCANNRHISKRGNRYLRKTGYEVMQSYVMHKPANDPIFTFIEKKRGEGKSGKLAMVAGLNKFLRIYYGKVTELYRSLPAIE

SEQ ID NO: 96265 - protein, 373 aa, unidentified
MPRYSTAFGMDVHLRSTTVCALDAETGEAVTRRFRGNPWGEVAEWMSGFPGPSLAAYESGYLGFAPQRELSALGVDCVVAAVSKVPRSAADLSSKNDRNDAARMAKAILSHDISPVWVPSPEIEGLRDLAGAHDAATARLAAAKQRLLAFLARRGYAYGGTTPAGNPRRYWTYDFLRWLDKVRPADDGGIRALAALRSEVAAAAAPRAALRAEYRAAVAAGPLSAEVEALQSIKGCGFALAAAFASEVGDFSRFRSGRQVTSYFGLAPKQRSSADSVRLGGISGAGNALVRRLAVEGSWSYVQASHQPKLMPKGSGVPLEVRMHGRKGSERLLRRREEMLARGMPQAKANAATAAELVRWLWALGAMCREATE

SEQ ID NO: 96266 - protein, 349 aa, unidentified
MSQNLNSAVAVIGIDIGKNSFHVVGLDNRGAIVLRQKWSRVQVEARLAKMPPCLIGMEACVGAHHLSRKLKGLGHDARLMPAKYVRPYSKGQKNDFRDAEAIAEAVQRPTMKFVATKTADQLDLQALHRVRERLVSQRTGIINQIRAFLLERGVAIRQGLRFLRAELPRILAKPSDVLSARIVRLIESLAEDWRRLDERIDQLSGEIAALARQDAGCERLMSVPGIGPIISSAMVSAIGAGEVFSKGRDFAAWLGLVPKQISTGDRTILGKISKRGNRYLRVLFVQAAWVVLIKPQSWDRHGLKAWLDAAKKRLHRNVLAIALANKLARIAWSVLARGRTFEASKLQAA

SEQ ID NO: 96267 - protein, 395 aa, unidentified
MKMNGKITGIGLDSHRTFSSVTARDVEGKIVWRKRLEHADRGPLREELRTWPKGTPVVLEGTFGWGWLSDELSAAGLEPHLASSKKVAAWRDARGLAKSNRTDADLLSELWGQQPRWWEVWLAPPEVRSQREWLRYRMTLVRLQTGLKNRIHAILHRHGMVHGETDLFGTSGRRFLNLLIGPGDETLPESARAMLKGYLQLLDQLRRQIANVTREVRGQITRTPAGERLRTLPGIDYILSYTILAEVGRIERFHSAKHLASYSLLAPRAYDSGDDDGEAPKGRHVGHAGRRTLKWAWIEAAHGAVRSGGRFREIFDRRTHGGKRDRNRGYIAVGHELCRIAYILWTKEIDYTETPPPRPGRGKRRRGYRPAAKGIPGRSRPGTGQPEHPMVAVLM

SEQ ID NO: 96268 - protein, 382 aa, unidentified
MVTGGVDAHSDTHHVAALDERGWLLGDSAFATSAEGYQELLAWLESFGQVERVGVESTGSYAAGLVRFLAARGVAVVEVNQPHAHTRRRRGKSDPLDAEAAARKVLAGEATSVPKHTGGIVESIRQLRVAREGAVKANTAALNQLYELAITAPDELRQQLAVRKTSRGKASLCLRLRPDRARLHEPLQAAKLALRSVAERVRDLDRQIGLLDQHLAPLVATAAPRTMSLLGVSTQHAGQLLVTAGQNIERLPSDGAFARLCGASPIPASSGRTSRHRLSRGGDRKANRALHLIAVCRLRYCARTRTYANRRTAEGLSKPEIIRCLKRYIARELYHTLSADLADLNLPAPSAQQAITINCGAGPTGITPTRATATSRRRRRRT

SEQ ID NO: 96269 - protein, 404 aa, unidentified
MLVGIDWGREFFQVVLLTIAGKVIASVKLENTYKGYLALLEQLRDRAEEVVFAIENRNLRLVDFLIAHGFKGFYVNPNAMKGYRARYKSASVKSDELDAYILADLLRTDRHNLSAIALDNPLVRELKGLLLDRERLVKDQTRLINRLKGCLMEYYPEALQFFNDLAGKVALDFWLAYPTLEDVRRLTVKEIEMFLAKRGWHRDKAEVAQGIMTIVNGPVIKVLADVVRVKSRLLLGIVRQLQALQETLVEYNKEIERLVKGNEEVARFTSLPGAGSVIGGALWTLFAGALDFNGLTDIRAYVGTAPVTIQSGQFKGIGFRFACNKFYRNILHQLAFCSIRVSQWSSEHYRQKRREGKEHNHALRCLADLWLKVIFAMWRNKESYNEQKHLASVARFWLNNGGLT

SEQ ID NO: 96270 - protein, 447 aa, unidentified
MHDGTHLSRGDLNRNRRLVQLRELLPMENAIMGIDLADRNQAAVVTDHDSRVLARRRLNCRAWELGELLDWAIHAAQEKGFASVSVACEPTGHRWRVLDQLAAERGLPLVCVQPLLVWRAREGEDLTWDKSDPKDAVLIARLAAQLRCYAPERVDSTWARLRHLGARRAELTAEATRYVNQLRDLLECVWPAGLDASPSPFRSRSWCAAMTVVLDRATAGDLTKVRRLGRTRFTKAVRRELPHWGAKRPCLRIINAMFDALADTAGVLTHRPGALERVRLILTSWQHTRELLGEVEARMVALLDELELTTLVTSIDGLTAVGAASILAETGDLTRFHSPRSLVKHAGLCPRDNASGAHQGKSSLSGRGRPGLRAAAWRAVWAALPNNPVLAARFQHLTTRDQNRLARQQARAACGAALLRWLHVVVTQRTQWDATVAAGGRRLPMAA

SEQ ID NO: 96271 - protein, 465 aa, unidentified
MVCVGIDVAKDKHDCCILDSDGTIRADCITIPNNMDGFKQLLQTIRDCTKKSDKIKVGLEATGHYSYNILGFLLDNDLTVYVMNPLHTNLYRKSLSLRKTKTDRVDARTIATMLLSDVDLKSYTDTAYHNEELKSLTRYRFDKVRERAKLKQSVSRLVTILFPELEKLVPSLHGASVYALLSEYPGAKQVSEVHLTKLTNLLSTASKGHYGKEKAIQIRAAARTSIGSVMPAKSLELKHTIKLIQELTSEIDEIEDSIQQIMDELNPPILSIPGMGVNSAAVILAEIGDFSNFSSPDKILAYAGCSPFTYQSGKLTNCYAHMEKRGSHYLRYALYNATKYVCHWNPVFAEYLAKKRAEGKHYNVALSHATKKLVRLIYALQKSGKAYLTAVWFSPEPKLKPRTTQLAQQTLDKPKHSNAILFLRGLAGLALLFSPSPSLFQDQHLNAVCHGERMVRGFFILGLDF

SEQ ID NO: 96272 - protein, 355 aa, unidentified
MNVTTIGIDLAKTVFSIHGTDQHGKVVVRKRLNRPKLLPYIAQLPPCLIGMEACSGAHYWAREMTKLGHDVRIIAPRFVAPYRKSSKNDDNDAEAICEAVGRPNMRFVPIKTEDQQAVLCLHRIRRGLTKERTAQINQVRGLLAEFGLIIPQGRYAARRRVPEILEDAENGLPMLTRRLLNDINQRILQLDEEILAYDREIEAMARRDEQARRLMAIPGIGPQTATALLASAPDPRQFKSGRHFAAWLGLVPRQYSTGGKVRLGRITKRGDKYLRMLLIHGTRAVIAKLPDRNDRLSGWARDLVERRGYKRAAVALAAKNARIIWALLMNQTEFKTRATTTGRTRLPAESCNGKR

SEQ ID NO: 96273 - protein, 337 aa, unidentified
MDTSKHVFQLHGVNAAEEVVLRRKLRRKEMVTFFEKLAPTVIAIEACGASHHWARLLQSFGHTVKLIPPQLVKPYVKRGKNDAADAEALCEAMSRPTMRFVPVKSAEQQAALMLTSVRDRLIRNRTQLANAIRGYAAEFGLTAAKGMAHLVPLLERIQADESLPALARELFAAQAKEYEQLQTQVDEVDAQLMARHRADECSRRLAKIPGVGPVGAMLLTMKTPAPELFRSGRQFAAWIGLTPKDHSTAGKVRLGVITRAGDEGLRSVLVVGATAVIQHARRHGKASPWLAGLLKRKSPKLAAVALANKMARIAWKLMLTGEAYTATPAPAALAGAA

SEQ ID NO: 96274 - protein, 339 aa, unidentified
MNMTTLGIDLAKNVFQLHGTNDCGKKVFSKRVSREKFADTVQQIPKSLIGMEACGSAHYWARKFTKMGHTVQLMSPQYVKPYVKTNKNDRNDAEAICEAVTRPTMRFVPIKTVGQQDIQLLHTARTKIIKDKVALGNQIRGLLMEYGVAIPQGDSSLKKALAALSDFKNSDLTEHSMFIFNELYTEFLNLELRIEDYTKKLLLISKQNEQCKSLMSIPGIGEITATALVSSIGDFNNFKNGRNLSAWIGLVPRQNSSGQKNRLLGISKRGDKYLRTLLIHGARAVVNQVKDKVDKTSLWIKKLLERNGFNKTVVAVANKNARIAWSVITKFTVYNPDLA

SEQ ID NO: 96275 - protein, 390 aa, unidentified
MVRFSRPWKERREAMAATAQGTEYRIGGTLFVSMELSSRVWKVTSTSEVGGKVREKNVPAGDLAGVMEEFCKAKKKHGLREDAEVVSCYEAGRDGFWIHRELTLLGVTNLVVDPSSIEVDRRARRRKTDRIDGRKLLAHLLRWCGGGRCWSVVAVPSIEEEDARQLHRELEALKRERTRHRNRISSLLVVHGIRAEITDDFAERLSEMQLRDGRALPEHLCERLVRESERLHVVRAQIAELEAERRALIRTSSDPAIEMVRKLMGLSGIGENAAWLWVMEFFAWRHFRNRREIGSLAGLTPTPHASGESRRELGIDKAGNPRVRAMAIEIAWCWVRYQPDSELTRWWVRFANNGRSRRIGIVAVARKLLVAMWRYLEFDCVPQGARLKAA

SEQ ID NO: 96276 - protein, 348 aa, unidentified
MRYYNQPHAYYCGGDLHARSLYLHILDSQGVTRFEKNLPASPQAFLDAVAPFRDGLVVGVECMFAWYWLADLCEEQRIPFVLGHALAMKAIHGGKTKTDRIDAAKLAGLLRGGLFPQAYVYPKAKRATRDLLRRRSIFVRQRAHLIAHIQNTNSQYNHPPFAKKLTYKGNRTPDLVERFADDSTRLSVQANLNMIAAYDAQLQQLETHLQQHAKIEDPVTYQFLRTVPGIGPILGLTMLYEIDDIQRFPEVGNFLSYSRLVSCIHESAGKVKGVGGRKIDNAHLKWAFGEAASLMLRSFPAAKAWMARQAKKRSKVRAHAILEAKIGRTVYAMWQRQRPFDPKRFLAS

SEQ ID NO: 96277 - protein, 362 aa, unidentified
MSVEGISVGLDVHARSVVACALDGRTGEVARARLTPDYRELLAWLHRLEGPLAVTYEAGPTGFGLARFLTAAGVECLVAAPSKLQRPSGDRVKTDARDAAHLARLLHLDQIVAVTVPTADTEAARDLVRAREDVRGDLMSARHRVSKLLLRQGIVYCGGKAWTGVHDRWLRAQRFDSSALALTYETVYETMLAAVDRRDRLDAAIAVMATQSQFTPVVNRLGCLRGVSTLTAFGLAVEIGDWHRLDGSRIGAYLGLVPTEYSPGSSRSQGGITKTGNGHARRLLVEAAWHHRQPYRYPGVDLRRRWDQASPAARARGAQGNRRLCARWAAFDARKKRPVVANTAVARELAGWCWSLAVLQDD

SEQ ID NO: 96278 - protein, 423 aa, unidentified
MDMLHERVAGLDVHKNTVVGCVRLRVGDETRRECRTFATTTEGLLALGGWLEESRCTHVAMEATGVYWMPVWKILCGGDFELIVANAAHIKNVPGRKTDVNDAMWIADLQACGLIKASFVPPEEMQELRSLTRTRKQLVREQTRHAQRIQKTLAEANIRLDSVLSDIMGASGRRIIEAMIEGVRQPHKLAELAGKRIKATPKELYDALHGRLTDHHRFLLDLHLRQWDGIDAAIRKIDLEINQRITQMDAQVEPDTPPFRDLMDLLNTAPGISTVAAPSILSEIGRDMSRFPTAGHLVSWVGLCTGHNESAGKRKSSRLRKGAPWLKTMLVQCAWAAKRKKGSYYRAQFFRIQSKRGPQKAICAVAASLLTAIYHMLKYGVPHHDLGADYFDRRPPELKAKRLVAQLAKLGFAVQLQPAAQVA

SEQ ID NO: 96279 - protein, 338 aa, unidentified
MYYTGIDLHKFTSYLTTVDSSGVIVKQENLKNIAHNFVQYFGSIPGEHQATVESTMTWYWLNDLLTSINIPLVLAHAKYVKAIAYAKVKTDKVDSHTLAQLLRMNFIPVAHKISNDNRTLRDALRARLKIVQRHTSVTNSMQLLLAKYNYDSPTQLTGIPEFQYEQLTEVEALLNEQMLDLEKQLYPYLIPNDDIQRLLWIPGIGKMNAFTILLEVDDINRFPDVKNFFSYSRLTPSARNSGGKSKQRSSKDGNKYLKVAFSDAAIHAVQYYPVIRKYHNSLLRRKNKQIAKTIIAKEIAEIVFYVLKYKTDFNNKFKGQELEHKKSLQWPRITSPCV

SEQ ID NO: 96280 - protein, 429 aa, unidentified
MKIIYPRVCGIDVHKKFIVAVICISESVEPIYLKKRFSTFHNDLIRFRDWLIQNDCQNVCMESTGKYYIPVYNVLESHISNIVVANPKWVCAVKGEKDDDKDAKWIADLFKLGIVKSSFIPQKDFRILRELTRYKYKLVNMRSSEKNRYQNALTSGNCKLDMVFTDVFGKSASNIIDLILSDNPYTDEDILSKVHKNCKASPDMILNSINGTDLTPVQKSRIELVNDHIKQLSSNIQRLDKLIDLMIEPYEDYISFLCQIPGVSRNSAIIILSEIGVDMNQFTSTRRLTSWAGLTPSSNQSAGKKKSVRISRAGVYLKPCLVEVAHAAVKDKNHPYYANKFNKISKRRGKKRAYIAIARKILVAAYHMLLTGEIWNPADLAEVETPVEQRIKYVKNNLKSDIKQLLDIGLTVEELTLMIQQNANTMTAQ

SEQ ID NO: 96281 - protein, 402 aa, unidentified
MKVCGLDVHKDSIFCSIYNGKTTSEVKIFDSTTRAIYEMGEYLMTERVKRVAMESTSIYWIPVWNILLEMGFELTLVNPFLIKQMPGRKSDVKDAQWIATLLHKNLIRGSVIPNSTIQELRFYTRKYMKLQQDKCKLLTKMDRIMVMANIRISSCVSKLTNKSVIMVIDALIKGETNPDNLMKLVYGNTKNKQSGKLREALTGYIKDHHRKVLKWEKEIYDNLERQTIECVEEMERICEEHYKDEMVLLQSLPGVSKITAICLIAETGADMSVFENSGKLTGWAGLRPRNDESAGKFKSKAITKGNKYLRVVLIQVAWAASRTKGSYFMEKYHRLSMRKSNKKAVVAIGRKILVIIWNMLKEKKPYNPNLVCIYDPIKIERKLLYHRKEMEKAAKLLHKEII

SEQ ID NO: 96282 - protein, 482 aa, unidentified
MWNTGLDYHPTTSNLHILNADGVRVKSQTIRGRWPLVVEAMRVAAKEAAAVGERLAVCFEASCDYGHLFEALSKVAAKVVVAHPGQLRLIYKSKRKNDGVDAAKLALLLMNNGVPEVWVPGQDARAWRRMIEYRRRTVDKRTACKNQLRALLRTHGIAAPGRQTLWSIKRRAWLKSAALPTAGDVMQRDMLIEELEHQERQVKRVTVELNRLASAHPGATLLQTIPGVGPRTAEAMAAYIDQPGRFRNGKCIGAYLGLVPCQDASGGHNRLGHITRQGPSTVRKMLIEAAWQGIRRSETIKAFYERIVGGKPDRKKIALVATAHRLARVMLSMLRHGEAWRHDGAEAKTTGEATTTASSATTTPAEATAPAATPHATSTSTPKQSQSPASSKKSTPASLSTRTSAPSSATVEAPSSSTVQKQSPASSKSVRKSKPPRKAIATTSSPVKPTAGKTGASGPAPDPAPPEGALAKARRRQPGAGG

SEQ ID NO: 96283 - protein, 405 aa, unidentified
MWFAGIDWADDHHDAVVLTDQGQLLGALRVPHTAEGLDHLTRFLRGGASTSGAAEPVICLVETQHGLLITALLEAGFTVCPVNPLAVGRLRPPSGVKTDARDARLLARLGRNDWPALRVLQPAGPLLQELKTLTRDLEGLRREQTRLVNQLTACLKAYSPAALRCFDGLTRQVTLAFLQAFPTPEAAAAAALDQLTQVLAQGHYPHPRQKAEQLAALLQAPQLHALPGVARAKARLMAALRAQLAVLTTQVAAFDQAIQQLFAQHADSAVFASLPGAGRRLAPRLLAEWGADRTRYASAASVRALAGTAPVLFQSGAFRGVRRRRAGVNAWRQALSHFAWESVLCEPWAKAYYQRKRAQGKTYAMALRAVANQWVRIIYAMWQARQPYQRAIFLAAQHAHGGLVA

SEQ ID NO: 96284 - protein, 365 aa, unidentified
MREQDERDKITIGLDLGDRRHRFCALDKEGQVIEEGTLGNTRECLGELSRRYAGALIVMEAGCHSPWISRYLEGMGCEVVVSNPRKIRAIYQHERKSDRRDALMLARIARMDHTLLYPVRHGSEQAQQDLLRIKLRDSLVRARVGVINSLRFTLKSLGYTIANPSTERFHKVLEGQIPDSLSTVIAPSVRALEELSLRIKLLDREIIAMARSEYPETAWLEQIPGVGPITALYFVLKIGEPARFERIRDVGAFIGLCPRRDQSGENDPQLRISKRGDVYLRRLLVSAAQYILGPFGPPSALRQYGLTLAAGGTSRAKKRAVVAVARKLAVLLLTLWKNKSAYQAFPSHGEETMRTSDSERLRCIA

SEQ ID NO: 96285 - protein, 424 aa, unidentified
MKEESFAWFAGVDWGSEHHQVCLVDAQGRIVGEREFPHGGKGLADLCDWLLSICGAANGVAVGIEVPHGPVVDTLIDRGFVLHAINPKQLDRLRDRHSVAGAKDDRRDAYVLGDGVRTDRRLFRRLHVADPRLVELRAWSRLAEELTQERVRLGNRAHHELWRYYPQVLKIADDDVAAPWVLDLWDLAPTPAKARRLRAAPVEKLLKQHRIRRIDAGAVLRNLQEPAIKVADGVAAAASVHLRSLFTRLRVVNRELQQAEAKLDALCAAIGETDADSGDGLQPRDVMILRSMPGIGRTNLATLLCEGSGPLSRRDYQALRTLCGAAPVTKRSGKSHTVIMRYAAHVRLRNAVYHWARVATQHDPKSRDRYAALRRRGKPHGRALRGVADRLLGLACVLLERQTPFDPDFAQSQVAAASPAATRR

SEQ ID NO: 96286 - protein, 351 aa, unidentified
MTGRAGNPESNIHGEYTMSDDCMYAGIDVSKDSLELVIRSSNQVSYLKSFANTKAGIRKVVSLITKPGLPCRVVVEPTSRYHVQVTLALAALPDCQVMLVNPLRARKFQEANGKRAKTDAIDARSLSKMAQKLEEDFIPYTPPADNIRELQLLGRRLANCVLQRARAKCRLKSYPVKDKVSNPCIASLKREIKFYKKEIARLLAKMQRIVDADAELRECYDLLLGIRGIARQSALQLLAELMALPAGMGPRQWVACAGLDPKPQQSGQHDPPMRISKMGNRYLKQVLFMAAMTTTHWDPQIKAYYDNLNNRKNSKRLAQVVVMRRLLHGFWHVIDRKQPFDASKCFAIPTS

SEQ ID NO: 96287 - protein, 387 aa, unidentified
MPQLNDLSRSLVAFKQAATLIAVIEMSQSGWLVAGVVPGIERQPLKKLAADEEGLLRLLYRWRNEATQAGHAIKRIVIAYEAGRDGFWLARWLRAHRVEAYVIHPSSVPVSREHRRAKTDRLDTELLKRAFLGWLRGEPKHCSMAAIPAVEDEDARRPSRERASLVGECTRIVNRLKANLARLGIRGFKPALAHAAERLEALRTPEGTAVPPNTLAELRRDIGRMRFVKQQIKEIETARAERVERAPTEGHNAIVCLLDRVGGVGIETADMLVHEVFSRNLRDRRAVARYAGLTGAPEESGKKRRERGLAKSGNARVRRAMIQLAWGFLLHQKDSALAQWYRSRTADARGGTRKTMIVALARKLLIALWRLVTTGEAPAGLILRPAA

SEQ ID NO: 96288 - protein, 346 aa, unidentified
MVLIGCDFHPSWQQVSWMNRETGEAGDQKLVHEPGAVEKFYRQFPAGTRIGMEATGNCQWFVELVTGLGHRVLVGDAAKIRASDSRQQKHDKRDARLLVQLLAEDRFPEIWVPSREQKDLRQLLIHRYKLVRIRAQVKNGLQHLAMNQGVMKKQKLWSKAGEKVLRELPLAPWASRRREDLFRVREMLNGQIDLLDQAVVEAAEKNEKARLLMTQPGVGPITSLAFVLTIGDVKRFQRGKQVASYLGLIPREYSSGGHQRLGSISKQGNTFLRMLLVEAAQGAVRCDPGFRNEYLHRCHSKPKGVAKVAAARKLAIRLYWMLRTNTGYPEVVRVESSSRVPLVSES

SEQ ID NO: 96289 - protein, 338 aa, unidentified
MALYAGIDLHSNNSMVVVQDDQDNVVGRQRLPNDLRTVSEWLEPYRKDLAGVVVESTYNWYWLVDGLMEQGHRLHLANTVAIEQYDGLKYRDDASDARWLATLLRLGKLPEGYIYPRTERAIRDLLRKRSQLVRQATMNLLSIQNLFARNRGKGISANHVKQLTPEAVDAVFEDPNVALAVQSSLKVLDCLREQIVVLEEAVHGQVRLRKGYKRLLTTSGIGKILALTIMLETGDIGRFREVGHYVSYARLVGSSHWTNGKRKGSGNTKNGNAFLCWAFIEAANFAIRHNPTIRRYYQRKQARTKRIVALKAVAHKLARACYHMIKEDVAFDLTRAFG

SEQ ID NO: 96290 - protein, 316 aa, unidentified
MESITRVGIDAAQAWLDVHIERPHSKVRRYGNDLDGLGQLKVDLGPGNYVIAIESSGRYEALARHELEAAGYKVRVKNPRQMRRLAEGLGVQAKTDLIDARMLAETAELGRANEPRSKEREALGDLSRTIECLKKDRARHMKRMRVPGYSEVAIRTLKAVVKTIDREMAKLEKKFIELVKKGPLAERYALALSVQGVGPVLSRIAVSELPEKLDTWSIRQICSYGGVAAIDHSSGKRSSPARVPSHGNSHLKGGLYMPALSLTTTQKWAKDLYKRLTEKGRTHQQAIIAVMHKLLIQLVAVLKRGSPWQAEPPIRA

SEQ ID NO: 96291 - protein, 362 aa, unidentified
MEKMTYVGLDVHKDSIAIAKLRPGSDTPLVWQIPNEAKVIRRTFGKLLAEAYELRCCYEAGACGFELHRQLESMGVECAVVAPSLIPRKPGERIKTDRRDAVKLARLDRARELSPIYVPTSDDEAVRDLVRAREDVRKDLTAARNRLAKFLLRHGRIYRQGRNWTVRHRQWLNVQTFEHPAEKLTFDHYLAAVDHQDACRSDLEKEITAIAGQPGYAQSVEKLVSLRGIAILSAMVLLTEIQDFRRFKRARELMAYLGLVPSEHSSGASRRQGGITKTGNSHARRILVEAAWHYRHPPAARTRVHQALRKQPAARIDFARRAQIRLHKRYVTLLARGKSRQAAAVAVARELCGFVWAAALQN

SEQ ID NO: 96292 - protein, 460 aa, unidentified
MTLLAQLGTQLPTRYYLGVDVGYKEHVAVVISLQTFARGDDRWKRARCLHFPTTHAGLKKLQQYLDSFCPDPAAFLGLCEPTGGFYGATVFQHLLDDGYPMLLVENATTRHMREKILPNVPKTDEMEARVMARIGYLHEAVGEEFTLRPLELPDPGDADLLALCRDSWKLNTMITRARNQFAQLMAVIFPELKTFFTGSVSTVVPVSLVAAYPTPATLAAAPVEEVYAVLRQAKGYQHARQVDELQALARNSSGLLPDPGRAWRLKWLTDFLLTNFQYQAALEKQIEELVTGREGYPLIAGVPYSGPTTLGVILAVSGDVSRFRNFRKYVAYTGYFAGLETSQTIDRTRMSKRGNRDLKRALFQIAAPLIWFDQADNPYKELYERKMAEGRAWYEAMPFVCAALARHIYHCLKFKDPYDVEKAFRGSAPTPASEQEWMDLRADLDEKFEAMKAYLCQTEG

SEQ ID NO: 96293 - protein, 439 aa, unidentified
MNSKRIEKKRHFVDDKIIIGIDPSKRNNNAIIINELGIPYCKSFSFNNTYKGFNDELWVKLNRVLKDINPTKVVFAVEISINLWQKLCHYLHNKGFTVLMVSPLYTKHERPKMDNTYSKSDPKDSLAIANCARQGYFNFYKQYPTEVDAMHRLTITYEKLKVHMTQVKQRIRSQIELIFPELPTVVDLDTDTARYLLGKYLTPTEFLTMNLYAEGAAIEKVSQKQHGQKTLQRIQDIAAYSIGVTTTDDLLFAEKLTMLSWLNQHALIKEQMELVIDQLVRLAQETPYFDIITSIKGISKISASRFIAELRDPAYFTNYKQIEAFAGTNLKLSQSGKYTGYRRITHIGNHRLRALIYKMAEETKNHIPEIRIRYLKRQIKQPRYRKNVVACASNMLKLITAMIKVNHTYEYRDQPVEELKQLEITYQEFKKKKKYKKSA

SEQ ID NO: 96294 - protein, 425 aa, unidentified
MDQSHNDQDRFAALVGLDWADQQHAGALRTAADGALEAFKLLQTADAIEQWAAALRRRFSGRPVAICLEQSKGALVYALLKYDFIVLFPVNPKQLARFREAMVSSGAKGDPEDAMLLLELLCKHRQQLRAWQPDDATTRLIGQLAEDRRNLVDHGTRLSNALKSRLKQYFPLALEVLGELDKELACQFLLRWPTFEELGSAEPAEIAAFYRTWHCYHPRLIEERLEKIRQAKPLVNDPAVIESGGRLVQCLARQLLDLLGPLAQYDRRLTELMQRHPDAAVFESFPGAGDVMAPRLLAAFGTDRERFKSAADMQSLSGTALVTRASGKTRAVLRRWACNKFLLQTFHEFAQHSMGRSAWAKTYYDQARRKGKRHHAAVRALAFKWIRILHRCWQNRTLYNEALYFQQLQRKGSRLVVLVAREHSP

SEQ ID NO: 96295 - protein, 280 aa, unidentified
MPMYQLGIDVSKNTLDLCLLREGIKGRIKTRKLKNTADAAKVVAEWLKKQSCELGEVHIIMEATGVYHEPLAYGLHFAGARISLANPHRTREFARGMNILTKNDKVDAWMLACYGSLKEPEAWTPPPESVRYLRALLRRRDALVADSTREKNRLEKSVFTDSPDAVRASIENMLQELSNEIEHLDVLIQEHIETHPELNQDFRLLTSIKSVGYLLGLNMLAILKSHSFESAEQAAAFLGVVPVERRSGTSVKGKPKLSKIGPPEIRTKLYLAALCGLRFN

SEQ ID NO: 96296 - protein, 464 aa, unidentified
MVQKQDKKKGKKPPVTATDMPVIRPDVGGIDIGSRSHWVAVPADRDEDPVREFSSFTGGLNELAAWLKSCRVKSVAMESTGIYWIPLYELLEQHGFEVLLVNAAHVRNVPGRKSDVLDCQWIQRLHSVGLLRGSVRPEAQYIELRAYVRQRERLVQDAARYVQHMQKALMEMNVQLHHVVSDLAGVTGMRIVRAIVKGERDGEKLAELRDGRCRQPKERIAQALQGTYKREHLFVLEQALEAYDTQQRMLKACDERIEALLVEIAAENPAPSEPCPPPRFGRPTNNQPTFEVQQPLYQICKGVDLTLIHGIAPATALRVVSEIGTDVSRWKTEKHFTSWLCLAPGTKITGGKRLSGRRPPAQNRVGQALRQCAVAIGRTETALGAFYRRLAARIGAAKAAVATARKLGVLIYRALKHGQAFLETGLAVYEKQQQDRQIRNLQKRAAALGFQLQRVPPEPAAAAG

SEQ ID NO: 96297 - protein, 466 aa, unidentified
MSKPEQNSGPKVAGRKGSKTKPVVRECQPDAAGCDIGAREIFVAVPADRDANPVRHCGTFTGELNKMAEWLVQNKIKTVAMESTGVYWIPVYDVFEKYGLEVRLVNPRNMKNVPGKRTDYHECQWIQYLHSMGLLAGAFRPDAEVRAVRILTRHRNDLVDMASQHVQHIQKALTQMNVQFQHVISDITGLTGLAILDAIISGERDPAVLAQLRDPHVKASPETLRQSLEGNWDPTQIVVLKQRLELYRIHREKIDESDQEIEKLLAAFVPQVDPEKKPMPEDRKQKQRRRKKKTGSPGFDMRKEGYKLFGVDLTQVPGLMASVFTLFSEVGRDMTRWPTAAHFASWLGLCPDNDISGGKVLWRANRQVKNRAGTLFRLAAHSLHRDQTQMGHYLRRMKAKQGPAAATTATAHKIAVIFYTMIKNQVEYDATLWADRDLMREKRMEARLRKQAALSGFKLVPLEATA

SEQ ID NO: 96298 - protein, 353 aa, unidentified
MTSTKYIGMDVHKESISIAVRNDAGKIVMECVIETKANSILDFIHGLRGELQVTFEEGTWATWLYDLLKPHVTKLVVCDPRKNTRQGNKNDQIDARELADRLYMNKLSSVYHGGAGVRTLKELARSYLTISKDLARVMSRVKAIYRSWGIPCAGKQVYAPRHRANWLAKITEVGVLRRAEFYYQQLDALRSLRHEVRRDLLAESKKHKATKLLCQIPSIGPIRAALLIALIQTPHRFRTKRPLWKYSGFAIETHSSADYRSVKGQLQKAKKQVSVRGLNRDCNHDLKNLFKSAATIASVKTGSVPGILRGFGCQRHETGDGTPDLGEEDCHHCVDRMEERSKLRRPISETTTA

SEQ ID NO: 96299 - protein, 408 aa, unidentified
MQVTFGIDVSKSTSTVCELIGESKNELTITNNRPGFIQLLHELTAFSKHPQIIFEATGVYSRRLQAFLEDYGYEYVILNPLKAKKEMDMGLRHNKTDKTDAYHLALIQRLYHHPINQLQSQTYKQLNALSRFYDQLTADLVMAKNRLHQALQSTFPEIENLFSSAKGKNYWQIVVRYPHCDLVRREDKKQLINWLMSLKGIAFKHALRTADKLIELAYQAYPVVSCSSIEVEQVQYYAHRLLNLSDQRENLIARMVKLAKSLPNHDLENLESIPGFAQTTAVRVLAELGDLRRFSNPNKINAFIGIDPGRYQSGEMDSNLSITKHGNAVARKLLYRAIGQIDNAAKTNPCHIADYYESKKLSSQTKGFKKIAIASIHKLIRTIYALIINDQPYDYNVATHNQKDFSRN

SEQ ID NO: 96300 - protein, 334 aa, unidentified
MKTLKQSIGIDVAKDNLVCCIGQLDLNEQYSFSKTKTFNNDVKGFGQLIQWIAPLRDNDVVFVMEATGVYYENLAYWLDSKGEKLSVLLPNKVKHFAKSLNLKTKTDGVDAQMLSRLGLERKLSLWTMPSKLMREIKFLSREYREAKAKLVITKNQLHAKEHSHGCPASVIKRLKRQITFLETQLSEIEAELRVTVMSDSLLNDKIVKINTIPGISFVTIISILAETNAFALVENAKQLVSYAGLDIQHNQSGAKDGKTRISKKGNSYIRNALYLPALCASRHNPDMNAFYTRLSERKPAKKIGITAVARKLLILTYILWKNDTEFELAYEESK

SEQ ID NO: 96301 - protein, 412 aa, unidentified
MEVLVDRCAGLDVHKKSVTACVRTPGEKGQRRQVVRTYKTFTGELAKLRAWLAEEGVTRVAMESTGVLWKPLWHALEGGFELLLVNARHVKALPGRKTDVQDAAWLAQLLECGLLRGSFVPPPLIRQLRDLTRYRKRLIEDQVREGQRVEKLLEDAGIKLASVASKTLGMSGRAMLAALCDGERDPEVLAELALGRLRARLAELRQALQGRFGEHHQVMLDAVLGHVDHLEAAIAELDRRIDLVIAPFAALRDRLCTIPGIGKRTAEVLIAEIGVDMTQFPTAAHLASWAKICPGNNESAGKHRSGKNPGGNKWLCAALTQAAWAAARTKDTYLASHFWHLARTVGKNKAAVAVGHTILVSAYHMLARGEDYHELGADYYTRRADPQAHQRRLVHQLEKLGLKVTVEPADAT

SEQ ID NO: 96302 - protein, 345 aa, unidentified
MKHYCALDVSVKETAVCIVDDTGKICREVKVASHPEDLISVIKDPKWQIERIGLEAGPLSQWLYEGLAKAGLPVICIETRHAKAFLKAQPNKTDRNDARGIAQMMRVNLYRPVHVKTLTSQKHRALLTARKLLQEKAIAIANDIRGLLRNFGLKVGLVGKVKFDERINELVEDRPDLREIMQPLLAARKLLREEFTKLHKKVLDLVREDEVCRRLTTIPGVGPVVALTYTATIDIPGRFPHSKAVGSVLGLTPKLNESGESKRVGRVSCCGDAMMRSLLYEAAQVLLVNVKKWSWLKAWAMNIAKRRGRQKAVVALARRLAVIMHRMWSDGTEFCWTRESLPVAA

SEQ ID NO: 96303 - protein, 341 aa, unidentified
MEPTVVGVDIAKRVFQLHWIVSDTGAVFDRQLRRSQFLEHFANRERCLIGMEACGGSQHWARRLIELGHEVKLMPGKHVKAFVTGNKNDVADARAIWAAANHPGVRAVPVKTEAQQAVLALHRIRQQLVIFRRSQSNCLRGLLGEYGEVMGVGRAAMNRAMPDVLSRLDSRLPRVLIDSLREQWQRLVDIDKQIAAIEQRLRTWLRENPACRTIAEIPGVGFLTATAAVASMGDPKAFRSGREFAAWLGLVPAQFGTGGKVRLLGISKRGDRYLRTLMIHGARSVMKHAKDPGSWAVQLCMRRPLNVVVVAMANKIARTIWALLAHGRSYSASYPPPLTAT

SEQ ID NO: 96304 - protein, 349 aa, unidentified
MRFYNQQHRFYCGVDLHARTLSLCILDAQGTIVRQQTITAGPHAFLQAVAPFRDGLAVACECMFAWYWLADLCEQEKIPFVLGHALYMKAIHGGKAKTDKIDAHKIAVLLRGGMLPQAYVYPKGMRETRDLLRRRTFLVRRRAEALVHLSNTNSQYNQPPFAKKLAYAANRAELDIAQRFSDPSVRKNVAVDLALIDAYDTQIADLELYLSRTAKVDDPQAFHRLRSVPGIGKVLALVLLYEIHDIRRFPEVGQFLSYARLVRCTHESAGKKQGTGGNKIGNAHLKWAFSEAACLFLRESEQAKKWLARREKKHGKARALGALAARLGRTVYHLLRKREVFDRQRFFAS

SEQ ID NO: 96305 - protein, 353 aa, unidentified
MGIVVALDVHRRQITYKALDRETGELRRGRIAPASRVDVRAWLAQFAGCEAEFALEGTTGWRFVVEEIERAGHTAHLADPAETAAKRGRKRRAKTDNADCDLQLRLLLAGELPESWIPPVHILELRTRVRMRKTLIDQRTAWQQRIQAQLFHQGIPAGLRLRTQAGREALRRAELSPAGRELVALGLRMVDALDLELAPLDRELRGFARRQRGCRTLIAGLYGVGPVSATAILAELGDARRFASSDDAVRHSGLDVTVYQSDSKRSPGRLSHEGPELLRWALFEAAVSAARAGSPDHAYYLQVAERLDHTRACLSVARKLCRRAYHILRELGDEALAPVDCDPHAEETIAAAA

SEQ ID NO: 96306 - protein, 382 aa, unidentified
MPKFPRCLNVSLEEREVLRKAGLSCEADPENYLGGSSQIMYFIGLDIHKKTISYCVKDAAGRVHQEGKIGSSRLALDDWIRAMPQPRAIAMEATIFTGWIYDHLLPHAEMVKVAHPLMLRAIAAAKKKNDTIDARKIADCLRCDLLPECHMCSTEIRDRRRTLRYRHLVIRQMVQMKNRVAGLLLEGGVSYDRPRLHHQGYFTALLASNEEISDSIRPLLKLSREHILRAQRLDSALIASLEKDPLLSDRLRRLRTIPGVGPITALTWALEIGDYTRFRSVKEAISYCGLCSAEKSSADKMVRTPISKQRNKHIQQVLVEAAKLAHLRSHELALVRDKELQKGNKNRATLAVARKMVTYMLAVERRQQDFVSAENMVAKAVA

SEQ ID NO: 96307 - protein, 345 aa, unidentified
MNKVLSSQQATIFCGIDVSARSLAAALIGVDQELARREFSNSPAGHKELIVWLGKRGAKVRVSMEATGIYSLDLALALEGKAGIELAVLNPKLVNRFAQTLRRSKTDAADAMVLAEYSQRMPFTAWQRPSVSALRLRSMGRHIESLIGEQVSVKNRLSAARSTTSTPRAVIVDLERAQAALLRRLRKMRGEAMKLVDADPDLAKRFKLLISIPGIAAVSALQILSELQTLAPEMTVRQWVAYCGLDPVHEVSGTSVHKPSRISRAGNSHLRRALFMPTLSAVRFDPHIRSFHLALKQRHKTGLQGLLAVERKLVHAIYGIFKSGKPYDGSLLFPHLEPALKSIAG

SEQ ID NO: 96308 - protein, 405 aa, unidentified
MEIVYERCCGLDIHKASITACVNINGKKEIKTFGTMTDDLLQLSAYLKKCDVQMTAMESTGSYWKPIFNILEVEGIEAILVNAAHMKTVPGRKTDVKDAEWIADLLRHGLLKASFVKPRDQRELCELIRYRQSMIEERAREYNRMGKVLEGANIKLTSVTSRMDTVSGLNMIRALSEGEANPEALALMAKGTMKSKVNELKRALKGLVQPHQQMILKAMLSHIDQLSELIATLDSEIEIRMSQDVELVEALDGITGVGKVSAQTIIAEIGTDMNRFPSANHLASWACISPGNNESAGKKKSGKTQKSNSTLKKTLVQCGRAAANSKDTYLNAQYRKIAARRGGKRATVAVGHSILVICYHMIKNRTQFNDLGADYFQRRNEAVAIKQSLKRLEALGFSVSIEKVA

SEQ ID NO: 96309 - protein, 387 aa, unidentified
MISVGIDVGKHSHEVCLMDAEGHQIGKFFRFQHSREGITTLVELLHRQPEPCIIALEATGHYWLAIYHNLLQEGFKVVMVNPLQSHAYSRSTIRKVKNDRRDAWIIADLLRIGRVRPGYVPGPDIQPLRDLARFRMELVDQVGDTKRRILVVLDKVFPEYETFFSNVFITTSKELLKRAATAEEFAALDLGEISRVVTKASHGRLGLERAERIQQAARTSLGLPYLRDAATVELRCLIAQVEFLESQVKATEAAITQLFSLVSQHLTSIKGIGIISAAAIFAEIGDIHRFPTPESLVAYAGIDPTIFSSGEFEGTKRHMSKRGSPYLRKALWMAANGARRWNPDLDIFFTKKLHEGKPYGIAMGALCHKLLGRIYVILKENRPYEVR

SEQ ID NO: 96310 - protein, 342 aa, unidentified
MRSIKRAVRSCHIMSALVCGLDVHKDSTYATILSPEGKIVNQTRMENERVLPYLSHFKVSKVGMESSNQIAPLFRQLTAKGYDVVVSHPKKTRYIAEAKIKSDRVDSKAIAELVRLDALPLAYFPTGEIAKLREKVRRRAFLVRERVKLRVKVKSVLTYEGLKWPSEHGLFTKKGVEWLHELKIDSVESYLRILESLDEEIKLLSKELVGVAEDDEEVKLLMTIPGIGYYTAVLMKSEIGDISRFPFPERLCSYAGLVPSTHASGKTVWHGGITKEGSRWLRWVMVEAAQTHVHKYDTAITKAYNRIAEKRGKKIATVAAARRLLMCSYSVLKNKKPYYDQT

SEQ ID NO: 96311 - protein, 338 aa, unidentified
MTTVKYFIGVDMASATFTACAGTTPWQVLVKPTTFDNSEDGFSTFVNWLKEHHLTSTHSVVCMESTGVYSEGLAYFLYAHQYAVAIEPPLNIQRKFPATRSKNDLQDSQHIAEYACRYVDKLSFWQPRPEILEQIKVLLTTREQFTTQVTAHKNALHAVKRKKVLSQLAKQVHEDIIQQLAKHIKAIDVEIRRLIESDPTFKKTLLLLLTIPGVGLTLAAHLLLITQYSLDPRELAAYLGICPYDNKSGTSIYHAPTSRHYGPSAIRKLLYLAACSVRTHRKEFRQYFFRKVAEGKSKRLVLNNIENKLLKVACAVLRSQKPFIPNYVSVNPLVLQKA

SEQ ID NO: 96312 - protein, 422 aa, unidentified
MSYCPVAGIDVSKRFSDMCILSPDNKIFAQEKIYHDETSINRANALLQKAERLFFRKPVIAMESTSHYHLILFQFFSEHGYDVIVVNPLQSNSMKDFSIRKRKTDRVDAFKLAMMYRTKTLRPSQIPQTATRALRQLCRHRAELLNDVSSYKNRLTALLDQTFPGYDKVFSDVGGVTSCAVLVRFPTPTILLVEEESELVEVIASASKSGYSFAKKKAGLLISAAQKAQTLGIHSCADETLIVCTIQMLRTLSESVLQIETAIDNLLAQIKEMRNNVSLLQSIPGVGSHSAALLLGEIGDISLFKKPKQLVAYFGLDPTERQSGSFRGTKNKLSKRGSPYARVALHMGVVNSICKRGKDSAANPVLLSYYEKKCKNKPAKVAQAASMHKLVFIVFAVLRDQKPFELKTPEQHAVEQGFVKAA

SEQ ID NO: 96313 - protein, 349 aa, unidentified
MLIIGLDYHPSFQHIAFVDTKTGECGERRLMHSDGEAESFYRELKQREVKVRIGMEATGHARWFERLMAELAFELWIGDPAQIKTKRVRKQKTDRQDAQLLLTLLLEDRFPRVWIPSPENRDLRQLLWHRHRLVQMRTRIMNQLQAVAMNEGLRCKKKLWSQAGRAQLESFLLAPWATRRRQDLLELMDRLNPTIEELSAAVEQEAEKMPDVRRLMTHPGVGPLTALAFVLIIGTPERFQGGKQIASYLGLVPVENSSAGHQRLGHISKQGNSLLRFLLVEAAQATVRLNPEWRRRFLHLAMRRERRIAKVAMARKLAIRLFWMWRKGWDYQQLSSSVRMRESSKPALV

SEQ ID NO: 96314 - protein, 365 aa, unidentified
MEKLLKQAIGIDCAKDDFVASYGKYFYNTEVQVTLTQTIKNNEQGFAKLEQLIKKTAVKEIPINIVMEATGVYHEKLACFLYDKGYPVSVVLPQRAKAFMKTLKTKTVTDKESSKGLTVMGLEKKLDLWQKPDEVFNQLKQLSREREQLQKLLTQTKNQLHAEKAGAWPNKKSITRMTLLQKMYNKQIDEIEKDIEAIIKANPDLQKRINHVTTIPGVGLITAVTTIAETNGFNLIRNKRQLVSFTGYDVVEKQSGISVRGKAHISHRGNRHIRRAMHMPALTSIRHTEHSKELFKRLVSKHGIKMKGVVAVQRKMLVLIYTLWKKQEDYDETKYSVKKIEQPQKTALTELDHVRSIESVDSLQR

SEQ ID NO: 96315 - protein, 412 aa, unidentified
MYYVGIDIAKRTHVAVIMCEDNSLEVKPFSFNNDKSGFKKLLIHLQTLCCGLSDIVIGMEATGLLFENLYRHLQSLEYNVVLLNPYQTAKFREMDTMKRVKNDNIDSVMIAALLKSGRFSEGYVSQEQLQSLRELYRHRSSIEDQIKSLKRQTSTILTVVFPELETVIRNPFNVSGLALLDKYPTAKHYTNASVDRILKTFRGIKGNNFNRDKAQALLDASKNTIYSGVAKDARAFNIRTNIEQMRLLQKQLEQTLEMMQLLFNSKEVKQEDQEVMEELIDNLRTIPGVADKTILALLAECGNLDRFYSPKALIGFLGLYPTLSQSGDSTRHGRLAKRGASLAKKAIYLASIAAIRHNDEMRTIYMNYRSKGRAKKEAIIIVARKLLTIIYTIYSRNIPYDPQRVFVAKPNQ

SEQ ID NO: 96316 - protein, 389 aa, unidentified
MEARTVNTLPSAAAHDGVRCLLAIELSKKSWVAAVNTPLSDKISLYKLKPCNWEQLLELIERIRKRVAQELKKPVEIISCYEAGYDGFWLHRLLEAQGVRNHVIDAASLQVDRRARRAKTDGIDVEKLLRSLMAYLRGEPKVWSVVRVPTVIEEDDRRLHRERSRLINERIQHVNRIKGLLAIHGIYDYEPMRPESIQRLERLHTAAGHSLPPHLKAEILRELQRLELVLRMIETIEAERDAIALAKSKSRHTSAKKIQHLVKLKSIGPEFATVLVGEVFYRTFNNRKQIGSYVGLTPSPFQSGSTSRDQGISKAGNTKARTTMIELAWLWLRNQPDSLLSVSFRERVGSRKGRIKRIAIVAMARQLLIALWRYLETGVVPEGAVLKCK

SEQ ID NO: 96317 - protein, 449 aa, unidentified
MRKPLVVLDEEHERVFERVAAVDVAKASGVVCVRTPGRPGGPRQNQVFDDVAATTGAITELGRFLVAEKVQMVTMEATSDYWRIWYVVLEMAGLAVQLVPPHQARQIQGRPKTDKLDAIWLARLTEWGLLRPCFVPPGPVRKLRDFTRARADLVRDRTRCWQRLEKLLEGALIKVSSVASKLTTRSAQDMIRALIAGERDPQVLAGLARGRMRAKHDALVAALTGMFDDRHGMLAGLLLDQIAYLDNAVSQVEAATEAAIAQIPQAWGVDADGVTGPDAGTGPDAARLPAAWRLAEIAGLSYELAIAIIAEIGLDMTRFRTASHLVSWAGLCGTANQSGPRKRKDKKGHGNSYLRGYLCQAANGAARTSTFLGERYHRIARRRSAARALVAVARSILVIIWHLLADPDARYTDLGPGYHATRTDKDKKIRNHVRQLQALGLTVTITPAA

SEQ ID NO: 96318 - protein, 331 aa, unidentified
MSNIIGIDVSKASLDCAYLRDLDQDKAKRKNCHNKVRCFASLVAWAEARSGLPVQTLAFIIEPTHVYHEQLVQFLHNTGATVYLVNPGRVRKFAEGIGILSKNDLIDADLLTRYGLLARNLIAYAPVAQEVNDLRSLLNRLDVLERNLRSELNRQEKVGKTMVFHRLEQQSIARTVKRLKTEIITFKRAIRECVKSTPSLQQNFDLLHTIPGVGAKTAWIMMVILGSRAFRSAPEVASFLGLNPIEKRSGKSQYRRPRLSKSGSGNYRQKLYFPAMVATRKNPDIQALYERLLAADKTKMCALGAAMRKLVHICYGVVKNQTPYQAQTIPS

SEQ ID NO: 96319 - protein, 344 aa, unidentified
MKIKLLGIDLAKNVFQLCALNQANKVLYNRTVRRASLSSTIARLEPITIAMEACSSAHYWGRTFEAMGHKVLLVPAQHVTPFVRGGKSDARDALAICEAAQRPGIHLVPIKSIDQQDIQLLHRLRQRQVQHSTALANQIRSLGREYGVIFPAGIKSLISQLPEALEDGSNELSPVARYALADQHRCLIEVRQAMKTFLLQIKQLAGQHPAYVNLLPVLGVGPMIASAYIAAIGNGNQFKCGRQVSAWLGLVPRQYGTGGQIQLRGISKNGDRYLRTLMIHGARAAITRGLKKSPEMTQWVQPIIDRRGFNKAVVALANKMTRICWVIVTTGEAFDVKQAFKPVV

SEQ ID NO: 96320 - protein, 270 aa, unidentified
MDKIPVFVGIDVAKHRLEVHLRPSGESFTIDYSEEEEVAALVERRLLPLEPTLIVLEATGGLEVRLAAALAAACLPVAVVNPRQVRSFARATGRLAKTDRLDAKAIAHFAEAVRPAVRPLADEATRRLQALVARRRQLLEMLVAERNRRQAAEPALHVRIDAHLRWLEEALAEIEGDLDGMVRDSPVWRAKEELLRSVPGVGPVSARTLLAQLPELGSLTRRQVAALVGVAPFSRDSGKMRGRRTIWAGRRPCGPASTWLPSRLPGAATR

SEQ ID NO: 96321 - protein, 429 aa, unidentified
MTVQQGTPESDVLVAIDVSKFRHDVLIEAPGWRSRKRMVIPNQAAEFRHFAVYLHSLNRPVRIAFEATGDYHRGLAHFLTAEGFQLHLVSSLALARTREALHNSWDKNDPKDAQVILHMLRDGVVQHYHDPLAHGLNDFQELSKTYHQVSLEKTRTLHRLLTHYIPLYFPEIEPHFHSTRSEWLLHLLTVFPTPASISALSLHDFVQQAWTLVGRKVSKQRLLEDIYRTAHSSVALPVAADSEAVAMFRLVLQEMLTLCQLRDQIEKRADQYLQNNSDYHRLRQIPGIGPIGALTILAEAGDLRRFHHHRQFLKFCGLDLATYQSGQFRGTSKISKHGNARLRCVFWMAAQVAVRMKENSFRYKYERYLRDTPADADIRRKACIAVAAKIARVAHSLIKTGTDYRPFFEAAVPSGRIRSARAVEAIATS

SEQ ID NO: 96322 - protein, 355 aa, unidentified
MKKNAILATTIPATTIGLDLSDRTLQFCELNASGEIVGEGQCKLDRTTLRRYLAAKSAGTRVALETGGHSAWVRELIEEMGHEAVVANARDLEAVTGRSHRTDHHDARQLARLARVDASLLNPAELRRTAEQADLFVIRARAVLVEARTMLINFARGITKTLGHRLPASATHHFAERVRAAVPNALQPALLPVLNVLEEIAGQIEDFDQKIEALAEQRYPQTRWLKQVPGVGTLTALTFVLTLGDPERFAHSRDVGPFLGLVPRRRQSGEQDPHLRISKCGDRYLRRLLVQCAHVVMGRFGPDCALRRWALAHAQHSRTAKKRTVVAVARRLAVLLHRLWHRQEVFRPFPLAVAA

SEQ ID NO: 96323 - protein, 371 aa, unidentified
MAKRLKYIGLDVHKETIAVAVAEGERGGEVRFHGTIPNEDDAVRGMVKRLAGPGITLDFCYEAGPCGYGLQRLLTRQGQPCIVISPSMMPRRPGDQIKTDRREAMTLARLLRAGELAPIWVPDEAHEAIRDLIRARRSAQEDTSAAKQSVRSFLLRHDRRFSGKSAWTKTYWRWLSEQRFDFAHQQLAFEEAKRRVLEAQARTARLEAALVEAVDGWRFAPLVRSLQALRGVRLIVAATLVAEVGDLTRFQNPKQLMAYLGLVPSEYSSGARVQRGRITRAGNAHARTMLVEAGWTYRLPAREERRYRDRVADLPEDIQAIGWKAQVRLCQRFRRLSATGKPQPKVNTAIARELVGFAWDIARRVQPVVAV

SEQ ID NO: 96324 - protein, 376 aa, unidentified
MITCFIGIDAHTTNYTLSTAIDAEDKPFNTCKYAPKLTYILKYANALCKKYNLKKEDILLGYEAGCLGFKLQRDLNENGFNCVVMAPSTIPGTAINRRKKTKNDIRDAEAIAKALRNDDYSSVATPDEEDEAIREFIRAREDIRMELKRCKQHIMAFCNRHGQHYEETGWTQKHMKWLNNLAFSQPVLKETLNSLLLEYEYLTEKLEEKDRRIEEFAQMDKYRESVHKLTCFKGIKTLTALAVIVEIGDFARFMKAKNFVAYLGLSVGEQSSGNDHNQTGITKQGNRFIRKLLTEAAQCFSRATSKKSKELKKRQEGNVEEVIAYADKANERLRKRYHHLVIHNMKSPNKAKCAITRELACFIWGMMTDNIHTVLV

SEQ ID NO: 96325 - protein, 457 aa, unidentified
MNRKRPTHKTNRTMPMIHPNAAAIDVGATMHMAAVRADRVPEPVRSFGTFTTDLHQLVDWFTECGVETVVMESTSVYWIPIFELLDAHGFTVLLVNARDAKHVPGRKTDVSDAQWLQRLHSHGLLRASFRPKGQIAELRAYVRQRERLLEYAASHIQHMQKALMEMNLQLHHVVADITGTTGLRIIRAILAGERDPEVLARLRHYSCHSSAETIAKALTGSYRTEHLFALGQALALYDVYHEKVSACDVRIEAVLKELSIDRGHSSDSLPSSRRRTDQANGLAFDVRAALFALLGKDITQIDGLGPYLSLKLIAECGDDLSAWPSAKHFTSWLCLAPSNKISGGKVLSSRTRRSGSRAAALLRLAAVTVGRTDTALGAFYRRLSARIGKAKAVTATARKIAVLFYNAVRHGMEYVDPGASFYETRYRARVLNNLHRRAKAFGFVLQPMEPTPGVAVS

SEQ ID NO: 96326 - protein, 488 aa, unidentified
MARQVVHDDDVALAQFGHQHLGHVGFEPIAVDGAIEHHGRDHTGHAQARDQRGGLAMAMRVPHPQAFALGAPTMATGHVGGGPRLIDEHEAFRCQIELAVEPVLALPQDVGAVLLDRVPGLYGMARPFSPASDMMLVLEEERSGPMSIVILGVDLGKNACSVVGVDAAGAVVVRRSMRRQTLVDYVAKLPVCVVAMEACCGAHYLGRLFAAHGHEIRLMSPEYVRPYVKAQKNDDRDAEGIAEAASRPTMRFVELKTQEQLDIQTLHRVRSRLVAERRSLTNQLRAILLERGTIFPVGRRKLELGIDALLADEDTTLSPRLRQLVAELRAEWRELDTRVEALNGEFVELARNDAAARRLTSIPGVGVLNATALIAAVGDASSFAKARDLGAWLGLVPRQHTTGGKPRLLGISKRGNTYLRTLLIHGARAALPSLARSETPLGRWLTGMIERGVHRNAIVVALANKLARIAWAALRKDATFERGYPVAA

SEQ ID NO: 96327 - protein, 346 aa, unidentified
MLYAGLDLSRKRLDFHLLDSEGATVEVGAAPPDADGLLGLTRRLDRHREPIRAAIESMNGARFVHDRLELAGWQVEIADAQKVKGLAPLACKTDRIDAWVLAELARRDLVPAIWLPDPMVRAERERGRWRLHLVRHRSSLKQRVHAVLLTHGKPCPVSDLFGVRGRQLLAQLGLPEPWQATVEASLRLIDELEREIGDCERELRRLGADHRYVPLLLTVPGIGWVLAYTIAAEIGDIGRFPSPRKLAGYTGLCPRVYQSGERDLRGPLAKQGPKYLRWALVEAATHACTHPVYRDRYQHTKVRIGKQRGAKVAQIDLARRLAEAIWHMLSRDQPFAPKGATDPLAA

SEQ ID NO: 96328 - protein, 342 aa, unidentified
MNHYAGIDVSLECSSVCVVDASGKIVREGKIASEPEALIAWLGSAGVPLERIGLEAGPLSQWLYAGMKQAGLAVELLETRHVSKAFEAMPVKSDRNDARNIAQLMRLGWFRPVHCKSLAAQEVRAMLTARKLVQSKLLDVENSLRGILRGFGLKVGKTNKTGFAGRIEELVQGHPNLEVIAQALLRTRAVLLAEFKGFDKRVRQSSRLHPHARLLMSTPAVGPVISLTYACAIDDPTRFRSCKQAGPQFGLTPKKHQSGETDYSGRISKLGDASVREALYEAAHIILTKPIKGCTQLKSWAMRIARRAGMSKAKVALARKLAVIMLRMLKDNMPFNPAAKAA

SEQ ID NO: 96329 - protein, 327 aa, unidentified
MHILGIDVSKAKLHCSLLDPATEKFKSKTVSNDAEGFAGLLAWLARHGDHPDTVQAVLEATGVYHEAAALALHEAGLRVAVVNPAQARDFARGLAIRTKTDGVDAKLLARYGAAVRLTPWQPPSPEVRALRALMARREAVAADLQRERNRLEKAEVVGETGPVMDSITSTLAFLHAELQRLERAIDDHIDRHPGLKAELKLLTTIPAVGPAVGRTLLSVMASRRFGSAEQLAAYLGLVPIERQSGQSVRGRARLSKAGPPRVRAVLYMAAVVAIRHNPHVKALYARLLARGKSKMSALGAAMRKLVHLCFGVLKTRQPYNPLWTAQT

SEQ ID NO: 96330 - protein, 410 aa, unidentified
MEVIVERAAALDVHKAQVTACVRLPAGKRGRGQEVAEFRSTVQGLLTLHDWLHAHGVTEVAMEATGVYWKPVWAILEDDFEALLVNARHVKQVPGRKTDVCDAAWLCQLLEAGLLRASFVPPKPIRALRLLTRYRKTQVGERQREANRLHKVLEDTGIKLDCVASDILGVSGRAMLDALVHGTTDPEVLAELARGRLRAKLPALREALEGRFDAQHALLVGAILAHLDFLDQQIGRLSEAIEEALAPFAAAVELLCSIPGVQQRSAENILAEIGLDMSRFPSAGHLASWAGQCPGNHQSAGKRRSGRTRKGSKWLNQTLNEAALAATAKNGSYLQALYRRLRPRVGHGRALGAVKHSMICACWHMLSSGELYHDLGGDYFPRLDPERQTRRLVRQLEALGHKVILEEEAA

SEQ ID NO: 96331 - protein, 358 aa, unidentified
MTTDAGPVTGGVDTHGQTHHAALIDGVGRHLGDREFPTTPTGYRALTAWLSSHHHLERVGVEGTGAYGAALARHLHAHGIAVVEVDRPDRRARRAKGKSDPLDAYAAARAALSGAAAGTPKQRDGRVEAIRTLRVARRGAVKARTQAMNQLKALLLTGPAELREQLRHLSATVLVTTCARLRPDDQDLADPAQAVKTALRRLARRHQHLTEEVRDADTDLTTLVSDAGPQLLALHGVGIDVAGQLLTTAGDNPDRLRSEAAFAHLCGVAPVPASSGRTHRHRLNRGGDRAANNALHTIALCRLRYDPRTHAYVVKRTKDGLSKTEIIRCLKRYIVREIFTALQPLPAPNGLLHVLDTP

SEQ ID NO: 96332 - protein, 394 aa, unidentified
MTAAYTGNVSTPGGVLHLAFELGWTHWKLAFTIGYGQKPRQRTIAARDLAALEQEIAKAKKRFQLADAALVVSCYEAGRDGFWLHRYLTARGIANVIVDSASIEVNRRKRRVKSDKLDADKLVNMLIRYRAGERKVWSVVWVPSVTDEDQRQLHREMQELKDDRTRHNNRIKGLLASQGLALEVVDELLPSWLGAARLWDGTALGADLQRRLVREYERWQFVHRQVLDLTRERRRRMLCDATAHVDKVRRLLGLAGLGVNGAWLLVYEFFAWRELQNRKQAGALVGLTGTPYQSGGREREQGISKAGSKRMRKMLVELAWCWLRWQPESALSQWYARRFGTGQGAARKIGIVALARKLIIALWKYLERGEIPAGARLVDWRSKLIRHKVNKPAA

SEQ ID NO: 96333 - protein, 335 aa, unidentified
MNFKSFLGVDVSKLTLDLCLINCEGEKRYFKVKNNLSSLMELFRELQSIIEIESLLVCAEHTGHYSNKLKTHCLTQGINLWLESGAEIKLRSGIQRNKNDKIDAERIALYGKRYVDKANLQHSEDQVLKEAEFLLTERELYIKERAKYKTQIKDFKSFINEAFYRNRKKRLEKHIALLSTSIKEVEAKLEELFKSSERLSNQMDILTSIDGVGKQVALYSIIHTEAFIKFSNGRKFACHVGVAPFSFESGTSQRSRKKVSHRANKKLKTLFHMAALSAIKMPGEFRDYFERKLKEGKNKMTILNAVRAKIINRMFALIRDNRKYEKSYQFPLANP

SEQ ID NO: 96334 - protein, 400 aa, unidentified
MRTVFGIDVSKASSEVAIVINGEKIHGYTMPNDAIGFTRLLDDLKTVQKPEIIFEARGVYSHRLQAFLEENGYTYTRLNPLEAKKQLDSLRVRKTDKIDAETLAISQFVLNRKPTYIQEEVYQELRDLSRFYQNLTEDIVRTKNRLHKVLQVTFPEMENILSTPTREQYWNLVMTFPYKDFVLELSKDELLEGIRQSTSKRISDKRVAYLAQKLAALANQSYCAVKKNSPILEEVRYYAKELLRLSEQRQAVLEQMVELAQPLPEYEILLSIPGIAETTATSMIGELGDIRRFQSANQINAFIGIDLRHYESGNFLVKEHITKRGNPYARKILFKCIHNIAAASHTNPCHIEDFYEKRKRQSQTTSTKPHTIASIHRLIRTMYYLITHNKLYDYTSTQNR

SEQ ID NO: 96335 - protein, 437 aa, unidentified
MSEEYSLKYCGIDVSKSSLVCAAIGDLDERHNQYLPGQARDIGIINDEPLIVKSFDNSWTGVVAMTRWLNSVKVAVAVMESTGSYWQGAYLALEEGGVQPVLANPTQVKNVSVHKTDYRDSVWLAVLLRAGFIIPSYVPAGLMKELRDLTRMRARIVRDRSRLKNRCHSILDSMLVRLGLSDVFGNRGRQTLIRALNGDFKELPEEQRQVFEGASTAQRLMVVDLMEAISQLEERAKRYDAAIARTVREIEEAKGDKTFQLLTTIPGVRMVIAATIMAEIGDVGRFATAEKLTSYAGLAPRVIQSGKKDVTGKTGHMCNRQLRTAMFMVAQTCARFGPPHLRQFHEMKMRKKGDYRKATIALARRLMVIVWTMLKDGVSFDMGYDKEQEERKEKRVRGSLKRLRKLEVEYGSENVYRALQEHLELKIREEQKTSVAA

SEQ ID NO: 96336 - protein, 427 aa, unidentified
MTRMHQAATEPAPPSAVSTSRVVFGGIDTHKELHVAAVVDSGEVVLGTASFSTTRAGYRALIRWLRSFGDVRRVGVEGTGSYGAGLTRHLTEAGVEVLEVDRPDRSDRRRKGKDDDLDAISAARAALHQRRTSIPKSKDGAVEALRVLRVTRQTAIRARRNALQLLRMSIVSAPEELRDQVRNLTRMRLIRTCAAWRPDVTDAADPVSATRIALKSLARRILELGDEIAMLDELIEPIVTALAPQLLARVGIGVEVAGQLLVTAGDNRARMRSEAGFAMLCGVAPLPASSGMTQRHRLNRGGDRQANSALHLAVISRLRMDEKTKAYVAKRTVEGHSKLEIIRCLKRYLAREVYYLLNPGTPPTKGGGSGARRAGSTPARNHLPEGAAGTRSQGSAGRPTASAAQALIPGGDALTPPKPPPDRVHAT

SEQ ID NO: 96337 - protein, 340 aa, unidentified
MQEQVSRQYVGIDLHRRRSVIGRMDEAGKVLSTVRVLNDPVQFALAVAEAGPGAEVALGATFGYYWAADVLKEAGAHVHLVHPLGLHWDNRRVKNDERDATELARRLWRDDLPEAWVAPPEVRELRELVRYRAKLVEARTSAKAQVRAVMAKCGVLPELGDMFGPGGQGLLDKMELPQPYRYRVDSLRRLIGVFDDEIGIAEEQLHKRLKANRGYWAVQALHGVGRVTAAIFVAEIGDVNRFRSARHLCSWAGLTPSHRESDDKAHRGHITKQGSTILRWAAIEAVARYHGGAPIAPAFRRIQERRGTMIARVAAARKLLTLVYYGLRDGEIRCLHKEAA

SEQ ID NO: 96338 - protein, 393 aa, unidentified
MICVGIDVAKDKYDCFILSSEGEVLADVFTIPNNAEGFDTLLQTIRRCARPEDKIKVGLEATGHYSYNILGFLLNEGLDTYVINPLHTNLYRKSLSLRKTKTDRVDARTIAAMLMSDVDLKSYTDTAYHNEELKSLTRYRFDKVRERAKLKQSVSRLVTVLFPELEKLVSTLHTASVYALLSEFPGAKQVSEAHLTHLKAVLYDASKGRYGSDMATTLRDAARCSVGSVMSAKSLELRHTIRLIHELDAEIEDIEAAIQSMMDEIQSPITTIPGMGVRMGAMILAEIGDFSRFDSPDKILAYAGMSPSTYQSGQLSLSGAYSHMEKRGSRYLRYALYNATKYVCLWNPTFAAYLAKKRAEGKHYNVALSHATKKLVRLIYALEKSKRPYSTAA

SEQ ID NO: 96339 - protein, 363 aa, unidentified
MNYVGVDIHKKYSVLCALDESGRKLREGRVEGNSARGFAQFFAGLEGPSKAVVEACWNWGLIHDELEELEPVEEVVLAHPYKTRLIADAQIKTDRLDAHALGTLLRGNLVARAHVPGRETRARKNLLRQRLYWARLRTMLRNRIHALLDRQRELELPQCSDVFGVRGLGFLRRLELAEPDATLLREQLALHDLIAQQMKAQEKRIAVEFKTEAVHQHLLSVPGIGITLAAVIGCEIDQIERFNSAEKLCAYAGVVPTTHASGGKTSHGRLLPFCNKWLRWALVEASWVAIGCSPYFGSLYRQHRARGKKANTAILIVARRMCRIIWQLLEQKRDFEKLAPRPKLYSFPGCSALALTVNPALAS

SEQ ID NO: 96340 - protein, 401 aa, unidentified
MNAVGIDVSKGKSMVCVMRPFGEVVLEPFEVLHAAQNLHDLAEKLKALDGETRVVLEATGNYHKPVAFVLHDAGLFVSVVNPVLIHDYDNNSLRRVKTDKKDAVKIANYTLDKWTRLRQYLPEDDTRLALKNCYRQYQQAVAIRTMLKNNLISSLDLTFPDANKLFSSPVKNNGCEKWVDFIGDFWHSECVSSLSANAFAKKYLKWCQKHGYVFTRSKSDEIYACAVNSASLPKSPTSKLLIQQQVAQLKAVSQSVAAFRQEMLRLSQQLPEFDTVMEMYGVGPSLGPQLMAEIGDVRRFSSKKSLIAFAGIEPQPNDSGKVVGNDKGISKVGSAVLRRTLFLIMTVILQTQPQDEPVFQFMNKKRSEGKPYKVYMMASANKFLRIYYAKVKAVMDSERSQ

SEQ ID NO: 96341 - protein, 393 aa, unidentified
MNNVAGIDVSKGKSMVSVLRPFGEVVAKPFSIGHTGSELKELADYLKSLDGETRVVMEHTGRYYEPVARFLHEEGVFVSAVNPKLIKDYGNNTLRKVKTDKADARKIARYGLDNWAELRQHTPMDTIRMQLKTLNRQQSLYAKTKTMMKNNLIALLDQTYPGVNALFDSPVREDGSQKWVDFATAFWHVDCVRYRKWCKRHGYNFSQSKAVEVHTGAQDLIAMLPKDALTKTMVRQAIDALNAVSASLERLKAEMQALAAQLPEYPVVMAMHGVGDSLGPQLMAELGDVARFTHRNAITAFAGVDPGADQSGTHEAKSTRVSKSGPPELRRALFLVMDCLLKTQPQDDPVYRFMDKKRAEGKPYLVYMTAGANKFLRIYYGRVKEYLASLEEN

SEQ ID NO: 96342 - protein, 389 aa, unidentified
MIVIGTDTHKYKHALAAVDEGTGRVRGSREIDADDAGHLAAVKWARGLDGERVWAIEDCRHVSRRLEQALIAAGERVVRVAPHRMGVSRKGEREPGKSDEIDSLAVARAVVKDGVERFPAAFLDERAMEVRLLADHRNDLVAERTRGQNRLRWHLVALCPELEASLKKRSLDRTKVLDGVDRRLRRLPASTRVRVAREEVAQIRRLTRQANTIEKELLSLIKAQRPQLLEELGCGPLTAAILIGRTAGAERFQTDASFALQTGTAPIKCSSGQRQQHRLNRGGDRQLNHALHIIAITRARIDPATREYLERKQAEGNTKKGALRCLKRYLARRFWRLLAQPPLPADHAVAREHTAEPADPQPLTIPERPAPHREVDRTITVPIPMVCIT

SEQ ID NO: 96343 - protein, 340 aa, unidentified
MIIGCDFHPRFQQIAFLDQDTGEHGERRLNHPGEAERFYRSLVGRQVRIGAEATGNFRWFRHLMEELGQEFLLGDATAIRAACPRRQKTDKRDARHILNLLVEDRFPVVWQPSAENDHVRQLLLHRCRLVRMRTRVKNQLDSIAKNEGLLSSRVWSPRRRSEIEALPLPGWYAHRRADLLGLLDELDARIRPLDEAVQEAAEDNQEARLLMTHPGVGPIVSLAYVLTIGDWRRFPRGKQVGSYLGLIPAEESSGSKRRLGQVSKQGNTLLRWLLVEAAVHAQRHDASWHRQYVRLSMTKHHGVAKVAIAHKLAVRLYWMLRSAQNYEQVMERGSHAGQSV

SEQ ID NO: 96344 - protein, 374 aa, unidentified
METIYIGVDFHARQQTICYLKTETGELVTCELKHQDKQKVRAFYAQFRGRVIVGLEASGYSPWFERMLEELGCEVWLGHATEIRRRARWRQKNDRRDAELILDLMLHDEFPRLHRPAVQSREVLRMLRYRQKLIKIRTMSKNSLQALALQSGLAKGSRLFTQAGQQELSAAVMSPVMHWQREHWLQLMQPLNQQLLETMVWFKAQSKDDVCIKRLRTHPGIGLLTSLCIVHTLQPVSRFRNTRKVAAYAGFDPVERSSAERKCFLGISKAGSRVLRFLLVEAAHTAIRKDEDLKRFYKRLAERRGRPKAKVAAARKLLIRAYIMLRDEIDYAEFRRRAVAARLARQGQGPNVPEVLIGQPASADHRDELTSENQ

SEQ ID NO: 96345 - protein, 366 aa, unidentified
MIVIGTDTHKQTHTASAVFAQTGQLAGELTAPARRAGFVELLHWGRELDQERIWAIEDCRHVSGSFERFLIAVGEHVVRVPPRMMGTSRQGERTRGKSDPIDARAIARAALKEGPETLPGAHLNENALEIKLLLDHREDLVRARSEDQQRLRWHLHDLWPELQIPAGALDRLIWLDRVSRKLARSEQCGRVRIARELVREIRRRTRRAAELESEIGALVGAHAPGLLALPGCGTLTAAKLVAETAGARRFSSDAKLARLAGVAPIPASSGKRDRHRLDRGGNRQLNCALHRIAVTQGRVHPPARDYLLRRQEEGKSRMEALRCLKRHLARAVWQALRRAESRGSNLSRLDSTQSSNLRPVAGLALT

SEQ ID NO: 96346 - protein, 367 aa, unidentified
MKKVSTVAAKPSKKISQQKLTVGLDLGDRNSWYCVLDESGQIQLEQRVRTNAKALQEVFGAMPRSGIALEIGTHSPWVSRLLSELGHAVIVANARKVRLIGESRKKDDRLDAQTLARLARIDPQLLYPVKHRSAQAQADLMMIRARAGLVRARTGLVNTARGLAKSYGERLRGCNVRNMNPEKAEGLSPELQRALEPLLAGIEAVSERICEYNERIEQLAQQSYPQTALLKQVKGVGTLIALTYMLTLEDPHRFQKSRDVGCYLGLQPGRRNSGRSEPQLHISKEGDPYLRTLLVQGAQHILGPFGADCDLRRWGLKLAERGGKSGKKRAIVATARKLAVLLHHLWVSGEAYEPLHNGSRTTVAAAA

SEQ ID NO: 96347 - protein, 355 aa, unidentified
MQSNKISFKGQNIYVGIDVHLKTWHVTTLTESGYKYSFAQHADAKELFDRLNKKFPEAYYKSAYETGFCGFSVHYALTELGFENIVVNPADIPTTGKEKAMKTDAVDSEKIAWSLKRGELTGIYIKDKRYMDDTNLIRLRQRFIRDLSRQKNRTKHLLYTQGVVYPERFSKKGTHWSQNFMKWLREDVELLSEEKRTLMLLCNQVDHIRKDILAITREIRRLSATDRYKENFSLLSSVPGFGLITSMSMLTELDNNPLRFPNERKFVAILGLIPTSHDSGEKKSNGVKTFRGNKQIGPLIVEASWVAIHRDYQLGCYYTNCCQSMNPQRAIVKVARKLACKAYAVMKTKKKYVLS

SEQ ID NO: 96348 - protein, 352 aa, unidentified
MRFYTGQHQYYCGIDLHTNNMYVCILDQAGNILIHKNIPASPHALLRILEPFLPDVAVTVECIFTWYWIADLCQNENIPFILGHALYMKAIHGSKTKNDKIDSHKIAVLLRGGMIPMAYVYPQEMRSTRDLLRRRMHFMYKRSELLSHIQNTRSQYNLPEFNKCISRKRNRAGISEQFEDPSVRKSIELNLTLLKQYDSLLNDVELYLVRHTKDHRPNDLYLLRTIPGVGKILSLVILYEIQDISRFQRVQNFSSYARLIKPQKKSAGKVTGSGNRKMGNAYLKWAFSEATLLLIRERPEIKDLHLKLKNKHGKARALAIISHKLGRAVYYMLKNHQAFDMRHFLQIKDRAA

SEQ ID NO: 96349 - protein, 349 aa, unidentified
MQTTSTTALSTSWLGVDVSARTFDACLCPPDVDPTSAAQLHKLRVCHFERTPGGAAQLVTKYAGRLPMHIVMEATGRYSSQLAAWICDADPHAQVCIVHARRVRNHAKALGLRSKTDRADARLIASYGAKFAPAAYHPPESDQLTLRTLMRTRHGLVEQQTALTNQRADLARANGLDSDCAVTLDQALSDLIDDFQQKVADIDKALNDLKLRNLQLRSDLELIDNIPGIGPITGPTILGELGDIRRFAKRRQMETFVGLDIRRHQSGTSRDLALGLTREGAAGVRWALYLAAMAASKTRTALGDRYRQMLARNKPKKVALGALMRKILSIIRAVIINGNPYDDKLARQR

SEQ ID NO: 96350 - protein, 365 aa, unidentified
MEEQKKAETRYIGIDLGKRTYEMAIVGKGGKVTRSNGKTHPAARQVLYKKLQPNDQVALEAGNLAFIMAKEIAAAVGCKVYVLNPSNLALIYGSMKKTDKEDSLKLAHILEDSNEERLPVVPVPSDQEMRRRKIVSNYRRAQQERNSYINRLHALFVSQGITTKVRSDLADSDSRKKAIQELHGIERDEAEHLVGILDLCEKRIDKLEKQIAEEAKGDEVIERLQSVPGVGLITSFAFAAHIAANRFGNASQVGNCLGLVPRVYISGQAVKYGSITKRGNGYLRALLVQAAWALTRSKNGGKLKELYYYMTIEKSKSKKKAIVAIARRLAELLYLIMRDEVRYVKMPFIREKEQSKGEALAKLCA

SEQ ID NO: 96351 - protein, 452 aa, unidentified
MRLLNGKQGLRRSQFAQELRGANLEKVLIVPIDAAKVLQKSMILNYFGEVIESPFSFVVNQSGMNLLIEKIEEAKHSCQAERVFIGIEATGHYYEDIVRILTNKGHSVHIINPASTHEERKQHLTYTKTDDIDLYLIAEVLIGNKATNAKLTTGVYKQLQFLTRARRSEVNKRSRIKVEIRTLHDNIWREFQGYSVLENGKVKTKKIFSDFWGKASLHLLTYFPHASQVIELGELGLRRLSKEHNLKLRNTVIEKLLCAASESVSKPLSELSSELFLLNQKLKDYEWHTQNIEKYEKEIERIFINTDGLLLLTVPGIGLITAAEIYCEMGDLTNYTSASQLIKKAGTNPTIKQSGKSEGYYGRISKQGNANLRRVVYNAGRTLSVHNDALKPFYTRLKEKGKKAGKIYIAMGNKFLKIAFSMLKNHKPFECNEPNFNYKQEVFKKLTLPLSA

SEQ ID NO: 96352 - protein, 316 aa, unidentified
MTGPAVYVGIDVAQATLDVALLPSGETWQVANDEPGIRALLARLQPHAPTLIVLEATGGYERAAVAALATGGLPVVVANPRQVRDFARATGQLAKTDTLDAGILARFADRVRPAVRPLPEPMTQALAALLARRRQLLEMLGAERQRLSLAAASVRRSLTQHIAWLERQLGRVDDDLDALIQASPLWRAKDNLLQSVPGIGPVTSRTLLATLPELGRLSHKQIAALVGLAPLARDSGTLRGKRSVWGGRAPARTALYMAALVAARWNPVLKAFYIRLRAAGKPAKVALTACARKLLTIVNAMARSNTYWQAPVVRSA

SEQ ID NO: 96353 - protein, 369 aa, unidentified
MTSIIYVGMDVHTTNYTLCCYSIEENQIFAQVQVDLDYREILRYLNQVQSQRGGNCKFICGYEAGGLGYSLYHELTYHGIECIILAPSTMAVIPGKRIKTDARDAEHISKCLAYHTYSAVHIPSQEDDAVKEYIRMRDDAVTTLKRIKQQTIAFCVRHGKQYDGRSYWTKRHLDWLESLKFDHPILQETFQEYLIQYYQASEKVDIYNIRIEELAQRETYREHVQKLVCFRGIAVHTALSLLVEVGDFHRFKTAQHFASYLGLVPGEHSSGGKQIHTGITKAGNTHLRRLLVESSQVFSRGVIGKKSVKLKAKQEGKPAEIIAYADKANERLRRKYTKIASHSKYNIAKTAVARELACFIWGMMTDNIA

SEQ ID NO: 96354 - protein, 361 aa, unidentified
MQHSMSLVGLDVHAAQTHAAIFDVASGELRGVRLRMAPTAVVEFLATLPGPVRAVYEAGPTGFGLARAGVERGIDVRVVAAGKVPRASGDRVKTDKRDAERLARLLAAGELRFAYVPSVADEQFRDVIRAIEDCRGDLMRARHRLSKLLLRRDLRWPGPGSTWTHAHMRWLRSQRFADPGSQAVFVDYLAGVEMLVARRAALVAALEQIIPDSRHAATIARLRCFRGIDTLSGAGLCAEVGDWRRFRPKPLSGFLGIVPSEHTSDQKRRQGSITKAGSTHARRLLVEAAHHYRHRPAIGDALARRQHGQDPRVIEIAWRAQRRLHQRWNILAGQRRKPAGVVAIACARELAAFCWEAATLD

SEQ ID NO: 96355 - protein, 354 aa, unidentified
MVLLGVDPHKDTHTVVAVDQAGRQLDQTTVPARTLGHGELVGWARTRWPGPAQRTWAVEDCRHVTGRLERDLLAAGERVVRVPPRLMAGARQAVRTQGKSDPIDALAVARAALREPNLPTAGHDQASWEVKLLVDHREHLVAEPTRTINRLRWHLHQLDPDLEHTTRRLPGRGLRRITARLAQTAADAGSVVQVRICQAQVSAIQALSDQIGQLDRQLRQQVARLAPSLLSLPGCGTLTAAKLIAETAGVARFRSQACFAMHAGVAPVPVSSGRTDRHRLSRGGNRQLNAALHRIAITQLRLPGPGQAYYQRRRAQGDATGEAVRALKRRITRAVYQHLKQAEQRLRAASPAAA

SEQ ID NO: 96356 - protein, 311 aa, unidentified
MKILETIGIDVSKETLDVIIHTAGLSNQFENSTKGYKTLSKWVLSKVTSPKESLLFAFEHTGLYSFPLSVYLSENGYSFIIIPGLEMKRSLGIKRGKNDKIDAKAIALYAFRRKEEVIPYQLPSKELSKLRQLLSLRERLVKHRAGYQASLNENERFLKKSDNPVLFDVHKKVISELNKQIFKIEQELDDLIKRDNQMRKMYDLITSIDGVGPQTAMFMIAFTNAFTLFKDWRKFASYSGIALFQYQSGTSIKGRTKISHLANKSKGLVNYILHDSMVVLYLRDQNTTDEQSGTQSPIRRDAPSYPSLASK

SEQ ID NO: 96357 - protein, 348 aa, unidentified
MVVIGVDSHKRTHTVVATDGTGRKLAEKTVVATSAGHLELVRWATRFAERTWALEDCRHLSRRLSSDLLIAGERVIRVPPKLMAGARRSSREPGKSDPIDALAVARAALREDLPVATLDGPDREVRLLVDHREDLVAERTRAQNRLRWHLHELDPGSEPVARGLDRAVVLAALETRLAEQPGTVARIARELVVRIRELTATINDLEREIARLVASLAPSLLALTGCGSLTAAKLVGETASIGRFHSAAAFARHNGTAPLPVWSGNTIRHRLSRTGNRQLNVALHRIAITQMQREGPGKAYVEHRRTMGNTKTEAIRALRRRISDEVFRRMRHDEATRAASPSGLAAAA

SEQ ID NO: 96358 - protein, 373 aa, unidentified
MESTNDPVFVGLDVHRKSVYATACDAGGSRVNQERFGASDAELVDYLERLPGPKHVVLEACTLWEHFYDAAKTTGASVVLSNPYKTRLIAEASLKSDKLDSEALATLLRLNSVPESYAPPPEVRALRNLVRERVFYRRKATSVKNHIYSFLLRRGIEYEDQILNLRRKREVLRDLHLEEVDRGLDALASLETTCRQLDEKIHQAWASSEEAQLLSTIPGVGEIISVALVAFLCPIERFSSPDKVSSYVGLAPTTHQSGESEYHGHLKRDSVALVRWLLVEAAWSHRHRVPRGAVAKVARRVSRRRGKGKGAVAGAHALLKVIFAMLKNGEPFRTDAPRPPTAESTLRHPRVTAGKRVQRAVLGLSTAKCLPAP

SEQ ID NO: 96359 - protein, 338 aa, unidentified
MKVHTLGIDLAKNVFQLHGVDRKGRTVLTRRVHRDQLLRIVGELDPCVIGIEASTGAFYWQRQFEKLGHCVKIMAPQYVKPFVRRQKNDTNDAEAICTALQQRNMRFVPKKTLEQQDIQALHRARQRLVNHRTALISQMRGLLLDRGIAIAVSATRARRLIPKILAMPNDELTPMMCEIVSDLYAFMLQIDDRIRTFDQKIAAIFKASAVCQRIARIRGIGPKTATAMIAAIGDGSDFKNGRHLAAWLGLVPRQHSSGDRRLMMGISKRGSQHLRTLLVHGARAVVRTAVRKNDARSMWVNDLRQRRGYNRATVAVANKNARVIWAVLTSGEPYRSAA

SEQ ID NO: 96360 - protein, 331 aa, unidentified
MNIHVGIDIGAKTSAMGWRQNGKTAGQWEIQQTAKGRKAAVNKMLALKPLSVVMEATGIYYLDLALELHTAGLPVSVINPKSFHNFAKLMLQTSKTDPIDAQLLAEYGERMTPRLWVPPTADQLTLRAIGRHINRLIGHRTRAKNELHALQATGTSFKLLIEDEEDAIAALDIRIDRLKKAARDAIAKCPNLTLQFHCMMAAPGVGEASAITALAELTVLPVTLKSPQVSRYAGLDVRLTQSGTSINRPGRMSKCGNAYLRAAMFMPALTAVRCDENVKAFYETLVARGKKKMQAIGAVMRKYLIGLWACMRSGEEFDTAKLFSEKDRAKA

SEQ ID NO: 96361 - protein, 469 aa, unidentified
MSKRNGNTKSNLGPKEIRKRLTEGKGFPELNPNVAGIDIGSREHFVSVPEDRDSQPVRRFGCYTADHLLLVGWLKECRITTVVMESTGVYWMPLSAVLEEHGFEVFLVDARHVRNVSGRKSDVQDCQWIRRLFSYGLLSAAFRPKPEITPMRALWRLRGSLVQDCARQIQLMQKALELMNVHLHKVVTDISGLTGFRIIRAIVSGSRDPQALAQMRDPGCKLSEAEFVLALNGNFRSEQVFCLRQALDTYDFFQDQIQKCDQALQAYLSELPTKPVGQGQNLIPKKKSSRRRKNQPYFDLRSEQIRVSGVDLTRIDGIDMLTAQTILSEIGLDLDRFPTEDNFSSWLGLSPNNRITGGVVRSSRSRKVAHRVATALRLGAQALHHSRSAVAAFYRRLASRMEPAKAITATARKLACHVYRMLKHGQAYVDQGEAAYLAAFEQQRLRRLQRQARRFGFELVNLQSGEVVS

SEQ ID NO: 96362 - protein, 444 aa, unidentified
MHYQKVLKMPESIPYLSVGFDVGADFTWMSIMLPNGILIGKPFKIIHSDPQSRELAISKIKEAQEMYSLESRCFLESTGIYHIPLLCFLRDKGFDCAVINPIITKNSTNMNVRKLHNDKFDSKKAAKVGLDASLKASIVPDDAIIDLRNLVRDYYYFKDLQSAIVLKLHAELKVSFPAYLNVFSKVTTQTSLKLLEAYPLAADMLAAPKDELVETIRSTARFGETYALARYDAICTAAKDAAVFGRALPSNALRIRLYIKMYREYQAHLDSILEELHQAVGKLEGTPDYDRISFIQTLHGVGFLSAVVLIAEMGAFDLFSSPKKLYAYFGLDPGVNDSGKFHGDRVHMSKRGSSLARRILHMVAINNLKVDKATKTPVNPVIYDYYTRKCASKKKSVAVGAVMHKIYNIIFAMLRDNKPFELITPEEHRERYAAEHPESVNPAA

SEQ ID NO: 96363 - protein, 351 aa, unidentified
MITMAETRCRVTGGVDTHRDVHVVCALDERGAELGVESFPTNPAGYRQVLRWLRRFGEVERIGVEGTGSYGAGLTRYLHAQGVEVIEISCPNRQRRRSHGKSDPVDAIAAAKAAFSGDATTAPKTRTGNVEAIRALRTADRSARHARIKALNQMRALLLTGPEELREQFRGTTPWRMVRTAARLRPGDPATAGGATKYTLRLLARRVLELEAELKELKSILKPLVAATAPELVAQHGVGTETAGALLVAAGDNPERLRDERAFAHYCGTAPIDASSGTVVRKRLNRGGNRHANEALWRIVLVRMVSDPATRHYVERRTKEGLSKREAIRCLKRYVARELYPLLAQTAPCNR

SEQ ID NO: 96364 - protein, 310 aa, unidentified
MTIHPCFVGIDVSKAVLDLFETWQGRSTQIANASEPIAVLATQWRQAGAFVVFEATGHYDEALRQGLDAAGVAYARVNPGRARHFARYAGFLAKTDRLDARMLAEMARRGALGAELPFDEEREALRLLHRRRDQLVAMRQKERTRLTEATHAIENESLERHLAFLSADIAAIERQIAEAIKASPVLKDRETRLRQVPGIGPVSAAALLALMPELGQRSPKAIAALAGLAPSNCDSGQHRGQRQIAGGRKRVRDALYMAAVAASLSKSPFAAFYQKLKSAGKPTKLAFIALARKILVTLNAILRDGTSYAK

SEQ ID NO: 96365 - protein, 313 aa, unidentified
MQQSFVGIDISKNSLDVHVLPEDTSYSFANEPQKVKALTRKLKKLKPTLIVMEATGGYEISLAVQLSAAKLNTAVVNPRQVRDYARAIGKLAKTDAVDAYVIARFAQDVRPEAREQLTLKELQLKELVMRRQQLIDMRSAEKNRMTRAYTPQVLQGIQKHISELSACIADIDEQLHNDIRNNPTWNQKLEIIASVPGIGHTTAHGILFCLPELGILNRRQIAALVGVAPMNRDSGMMRGRRTIAGGRAVVRRMLHMPTLSAVTRWNKRLKTFYYHLRQQGKKHSVALTACMRKLVIMLNSMLKKNQPYSENYC

SEQ ID NO: 96366 - protein, 453 aa, unidentified
MCLEDRPVLEPNAAGIDVGAREMFVAVPPGRDENPVRVFATFTEDLERLTDWLEQCGVTTVALESTGVYWIPLFEILEQRGIRPCLVNARHMKNVPGRRTDWHECQWLQFLHSVGLLRAAFRPGQDICAVRTVLRHRNELVSAASQHVQHMHKALTQMNLQIHHVISDITGLTGRAIVDAILAGQRDGAELAKLRDPPIKADTDTIRKSLEGNWRPEHLFTLGQSRDLYRIYQQQIVNCDLEIEKMLQGFAPRIDPGERPLPPDRKRNRAGSQRRRKNGHPHPDFDLRTEAYKLFGVDVSQIPGLEENALPLFSEVGRDMSRWPSAANFVSWLALCPDNDISGGKLLWRGARRVKNRAGHLFHMAAYALHRSPTPLGNYLRRMKAKLGPQAATMATAHKIAVIFYTMIKNQVEYDETIWDARDAEREKRLEAKLKRQAKQLGYELVPIEPKAA

SEQ ID NO: 96367 - protein, 352 aa, unidentified
MKKLFIGIDFSKKKFDATVILAAGLHELEERKWETFTNDPKGFRHFIKWVKQNAWKTTQEEWLFCGEDTGACSISLSRWLYGRGYDMWLANAYAIKHSSGIQRVKSDKADSAVIAEYAWRHQDKAQLFEPIDENLQELREIFLYRHKLVEQRVKLQVRSKEKDTVRGKSKALSFVERKTRHLIEELSKAIKQCDDKMKEIIAADEALRENYDIITSMRGVALQNAACLMIYTNNFKKFDYDSRKIACYYGVAPFGKQSGTSVNLAPRTSHFANKLIKSLLGQAAHVAKEFEPEIRAYYDRMIQKGKKRQVAINNVKNKILHILVAMVKKKEKYNPNSNKKENVKDFALCVNF

SEQ ID NO: 96368 - protein, 416 aa, unidentified
MNAAGIDVSSRKSTVAVLRPFGEVVRLPFDVAHNTEGLASLAEQLKALDGETRVVLEHTGRYYEPVAKALHEAGLYVSAVNPLLIKEYGANSLRRVKTDKADAVKIARYAVDNWADLRDYTPMDTIRYDLKTLNRQFQLASKQRTASANNLIALLEQSFPGIRKCFDSPVRSDGTQKWVDFVHTFWHVECVRKQSLNAFSERYRKWCKRHGYIFKQGNAVEVYSLAKNAVVLVPKSEVTKVLVQEAANQLTSISRSVETYRAEMERLASTLPEYPVVMAMYGVGKSFGPQLMAEIGDVRRFERKQSLVAFAGIDPMPNQSGDKNVRSNKSSKRGSPYLRKTLFNIMGIYLKCSPQDEPVYQFLDHKRSEGKPFYVYMTAASNKFLRRYYAQVRDYLSTLDDLPPVDMDSTGLKTSD

SEQ ID NO: 96369 - protein, 340 aa, unidentified
MEGLYAGSDLHGNSNFLGIIDAQGRRVFKKKLPNELSLIRQTLQPFQGELVGIVVESTYNWYWLVDGLMEEGYKVHLANPSAIQQYVGLKHADDRHDAFWLAEMLRLGILPEGYIYPKEERPVRDLLRKRGHLVRLRTSLVVSLQNILSRNLGRKVKVNDVKALREDRVSLLLGMSEDLALAGRVSKEAIDHLTRQIYKIEWAVQKRIVLRDEYRYLLTLPGVGKILALTIMLETGPIGRFETVGDYVSYCRKVPSRWISNGKWKGSGNRKNGNKYLSWAYAEASEFARRLYPEPRAYYHRKMQKTNAAVAHSALAHKLARAGYYVMRDQVPFDPEKLFK

SEQ ID NO: 96370 - protein, 419 aa, unidentified
MARIHSIAQDAVLVAIDISKKRNDVLIQVPGSPRRRRLVVLNQRAEHDRFIQRLKAFDRPVVTGFEATGNYHRALAWRLVDAGIETRLISSMALARQREAIHNGWDKNDPKDAQVILHMLATGLSQVYQDPLAAGLADIQELSKTHEAVSRARTQTIHRILTHYLPLYFPEIEKFLGSSRRDWFFALLEMFQTPASISALSPEAFSAAVWDIIGKKTSKARLIADIYETAKESIGLPVPLDSRAIAMFRMVLAEARSLNRQRNAIEAEAEALLGGTPDFEALKQIPGIGPIIALTILAEAGDLRRFGHHRQFLKLCGLDLSTHQSGTFRGQTKLSKYGNARLRRALWMAGLVAIRQKENNFRDKYTRYIARDPDNPDLRRKALTAIAAKMARTAHAIIKSGKAYRPFYEGAVPGGRISL

SEQ ID NO: 96371 - protein, 431 aa, unidentified
MLKINPLSTLYVGIDVSSKSNYVCALDFYKNKYINSSFANNQPGAEELALKILECLKEHPDITTIVAALESTSVYSIHIANYLSSCEELMRFKPYVFVLNPKCTANYKKSYIGLGKSDPIDAFVIADYARAGTIESEPWRGSQFLALKRLTRHRLHLVECMTREKTYLVSNLYLKFSELQMLEGDDQPFCDIYGATSSSVLMEYFSPEEILDSSEEDLIAFLAKKSRNRIKDISKTADLLKKAARDSYRLDKALYGPLNVSIASSFNCIETFKREIKVIDNAIEKEIKGLNPNAFIILQSIDGIGPVFAGGIIAEIGDITAFHSSDALAKYAGLTWKSNQSGDFDGEDTPMIKAGNRYLRYYLGEAANSMRKHNVEYGTYYRKKYNEVPKHQHKKALALTSRKFVRLVYGLLARNQLYSGVSLDTSIKDSN

SEQ ID NO: 96372 - protein, 426 aa, unidentified
MWDARRRVLKMTSLKQGIIQDKEVIIMRTVFGIDVSKASSEVAILVNGEKVHGYTMPNDAIGFNRLLGDLATVNSPEIIFEATGVYSRRLQAFLEINGYAYTRLNPLEAKKQLDSLRVRKTDQIDAEKLASSQFILNRKPTYVQEEVYQNLRDLSRFYQNLTEDIVRNKNRLHKVLQVAFPEIENLLSSPTGEQYWSLVTIFQTKHWVLELSEVELKETIRQSTSKRISENRVERLAEKLVELAKQSYPALSKTSPMIEEVKYHAQELLRLTNPRDQVLAQMIELAEPLPEYEILLSIPGIAETTATSIIGELGDIRRFQSANQINAFIGIDLRHYESGNFLAQEHITKRGNPYARKILYKCIHNIASASYTNPCHIADFYEKRKRQSQTTSTKPHTIASIHRLIRTMYYLLTHNKLYDYASTQSR

SEQ ID NO: 96373 - protein, 369 aa, unidentified
MNKTLYVGLDVHKDTIAVAVAEEGRGGEVRFYGTVINSADAVLRLTKKLAKNGHTVSFCYEAGPCGYGLHRHLTKLGFECAVVSPSLIPRKAGDRVKTDRRDAQMLARLWRAGELTPIWTPDEEQEAMRDLIRARKQAVDVVKASKMQLLSFLLRHGLRYENGQYWTKRHRRWLAELRRFRFYHQQLVFEELKRAVDQAEERVARLDQAIEAAIPDWHFAPVVDALRALRGVNTTIASTVVAEIGDITRFDNPRQLMAWLGLVPSEHSSGNTTRRGRLTKTGNALARTMLVEAGWSYRHPPKEGHPYLKRAAHLPQEIKDIGWKAQARLCKRYRSLSRTGKPQPRVLAAIARELAGFVWDIARKTPLTA

SEQ ID NO: 96374 - protein, 345 aa, unidentified
MEYFVGLDVSLEATAVCVVDGEGKTIRESMVGTDPDALAGFLTALNLPLKRIGLEAGSMTHWLYHSLNAAGLPVICIETRHAKAALKAQMVKTDRNDARGLAQIMRTGWYKAVHVKGAECQKLRVLLGNRRFLVDGRVRIENQIRGTLKTFGLKTGAVTRVAYERRIRELMEGHDELCRYVEPLLAVRRQIMAEAARLEKAILDFVKNDEACRLFMTVPGVGPLTALAFRSAIETPHRFRKSRHVGAHLGLTPRKYASGEVDYDGGITRCGDEMVRSHLFEAAKVLLSRVSKWSALKAWGMQIARRSGMKNACVAVARKLAVILHRMWLDGTEFRYGSMPVAAAA

SEQ ID NO: 96375 - protein, 350 aa, unidentified
MIIIGCDYHPGFQQIAFVDTETGECGERRLAQREEAETFYRDLHKKGGRVRVGMEASGHARWFERLLTELQFELWIGDAAEIRTKRVRKQKTDRQDAQLILKLMLEDRFPRIWVASWENRDLRQLLWHRHRMVQARTRIMNQLQAVALNEGLRYKKRLWREAGREQLELLRLAPWASRRRHDLLELLDRLNPTIAQLTTAVEEEVEKCPEAQRLMTHPGVGRLTALAFVLIIGRTDRFQGGKQVASYLGLVPEEESSGDRRRLGHISKQGNSLLRFLLVEAAQVTVRSDSEWRGKFFHLAMRRGRKIAKVAMARRLAVRLYWMWRRRWNYEQLTKFGSHAGQPGHPHGVQ

SEQ ID NO: 96376 - protein, 430 aa, unidentified
MGRVIIGMDPHKRSATIEIIDDGEQILIAGRFATDRDGYRSMLKTGRRYPDRIWAVEGCNGIGRHLAQRLVADGETVIDVPAKLSARARVFATGQGRKTDPVDAHSVAVVALRTTGLRQVTVDDSTVALRLLVDRRDELGRARTETISRLHQQLLELIPGGAKQFLSAAQARALLATVRPRDIVGRTRRQLAAELITELTTIDKKIKAANKQLTELVAATGSSLLQLNGIGPSGAARLLGDIGDITRFASRAHFASWNGTAPIDASSGDQHHHRLSRAGNRRINRVLHIMAIVQLRHDTEGRAYYRRRLAAGKTPMEAIRALKRRLSNVVYQRILNDTRSVATGPGGHRGTTLQSSAASPIPTADTSEQSLPGPSTKHSRTPSSLHTLGRPDAVAIGLRRHTGGHHLGCEGSPGLAGSGNWRCPRGPLGG

SEQ ID NO: 96377 - protein, 457 aa, unidentified
MSKDKRKKEAEKVKKTTKTLQGIPILNLSAAGADIGDTQHYIAIPDGKGSLKVRVFNSFTADIEEAVNWLKSEGITTVAMECTGVYYLPFYLLLEEAGIEPYLVNARHVKNVTGRKKDDTDAMWIQRLHSCGLLQKSFQPDNDFRTLRTYVRQRKGLITRCSDEARRMQKSLEQMNIKIHTVISDLLGKTGMQIVKAIISGNFNPGELAKLRDPRIKATEQEVFKSLQGLWEDEYVFTLRQAYNTYQFYQQQIKECEEMIHEQLIKQIAKVSQGDITIDPPIVEKKTKPRKNQFSKPITPLLKKIAGVDLCKIPGLNEVSILEFIAETGIDTTKWHSYKHFSAWLNLVPNTKITGGKIISSRMVKKKNIAGQTLRMGASSLYGNKTAMGDYHRRMSAKYGGKGAALASAHKMSRIIYKMLSDRVEFDSNMLFDADQKYREKKIKHLEKVLAQLKKAS

SEQ ID NO: 96378 - protein, 468 aa, unidentified
MTPRIQKNLRQPPCPEPLRVTHRHAAGIDIHANVHWVAVPPEDAPPPPSGHPPNLPKHVRSFGTCTADLMALADWLEQCGVKTIAMESTGIYWIPLFELLESRGFEVYLVEPRQSRHAPGRPKSDVLDCQWLQRLHSYGLLTASFPPAEQVVVLRSYLRQRQMLIRYAGQHVQHMQKALEQMNVKLTEVVSSITGVTGMAIIRAILEGERDPLELAKLRDDRCKRTQAEIARALYGNWRAEHLFALKQAVALCDFYRQQLRACDDQLQGYLGTFADQSKGQPCPRRPRRRTKGANEPAFDLEGTLYRMAGVNLTVLEGIDPHTALVLLSEVGPDVSRFPTVKHFSSWLGLSPQHQGSAGKIRSRRVQRGSSRAGRALRLAVQGCHHAKHALGAFYRRVQARAGAPKAIVATARKLAERVYRLLKYGAEYVCQKIEEYEAAYRARLVKGLARKAAELGYRLEAATATGS

SEQ ID NO: 96379 - protein, 386 aa, unidentified
MQTVADRPAAPTAIRTDLGAIFVSLELSRSTWLITSLSPDGGEKMSKHVVRGGDVAGLLERFAQLREKTRARTGKVFPFVVIQEAGLDGFWIDRALQNEGIESHVVDPASIATSRRRRRAKTDRIDGEALVRALLAYKRGEPRVCAMVKAPTPEEEDRRRLCRERKVLIVERVRHVNRVKGLLFSQGISGYEPLRRDRQERLDTLRTGDGRRLPDHLKAQVRRELDRLELLLEQIKAVEAERDVLLAAQRVAAPAAMLLDIKGIGPEFAAILWSEGLFRHFDNRRQVASYAGLAPTPWQSGSVDREQGVSKAGNPRLRTTLIQLAWLWLRHQPQSALALWFEERVRRNGGRLKKTTIVALARKLLVALWKYVTAGVVIEGAVMKVA

SEQ ID NO: 96380 - protein, 406 aa, unidentified
MLFVGDDWAEDHHDVELMDSAGRRLAKARLPEGVAGIARLHALIGAQLGEDVDGPEVAVGIETDRGPWVAALVAAGYTVYAVNPLQAARYRERHSVSGAKSDAADAHILADMVRTDAHQLRPVVVDSPDAEGIKVVSRAHKTLIWERTRHTQRLRHTLREYFPAALEAFEDLDAPDTLELLGKAPDPASAAKLTLGQIRAALKRARRRDIDTKAAAIQAALRAEHLGRAAVITTAYAATTRSAVAVLITLTEQVTVLQGQVEASFGRHPDAEIIVSQPGIGPILGARVLAEFGDAPKRYADAKARKNYAATSPITRASGKKKVVLARFVHNDRLVDALMSQAFSSLQASPGARAYYDKQRDRGLGHNPALRQLANRLVGILHGCLKTRTHYNEATAWSHQTEKAAA

SEQ ID NO: 96381 - protein, 353 aa, unidentified
MKFFAGVDTHRDNHTVVVINAVGELLETFTIEANASGYGLAMGRVANYAGLIWGLEGTGSYGRSFAKALAREGHTVYEVPGTLTKRHRRRLRGAGKSDPQDAHAIAEAVLREREHLPQYVERDAEDATRLLYERRDRIVRERTAKVNRIKALSLRLQLNLAEDLTTARTLKTLTALLAKTKAEGYADFEALDEMRDLAAELQRIQQRIAELEERLRPFVDRLAPKLLELRGCSIISAAGLIGHIGSTRSYPNADAFAAHAGAAPVPCSSGKYQSVRLRTGGNRQLNRCLHNIANVQMRTEEHLGKLYYDRKRAEGKTHREALRCLKRRLATVVFRKLRTAEAGRTPLQNVFAA

SEQ ID NO: 96382 - protein, 312 aa, unidentified
MTLALCFVGIDVSKQRLDIHLHPTGKHWSVNNSTEGLAALIKRLRRHRPQRVVIEATGGYAALAIDRLCAAGLPLSVVNPRQVRDFARATGTLAKTDRLDAAVLALYAERLQPPLHQPRPPALRQLAALIVRRRQLVKMRSAERVRRPLAETSEILASIETVIDQISTQIKDLERKIKDLVASQDDLKQKAKLLCRHSGIALLSAATLIAGMPELGTLSRRKVAALAGLAPLACDSGAWRGRRRIWGGRADLRQALYMPTLTAVRTDPSLKAFYKRLTDAGKPHKVAIAAAMRKLLVRINADLKSSQQEHSC

SEQ ID NO: 96383 - protein, 455 aa, unidentified
MKRKRTTNTVKKNAKIEKLMVMNPHAAGIDVGSGEHWVCVPKTSCENNVRQFGTYTTDLKKIADWLCECGVTTVIMESTGVYWIPLYEVLEERGFDLNLCNAKHAKNVPGRTKTDRYDCKWLQKLHTYGLLSASFIASSEIRELKVLMRHRDNLIQESSRHIQRMQKTLTYMNVLLHKVVSDITGYSGMRIIRAILAGETDSHKLVKYRHKTVKASEEEIVKALEGNYRFEDLFILKQVVESYDFVIKQISEFDSAIDDLFSGLDKQADNKKNPLPKVKKSSKVNYSERVQLYEIFGVDLIQIPGLSALTLRKLIGEVGLDMSRWKNFKNFTSWLGLSPNRKVSGGKVLSERTNQVQSKAAGIFRMAASTLRTSDTFLGGFLRRKKSHIGSAKAITATARKIAVIFYTMVKEKISYQELGAEYYEQKYKERSVKRLMRQAKRLGFSLNQLELVKA

SEQ ID NO: 96384 - protein, 312 aa, unidentified
MTKIICGVDVSSRRLDARVGRQGAVERFERTPAGIEALAGFCKKHGVELVVMEATGGYEKLPFGLLWGQGVPTAIVNPRAVRRFAEAMGILEKTDAIDAGVMAWFAKVKRIVAHPPAEAAQERLQALVRRLSQLTELRTMQLNQRRLVSDRETLASIAEILAVVARQIRALEAKIAALIDTDELWQKLNATFRSIKGVADRAVARMIAEVPEVGTLSNKAIAKLVGLAPIARDSGKISGRRPIRGGRSAVRSTLFVVAEIVRRHDPDFADFHRRLSKAEKPKLVIRIALARKLLVRLNAKARDIRRELALAA

SEQ ID NO: 96385 - protein, 377 aa, unidentified
MVSFFIIFVQHPTINAMETKKARKKIYHYFIGIDVSKNELDFAVVKDQAMILHKEILNSVEAILEFVAELKKISGFRVSKALFCLEDSGFYSNHVLNTLKKLKAFVIVENPQKIKKSQGLVRGKTDKIDALRIAQFAQKNKDELRLWVSRRPVLLLLKNLISTRERLLGISVILRTPLKEQLSYISKGIHHQSALSCKKSLVAVTVDLESINLAIKGLIDGDERLKSIYHLITSVPGVGPICAYQIILCTNEFLDITDPRKFACYAGVAPFKNESGRFIGKARVSHYSNKKVKTLLHMAAITAIRYDAEIKAYYERKTKGEGKPKMAVINAVRNKVILRVFACFRQDRTYIRSYEYPVRQEAVKDIQVFSACPVIVS

SEQ ID NO: 96386 - protein, 362 aa, unidentified
METRFVIHGLKHQMEKRSMEHYAGMDVSLKETSICIIDETGNIVREVKVTSEPEMLVEELSKEAYCFKRIGLEAGPLSQWLYSALADAALPVICVETRHIKAVLKAQVNKTDRNDARGIAQMMRVGLYRPVHVKTIASQKCRMLLTSRKLLQTKAIDIENDLRGTLRNFGLKVGVVGKVGFEGRIRELVQGRPDLAAITEALLMVRRVLRQQLDVLNTQLLAVVRADEVCRRLMTIPGVGPVVALTFRTTVDVPVRFKNSKKVGAAFGLAPRQNQSGESNRIGTISKCGDQMMRVMLYEAAQTMLTRSAKWSWLKAWAMKIAKRRGMKRAIVALARRLAVVMHRMWMDGTEFQWTRDIAATA

SEQ ID NO: 96387 - protein, 430 aa, unidentified
MTLKEPTPPDAILVAIDVSKARNDVLIEKPGSARRRRLVVPNTRIEHDRFIALLTSLGASVIAGFEATGNYHRPLAFRLLEGGISLRLVSSVALARTREALHNGWDKNDPKDAQVILHMLKIGATQTYADPLVSGINDIQELSKTHEIISKAKTELWHRLLTHYLPLYFPEVARFAGNSRSDWFLAFLEAFPTPASITALSKEAFIDAAWAVVGRKVSKARLLGDIYETAVSSIGLPVALDSAAIGMFRVVLTEGRSLIRQRDLIESQAHAMLAGHPDYQRLRQIPGIGPIIALTVLAEAGDLRRFGHHRQFLKFCGLDLATYQSGQFRGQTKLSKFGNARLRRAFWVAAQVAIRQTDNSFRAKYERYIARDRDNADLKRKALTAITAKMARTAHAIIKSGSDYRPFVEGPVPGGRTSLSRSREGASATL

SEQ ID NO: 96388 - protein, 320 aa, unidentified
MMAQTDSVVAGIDVAKDKVDACIRMIAERPIFPSTTKGRRQLVAWVRKHKVTKVVMEASGGYEREWAKALRQAGIEVRIVDPKRVRSFALSAGCLAKNDVIDAEMIAWFGEIFSDGPSQLYDADREELQGLVKSRLALVNLRIRLQCQSEHAAPGPAQKAQARVLERLDTEIAKLEAEISAKVKSTPALAERAEIIASVPGLGEISATNLVAGMPELGQVSNKIAAALVGVAPYDDDSGKRRGERHIKAGRRWLRNAIYMPCLGAATLNNPVLKAYYRRLIERGKEPKLAIIACMRKLIVILNTMLVRRQTWDPTRHALS

SEQ ID NO: 96389 - protein, 408 aa, unidentified
MNPLYVGIDVSSKSNVVYFMLPDGSKHCNFSVANSHTGSSQLVKRILSAMTSCSLDTVLIGLEATSVYGDNLVYFLREDAALARFNSKIHVLNPKQVSKFKEAYNDLPKNDLIDSFVIADCLRFGRINKEVYIGDYRYKALQNLTRARYFAVSNLIKEKQRFMNILFKKYSTMTQEKVFSDTFSTTALAVYDEFESAEALADMDLHELTAFIMEKGKNRFPNPNAVAKSIQKVARSSYRLPKTVNDSVNQVLSISITSIKALEAQIKEFDKAIAAQMELLPNVLISIPGIGPVFSAGIMAEIGDINRFHNQAQLAKYAGLAWKQHQSGDFEAQTTRLINSGNRFLKYYLCEAAFSLVRCDKEYSDFYHLKYKEVNRYQHKRALALTARKFVRLVFRLLKDNRLYTSAE

SEQ ID NO: 96390 - protein, 337 aa, unidentified
MTNIYILAIDLAKRSFQVCATDRDGAVLYNRMISRTKLEKLLEAQTSCIVAMEACATSHHWGRVAEGFGHEVRLIPPIYVKPFVKRQKNDAADASAIAEAAKRPNIHWVAVKSAEHQARAVAFRTHQCLVGQRTQLINALRGHLAEFGVVVAQGRANIKTITSMLKDQAIDLPAGVEDIVRLYLDQVELLSTRIDELTCRLREAVKVNDDMRRLCTVPGVGPVTAGAIMAFAPDLHSFSSGRNFAARLGLVPRQRSTGGKTRLGGVSKMGQSDVRRLLIVGAMSRIRWIVRKGELPDNWLGRILGRKPRMVAAVALANKMARNIWAMMTRNEDYRLA

SEQ ID NO: 96391 - protein, 363 aa, unidentified
MNYVGVDIHKKYSVLCALDESGRKLREGRVEGNSARGFAQFFAGLEGPSKAVVEACWNWGLIHDELEELEPVEEVVLAHPYKTRLIADAQIKTDRLDAHALGTLLRGNLVARAHVPGRETRARKNLLRQRLYWARLRTMLRNRIHALLDRQRELELPQCSDVFGVRGLGFLRRLELAEPDATLLREQLALHDLIAQQMKAQEKRIAAEFKTEAVHQHLLSVPGIGITLAAVIGCEIDQIGRFNSAEKLCAYAGVVPTTHASGGKTSHGRLLPFCNKWLRWALVEASWVAIGCSPYFGSLYRQHRARGKKANTAILIVARRMCRIIWQLLEQKRDFEKLAPRPKLYSFPGCSALALTVNPALAS

SEQ ID NO: 96392 - protein, 370 aa, unidentified
MKMSIGVDLHKTQFTVCCLSEDRKIQESGIYPTKDRGYGAFIKKMFHWIEGGYEITVAVESTGNTRYFCNQVMDAGIVVKIVNTLKFKIVNESVKKTDKHDARTLAEFLEKDMLPESILCSQESEDIRRLLKSRSVLVKALVSLKNQVHGLLLGYGIESRRGQLQSKKERQRILDGLADHRSSGNAAWAVQPLLGTIDQIASQVKELEKVLSDLVHEDKDVELLRTIPGVGLITAATIRAYTDDINRYESAKKYAAHAGLVPWVQNSNTTVRHGHITKRGPLELRTAFVQMVMGMLRLRNKTAGYRLMGKYNVMKEHKGAGKSIIATARKMNTMVYAILKTRKPFDPSRMAPDPKYLEMSKAARRYALAV

SEQ ID NO: 96393 - protein, 343 aa, unidentified
MGEVSTIGLDIAKSVFQVHGVDVDGAVMIRKRISRAKLLEFFATLPTCLVGIEACPSAHYWSRRLQGLGHTVRLMPPSYVKAYVKRSKNDANDAAAICEAVTRPSMRFVATKSEQQQSGLMLHRSRQLLVCQRTMLSNAIRGHMAELGIISAKGRNGTAELLKIIADEQDDRIPAAARFSLNVLARQYAAIREETVAIERRIHAWHRSSEESRRLEEIPGVGPIVATALMAEAGDWKTFSSGRSLAAWIGLVPRQHSTGGKERLGRISKQGNRHLRWLLVAGAMAVIRYARQHGTKRPWLARLMDRRPIKVAAVALANKIARMAWAMMVRGERFKEPKLLPAA

SEQ ID NO: 96394 - protein, 405 aa, unidentified
MACVRVMSGAKAERTCRTFGTTTVELGELRDWLNGNGCTEVAMEATGVYWKPVWNILGDGRFDLILANAAHIKAVPGRKTDINDAMWIADLVACGLIRPSYVPGERQAELRSLLRTRKQLCREQASHVQRIQKTLEEANIKLASVISDILGVNGRRMIEAMIAGVRNPRRLAGLADRRLKASPKQLYDALHGRLTDHHRFLLKLHLCQWDALAAAIASIDRQVDTQITTMDAGVTAGKARFRPLIAWLAAIPGLSTLASTTILSEIGSDMSRFATAGHLVSWAGLCPGQNESAGKRRAARLRKGAPWLKTILVQCAWAASRAKTSYFGAQFRRLKSRRGPQKAICAVAASLLTTIYHMLKHGTAYRDLGSDHFDRRPRETRARRLVSQLSKLGFDVEIRRIAEAA

SEQ ID NO: 96395 - protein, 375 aa, unidentified
MKEKVRFLGLDVHAETITVAVAGPGEEVRSLGTIANRADSIRKLVKRLGPVEQLKACYEAGPTGYVLYWQLVELGVHCDVIAPTLVPVKAGDRVKTDRRDAEKLARCHRGGDLTVVWVPDAGSEALRDLVRAREAAKQDQLRARHRLSKFLLRTGQRSPAGVKAWTQFYMAWVRQLRLEQVAQESTRLDYLHEVEHMAERVVRLEQAIAEAVKLASPEIQEVVKDLQALRGIAQISAVTIAAELGNITRFESPRQLMGYSGAVPRENSSGQRTQRGSITKTGNAHLRRIAVEAAWSYRLRPGVGPGLRKRQEGVPEELKEIAWKAQHRLHKRYSRLAAAGKDQRKIITAVGRELLGFIWSIGVKAETAARQRIVA

SEQ ID NO: 96396 - protein, 372 aa, unidentified
MNHNTIYVGMDVHKENFSLCAYTLEAEKASYHQRTEADYKDVLKYLEFLRSIYGNDANFICGYEAGCLGYTLYHQLSANKVNCVILAPTTMLEQRSKKRIKTDKRDAEIIAKCLAQHNYSPVHIPTAKDEETKEFLRMRDDHKLALKKIKQQILAFCLRHSYRYDGKSHWTAAHLKWLRSLTPEALYKEILDEYLLSYQNLSNKLERMDKRIEELASLEEYREAVKKLCCFIGVRTHTALSVLVEVGDFKRFASAKNFASYLGLVPGENSSGENQTRLGITKAGNRHIRLLLTEASQCYARGQIGFKSKELKSRQSGNTPEIIAYADKANERLRRRYYKMVLGSCKKHNVAKTAIARELACFMWGMMTDRIA

SEQ ID NO: 96397 - protein, 343 aa, unidentified
MQTVTTIGLDIAKSVFQVHGVDAAGQVVIRRHLKRRQVLAFFQKLPPCLVGIEACASSHHWGRELQVLGHTVRLMPPAYVKPYVKRHKNDATDAEAICEAVTRANMRFVAIKTPEQQSCLILHRTRHLLIRQQTSVINAIRAHLAEFGIVAAVGRNGVEQLLGVVADANDKRLPEVARVCLAALGVQLRVLKAQILEFDRMINAWHRSNETSRRLDKAPGIGPVLATALVATVPDPKTFRSGRNFSTWIGLVPLQHSSGGKDRLGHISKQGDRYLRNLFVAGALAVIRYAKIHGTQHRPWLTALLARRPTKIAAIALANKIARMAWAMMVKGEHYKEPVALAA

SEQ ID NO: 96398 - protein, 401 aa, unidentified
MRDGFGVFVGLDVGKEGHHAVALSCEGKRLHDATLPNTEAGLRKLFDKLARHGLILVVVDQPASIGALPVAVARACGHQVAYLPGLVMRRLADLHPGTAKTDARDAYVIADAARTLPHTLRRVDTGDEALAELEVLVGFDDDLAGEVTRVTNRIRGLLTQIHPPLERVLGPNVQHKAVLELLSRCGGPAGLRKAGRAKLLDIVKARAPRMGARLVEQILAALAAQTVIVPGTTAAETVLPRLADSLRDLLRQRDQLAGQVEEMLDAHPLAGVLTSMPGIGVRTAARILLEVGDGTAFPTSGHLAAYAGLAPVTRRSGTSIRGEHPPKSGNKQLKRAFFLSAFAALADPASRTYYDRKRTEGKKHNAALICLARRRVDVLHAMLRTKTPYQPKPANEPRLAA

SEQ ID NO: 96399 - protein, 349 aa, unidentified
MLADELDYVIGVDTHRDEHVLAVVVAPTGAVVAQRSVKASARGYAAAVRFADQHAPGARVWAVEGAGHYGAGFARHLSDRGETVLEAGRGPRDERRLQGKDDPLDAVRAARAALASEKLVLPRTGQRREALRLLLVARRGAVEVRRRALVQLRSVIVTAPDRLRGQLKTLPERRLLERCSHFRRSSSCPVDELAVKLVLRTLARRIQTATSEAEQLEREILGHVRALAPRLLDEPGVGPIVAADVIVAWSHPGRVRSEAAFARLAGVAPVPASSGQTVRHRLSRGGDRQLNRALHTIVLHRRQHDPTTHAYIERRVAEGKSRREATRLLKRYLARHLYRLLQQTEPLMT

SEQ ID NO: 96400 - protein, 344 aa, unidentified
MTITVIGLDLAKNVFQVHGIDEKGRAILRRKLRRSDVLPFFSKLTPALVGMEACHTSHYWAREIAKSGHDVRMMPAQFVKPYVKSQKNDATDAEAICEAVQRPTMRFVPVKSENQQAALMLHRTRDLLVRQRSSLISSIRAHFAEFGIIVGQGIRNVERLLALLEAEGDNRLPALAAEMLGILAEQLREIAARVREVEIKLLAWHRANQVSRRLESIPGIGPITASAITITVGDPRQFKSGRQFAAWLGLVPQQRSSGGKERLGGISKRGDGYIRRLLVHGARAIVGWQKRPSKHATPWIARLLERRPMNVATVAYANKLARIAWALMIREERYNPARAFASVA

SEQ ID NO: 96401 - protein, 370 aa, unidentified
MKKYSEAFVGFDTAKNKHAVAIADSGRDGEVRYFGEIDSSQATVAKVLGKLSARYAKLHICYEAGPTGYGLYRQVKALGHHCTVVAPSLIPRKPGDRVKTNRRDAVSLARLFRAGELTSVWVPDPVHEAVRDLVRAREAAAADLRKKRQQLLSLLLRHGRNFTGRAHWSLAHRRWLAGQTFEHPAQQIVFQDAVDAIEDAAARLRRLDQQLVAIVPSWSMAPVIAAYQAMRGVSFIVAATFVAEIGDVRRFDNPRQLMSFLGLVPSERSTGETVRRAGLTLAGNRRARRVLVEGAWTYRYPARVSEILRARMQGLPKTVRDIAWKGQVRLCARYRRLVAAGKKTPVVVAAIAREMAAFLWAISRQVEPLT

SEQ ID NO: 96402 - protein, 347 aa, unidentified
MRFYNQQHPFYCGVDLHAKTLHLCVLDQAGEIVRHRGIRARPQDFLRTIEPYQKEVVVGAECMFAWYWLSDLCLEREIPFVLGHALYMRAIHGSKTKNDKIDSEKIARLLRGGTFPMSYVYPRQMRSTRDLLRRRCFLVRRRGELLAHLNNTFSQYNVTPPPGKFSYAANRVDLTKCFDDASVRRMVQTDVALAADFDKELTSVELYLKRNAKVHDPDTFHRLKTVPGIGEILAMVLLYEIHDIRRFADVGDFVSYARLVRGSHESAGKSKGSPHKKIGNAHLKWAFSEATTLLMRECEAAKRFVERKTKKHSKPKAMSVLAAKLGRAVYWMLRRKTAFDVNKLFAC

SEQ ID NO: 96403 - protein, 473 aa, unidentified
MEDAMDKSKKQKRKNKKHRKVDISNLEQLNLNAAGIDIGAEFHYVAVPNGRDPEGQDVRHFTTFTADLHKLADWLHQCNIDTVAMESTGIYWIPVFEILDSQGFDVRLVNPRNVKNAPGRKTDVVDCQWIQQLHTYGLLQSSFRPENQICELRAYLRQRAMLVSYASHHIQHMQKALEQMNIKLSQVISDITGVTGMKIIRAIISGERNPVKLASMRNARCNNSESIIAKALEGNWRSEHIFALQQAVELYDFYKNQIIACESQIQHHLESFDDRSNGTPLEKPPRQSRGSSNQFHFDARLYLHRMTGVDVTRIEGIEGPTALNIIGEIGIDMSPWPTEKHFASWLGLCPGSKISGGKVLSSKTKPSANRAAHAFRLAAYSLQRSKSAIGAFLRRKKAQKGAPKAITATAHKIARIFYNMLKYGTEYVDLGQEYYEQRYQDRVVANLKRKAKQFGFELVNIKEHELLTELPAS

SEQ ID NO: 96404 - protein, 402 aa, unidentified
MNNVAGIDVSKGKSMVCVMRPFGEVVLEPFEVLHTAQSLNDLAGKLKALDGETRVVMEATGNYHKPVAFVLHDAGLFVSVVNPVLIHDYDNNSLRRVKTDRKDAVKIANYTLDKWTRLRQYLPEDDTRLALKNCYRQYQQAVAVRTMLKNNLISSLDLTFPDANKLFSSPAKSNGCEKWVDFIGDFWHSECVSSLSSDAFAKKYLKWCQKHGYNFTRSKSDTIYACAVNAASLPKSPTSKLLIQQQVAQLKAVSQSVAAFQQEMLRLSQQLPEFDTVMEMYGVGPSLGPQLMAEIGDVRRFSSKKSLIAFAGIEPQPNDSGKIVGNDSGISKVGSAVLRRTLFLIMTVILKTQPQDEPVFQFMNKKRSEGKPYKVYMMASANKFLRIYYARVKAVMDSKHSK

SEQ ID NO: 96405 - protein, 370 aa, unidentified
MIVIGADTHKRSHTAAAVDAATGRLLGEQTIAARRRSFDALLIWARGHGGDRVWAIEDCRHVSGALERFLLARGEAVVRVAPKLTAGARSTAREPGKSDVIDAVAIARAALREGLDSLPVARLAGPELEVRLLVDHRERLIGQRTALINDLRWQLHDLWPETEIPPRALIRVGWQDRVAGRLARAEQSARVRIARDELRRIRELTRAINDLERELAALTAALAPQLRAERGCGALTAAKLIGEIAGADRFATDAKLARTAGSAPIPASSGQTQRHRLDRGGNRQLNSALHRLAITKGRLDPETIAYLARKQAEGKTRREAIRCLKRHLARRVWHLLQPDPATTIPTSTPRRRTRSVTIHCNTPTGTLDLT

SEQ ID NO: 96406 - protein, 346 aa, unidentified
MTIVEAARGVTGGVDTHLDVHVAAALDPLGTLLGTERFDTNLAGYKALLSWLEGFGALTKVGVEGTGSYGAGLARFLRRADVAVIEVDRPNRAERRRSGKSDPLDAVEAARAALGGRAQSIAKTKDGAIEAVRVLVVAKRSARGARIKALVQMRHLVITAPDQLRDRLKGLTVCALVSEASRLRPSRTGEAVMAAHKAALCSLARRVQGLEDELADLDKRIGALVEAAAPQLLARFGVGPDTAAALLVSAGDNPERLHSEAAWAHLCGVAPIPASSGKSNRHRLDRGGDRQANSALWRIVMVRIAHDPDTAAYFERKVKEGRSKRDVIRLLKRYVARELYRYLPRG

SEQ ID NO: 96407 - protein, 405 aa, unidentified
MNAVGIDVSKGKSTVTIRKPGDVVLMSPCDIPHTQSAINDLIKQIKSLEGETKVCMEHTGRYYEPVATWLSDAGIFVSAVNPILIRDFGDDSLRTPKTDKADSKKIARYTLDRWAKLKQYGIMDKTRNQLKTMNRQFGFYMAQKTAMKNNLIALIDQTYPGANDFFDSPARNDGSQKWVDFIHTYWHVDCVRSKSLNAFTEHYQNWCKRKNYNFSAEKAAKIYQISSDLIAVFPKNDITKMLIWQAVALLNTASKTVESLRSKMNELASTLPEYPVVMDMNGVGATLGPQLIAEIGDVSRFTHREALTAFAGVDPGKNDSGKHIQNSVRTSKKGSPYLRKTLFQIMDSLIKRSPVDDPVYAFMDKKRSEGKPYYVNMIAGANKFLRIYYGRVREYLSNLSNNETI

SEQ ID NO: 96408 - protein, 366 aa, unidentified
MKTSVTYVGLDVHKDTVVVAMARGRQPAVLVGTVFNDWLTLAKVLDELGSQPRLRVCYEAGPTGYGLARRLNESGICCMVVAPSLIPVQSGRRVKTDRRDARQLADLLRARLLTEVKIPAAETEAMRDLERARDDAKNAERTVRHQLDKFLLRHGRSWSRTKWTRLHWSWIRQQAFPAEASCRVVADSIRAVEEATARVERLEKDIEELVETWSLAPLVRALQALRGVRLITAVILAAEIGDFARFATPRQLMAYLGQVPSEDSSGQRRRQGRITRTGNGHARRILTEAAWNYRFYPRPSRAIRKRRESLPRQIVAIAEKAEQRLSHRYRHLVNKGKSSPKAVTAVARELAGFVWAIAREVRSQAA

SEQ ID NO: 96409 - protein, 371 aa, unidentified
MAQSTPLYDGLDVHKDSIAVAHAQGESAAPPVFVGEIGPRQADLDKLIRRLEAKTPALVFAYEAGPCGYGLYRRLTAQGFACQVVAPSLIPKKPGDKVKTDRRDAVELARLLRSGDLTGVYVPTVDDEAVRDLVRARDAARLTLKNAKLRLKGFLLRLGRHYVGRADWNPAHPRDLAKVVCPTAAQQIVVQESVRAVDEQVDRLHRLEAELLARAPAWRLYPVVQALQALRGVQWLVAITVVAELGDLTRFDSPRQLSAFVGLIPSEYSSGAARRQGAITKAGNGRARRALIEGAWAYRHPAKVSAHIQTRIDALPKPIQAIGWKAQVRLCKRFRRLTARGKHPNVAVTAIARELVAFMWAIAKEVPITTT

SEQ ID NO: 96410 - protein, 399 aa, unidentified
MSERKSLELRVSVDVGCRRHSVAVGLSDGQVLEEFEIRHRREGFQEFFSRIEKHQKAQGCKVAVAMEGYNGYARPLDSLVRQRGYRLYNINNLKLARFKEIFPGAAKKDRIDARKGLELFQLRDHLPLAKDVLQEVTGTPKENEILKRLTRRRRRLVNERVRVVNNLQADLQAVCPGLLEITTEASNQWFLNFVISGDTILQLARLGKSTLLKIPAVGRKYASLIQQWQKRAHFSEEAQWVSEMIQEDARRCLELDERIKTLETKIKEVAKSSKIANTLLSIPGFGAVCTSELAGEIGTVERFSKEGSLALYLGMSMLDNSSGKYQGTKQPKHVNTRAKAAMMTAVDRHRKYVPESQKYYEKKRTEGKTHNQAIRALGRHLCRIIYQMLKEQREYRVRC

SEQ ID NO: 96411 - protein, 435 aa, unidentified
MRLTEYGRDPHMRKEYVCQPDLLLVGVDVSKAKHNACMGTQTTVSGRKFEFTHTREGFTRFEQTLRTHMVKNRRQRILIAMEPSGIYWQALYERLNSCGYEVCLVHCQAVRNNRKTMQDGTSKTDATDAASVFDLLRQGKFFLPVVRDPALTAAYRLMRRHMALKKRGSQLRNQLRAAIHLAFPELNPLIQDLTQPTALRFLQVNPTPESILRTGQRRFLEQWQPRCRCGQWPREKFQHIYDLATASIGLKDPYCINEFEIQALAQDLADALAKQQLWLDQAIALLAPRRDFQQLLQLPRIGKPTAAAILTAIGDVRAYSNGKQLVKLAGLDVRRFESGTSIHKLPQISHVGSAYLRHWLYHYALRLVAHEPHFQNYYQRRKDHSPGKGAGQRALLAVCDKTIRMIYRILTDHAPYDPNKDQSIAEYYAAQRKAA

SEQ ID NO: 96412 - protein, 424 aa, unidentified
MKVKIVYPEFKLENKLCVAFDVGKSHLDSYSPFSNGPLQMIMNDRVRNKSNAVRGALLEYRKLASENGLEGVHVVCEPTGGFERTLLRIAHELGMTTAYVNGESVSKLRVVRQNDTGKTDQLDPRIIHLAATQGRQLQVRDLGDGYAELRELNVAYDQVCDQATVLRNCIHDALYRLFPDLNMSRSKLFGSCGEALVKAFGADPVSIARLSLPEFTRRMKSHARRVRTDTLNRIHSDAAINARHVVPTVVREVQRDHLRDLYDRWRRLEDRKKMLKEQMADTFRSLPEATSLTFPGVSDFMMARVIGETGPLSDYSSHRRLLRMAGLNIRQRTSGKYKGKDMISKKGRARLRKILYQVVMLCLIKPGRIYSMEYVRKKGEADASLPVIVALMRKFLRAVFGLHRSARAFDAGRLATCESQLKTA

SEQ ID NO: 96413 - protein, 391 aa, unidentified
MIYIGIDVAKNKHDCFITNSDGEILFKPFTIPNNLEGFDDLYHKIESTTNDSSQIKVGLEATGHYNYNLLGYLIDKGLPTYVINPLHTNLYRKSLSLRQTKTDKVDARTIASMLMSDVNLKSYSDTFYHNEELKSLTRYRFDKVKERAKLKTSVSRLVCILFPELEKLVPTLHIASVYALLSEFPSAKHVATAHLTRLTNLLSESSKGRYGKDTAITFRDAARASIGSNMPAKSLELKHTIKLIQELDSEIDEIENEIKIIMDEINSPILSIPGINYRMGAMIIAEIGDFNRFDSPDKILAYAGFSPSTYQSGQLDGAYAHMEKRGSRYLRYALYNATKYVCHWDPTFAAYLAKKRAEGKHYNVAISHAVKKLVRVIYHLEKTKQQYIKVA

SEQ ID NO: 96414 - protein, 341 aa, unidentified
MDYCGIDLHAEYSQICILDEGGEVMETSRVRTSRKALERFFARDRMRVAMEAGGTSPWVSSLLDSLGHEVVVCSPRRVRLIAESSLKNDKVDAEVLARLVRLDPEFLKPIQHRSEQAQLLRANLKVRSAMVEARTKWINTIRGLLRSFGYNVSGKVAHTFVERVNRMKLPDELSAVITPLLEQLDLLTGEIERRNEHLEEMVKELPEVEHLREIPGVGPVVATYFVLTIDDPDRFKNSRDVASFFGLRPSMRESASVSQFGRITKEGDPEMRRLLVQAAHALLRTRADSQLKQWALALAERKGKSKAVVALARKLAVLMHRLWVTGEVYQAFPQQEASQAA

SEQ ID NO: 96415 - protein, 342 aa, unidentified
MQISTIGLDIAKNVFQVHGIDAAEKVVVRKRLRRRQVLEFFKALPPCLIGMEACATAHYWARELTKLGHRVRLMPAKDVKAYVKRNKNDAADAEAICEAVRRPTMRFVRIKSAEQQGQLMQHRTRDVLIRQRTQIINALRAHLAELGLVAAQGNAGVNELRAIVTDEQDTRLPIDARASVIVLAAQLEALESVIGAIEKRIKMQHRSSEASQRVEAIPGIGVIGASAIVATVADPTIFRSGRDFAAWIGLVPRQDSTGGKQKLGPISKQGDRYLRRILVVGAIAVLRRAQENPGKYPWLTQLLARRPFKVVAVALANKMARMAWALLAHGGTYRAPELAETA

SEQ ID NO: 96416 - protein, 423 aa, unidentified
MRSIGLDIHRDFMEVAIAEGGEIRSGPRVAMDPQSLELFAGSLDRGDQVALEVSGNAWEAVRLIRPHVGRIVAASPTDTGMRQARAKTDRLDARALARLLDAGQLECVWVPDEATQAMRRRLRRRAQLVVTKSRAKNEVHAALMRRLVPKPAFSDLFGEAGRRWLEELELPAAERESVDSAMRQIAFCEAEIAAIEKVVAEQALASAEIRRLMSVPGVGVITAAAFMAAVGDIRRFASPKKLVGYLGLDPIVRQSGSAEASYGRISKQGSAAGRYALVEASWSVVKAPGPLRAFYERTRGRRGASVAIVATARKLACLFWTLLTRGEDYAYGQPSLRQRKLRQLELRAGAPKHSRSGAGVWKANAAVRDAERKMAEQAESAYRRNVAEFKRVEALRAKQRKEAEKAQAEQHEEGAGATSGRAS

SEQ ID NO: 96417 - protein, 388 aa, unidentified
MIYVGIDIAKLNHFAAAISSDGEILLEPFKFTNDYDGFYLLLSKLAPLDQNSIIIGLESTAHYGDNLVRFLISKDFKVCVLNPIQTSSMRKNNVRKTKTDKVDTFVIAKTLMMQDSLRFMTLDDLDYIELKELGRFRQKLVKQRTRLKIQLTSYVDQVFPELQYFFKSGLHQNSVYALLKEAPTPTAIASMHMTHLAHLLEVASHGHFGKEKARELRVLAQKSVGVNDSSLSIQITHTIEQIELLDSQLFHTELEMANLVTCLHSVIMTIPGIGFINGGMILGEIGDIHRFSEPKKLLAFAGLDPSVHQSGNFQAQRTRMSKRGSRVLRYALINAAHNVVKNNATFKAYYDAKRAEGRTHYNALGHCAGKLVRVIWKMLTDEVEFNLE

SEQ ID NO: 96418 - protein, 433 aa, unidentified
MPTTHPYDLVIGLDRSDRKADLNLIDTRTGNAQKQSVATSPEDLHDWLARLRQDHPQASVAICLEQPAANLILFLETYSWITLYAINPISLQKFRETFVTSRAKDDGKDAEYLAQLLLNHHDKLKAWQPDDTQTRQLQQLVSHRRAVVDERTGLTNRLKALLKQYFPQALDLCGEDLWRPLATAFLLKWPTLQSLKKARKESLKEFYYLQGSRSQKLIEQRLERIEKAVPLSDEFALLQSYTLRVQLICQELQLLLKTIEQFDQEIANVFQQHPDREIFEALPGAGPVLAPRLLASMGSERERYARPENLQCFSGVAPVTQQSGGKCHIHHRYLCPKFLRQSVHEYAKESILHSRWAAAYYGQQRNKGCAHHTAVRALAYKWQRVIWKCWQTRTIYKEEIYEAALKKNKSPLSGLLDQIELGKSPVKTRAKKS

SEQ ID NO: 96419 - protein, 422 aa, unidentified
MSYCPVAGIDVSKQFSDMCILSPDNKIFAQEKIYHDETSINRANALLQKAERLFFSKPVIVMESTSHYHLILFQFFSEHGYDVIVVNPLQSNSMKDFSIRKRKTDRVDAFKLAMMYRTKTLRPSQIPQTATRALRQLCRHRAELLNDVSSYKNRLTALLDQTFPGYDKVFSDVGGVTSCAVLVRFPTPTILLVEEESELVDVIAAASKAGYNFAKKNAGLLISAAQKAQTLGIHSCADETLIVCTIQMLRTLSESVLQIETAIDNLLAQIKEMRNNVSLLQSIPGVGSHSAALLLGEIGDILLFKKPKQLAAYFGLDPTERQSGSFRGTKNKLSKRGSPYARAALHMGVVNSICKRGKDSAANPVLLSYYEKKCKNKPAKVAQAASMHKLVFIVFAVLRDQKPFELKTPEQHAVEQGFVKAA

SEQ ID NO: 96420 - protein, 368 aa, unidentified
MTEYLGFDLHSKDTVYLGQEPSGDVTAQGKVSTTVKGICGLVEALKILQGTKIGLETGPQAMWVARLLSGLGMQPVVIDAREVRQKARRIGQKCDRRDAFEICDGLRRGIYTSIVYVPGPEIQRLRQILSERRYFVRVCTSQVNRAKSALRSVGLGQEAKTLTTLDAWHKLLRRPAVAWVRETLARHRDVWRVAREKVLALEGELREALKPFEETVRRLQTTPGVGMITAATYLAVIATPQRFADSGRVVSYIGLVPSTYDTGCVQRHGHITKRGSCELRAMLCEAAHHAARPQHPLNPYWVRVCAKQGYKRAVVAVAQRLGRILYAMWRKEEDFDATKLNVIEKQHTRTRTYYWQIKKPGQPLVVIG

SEQ ID NO: 96421 - protein, 389 aa, unidentified
MEARTVNNLPPAASHDDDAVRCVLAVELSKKSWIVAVNTPLSDKISRLTLKPCDGKELLDLCERIRTRVARETKQRVEIVSCYEAGYDGFWLHRLLEAHGIRNYVIDPASLQVDRRARRKTDRVDAERLLRSLMAYLRGEPKVWSVVRVPSVAEEDDRRLHRERGRLINERIQHVNRIKGLLAIHGIYDYQPLRRDRMQPLDRLRTADGRTLPPRLKAEILRELQRLELVIGMIKAIEAERDAIASAKAQTEHTSAKKMQDLAKIKCIGPEFASTLVGEVFYRSFDNRKQLASYVGLTPAHFQSGATCHDQGISKAGNAKARTVMIELAWLWLRHQPDSPLSVWFRGRVGKLKGRIRRITIVAVARKLLIALWRYLETGLVPDGAALKL

SEQ ID NO: 96422 - protein, 457 aa, unidentified
MGKGSGGNGMTRGDRRRNARRERLRSLLPRGGAVIGIDLGEDKQAIAVVDHDVRVLARKTARVKAFRLGEALDWAVAQARAKGFTSVAVACEPTGARWMQVQRLCAERGLALVCIQPLVSHIAREQQDFTAHKTDEADCVMIARLAIELHCYVPEVLDETWAHLRHLGRRRAQLITAGTASVQRIADFLSVAWPVVTGACVHPFDSVTWLAAVQVVTSRCGGDPARLAGLGPEEFTGLARSAVGGWGGQRPVAAICRRVLAAAGDAGGAVAWSRRALFRRVADELGDLARTRAQLRAAEAGMVTVLGELGLSRLGDIPGLTALGAASILAEAGDPRRYDSSSSMVKHAGLAPAGNESGTFAGQAHISRRGRPGLRLAAWRAIWPLLRHNPVMAARYAALTGAAALAGARTRQARAAAAARARVACAASLLRWIYFITVHDAAWDAAAASGGRHLEAA

SEQ ID NO: 96423 - protein, 359 aa, unidentified
MCQSRFLGKKNKEEPMEKHTVVGVDIAKVVFEVAVSKEPGRVADCRRLGRGTFLVFLAQVPRGTVVMEACGSAHYWGRRIQELGHEVVLLPPHQVRPYVTRNKTDRTDAKGILEAYRNADIHPVPVKSVSQQVLVCLHRFRSSWVSSRTAQVNTLRGLLRELGFVIPEGIEKVLPQVRVLIEDADSGIPDGLRAVLATACDEIQALGESIRMTERQLEAVAEQTPLVERLQSIPGIGLMTSTALVAFIGDVERFPSGRHFASYLGLTPREYSSGLKRRLGRISKRGDSYIRMLLIHGARSVLCHAKKAKEHDRLRTWALALERRAKHNKAAVALANKLARIAWAVWKRGRDFESRPNAA

SEQ ID NO: 96424 - protein, 316 aa, unidentified
MQTPLVVVGIDISKARLDVSIRPSGARTSVPYDATGLTTVLTQLTQVQPVRIVVEATGGLERPLVRALVDGALPVIVVNPRQVRDFAKATGQLAKTDALDAQVLARFAEVIQPALRAIPDAQTQELAALLARRRQGLAMHGAEQHRRDRAPARVRKRIEAHLRGLQAELARLDEELDDRIQQSPVWREREELLQRVPGVGPVMSRTVVAELPELGPLNRKQIAALVGVAPFNRDSGRLRGRRAIWGGRAPVRTARYMATLVATRWNPVIRVFYQRLRTAGKAPKVALVAAMRKLLTILNAMVHAGTLWQPVVAPEA

SEQ ID NO: 96425 - protein, 456 aa, unidentified
MQKKYLKSKNEKKRVSINQAWPLINPRAAGVDLGAREHWVAVPEDCCAQAVRPFGTFTRDLEALADWLQQCQVTSVAMEATGVYWIPLFQILERRGFQVLLVNARQIKNVSGRKSDVADCRWIQRLHAYGLLGASFRPADPYCVVRSYLRYRDELVAARSVQTQHMQKALQQMNVQLTQVLSDVNGVSGLAIIGAILQGQRDPLKLAALVDRRVKTSLDKIARALVGDYRAEHLFVLKIACELYHTYEAKIADCDQELARELARLPDQVDVAAQPLPAKIGKTQIAEEMRLGLYRKLGVDLTAVEGFGPLVGLTVLSEVGPDLTKFKTEKQFASWLGLCPDNRVSGGRVLSCRTRRVVNRLSDILRLAATTLERSQTGLGAYYRRMKAKLGAAEGVTATAHKLARLLYRLLKHGEAYVRQGLADYEKKYADRKLKALKKTAASIGFDLVQRQAVTP

SEQ ID NO: 96426 - protein, 412 aa, unidentified
MHKEVLMQVYIGIDWSEQKHDVVFMNTAGATLAQFEIPHSAEGFLQFDETRWRMKLGTKDCVVGLETAHNLLIDFLWSRGYSKVYVVPPTTVKSNRKRFSSSAARSDPGDAIVIADSLRTDHGRLQPWRPDSLPTRKIQAKVSLINHLTKSARRLTNRLRAVLLRYYPAVLNMFSSWPTKIALEFVRAFPTPEEAENLSPDEFQRFARQHRYPNPKRLPACFARLQAPQPEATQDTVEIYKDEAVLLATMLLNVIRVKQTALRELKSIFREHPDHAIFDSLPGAGDFLAPALLAKFGDDRKRFPTPASVQALAGTCPVTDQSGKRRIIKFRRACDREFRAITQQWSIASLERSVWANAYWQRTRTRCRYSSLAYRRLANRWLAIAWKLWQTGQAYDEAYHLQQRALRSKRSR

SEQ ID NO: 96427 - protein, 339 aa, unidentified
MRKLCVGIDVAKSKFDVMYTIDGENYFGYSTFPNDKKGIKKFVKQSEKFLKQEKCEQLHFCMEATGIYHCELCEYLQNSAHKVSVVNPVRTKSFSKSLQLRTKNDKVDSQMIAHYTFLHNPTQTPKVPKELQHFRRLVKFKETLVEDRAKELMRIKSALDSDVKQLINKRINFLEKQIKETMYKIENIVKENEFLSRNFNLLITVEGINFNVAWRILAELNYETINDITPKSLVAHAGLSPRENSSGDKYGKVSISKIGKSDLRKIMYMPALSCIRHDNYFTSFYLHLVEKGKAKKVAITAVMRKMILTAMGVLRNQEPFDPNWSKKVQAKYQEKIKVA

SEQ ID NO: 96428 - protein, 412 aa, unidentified
MDIYGGIDWAEDHHDIALVNRDGQLLARRRISDDAAGLAQLLALLAEHGDTAGDPVPVAIETPRGLLVACLRATGRAVYPINPMAVARYRDRHSVAGRKSDHGDAVVLANVLRTDIAMHRPLPADTELAQAIAVLARAQQDAVWDRTQAHNRLRSHLREYFPGFLAAFASAKGGIMRPEARTILAAAPTPAGAAKLTLTQLRGLLKRAGRSRSLDAEATRLRDAFRVPQMRQLPLVEQAMGRQAIALLGQLDAACTSAGDLEQAVTESFNQHPDAGIITSFPGLGPLTGARVLAETGDDRSRFQDAKGLKAYAGAAPITRASGKSRSVTHRRVKNNRLASAGYIWAFSALTASPGARAHYDRRKDAGDRHAAAQRNLFGRMLGCLWHCLTTGQEYDETIAFPVPAKKLPQAA

SEQ ID NO: 96429 - protein, 442 aa, unidentified
MSRKSSKQRFTVVHPDCAAIDVGGREHFVAVDPRHDDPVQSFTSFTDDLHKMADWLERLSIKVVAMESTGVYWIPIYEILSERGFDVYLVNARTTRQITGRKSDVLDCQWIWQLMTHGLLRGAFRPDDLTCCVRSLVRQRASKVKDQAQTLNRIQKALSQMNIQLANVISDISGVTGMKILRAIVGGERDPVQLAEFTDRRIKAGKEAVARSLHGNWRREHVHALTQELAAYDFLEQQIAECDAAITTALEQLPVLESKPQESNKALRSPHRSGVQQTTLHQALWKVLGIDLTAIPTIGVDTALVLAGEIGSDLSRFPSSQHFCSWLGLAPPTRISGGHRLAGGGPKIINRAAQALKQAASNARNDKGFIGASHRARLTRMDTSCAIKATAHQLARLVYNLLTQKKAYVEKGLEEFEARSQERQLRALHRKARKMGYQVVAV

SEQ ID NO: 96430 - protein, 337 aa, unidentified
MVYGAIDLHMRYSQVRIITAEGRVIREGRVATTADRLVAVFAPQGPLRILLESGTESEWVAQALEAAGHTVIVADPNFAPMYGEVRRAVKTDGRDVAALAEANRRGWYRPAHRASAEQRARRQVLCARRQLVQMRSGTISVMRALLRQCGYRAGTGGSAAFVTRLARLALPAPLTETLAPLARTLTALTTEIAALDRQLAVTAQQDPIARRLQTVPGVGPVVALTYRAFVDDVRRFPSAAHVSAAIGLVPREASSAERRHRGHITKAGPSELRSLLVQAAWVCWRSCRRGPLRQWTDQLAARRGKRIAVVALARRLSRILFAIWRDDSVFEGSRVAA

SEQ ID NO: 96431 - protein, 438 aa, unidentified
MNTTESIKKSIAPDEFIAWVGLDWADNEHKISMCAVATGQVEASVLKHSSEALQQWLAGLEKRYGGKKVAVILEQSRGAVLYALMSSDFIVLYPINPQSLASYRKALYPSGAKDDPVDGALLREMVQKNPERFRQWIPDDPDTRSLRLLVEGRRKLVKQMTRLTNQLTSQLKTFYPQALEWAGELNSRQACDFLEEWPTLEAVQEARPARLRKFYMRYGRPRPETINRRVEQIKEATPLTRDPAAVLAGSTMVRAIAMQIRPLIAAIENYDDEIKRLFQKHPDRLIFESLPGAGPVLAPRLLAAFGADRERWGSAAEIQKLSGIAPVTERSGKQCWVHWRLACPKFVRQTFHEFAGSSIQWCNWAKGYYQDLRDRGKEHHAALRALAYKWIRVLFACWKNRTPYDNDVFLNALARRGSPLSQRAATVVPTGRAKAQRA

SEQ ID NO: 96432 - protein, 345 aa, unidentified
METMYYIGLDVHKRTVSYCVKDGRGVIHGEGTTPATRLDLDRWMKTLPQPWTAAMEATVFTGWIYDHLQPHAAALKVAHPLMLRAIAAAKKKNDRIDAKKICDCLRCDFLPECYMASTAIRERRRTLRYRNLLVRQMVQMKNKISMLLMEAGVSYNKQKLHKAGYFRELLVTNPDINEGLGSLLRVCRETVVRLQRTESALVRSLERDSLLVERVERLMTIPAVGPITALTWALEVGDVQRFSSIKKAISYCGLCGAEKSSGSTVQRTPLSKQRNKHLQTTLIEAAKMAPRNSAELAMLYDKEKQKGNANRATLAVARKLVAYLMAVDRGQRNFQVAETSNCIAA

SEQ ID NO: 96433 - protein, 399 aa, unidentified
MDRNRTVAGLDIHKDSIYLCIMRHDETIIFENKYGVLTPDLRQMCNDMVERGVTEAAMESTAVYWVPVWNELCESMKLKLVNPYFIKQLPGRKSDVKDAQWIAECLLKNLIKGSFVPEPIVQDMRKLNRRIMDLNEDMTYNCNKLDAAMQRCGFRLSNYVNTIKSRSYQKVLGAIIGGTARPDELVKMVHGRTINKHGRDTIKAAVTGTFSEIDITIFRQIKEVIDMIERQIEECQKELTALCEQHFPEQFRRLQTIPGVKERAATAIIAETGVDMKMFATAACLVGWCGLKPRNDVSNGRYKSRKVTHGNRYLRQILIEIAWGASRTRNCFFSYFSYIQTTVKKKSKMKIQVAIARKILVAIWHMLSKEQDFIDIYLKRLEENRKMEEQLKSLESKMA

SEQ ID NO: 96434 - protein, 326 aa, unidentified
MTASHSADNTFIGIDVGKANLDVQWHRGDSAQYANRPDAIAELVQRLQAGSSVTRIVMEPTGGYEKPLVAALRRAQLPVELVHTSRFKGYRTMVGVRAKSDTSDARLLAAYAAAPDEIRGRKADRVELPEDAIREELRELASRRDQLKDMIHAESCRLAITRHATLRQSILAHLETLRAEDKQMLQMMRALVRQRLDLRRDQQLLRTIKGLGTVSALTLIAAVPELGHIDNKQAAALIGVAPFVHKSGTLTAPARIAGGRAAVRRILYMAAVTASRHNPVLKSFYERLIAKGKPAKLALVALMRRLVVFANAVLRSGQPWKGAAIA

SEQ ID NO: 96435 - protein, 511 aa, unidentified
MGCRDSDIGDRPAASWRIPFERLSVPFPPLSATPCANLTMEEAAMMHNSTRERKEKPARLSVSLLERIQPDAAGIDCGQNSHFVAVPPDRDPQPVREFRTFTADLHRLADWLVQCGVKTVAMESTGVYWIPLYEILEQRGFQVVLVNARDVHNVPGRKSDVKDCEWLRELHSVGLLRASFRPAAAIVPLRSFMRQRETLVEEAATRIQRMQKALTEMNLKLHTVLTDLTGQTGLRIVRSILEGDRDPEQLAAHRNYRCHASHAEIVAALTGNYRAEHLFALRQNFAAYEFLLKQIAECDTEIERLLTTLAAQQPPPSAPLPVARRKRASKHQPQFDIRGPLHRLTGGTDLSQIDSIGPQAALQLIGEIGTDMTRWPTEKHFTSWLALAPNNKISGGRLLSSRTPPSANRAAVILRRCAMSLTKTSTALGAFYRRLAMRVGKAKALTATARKLAVLVYRVLSSKLVYNDPGADAYHQLNRTRELKSLRKRAKLFGFDLLDRATGEVLVNPVF

SEQ ID NO: 96436 - protein, 346 aa, unidentified
MPQPNDLSRSLVALDQDSTIIAVVELSQSSWLVAGVLPGIERQPQKKLEPSAERLLGLLHRWRDEAVRAGKKITRIALAFEAGRDGFWLARWLNARGVEAHVIHPSSVAVSREHRRAKTDRLDTELLKRGFLGWLRGERGHCSMARVPTIAEEDAKRPNRERECLVGERTRIVNRMKATLARLGVRNFKPTLRKAAERLATVHTPEGTPLPRNVLAELQRDMARLGFVVSQIREIEQARQKRLEQETETGPHAMVRQVARVIGIGIETADMLVHEVLSRPMRDRKAVARYAGLTGSPDESGARRREQGLARAGNARVRRGMIQCPRRSASCRKLTLLAPVTRRMSP

SEQ ID NO: 96437 - protein, 406 aa, unidentified
MKQIVSVGIDVSKGKSTVCAMIHPNTIIKESFEVLHTVEEMSMLADYIGSLDGEIRIVMESTGHYHLPVAQFLYQKGFFICVENAYIIRQFSRIMLHGAKTDPLDAKKLAKYGLAYWSELKPYKFHPSCYTELSLLSKQYQTYIKLLIAAKQNVIHLMDEMLPGFKEALDTASSVQFSKVKYVDFAKEFYHVDMIKSMGKEIFRENYKQWCKEKGYRFQSEKADELFHLAEDGIPTLPTEFPSTRLCMEVATEQVSQLGYALEQILSQMQNLAKTLPEYQTIRQMGGIGEKLCVRFIADIGDVRRFHNGKALVAYAGIDAPPYQSGQYTGTKRRISKRGNSALRKTGYEVMKSLKSHPPKTDTRVYDFIIKKENEGKSKKQAKIAGLNKFLQIYYARVMEIYKNIV

SEQ ID NO: 96438 - protein, 391 aa, unidentified
MTSSHRIDTLAAGDKDGTLYVAFELSKSKWLIGLVVSGESKLSRHQVSGGDTAAVWQLISKKRAYAEKKLGRAVRVVSCYEAGYDGFWLARRLGEQGIDNRVLDPSSIEMPRRARQAKTDRLDLERLMRVLIRHDGGEPRVCSVVHPPSPEQEDARRLSRERDRLIGERTGHGNRIKGLLHGQGVREVEPRRKDFLERLAQARTGDGRVLPARLVAEIKREHARLVLLGEQLAEVEGQMRAEREAAAPDSRARQVNQLLGLKGIGAVGGETLVNEVFWRDFQNRRQVGAYFGLVGTPFDSGQSSREQGISKSGNARARTLAIELSWLWLRYQPDSALSLWFKQRVGDQKGRVKRVAIVAMARKLMVALWRFLTLGVVPDNAIVRAAAPAGR

SEQ ID NO: 96439 - protein, 348 aa, unidentified
MRIIGCDLHARQQTLAMLETTTGETANLILLHEGNQVREFYSSLPQPVLVGLEAGGSMPWFLNLMEELGIECRVGHPAQIRAAEPRKQKHDRRDAELILKLLAENRFPAIWLPSRELLDLRALLLHRHQWVRMRTRIQNALQAIALANGLRRGPSLWSKDGQEKIAFLPLMPHTACRRSALQVMYRNIQSQIEKLTQQVAEQAENRYAAQRLMTHPGVGPVTALATEVFLGDPQRFADAKALASYVGIIPREYSSGGQQRLGGITKQGSPLLRFLWGEAGAHAVRRDPELKRFYRRKLVQKGLGKARVAVARKLGIRLWIMLRDEIDYPEFCRRGQMQVSGAACGGDA

SEQ ID NO: 96440 - protein, 319 aa, unidentified
MTSKGMEKMNPSTIGVDISKDTLDAFRLRDGASRRFANDKAGHKALIKWIGKQEVRVVFEPTGAYHRAFELALDRAGLPLVKVNPRQARRFAEATGQLAKTDHLDAALLARMGAVLGLEPRPVASEVLGGLKELHIARLALVKDRTAAKNRSKILTSPLLKQLNAERLGHIEQQIEAIEAQIMAHIEADESFARRFAILISIPGISQTTACALLIDMPELGSLDAKEAASLAGLAPVARQSGRWTGRAFIRGGRSGVRQALYMPALVAARFNQDLKAKYEQLVKAGKPAKVALIALMRKLVVLANALIKNNRKWAENAP

SEQ ID NO: 96441 - protein, 408 aa, unidentified
MGRAAEVVAPSSSLRTDGGCPVAQVNDLSRSLTAFDPISTLVVVVEMSKASWLVSGVVPGVERQPLKKLEPDATALLRLIERWRNEAVRAGRPISRIALAYEAGRDGFWLARWLIARGIEAHVIHSASVAVSRERKRAKTDRLDAAMLMRVFLGWLRGERGHCGMVAIPTMEEEDARRPSRERESLVDERSRITNRMKSALARLGIRGFKPHLRKAPERLAGLRTAEGTGLPANIIEEFRRDMARLALVREQISSIEKTRAERLERAPDTGPHAMVRLLARVIGIGIETADMLVREILSRKLRDRRAVARYAGLTGSPDESGLKRREKGLAKAGNARVRRGLIQLAWRFLMFQKDSALAQWYRTRTEGPSGARKTTMIVALARKLLIALWRLVTTGEVPDGVELRPAA

SEQ ID NO: 96442 - protein, 389 aa, unidentified
MKIYVGIDIAKLNHFAAAISSDGEILLEPFKFTNDADGFQLLVSKLESFDKNSIIIGLESTAHYGDNLVRYLVAEFYQVCVLNPIKTCQMRKNNVRKTKTDKVDTFVIAKTLMMQDDLRFITFFDLDMMDLKALGRFRQKTIKQRTRLKIQLTTYVDQVFPEIQYFFKSGLHQHAVYALLKEAPSPKEIASMHMTHLANLLKVNSHGHFTKEQAKELRVLAQKSVGANDSAISIQITQTIQQIELLDSQLEKIEAEMTDIMKFNDSVIMTIPGIGYINGGMILGEIGDIHRFSNPNKLLAFAGLDPSVYQSGNFQAKTTRMSKRGSRVLRYALVNAAWNVVRNNATFKAYYDAKRAEGRSHYNALGHCAGKLVRVIWKMLTDEVEFNLE

SEQ ID NO: 96443 - protein, 346 aa, unidentified
MKILALDLSKFKSVGCVYEAESGKHSYRRVNTRPVELHDLLVELEPDRVVIEVSSVSGWVSDLVRALGIELQVVNTNGEAWRWRSVKQKHDQADALKLARLSAMNQLELVHVPAPEIRQWRAVIKYRQHLVGRRTDIKNHVRELLVREGVILARGRKCWSQEGCAGLEEKARSWDEVGISELWRGELQSELQQLQVIQERIREVEAKLETLAAADDRVALLRTIPGVGPRLAEAMVALIDDPHRFKRARDVGAYLGLVPRQYQSGEMNRLCRITKRGSKLLRSLLVEVSWVSLRYNPWLRSLYERMNRGSKTRKKIAIVAVARHLAIYCWAMLRDGTTWRQPCTTQ

SEQ ID NO: 96444 - protein, 448 aa, unidentified
MVRRAKPAGLPIINPRAGAIDIGSRFHVVAVPPDVTDEPVQTFQAFTGDLQRMAQWLKSIDVTTVAMESTGVYWVPVYEVLESAGIEVVVANARDARSVPGRKSDVNDAQWLQRLHACGLLRPSFRPDREIAALRAYLRLRERHLDYAAAHIQHVQKALTFMNLQLHHVVTDVSGVTGMKIVRAIVAGERDAKALAAMRDVRCKATAETIEGALQGNYQPEHVFALKQALELHDFYQRQVEQCDVQIEAALTRLKANKGTPSEPLPAPRHKTKAPNAVAFDVRPSLYQIAGTDLTQIHGIGPYLALRLVSECGTDLSRWPTVKHFTSWLSLSPGCKISGGKVLSSRTRKTANPMAAHLRLAAVTVGRTSTALGAFYRRLAARIGKAKAVTATARKIAVLFYNTMRFGIDYRDPGADYYEAAYRERVIKQLHRRAATFGFRLATIDSVS

SEQ ID NO: 96445 - protein, 454 aa, unidentified
MPKKASSEKTSTGKKLKVVNPNAAGIDIAATEMQVCVPDDRDTNCNRCFGCFTQDLEAIAKWLADCHIETVAMESTGVYWLPLYFKLKEHGVDVVLVNARDVKNLSGRKTDEADAEWLMLLHSYGLLKCSFQPENEARAIRNLTRHRSNLLQSSSREALHMQKAMEQMNLKLGNVISDLLGKSGMAIIKSIIDGNHNPTELAMLAEDNCKATKEEIAKSLEGTWSEDHLFELEQAYDLYNFIQGQIRQCDKQIEMHLIRYRAQLAPPSDDNPPRCKKKIGKKNAVEFDVEKYAFGIWKVNAMAIPGMSAISLLQLIGELGHNFTEKFDSCHSFCSWLNLVPNNKISGGKLLSSKVPKRTNTCGQIFRLCANSLKRNKTTLGYYFRRIQSRCGYSQAIVATAHKIAKIFYTMIKTHMEYDESKTGVNERALLERKIIMTQRRLDKLNGQLSVAIG

SEQ ID NO: 96446 - protein, 430 aa, unidentified
MLSERKKVCGIDPHKNMCAAVVIKGNPIETLGKIKFENNRRGLDKLLHLLSETDCNTVVIETTNTFWQGISSALMHMGYTVVPVAPQTVPKKREKDDFHDASWLAITYMDNRVTQAYFATPKIQKLRSLLRTRYTLIKIRTMLKNRLNAELSRAGLNLKGVVSDIFGKEGKKILQTLAEEGIEGIKELANSEDGTSHKKNKYAMLLDVLSVAFTENFNAQVITILLLGTDNFEKLIERIEGLVNELIHSDMELLSLVNLLMTIPGVGFITAATIVAEVGDFTRFTSGKKIAKWAGLTPRMRESGGKRYYGRITRRGSPFVRWILYEAATTIAKLKKPQKLYTFYKGIAIRRGTKIAAVALARKLLVVMHAMVMQGRKYDESDAYRGTYERKMYLMELNYKKYREGLNQIKNELSKLRDTELTLIDERQKT

SEQ ID NO: 96447 - protein, 338 aa, unidentified
MGNVTTVGIDLAKNVFSLHGVDASGVVVLRKTVSRARLMEIVAQQPACLIGLEACSGAHEWARRFKELGHSVKLMAPRFVAPYRKNGKNDGNDAEAICEAVSRPSMRFVPIKTLEQQAVLCLHRVRQGFVEERTATINRLRGLLAEFGVVLPQKAAEVRRRATEWLEQLPPRAACAIRDLREHLRVLDERVREYERSIEAHARDHEQAKLVQQRLGIGPMSASAIVASVGDLREFKNGRQFSAWLGLVPRQHSTGGKQRLGHITGRGDPYLRTLLVMGARSVLQRASGRSDPLSRWALAVRERRGYHRACIAVAAKNARVVWAMLNQHASALIARRCE

SEQ ID NO: 96448 - protein, 400 aa, unidentified
MLSIGIDVSKGKSTVCGMKPGGEIVYAPFEVQHTRKGMSELVSLLRGSGEEVRAVLESTGSYHCPVVAALLENGIFVSVVNSLRMKRFCSQSIRKVKTDRIDAMQIALYGLAYWQELQPTKLPEDTYRELQLLARQYYQMTSLLIKAKVDFNALCDQVLPGMQELMSDHAGRHKLSDFVLRYRHTTHILEMGETRFRKDYCKWAEKKGYRNCERMAVLIFATAQNGIPVLPNAPSTQIVITEAIRVLHTVEASRDAILTQMQALAKTLPEYSLVREMPCIGDTLAPRLIAEIGDVRRFHSKRALIAYAGIDAPPYQSGKFCANNRHISKRGNRYLRKTGYEVMQSYVMHKPANDPIFTFIEKKRSEGKCGKLAMVAGLNKFLRVYYGKVTELYRSLPAIE

SEQ ID NO: 96449 - protein, 398 aa, unidentified
MKVSGLDVHKDKIFCAIYDGKSYSEVKEFSTTTNSIRSMGEYLKSEGVKKVAMESTSTYWVPIWDILYEMGFEQKLANPLQIKQMPGRKSDVKDAQWISKLLYQNMISGSFVPPPLIQELRSYTREYRILVQQRTKVLTKIDRVLVMCGIRLSSCISNMDSKSAIQIVDALIRGQTDPVHLVSLVYGNRKNKESGKLKECLTGNMKEHHRIKLMTLKQQYDLFEQQIGFYMNKMQDFCNEHFSEDVKNLTTIPGVSLISAMIIIAETGGDMSAFENSGKFTGWTGLRPRNDESAGKFKSTATTKGNKHLRAIIVQVAWGASRNKGSYFMDKFQKLAMRKSRKKALVAIGRKILVIIWHILKEKTQYNPNLVHIYDPVKVEHKIKYHEREIEKAKNLIV

SEQ ID NO: 96450 - protein, 341 aa, unidentified
MKNKSFIGIDISKNVIDVSIFCEETPIKDFSHDVFNNSRKGFGEMCTWLKKNHVVLSNCLFGMEFTGSYSMELEKFLNARNYQFCMLSTHVVKHYPMGPKDKSDKIDSAKIADFLYRYNGTECVKPYNMPDKTMQRLKALMNERKFLVEQRTCFMNRRQLCITKEDAQLYDGYIKKLSRDIENIELEEQKLLATDDSLLSTYKNLLTIPGIGFVNAINVIVITRNFTAFETARQYASYVGVAPHSHTSGTSVKWRPRPSARCDGQAKADLSMAATVAVQYDAELQSFYNRKLGGKQDSDTKRKALNAVKFKLVLRMFAIGKQNRKWEPLDSKSSNEKLAIS

SEQ ID NO: 96451 - protein, 418 aa, unidentified
MGGIREVAKVACGLDVHRSEVVACLITSGTRKRPKVEIRRFRTVLAELFQLRAWLVEAGCEVVGMEATGPYWKPIYAALEGHVQLVVGNPLQMKGLKGRKTDQKDAEWIADLTRLGMIKPSFVPPPAFRALRDLTRERRNVVHARTTLRNQILKLLEGTGIKLASFLSNVFGVTGMGLLRSLSEGQDVRALLPLLVKGTLRRKLTDLNLALEQPLPEHLRELLAIQLLRHDGLDRVVSHIEAMIETRMEPYQAERNLLLQVYGLGITAVNIILAEIGVDMNVFPTPAHLAAWAGVCPGNRETGGKRISGTTRKGNTYLTTILVECAQATVRARDSYFRSKYHHLRARIGHKRALMAIAHKLIRLIHRLLSRKEPYKDLGEAFLDKRDKTARVDKLSRRLQALGYRVTLEPLPDSGLIA

SEQ ID NO: 96452 - protein, 315 aa, unidentified
MTSTKYIGMDVHKESISIAVRNDAGKIVMECVIETKASMILQFIDGLRGDVHVTLEEGTWAAWLYDLLKPHVTKVVVCDPRRNALLQEGNQNDRVDARKLAELLHNNQLRSVYHGDHGLRTLKELVRSYLTITQDLSRVMTRVKAIYRSWAIPCTGKQVYAPRHRAEWLAKINEPGVRRRAEFYYQQLDALRCLRQEVRRDLLAESKKQQAWKRLCGIPSIGPIRAAVLLGILQTPHRFRTKRQLWTYGGVGIETSSSADHHVVKGQLERKKKQVEIRGLNRNYNHDLEKSFQGSGDRRRDQARSLRGVLCGIVG

SEQ ID NO: 96453 - protein, 372 aa, unidentified
MNYNTVYVGMDVHKESFTLCSMTIEDEKASHYQKTEADYKKVLKYLEFLRTIYGGNAKFICGYEAGCLGFTLYHQLTSQHVECIILAPTTMLEQRSKKRIKTDKRDAEIIAKCLAQHNYSPVHIPTATDEQIKEFLRMRDDHKLALKKIKQQILAFCLRHNYRYDGNSHWTAAHLCWLKSLQPEALYKETLDEYLLTYTTLNDKIERFDKRIEELASKDEYKESVQKLRCFIGVRTHTALSVLVEVGDFNRFASAKNFASYLGLVPGENTSSDDRNLLGITKAGNRHVRLLLTEAAQSYARGQIGYKSKDLKSRQSGNSAQVIGYADKANERLRRRYYKMVLGQSKKHNVAKVAVARELACFMWGMMTEHIS

SEQ ID NO: 96454 - protein, 350 aa, unidentified
MEHTTIAVDLAKSVFQIAISRRPGHVDAEHRFSRERFLTFFAQQPPATIVLEACGSAHHWARQLQPLGHAVRLLPAHDVHRYVRRNKTDRTDAKALLEANRNTELHAVPIKTIELQAVASLHRLRSTWIATRTARLNTIRGLLREFGIFIPVGASRVVPRVRDLLADPMSPVPDLLRSPLGSACDEIDTLEDNIQVIERQLANFAHQIATVPLLQTIPGVGLLTATALVALVGDIHRFGSGRHFASFLGLTPKEYSSASRRRLGAISKRGDVYLRTLLVQAARSVLWRARGAAQPTGFQRWARSTQQRRGHNIAAVAVANKLARIAWAVWSTQRAFAAERATPGRDGLDD

SEQ ID NO: 96455 - protein, 416 aa, unidentified
MDTMYERCCGLDIHKKTIEACFRSGKKKTHMSFGTTSAELRKLTMWLVENDCQSVAMESTGSYWKPIFNILELSGTDMEIIVVNARHMKNVPGRKTDVHDAEWIAELLQYGLLRPSFIPDREQRELRELSRYRKSLVGERAREINRLQKMLEGGNIKLTSVVSEVTGYSSRRLLDRLLRNDEPMTEDVISGLVHTSLAGKSKELETALDGLLSELQKELLIKVLDHIDDMSRRIADLDDFCRKQMKKYEDALDKLDEIPGIARRTAETILIETGLDMSRFPTAKHFARWAGLAPGNNESAGKRSSGRTTKGNPTLKSTLIQSAKVAARKKNSFFKARYQKIAARRGANRASVAVAHSMLIAIYHILKSGERFKDLGEDYYNQFNKEKKKKYYLKKLTKLGVNLKEATLSISIQAAT

SEQ ID NO: 96456 - protein, 400 aa, unidentified
MIAVGIDVSKYKSTVAIISNTGEILLPPKVYTHTYSALLSLVSLLKKQNDDIRIVMEATGHYHYPILKLLLGHHFFVSVVNPYIIKKYNDNNLRKVKTDKQDAIRLAFYALEKSYCLNAYVPAGEKYADLKFLYQQYTQRIHIIQKEKINLCHLLEESMPGLYDMLSTSVRNPSKNLLYSFVKRFKSFNRIKRMGKERFLNSYFKMAAEIGSRRRKNYALDIYEMAKDCIATGSTEPYSTMAQEECLRSLILAEEAANRLCEQMNSIANTLPEYPLVRSMYGVGDKIAPQLIALIGDIRKFKSGKALNAYAGNDAPPYQSGQFESKNRHISKRGSTELRKVCFEIMCCIKVHKSPEDPIYKFMQKKEREGKAKKVAIMAGINKFLRIYYARVSEVYQKAL

SEQ ID NO: 96457 - protein, 309 aa, unidentified
MKEELVYLGVDIAKSYLDAAIGNEKRRFCNDTIGHRQLIKWVKQIKAAVQVICESSGGYERRLVQRLARARIKVSLVQANRVRQFARAAGILAKTDRIDAGVLCEFGKVMQPQTVSAATLEQEHLRELESQRRHLTRVLVMEHNRGARVSDASVMRLNRSLINQIKKQIEKLDLLIKERIEASPELSAKAQKLTLINGVGARTAALLLAQMPELGQLNRREVAALVGVAPFNRDSGKVRGKRAIYGGRRPVRHGLYMAAIVAAHHNPVLRQFYLRLRAAGKPAKLALTATMRKLLIVLNSALKPDLNYA

SEQ ID NO: 96458 - protein, 348 aa, unidentified
MNVTYYIGFDVHKKSVSYCVKTGDGQIVEEGKLPATRQALRGWAQQRSEPWHGAMEATLFSGWIYDALKPYAAELQMGHPAMMKAIGASKKKNDRLDARKTADLVRCDLLPACYVAPVEIRELRRLLRYRNVVVAQAVRMKNKMSGLLMEVGAPYNKQRLHGKQYFSELLDQLEEVPESVKDLLRLSRTTLEAFEAMQQQLLARLQQDPLLTARVKLLTGIRGVGTVTALTWALEVGEPQRFSSIAHAVSYCGLTAALVASADKQQRGPISKQRNAHLQTVLIEAAKLAPRWNPQLAAVHTRELAGGHRNRATLEVARKLVAYLLAVDKSGQPFKVRAPAAQEAETVA

SEQ ID NO: 96459 - protein, 355 aa, unidentified
MTASYDYHIGVDYHKSYSHLVVQDSSGKTLRSGRVKNDRQSLGGFLERYRENSHAVVEATRNWMVMYDWLDDICDDVVLAHPLKVKAIADAKIKTDKIDATVLAHLLRADLVPEAWAPSDKARELRVALRERMFYVRLRTMVKNRIVTVFDRYPEQTAQLKKLGDLFGKAGRVQLAQVNVSEIDRIQIDRGLAFIGDIDGRIKQSETTIRAMTKANGNVKLLKTIPGIGEFFARLIDAEIDDVSRFRNAKKLAAYAGLVPSTYSSGGKTYHGKIIRQGNKWLRWAFVEAVTPAIASDAQLRVQYEHLKFRGVNKARVAIARKLLTIAFQILRDQRAYEPRGESNMEGTSTISRLS

SEQ ID NO: 96460 - protein, 400 aa, unidentified
MDALVERCAGLDVHQASVVCCILISVPGRKPQKLLRRFGTTTRELKALRAWLAEHGVTHVGMESTGVYWKPVYAVLEGHVDLIVGNAHHIKNVPGRKTDVKDAEWIAQLVRYGLVAKSFVPPPAIRDLRELVRYRRTLIETRTATRNRVLKLLEGANIKLSGVASDVFGVSGLAMLEALAAGVTDASEMAGLARGRMRRKQAALEAALEGHLREHQRFLLAMQLCALKAIDHDITALDTHIEAQLEPFRAQHQLLMQIPGVDWATAAAILAEIGPDRSVFTTARRLAAWAGVAPGNHESAGKPKGAAVRRGNVFLKSVLFAAASAAVRTKASYYRDKYNRLRSRRGPVRALMAIAQWPLLTSCSSLPSTCSPPARPSVTSARATLIRSRASAPPPGWSSA

SEQ ID NO: 96461 - protein, 392 aa, unidentified
MPQQHCRFEASRSLTALEQDSTIIAVIEMSQSKWLVAALVPGVKRHPLKKLDAQEEGLLKLLHRWRNEAGQAGREIKRIVVAYEAGRDGFWLARWLRERDVEAYVIHPTSIAVSREHRRAKTDRLDTELLMRAFLGWLRGEKRHCSMVAIPTIEEEDARRPNRERQNLVTEQTRIVNQMKAIFARFGIRTFRVTLRRAEEKLKGLRTAEGTPLPENTHTELCRHLARLRVVREQIRAIEQERVRKLVAAPAAEHGSHAMVQLIARVLGIGIETADMLVNEVLSRRWRDHKALARYAGLTGSPDESGKRRRERGLARAGSARVRCGMIQFAWRFLRFQKDSALAQWFAARTTDGRGSTRKTMIVALARKLLIALWRLVEKGEVPQGVVLRPAQ

SEQ ID NO: 96462 - protein, 355 aa, unidentified
MNDSKFIGLDVHKTSISAAVLDHDGKLVMQSIFATHAAAVLSFIHGVGGSVRVTFEEGMHSSWLYDLLRPQVSEVLVCNPRKNSLLKSGNKSDQIDARKLAELLRAGLVSPVYHGQTSTVTVKELGRTYTALTEDTTRVMSRLKALYRSQAIATEGKKLYTKRRREQWLKELTQAGRRYRAERMFEQLDALQGFRRQARRDLFVECRKHAATAILTSIPFLGPIRAALLIARVQTPFRFRGKRQFWAYCGLALETRSSADYRLVEGELHRAKKPVFIRGLNLNHNHDLENIFKAAATTASACPGPFRDYYETLLGRGMKPEMARLTLARKIAAISLIVWKKGERFDPEQLKAQAA

SEQ ID NO: 96463 - protein, 401 aa, unidentified
MRSIGMDVHRSFAQIAVVEDGVCRDEGRIGVRPEQLRAWASGLRPDDEVALEATTKSDAIATMLRPLVRRVVVSNPRKTRAIAEAKVKTDKVDARILAQLLAADFLPETWVADDRTRMLRRLVMRRTHLVKQRTRLKNQVHAIMARNLVPTCPHADLFSGVGRRWLTRQDLPADEWRSVDALVRQLDFHGDELVQVDRDIALEAIDDPIVARLMTVPGIDVTVAISILAAVGDFARFDSPDRLVSYLGLNPRVRQSGNGPATHGRITKAGPAQARGMLVEAAFSAARAPGPLRAFYRRVKERRGFQIATVATARKMTVLCWHLITSGEDYAFARPSLNAHKRRKLELAAGELPRRGPVRGASHDYHVKQLRDQERAIVEHAERSYEVLVAHWQPQRPAARA

SEQ ID NO: 96464 - protein, 456 aa, unidentified
MAGAIAVQQHDDVVNLSTISHKKTGYRFAFGKYVIQVYLWHLFGERSSISNQPYLYKRGSTSVAHNKRENLATFHALHRSAIGIDVHSNLIVATYQNCEYGSSSLFNENRGSGASKPELDAFASWCKAKEAEVLIMESTGVYWQSLYESLENVGCTNKQIVVVNARDVKNKRGSKTDLADAIHLAEVARQETYRASFVPAKEFRQLRCLWRSFFTLKISRKRFLNIMHKQLCQVGCRASSVFSDIRGKKATKIIDCLINGEHGETLYNHIIEITSCKQDKLKATPQQIYDALQADMESEVWFAIRQNMEHIKFLDAQIAESEANLRDKLKPYTHPMKLLTSIPGIKDITAMGIICELGDDISQFTSIRRFCKWIGLAPGNNESAGKKYSGRTTPGNKYLKVLLVEAVSGIVLMKKGFLHEVLQRFKERRGTKKSNVALAHKMCRIIFSVLTHGTAY

SEQ ID NO: 96465 - protein, 343 aa, unidentified
MDHYVGIDVSLELSSLCVLDAAGQIVREAKVASEPEALVTFLASLSLPLTRVGLEAGPLSQWLHAGLVQAGFEVVLLETRHVKAALSAMIVKTDRRDARGIAQLLRMGWFRPVHCKSPPAQEVRALLMARKQLQAKMRDVELSLRGLLRGFGLKVGEISKGQFAARVRTLTAGHEMLETIAAAMLRARDALQTEFARLHRAMLAIARTNDVCRRLMSVPGVGALIAVTFTSAVDHPERFSHSRAVGAHFGLTPKKYQSGETDITGAVSRVGDPMVRTALYEGAHILLTRAVRFSALKRWALEVAKRRGMRRAKVALARKLAVILHRMWIDGTTFRWNREGVAA

SEQ ID NO: 96466 - protein, 309 aa, unidentified
MEIVVGIDVSKERLDVAILPQEEVFAVGNDHAGIDELAERLKGIGVDAIALEATGGFEMLAVAGLSAAGLTVLVVNPAQVRAYAHAIGRRAKTDPIDAAVIAAFVLATKPEIRPLRDAETQALSELVARRRQLMQMTVAEEDRVRMALAKQAQKSIKRLLTALRRELESLDADLDSHIRKSPVWRVREALLTSVPGVGPTTARTLLAELPELGSLDRRQIASLAGLAPWTRQSGKWKGKSFIGGGRSKVRAVLFMAALVASRYNPDLKAFRDRLVAAGKPKIVATVATMRKLLTILNAIIRDGRPWQNA

SEQ ID NO: 96467 - protein, 350 aa, unidentified
MIIIGCDYHPSFQQIAFVDTETGELQERRLQHREEAEKFYRDLAAQGRKVRVGMEASGHARWFERLLAELQCELWIGDAAEISAKRVRKQKTDRQDAQLILRLMMKDDFPQIWVPSWENRDLRQLLWHRHRMVQARTRIMNQLQAVALNEGLRSKKRLWREAGREQLEAIRLAPWASRRRRDLLELLDRLNPTIAKLTQAIDLEVEKCPTARRLKTHPGVGPLTALAFVLIIGKADRFQCGKQIASYLGLVPLEKSSGNQRRLGHITKQGNSLLRFLLVEAAQVTARSLPEWRSKYVHLTMRRGRKIAKVAMARRLAVRLYWMMRKEWNYGQVKKFGSHAGQPGPGDGVR

SEQ ID NO: 96468 - protein, 395 aa, unidentified
MYFLGIDIGKRTHVASIMNEEGKVLLKGFSFPNTTEGAESLIERMVDYSGAPSDFVIGMEATGHYWLSIFSYLHESDYLIHVVNPLQTDGWRKGTEIRKRKNDIIDSVLIADLMRYGSFVETVLSDENVFSLKQLSRYRTYLVGTASDFKRKIIAVLDQVFPEYATIFTKQGVFGKASKELLLAFSAPIDLENISSETLAQYLAELSRNRIKAEKADQLKQAASNSFGVKFAQEAFTFQLRSMIEQLKFIESQIKETEREIKHIMDTLNSVILTITGIGPINGATILGEIGDIQKFSNPKKLVAYAGIDASVTQSGQYEATHNVMSKRGSPYLRKALFSAALVASQCDPVFSAFYQKKVSEGKHHLTALGAVSRKLCYVIHAILTKNEPYIIVSD

SEQ ID NO: 96469 - protein, 444 aa, unidentified
MKGKAVSALRSKRGLHRVNGAEPPVVGLTPQTTLKRKANTMKTYILRDPKPVEPQKSIRPPRPKPTAPVTGKGPVLFLGLDVHNDSIAVSLAPADATEVRRYGIIGGEHDDVLKLAHKLQAAHPGTRLKFCYEAGPRGFALCRCLRAHGWDCILVCPSKIPRKPGERVKTDRRDADDLARLYRAGELTGIYVPEPVDEAMRDLIRARFQVGKQQHRARQQLKMYLLRHNLRYGGQTSWTPAHLRYLAKIKMPFPTQQIVLQEMLDVISEATARLERYGQEIERAVPGWRWEPAVRALMSLRGMALLHAATLVAELGDFNRFEHPGQLMGYLGLVPSEHTTGKDRQQGGITKMGNAPARRALVEAAWQYRAPARLTPHLKKRQEGLPKTITDIAWEAQRRLHHRYTHLTRVGKKKSQVAVTAVARELAGFVWAIARQVKPLAATR

SEQ ID NO: 96470 - protein, 435 aa, unidentified
MGSKLQKIHAQGAGIDVGSRQFFVGIENQEVKSFDTFTSGCHQVVEYLQQHCITSVAMEATGVYWITLHDMLVAVGIKVDVVNGRHVKHVPGRKTDVKDCMWISELHSYGLLKKSFIPDVQVKEMRHYMRLRENHIEQKVKAVQRMDKALVMMNIRLSSVVSDMQGQSSLRIIQAILHGERNAEVLLNLCDTRILKQKKEKMKECLKGFYKPEQLFALKQSWEQYEFSEKQIAGCDICIEALLQKLTVNKPEPVLKGRPKKIYHNKPDVKNLHKMVQQLYDGKDLTVLPGITSYSLLKFFSVTGNDLKNWETENHFTAWLGLAPNQYQSGKMKKYRRIKMNTEAGQILKECVQPLLRSKHVALGVFGKRIASRRGPSIAIKAMARKLACWIYRIVNKGLEFVENGIKQYEERQKKDTLRWLEKKAKELNLTLTPC

SEQ ID NO: 96471 - protein, 341 aa, unidentified
MQITTIGLDIAKNVFQVHSIDAAEKVVVRKQLRRGQVMKFFAALPPCLIGMEACATAHHWARELTKLGHEVRLMPAKDVKAYVKRNKNDAADAEAICEAVRRPTMRFVGAKSAEQQGRLMQHRTRDLLMRQRTQVINALRGHLAELGIVAAQGREGLKQLLTIIADEKDARLPIDARASLIVLAAQLQALHTMIGSIEKRLTVQHRANESSKRLESVPGIGIIGASAIAATVTDPNAFRSGRDFAAWIGLVPRQGSTGGKQKLGPISKQGDRYLRRILVVGAHSVLRRAKQNPEKYPWLTQLLARRPFKVVAIALANKMARVAWALLARGGTYRVPALAAA

SEQ ID NO: 96472 - protein, 528 aa, unidentified
MTSGEDSVIVAKSATAATTLSTFVRMPLEQHGSRKAIEHWRGFDSSPLGQNRPTASLGGRAQKGYEMPGRDENTSSGDSRGQLAGLPIIRQNVAGIDLGSERHWVCAPTRDRSGREVASFGATTAELLRMAEWLKARQVESVAMESTGVYWIAPHEVLEGQGLQLLLVDTRQLAQVPGRDKKSDPTDCEWIQRLHSCGLLRGSFRPEEAVCMLRTLVRDKANLVAESGDWLRRMQKSLDQMNVRVHRAVSDIDGATGMAILRAIVGGERDAQKLAKFRDARCSKTEPEIAEQLSGHWRADHVFSLQQALKMYDAVQERIAAYEQEILRKLDEMEREEPTEPTAPPLQNANKARMIKKRGQEAKRQALYRMSGVDMTQIDAIGVETVEVVLSEYGSDLSRFPTEKQFVSHITLAPRVPKSGGKPVRKKKRNSASTRVAAALRMAALSLRHSQTALGAYYRRMAQRRDGDIAVFATARKLATLIYRLLRWGQPYIDEGAAAYENRYRQHRIHRLEATAKELGYQLTAVSA

SEQ ID NO: 96473 - protein, 333 aa, unidentified
MNTAGIDVSHKSLVLSVSKAGKLGKARAFCNDPTGHKALLKALRGAQVERVCLEATGTYHLDLALLLDAEGVALMVLNPKAAKRFAEALLTRTKTDGVDAGVLAQYAERMPFTPWQRPDDAVLALRAVARQIEALKKTRTGARNRRHAMGQSVLTPAAVLDSIERLIGECDAHIDALCAWAHEHIAAHPALEARWRLLLSAKGIGEASAIELLGELLVLPADMAAKQWVAMAGMDPREVSSGSSVNKPARLSKAGNRHLRQALYMPALSAARNDPHIRAFYRHLIEQRGLKKIQAICAVMRKLLHGIHAMFKTGQPFDSARLCPPRPAPAGAG

SEQ ID NO: 96474 - protein, 364 aa, unidentified
MKKISIVRTSGNKIFEPQLTIGLDLGDRSSSYCVLNEAGEMLLERKLPTTPEGMKETFAAIPRSRIAMETGTHSPWVSRLLTALGHEVIVAHARNVRLITQSRRKDDRFDARTLARLARIDPQLLSPVQHRSAQAQLHLTEIRVRAVLVSSRTALVNAARGLVKSYGERLRKCDTRQVRREASGLSAGLREALEPLLQEIDSLNEGIQEYDRRIAKMAKATYPEVELLKQVKGVGDLIAMTYVLTIEDPRRFRKSRDAGCFVGLQPGRRNSGESEPQLHISKEGDEYLRTLLVQGAHYILGPFGEDSDLRRWGQKLAERGGKNGKKRAVVAVARKLAVLLHRLWVSGEVYEPLRNSQKTMPAVA

SEQ ID NO: 96475 - protein, 421 aa, unidentified
MSNCTLSKKLAGVKPGTLFVGVDLALDRNVAVVLSERAEQLARFGFPNERDGYDYFYRRLEAIQEQQQAPAVLVGMEPTNYFWKLLAADMEQQRPEYSYRLVNPYTVKKNREGDHLDRSKDDNRDAFTIGDLLRTGKYTETRLLHGGYAELRQYVTLHKRLQGDIRRQKTLIRNIAGQLFPELPHVFKDFTGETALAMLRNHAAAVTLRSKSQEMFITDVWADFHGRRLYKAKLRRVHALAERSVGLKNGVAALQLALRTHIETLQVLQRQSEEVCTALIDAFLALPESAYWLSVHGLGVITAATILSEIGDPGNYTSGRQWVKLAGTQPVPNTSGRKSRSQTPMSHKGRPQLRTALFFAVMRLVQVDQAFARDYLHLQTREKNPLTKMQALGVLMNKLLRILWALMRNSTFYTPGFPGTA

SEQ ID NO: 96476 - protein, 425 aa, unidentified
MKNNFLSTLFVGIDVSSKTNVLCALDFQGNKLLNLKALNNQPGAKVILDNILDCLNSNSLKYVVIALESTSFYSTHIANYLSSNEELLFFKPFVYCLNPKTVANYRKSFVDMDKTDPLDAYIIADFARCGRITCKPWRGAQFLALQRLTRHRLHLIECITREKAYMVSNIYLKFSELTVLDKDDKPFSNTYGVTSAAILTESLSLDDIAYSSIDDLVDFIREKGKNRFSDPYKTVKLLQKAARDSYRLDKVLYEPLSVAIASSFNVIKAMEDEIKTVDKAIEKTIKGLNTTEYLSLTSIPGIGPVFASGVLAEIGTITSFDSHDALAKYAGLTWRSKQSGNYSSDDTRMTKTGNKYLRYYLIEAANSVKNRVPEYKEFYYKKYGEVTTHQHKRALALTARKLVRLIFGLLTKSQIYSSDKVGEIK

SEQ ID NO: 96477 - protein, 421 aa, unidentified
MQVVYQRCAAIDVGKDVIAVAVRLPGDGPDGRATVKRMFKTFYGVLAEAARWMTEQGVTHVAMEATGIYSMPVYHALIEHGDFEKVLVCNAGHVKNVPGRKTDFSDAEWLAHLLECGLLAGSFIPPAEIKAARDVIRYRAKVAQQRVSEIARLGNVLQDAGIKIDSVAWSIATKSGRAMIEALIDGERRGPVLAQLAKGKMRAKIPDLSMALEGRFGDHHALMCRLHLDHIDHLEAMIARLDAQIEAMMAPFRAARDLLTTAPGIGPLSAAAVISEIGADVREYFPDAAHLASWTGLCPGNHESAGKRRSGRRRKGNEHLQSLLVECAWSAVRHDGYLKALYHRHVMKWGGYRSATAKKKAIIVVAHAMTVIIWHILATGKPYHELGADYFTHRLDPERETRRLIAKLEALGHTVTLEAAA

SEQ ID NO: 96478 - protein, 349 aa, unidentified
MNQYVALDQYVALDVSLRKTSVCVLNSWGHVVTEADVPSEPGALISFIRTRAPHASRIGLESGPMSTWLWHALKAAGLPVICMDARHAHAALSVRPIKSDRNDARGLAEMVRVGWFKEVQVKSLGAHERMALLGVRRRLVDIRVEIDGQIRGILKTFGLVVGSGNKGAFAQRARMMAQDHPILSALVEKLLDVREVAAAKVAVLDKEIRRFVRDDPTLRRFLTVPGVGPVTALAFRATVDEPSRFRRARDVGPYLGLTPRRYQSGETDRQGHISKCGDRFTRTCLYEAANVLLTKVQRWSPLKAWGTRLAKRIGSKKARVALARKIAVILHCIWTDGTEFWWTKEMAAA

SEQ ID NO: 96479 - protein, 336 aa, unidentified
MDITTLGIDLAKSVFQLHGVDAQGAIVLQKKLRRGAVVKFLSKLEPCLIGIEACATSHYWAREIAALGHDIKMIPPAYVKPYVKRQKNDAADAEAICEAVTRPNMRFVPVKTEEQQAVLVLHRSRDLLMRQRTMILNAIRSHCAEFGIIAAQGARKVSELVTKLRNDDTLGVPEVGVSALLSLASQLDCLEQEVRKIEHQLLAWHRQNAASQRLETIPGIGLITATALAASVPDPAVFKSGRQFAAYLGLVPRQNSSGGKDRLGRISKMGNGYLRRLLVVGATSVTRRAPPTGTWVRSLLERKPTRVVTVAIANKTARTAWALLSKGESYKAVPAI

SEQ ID NO: 96480 - protein, 363 aa, unidentified
MKENHRVVAQEEPVLGGVDTHKDVHVAAILGRTGALLGTTEFPATLGGHATMLVWMRSFGDLLAIGVEGTGNYGAGLTRFLLAEGVRVVEVVRPDRRARRFNGKSDTLDAENAARAVLSGERTSTPKHRNGAVEALRTLRVARTSAVKARRAALQLLRNTIVSAPDRLRESIHGLTRTVLVRTCAAWRPNRDAAHEPTTATRIALRSLARRILGLEEEIADLDELTAALVARINPRLTEASCVGVEIAAQLLITAGENPERMRSEAAFAMLCGVAPLPASSGKTRRYRLNRGGDRAANCALHMAAISRLRVDPRTRTYAARRTAEGLSKKEILRCLKRYLAREIYKLLGPTPLEPDTVAEIAA

SEQ ID NO: 96481 - protein, 435 aa, unidentified
MNCVKDIRLEQFLQLKKWIRGSEKHLIVGIDAAKEKHNAFFGTARGKTLVKNLVFDNTLEGFQKLLAYVERIKVQYSLTAVVFGIEPTANYHKPLAEHLTKCGHLVVLVGGVAVKNNRQLLDGRWDKHDVKDAANVADLIAQGKCLFYEYPLMTLRNVRILIALKRRLKRREHGMSVCIRNHIIAQYFPELDQHYGPSETLAVVRECLDPSEIAGMEYDAFCRTVAPGKMTLAKGRRVGTIWRAAVDSIGCTMGEAASFEAQVMVDSLKQIRQTIKAVEEKLEDACMEFPEYTYLLSIPGFGPDVSSKVLGAIGDSHRFTSAKQVLKMAGLDLCADRSGKRSNSAIPVISKQGKADLRYGLYQAAFIASLKNKDFIAYFTNKLKGRAKEKGIVTKMRVKLAAKLLVIAWTLMKKKECFDPKYLTQEDQEARKKAA

SEQ ID NO: 96482 - protein, 351 aa, unidentified
MIIVGVDYHPSVQQVAFLDTETGETGERRLNHSDGEAERFYRDLQRRQVKVRVGIEATGHARWFERLLAELKFELWIGDPARIKAARVRKQKTDRQDAQLLLRLLIEGRFPQIWVPSPENRDLRQLIWHRHRLVQMRTRAMNQIQAAAMNEGVRRKKTLWSKTGRRQLEALPLAPWATRRRQDLLELVDRLNTTIDELTAAAEQEARKRPEVLRLMTHPGVGPITALAFVLVLGSPDRFGCGHQIGSYLGLIPCEDSSADRQRLGHITKQGSSLLRFLLVEAAQAAVRWDPDWRRRFVHLAMRRDRRIAKVAMARKLAVSLYWMWRKEFDYPQTLQFGSHAGEPGYVHGVK

SEQ ID NO: 96483 - protein, 401 aa, unidentified
MSNNELVVGIDPHRNKCGAFFFCNNIPIKSITFLNRFKSQAIFLVSTAESLAKSHNCNKIVFVIESTNVFWRPLFCFLTSSGYSVFTVNSFQTHNLRKTNKRKTQTDKIDAKTVAQLYLNNKHNTTSLPSGDFFDLRELTRFHSWLTNFAGVFLNRLFGYLFQVFPEAKDVFGNNLKSATVFSLIKHNLLNPHELSKVNVNILATKLKDYSHGRFNLSMACRLSSAASNSLGLPIGHKAFFPIMKIIVELYEFIQSKLSIIEKENVYPIVNQYSNSLSSVKGFSKLQQASFLSEIGNPNNFKNANDILAWFGLDPSLRQSGNKSGYGKRISKAGTKYGRETMFHVSKSCILHTPVVRDKYKKLRKSGISDTEAKILIGASLVKCFWAMLRDHSNFDPKKFS

SEQ ID NO: 96484 - protein, 414 aa, unidentified
MKLFVGIDVSSEELEACFMNPEGDTLETLKVKNDLNGASRLRDRIVAASDKLSSSEIHIGLEATSVYSWHPAMYLHEDESLRQRNTKVFTINPKLINKFREAYADLDKTDRIDAWIIADRLRFGRLTTTIVMQEQYIALQRLTRMRFHLVHNLTREKQYFLQNLFYKCNAFRSEVDSSVFGHAIMEMLSEKYSLDEIAGMEVADLADYLKEKGKNRFPDPEHVARCIQKAARASYRLSKVVEDSIDLVLGTSIQAIRSIQSQLKELDKAIERILAGISGAKCLRSIPGIDRVYAAGILAEIGDIDRFSDQAAVAKYAGLTWRRHQSGPFEAEDTKRIRSGNRFLRYYLVEAANSVKNRDPEFGEYYRKKYNEVPKHQHKRALVLTARKLVRLVDVLLRNGQLYTPRRKVTTAKD

SEQ ID NO: 96485 - protein, 412 aa, unidentified
MQTLVERGCGLDVHQATVVACLLIVLQNGKVQKQVRTFGTTTRALLTLREWLLSEGCTHVAMESTGVYWKPVYAILEGGLEIVVANAQHVKKVPGRKTDVKDAEWIADLLCHGLLRSSFVPPQPIRELRDLTRYRRKLVESQSAERNRLLKLLETANIKLSSVASDVFGVSGRLMLKALAKGEATPQAMAELAKRRLRSKIPQLELALEGKMEEHHRFLLELQLQRLEAVEHDLTVLEQRLQEKLKPYAAQLALLQEIPGVDWTLSAVIIAELGVDMSVFQNVSQLASWAGVCPGNNESAGKRKSSRIPKGNVYLKTALVEAANSAAKAKGTYLRDKFYRLKARRGYKRAAVAIAHKILVSVYHMLSQQVSYNDLGDLYLDKLNKHHLTRNLVHRLERLGYTVTLTLEQKAA

SEQ ID NO: 96486 - protein, 526 aa, unidentified
MAVGWTVAADISLAVIHKRAKRPGTARRSELVNNCAAGENFAGGRPAPARSQSQSPNLRKVSGRLLAEPEALAPTSHRKTPPEGHYISKMDGRAKRRKNHKEQKQTMNDSQQWQQHRAFGALDWASEKHSVVLVNQTGKVIEDFEIEHSALGWKKFREKLQPYGSIPFAIETSQGVAVEQLLEAGMLVYPLNPKSAQAYRERKAPSGVKDDRLDAWSFADALRMDGQNWKALRPEEPLIKELRLLCRDEVTLIEQRTAFVNQLRHALAEYYPAALEAFEDWTSVSAWMFLQRFATPEQLAQAGKRQWQKFLHSRRLWGSDQGPRRMEIFAHATEFTGTAPTVKAKSLLAQSLVQMLFAIEKQLAVYRQRIEALFARHPDHDLFGSLPGAGPKIAPRLLSEIGDDRQRFGGDPQNLQCLAGSAPVTKRSGKQRKYWPVHQRWACDKHLRHAIHLFSEQSLSRCAWAEIYYQHHRQKNQSHANALRRLSHRWLKVIYKMWIDRTPYNAELHHRNQLQHGSWIFQLQQS

SEQ ID NO: 96487 - protein, 325 aa, unidentified
MSKVGIDISEPWIDACIRAGARCIPLRCGNDGKGRNELHKWLKKNGITKPELFMEATGRYWDDLAMWAYKLGWKVTVVNPRCIRSFAESRLKYNKTDKLDAECILLFAEGAREGDLRQWHPRSAAERELKELQMGINGLAKEIGQQQNRLKSGIKSAALKDSIKRTIEFLQKQKTELEIMAMQLIKGDPKLLELYKILRQIKGFGDKTIRMLIARIDFDSFTKGRQLVSYAGLGTATWESGKSVRKKGHISRVGHADLRCGLYFPAVVAMTHDPEMIQLRQRLEGRKKESKEIICAVMATLLRKAFALVRNARKQEAAMVAAAEI

SEQ ID NO: 96488 - protein, 324 aa, unidentified
MTILAFDVSKNELVGVRADRHGNVREQFAFPNRETDISVRLGEWQARYPRLLVGSEATAEYHRPLTEWCVANGVPFRLLNPILTKQFTRATIRKKKTDQSDAAIIARLLAQGEGTTQSTELLRPTKTLNRTAHSLLTLQKTIKAIARHTEQIGAREPSIVAALQKPQTALAEAVRLLRGLVREQTDRELQRLLMSIPGIGVTIASTLITEIGDITRFPSGKSLVAYAGLDPKVKQSGQSLHHNTKITKRGSPYLRQSLYIAAYIAARHDPELKEYWQKKTAEGKRYKEATVATARKMIYRVYAVWKRGTPYVKRLNSILSTSAA

SEQ ID NO: 96489 - protein, 347 aa, unidentified
MAEVIRETIGCDVGDKTCELYIARADGTAQTPEPLKTTPTGFKKFFTRTPAHVVLENGTHSRWISALLKKLGHEVTVANTRRLQLITESNSKSDRTDAELLARLGRADVKLLSPIRHREDEAQADLAVPKTRDMLVRARTKLINQARGLVKSFGSRLPSCETACFHSRVEPEIPEPLKPALEPLLKAVATLTEQIKQLDKVVEQVAKQYPDAEVIGKVDGVGVLTALTFLLTLEDKTRFKKSRMVGAFLGLRPKRDQSGKTDKQLGITKAGDSFVRRLLVNSANYILGPFGKDCELRRWGLKLAERGGKNARARAKVAVARKLGVLMHRLWVTGEVYQPLGYKAKGA

SEQ ID NO: 96490 - protein, 350 aa, unidentified
MQGTGRWIGLDLSKETYEMRYFDQKGKVAGSGGLTTKVGRAKLYAKLKSEDIVAMEANSLAFVMEQEMRTIGCTVIILNASQLSVIYASTKKTDKEDAVKLARLIKIYEKEDLPTVDVPTDKEWYRRKLIKEYKTLKADRTREINRLHALFVQCGITTIKRSNVQTDVNRQEVLPQLFDYEARQAKRVCARLTVLDAQIEELDQLIKKECKEDEDIQRLQTIPGVGDKTALAFAAYVGDGKRFNNGDQVSNYLGIVPRVDCSGTINKYGHITKKGNGVVRSLLYQAAWAIVRSKRGGALKAKYFYMTEHGKGKKISITAIARKMAKLLYVVMKNKQMVYQEMPAPSLRAG

SEQ ID NO: 96491 - protein, 338 aa, unidentified
MYYTGIDLHKKTSFITTIDADGKIITRANLQNVEEDILAYFADLGDKTKIVIESMSSWYWLYDLLTGNGLDVVISNPVKTKAIASAKIKNDKIDSHMLAQLLRADLISTVHVSSLERRKLKELLRHRSRLVRDATRMKNRIHMLLMKNNLRSPVSDLFGVQGLRYLEEIDLPAYHRHQVETYLLLYEKLQEQIKPLTRRVRALVKQNHTAQLLMTIPGIGPITAMFIVAEVDDISRFRSYRNLASYAGLVPSLDASAGKEKMGRITKQGSPYLRTALVEAAQAAARMQNSRLRVFFRRRIVKAGYQKAVVATAHKILQYAFYVWKNQTPYKETYPVCA

SEQ ID NO: 96492 - protein, 403 aa, unidentified
MNAVGIDVSKEKSMVAIMRPFGEIVSTPFEIKHTSNDINSLIELINSIEGESRIVMEHTGRYYEALAHELSAANLFVSAVNPKLIKDFDNDSLRKVKSDKADSVKIARYALDKWQNLKQYSVMDELRIQLKTMNRQFGFYMKHKTAMKNNLIGILDQTYPGVNSYFDSPARSDGSQKWVDFASTYWHVDCVRKMSLNAFIDHYQKWCKRKKYNFSQSKAEEIYGKAKELVPVLPKDEITKLIIKQAVDQLNSASTTVEELRTLMNETASKLPEYSIVMNMKGVGPSLGPQLMAEIGDVRRFTHKGAITAFAGVDPGVNESGTYEQRSVPTSKRGSANLRKTLFQVMDVLIKTMPQDDPVYQFLDKKRAQGKPYYVYMTAGANKFLRIYYGRVKEYLATLPESN

SEQ ID NO: 96493 - protein, 468 aa, unidentified
MPARPTRSKRRLADRSCVNPDAAGLNIGSAEIVAAVPPDRDAEPVQVFQTFTPDLHALVAWLLECGIDTVVMESTGVFWIPIYELLEAAGITPYLVNARHVKTVPGRKTDWNDAQWLQKLHALGLLAASFRPDAEIRTLRTLVRYRAELIERRAPHINHMIQALKHMNIQLNLVLTDITGKSGLAILRAIVAGARDPQQLACFRESGCKHSEAEIAKALTGTWDDAQLFILEQALEIFDYYTAKITGCDDKLEQQYQALESRAEKEAALPDLPPAKKDSRSKNALSFNARAQIARVVGVDLVAVMGLSAVTVQTIISEIGTDMELFPTVKHFCSWLGLAPHNDKSGGKVLRSRTMKVRNRANQAFRQAAQSVAQSDSSFGAYYRAMRARLGPKQAIVATAHKIARTVYHLLKTREPYQEESAAEYDRKRRERELKHLARRAQKLGYTLTVAQATAPESSPEPGGEGRF

SEQ ID NO: 96494 - protein, 347 aa, unidentified
MRFYTTQHPFYCGIDLHARTMYMCILNQAGETLLHRNMTATPEALLKAIAPYRDQIVLAAECMFTWYWLADLCAEHGIPFVLGHALYMKAIHGGKAKNDKIDAHKIAVLLRGGMLPQAYVYPAEMRATRDLLRRRMHLARKRGELLAHVQNTNSQYNLPAIGKKIAYKANRDGVAERFADPAVQKSIEVDLALITYYDELLRDVELTIVKTAKHHDANTLYLLQTVPGIGKILSLVLLYEIHQIDRFPRVQDFASYCRLVKCAKESAGKRSGTSGSKIGNAHLKWAFSEAAVLFLRDNPAAQKLLARLEKKHSKGKALTILAHKLARAVYYMLKRQTAFDLHTFLQG

SEQ ID NO: 96495 - protein, 321 aa, unidentified
MTKVPKDISLLGVGIDVSKARLDLAFSDERSGLGVDNGPTGHAHIVKALKEAGPSHIVIEATGGYERLIVAELSAAALPVVVINPRQVRDFAKATGRLAKTDAIDAKVLALFAIAIQPPLRPLDDQQTQAFSELLTRRRQLVQMRVAESNRLAQARDRRVRKSIEGVLKMLDRQIASLDEDIDQRIENSPIWKEKEEMLLAVEGIGPTTARTLLAELPELGTASRQEIAALAGLAPFNRDSGTLRGQRTIAGGRASVRSALYMATLTATMRNPVIRDHYQHLLARGKRKKVALVACMRKLLTILNAMLRDKEPWRSTIVTT

SEQ ID NO: 96496 - protein, 401 aa, unidentified
MGIDVAKSKHSAFFGTATGKTLRRGLVVENSESRFEHLMAHVQFYMGRDGFERVVFGVEPTLVYHKPLAKFLIKQDFMVVYVTNEAIKKNRSLLDGRWDKNDTKDAANVADLISQGKCHYYDFSDIALRDVRSLLALRRRLKKQEHGTRIRIRNNLVAQYFPELDRSWNKSETENLAIVRWCLAPEKIHRLEFENFFQMVTTRYRGNSQYQRLMKIWHMAPYSIGCEAGKALDVEAKILVEGLKHIREQIAEVEKTIENICSSFAEYGLLLTIPGFGPYISAVVLAAIGNPERFENASQGLRLAGLDLCANRSGKKSQAAVPVVSKKGKADLRYALYQAGLIASARNTRFMLYYQRVLKGREREKGIRTKMRVKLAAKLLVIAWTLMKKKVAFDQNYLIID

SEQ ID NO: 96497 - protein, 413 aa, unidentified
MLYLGFDVSKRTHECVLLSEDDQVLWRMSVRADRAGFDALGQKLAEVDPQRVIAGLESTGPYWQTLHLWLLRWGPSKLMVLNPLQTRAFRNANLRGSKTDRLDTVSIARLLRWSHHTLSSAHLPLERQDAARQISRVRTELTQERTKQLVRLKGILSVVFPEFEEELELTTKSAQAVLLRWPTPELLLKEASLEELSGLLRKVSRGRSGVAKAERLLQRARETTGVPDPHDGRGIVIRSLVMLVEPLEAQIEALGKKLDELLEVKAETVALLMSLPGFGEETVRTWMAESLPISQFQGNDGAERLVATIGIDAKLKESGRFSGRVKMSKRGNRYLRRVVILAARNAARVDPQCRAVLQRHLNRGKHYNVAVSHVARKLVHIAFAVLTNRKPYELPAAYRLGITEEPVPAAAGA

SEQ ID NO: 96498 - protein, 415 aa, unidentified
MCKVIMIGCDLHDATMVLKVADGPGATVRKGFATSNRPGMIEWVKDFASQHGATRIVFAYEASGQGFGLYDDLTEAGIECHVLAPTHLPHTTHSRKNKTDDKDALMILDEVRAHVLAGRTLPNVWVPDHQTRDDREIVRLRLEVATQRTRLKNQIRNLVKRSRLGFPDDFTSSGDWSKRSVEWLREVAAGSTGALREGVRTALASLVELYQALSVQIQALDRAITRLSRTERYARPYRKLKLLSGVGTLTAMVFLTELGDLARFANRRQLAAYLGLAPSAFESGEREDRKGHITKQGPARVRHVLCQAAWAALRVSPEWRAKYDRIRRGSKSRGRIAIVAVMRQLGVEMWHTARSPELGTLLDEHDALASEKTKKETSARAPQKGAAPSTSPSPRPRRGEAEATATRKGLARRPG

SEQ ID NO: 96499 - protein, 361 aa, unidentified
MSSAFQSFVGVDLHKCTVTLTAVDAAGEITRLKISTKSTGKIEAWLRALAGPVHLAVEACPFVEWFIDRFRDCVARIDIADATELASRRGKRRKTDWNDSLDIAVRLARGECPLGFIADEELMKLRKRGRHWRHLSRLLSRSKYSMKSMLNAANIRGPKFDGAAAQRWLLANRDLLKPVQQQTFADFIDVLMLTERHRERLRREIIFATRSARFAPIVSLLTSVPGIGEIWAAIIAAEIGPFERFPNADTLEFWAGLTADMKESAGRTQSGNITKAGSVTLRWALCQAAMTLCQCDARQEAIRQRLVRRIGKPRANVAMGRRLLRILYAMIRDGKTFDRGPARDRTAAANRIRLGSKKRVA

SEQ ID NO: 96500 - protein, 366 aa, unidentified
MKKISTMAKRGNEIFKEPKLTIGLDLGDRTSHYCILDEAGNVILEHRLPTTPRGIHQVFCRIPRSRIALETGTHSPWVSRQLTQLGHEVIVAHARNVRLIGESSRKDDQLDARTLARLARIDPGLLGPVRHRSAKAQIHLTVIRARAGLVSARTALVNTARGLTKSYGERLRKCGSGQMNREIAKGLSQELRDALDPLLGEIESLNERIAEYDRRIERIAKEVYPEVTLLKQVKGVGTLIALTYILTLDDPHRFRRSRDTGCFLGLRPGRRNSGMSEPQMHISKEGDGYLRTLMVQGAHYILGPFGEDSDLRRWGLKLAERGGKNAKKRAVVAVARKLAVLLHKLWVSGEVYEPLRNNHKVVSAVA

SEQ ID NO: 96501 - protein, 367 aa, unidentified
MKKVSTRAAAPSGNILQPKLTVGLDLGDRNSWYCVLDEFGQIQLEQRVRTNAKTLREVFGEMPHSRIALEIGTHSPWISRLLRELGHEVIVANARKVRLIGESRKKDDRLDAQTLARLARIDPELLSPVKHRSAQAQADLMMIRARAGLVRARTGLVNTARGLAKSYGERLRGCNVRNMNPEKAEGLSPELQRALEPLLAGIESVSERIAEYNERIEKLAQQSYPQVALLKQIKGVGTLIALTYMLTLEDPHRFRKSRDVGCYLGLQPGRRNSGQSEPQMHISKEGDPYLRTLLVQGAQHILGPFGVDCDLRRWGLKLAERGGRNGKKRAIVATARKLAVLLHRLWVSGEVYEPLHNGSRTTVRAAA

SEQ ID NO: 96502 - protein, 341 aa, unidentified
MESQRHIGIDLHRNQFTCCMRLENGRNYLTEWKLEDLPRFVKKLRPSDEIAVEVTGNTRLFHDAVAAHVKRVVAVDPNQFKVISHSVKKTDPNDARNLALYLEKDLLPEVRMKDKTQAQLASLTQTRDTLVKLRTSLKNKVNNILSAHGINLQKEALSSEKKLQEIVAMKFDAMVNLELEVIIEEIRSLNQRITKLEKAIADEGSKLEGHKNLTSIKGIGPLSGSILLSVIGDINDFEDEGKLAAYFGIVPRVSNSNETERLGRITKRGSKLGRTALVQCALIAQRYSPYLKRYYEKIKARRGTGKAIIALARKLLGVIYRTLKNNWVFEDFPNFVLAEAV

SEQ ID NO: 96503 - protein, 352 aa, unidentified
MQNEVKVLGIDVAKNVFQIHGVDASGKEVFRQKLSRAKLKPFMATQSKCLVGMEACGGAHHWAREFQTLGHEVKLMAPQYVKPYVKRNKNDEADAAAIAEAVTRPGMNFVAVKEVWQQDILMVHRVRERLVKQRTALMNEIRGLMQEYGVVMATGPHRLRQGMVNLLASTNGCLTEMARGILEQLVTKWREMDERLATYTKRLEQMARSHELCRELDKLPGIGPITATAMVATIGNPRVFRNGRQLAAYLGLVPRHEGTGGKVRLLGISKRGDRYLRKLLIHGGRALLRHVERRSDRQSRWALAVINRRGFNKACVAMANKNARMCWAIMMKCLNGETPTTEAPPRHKTYAA

SEQ ID NO: 96504 - protein, 407 aa, unidentified
MEIICPRCAGLDVHKETVVACVRIAGDGPPLQEVRTFATTTSGLLTLADWLESFHVQQVAMEATGVYWKPVWHVLESHFELVLANAAHVKNVPGRKTDVNDATWLADLLAHGLIRASFVPPVAVQELRALTRTRKQFVRERSAHVQRIEKVLEDANLKLGVVLSDIMGQSGRAVLQAIIDGQDDPQLLASRVSVRVKATRTEVLEALRGHVSAHHRFMLKLHLDHIKTLDETITAIEQEVGRGLEPFRAAARLLSTIPGLRGVSAHVVVAEIGIDMSRFATPGHLLSWACLCPRNDESAGKRRSTRLRRGGNWLKTTLVQAAWAAIKVKGSYLQAQFHRIRARRGAKKAIIAVAASMLTAAWHMLRDGTEWHDLGAAHFDRADARKTANRLIRRLQQIGYVVTATPA

SEQ ID NO: 96505 - protein, 331 aa, unidentified
MFPVGIDVSKNTLDLCMLYDGIKGRIKTRNIQNNRHSVENILRWLRLQHCSPEDVHVVMEATGVYHERLATELHDAGFRVSLANPHRSREFARGMGIMTKTDKVDAYMLACYAFLKKPHRWEPPAPEIRYLGALLRRRDVLLGDALREENRLEKYLSTDTPADIISSCRRMAQLLREEISNIERQIKAHIKASPALRRDYTLLTSIKSVGPQLGMHMLIVLRSHNFVSAEQAAAFLGVVPIEKRSGTSVRRRPRMSKIGPPQLRAKLYMSALCGKIYNKRMRNIYDEMCLRGKPKMVAIGALMRKLVHWCYGVLKTGTVFNDEDLKPVLST

SEQ ID NO: 96506 - protein, 412 aa, unidentified
MNLVYERCAGGDVHKRTVVVCVILPDKQGQRQKERRTFSTMMPDLLRMRRWFQNLGVTHVAMESSGSFWKPIFNVLEGHVEVLVVNAQHLKAVPGCKTDLKDAEWIADLLQHGLLRPSFVPPAFQRELRELTRYRTSVIEERSRTINRLQKILEDTTIKLSAVATDLMGQSAREMLATLIAGETDPLVVAGLARGRMRAKRDLLVQALQGQFKPHHRVLLSEQLAHIDALDEELERLSAEIAQRLRPYEAQLKRLETIPGIKRRLAEVILAEIGPDMQRFPSSRHLASWAGMCPGNRESAGKRLSGKTRKGSPWLRTALVEAAHAATHCKESYLAAHYQRLVLRRGGKKATIAVGHTLLVIIYHVLAEEKDYQELGGNFFDEQDRQAVQKRLVHRLEKLGYEVTLAPASPAP

SEQ ID NO: 96507 - protein, 361 aa, unidentified
MTSMTHDGPQITGGVDTHGLTHHAAVIDTVGRHLADREFPATIRGYRDLLDWMRMHGTLVAVGVEGTGAYGAELARVLTAAGVTVVDVDRPDRKTRRMKGKSDPIDAYAAATAVLSGRATGIPKSRDGVVEAVRVLRIARRSAVKARTQAMNQIRGLLVSAPAMLREQVAGLDRAALIRTLARLRPGDDLSRPLAATRASLRRLARRHQALDEEIAELDAEIGPLVKQAAPALLELFGVGPETAGQLLASAGDNPERMRSEGAFAHLAGVAPIPASSGRTHRHRLNRGGDRAANNALHTIVLTRMRFDERTRVYVERRTREGLNKKDIMRCLKRFVAREVYRALTSTPTERITQTDLTPAA

SEQ ID NO: 96508 - protein, 401 aa, unidentified
MVISIDGVGVFLGLDVGKAAHHGHGLTPAGKTVFDKPLPNTEPKLRAVFDKLRTKFGTVLVIVDQPASIGALPLTVARDAGCQVAYLPGLAMRRIADLYPGEAKTDAKDAAVIADAARTMPHTLRTLDLADETAAELAMLVGFDQDLAGEANRTSNRVRGLLTQFHPSLERVLGPRLDHQAVTWLLERYGSPAALRKAGRRRLVEVVRPRAPRMAERLVDDIFTALDEQTVVVPGTGTLDVIVPSLAKSLAAVHGQRRALEARIEALLEAHPLSGVLTSMPGIGVRTAAVLLATVGDGSSFPTAAHLASYAGLAPATRQSGTSIHGEHAPRGGNRQLKRAMFLSAFAALHDPASRTYYDRCRARGKTHTQALLRLARHRITVLFAMLRDGTFYEPRSPRTA

SEQ ID NO: 96509 - protein, 414 aa, unidentified
MGGFPVFSLIPFQGGVALSALYIGIDVSKDFSTAQAIDGKGNKCFYLELAMTADGFSQLLKAIKSHCKDIARVTVAMESTGCYHINLFSFLTYKGIRCIIINPLLIANFTRLSLRKTKTDKKDAFTIAQFLLVHKDSLLKTDLSPDMQDIKDLAREHESLTNLIAGMKNDIRRMLQITFPELETVCNIFSETILDLLRQFPSAHLIKIAKPNIIAKALLHEDKRKKTSVSAEEIIKAAKGSVASHGAAKEIILPEKISTLQHLIEKKVRMKKALVEACEGMMVEDIEIITSIGGISNLTASRLLAEIGDYRAFSTYKHLIAFAGLDPSVHQSGKFEGISRISKRGNRHLRYIIYLMTTCVVRGNNIFRSYYQKRRAEGQPFKKAIIATAHKLVRVIFAMLSKRTTYKSKEVNAQ

SEQ ID NO: 96510 - protein, 373 aa, unidentified
MKKLGEAFIGIDAAKARNAVAVADEGRGGEIRYLGEFDASPEAMRRLVQKLAAKYERLHFCYEAGPTGYGLHRLIVSLGHGCVVVAPSLIPRKPGDRVKTNRRDATTLARLLRAGELTAVWVPDPVHEAMRNLVRARTAAVETVRVHKQQVNAFMLRHGRTAPVRKAWGARFRRWLQQQKFEHPADQIVLQEYVEAVRLAEERLGRIEAAIVEFLPGWSLAPVVEGLMALRGVDLVVAVNFVVEVGDIRRFETPRQLMGYIGLVPEERSTGESIRRGSITKMGNARLRQLLVESAWTYRHPPRVGKRKLGLMARVPPKVREIAWKAQSRLTARFRVFAARGKRLTVACTAIARELAGFMWAVAQEVQPQSNAA

SEQ ID NO: 96511 - protein, 340 aa, unidentified
MDITTLGIDIAKSVFQFHGVDADGAVVVQKKLRRGAVLDFLGKVGPCLIGMEACATSHYWAREIAALGHEVRLIPPAYVKPYVKRQKNDVADAEAICEAVTRPSMRFVPVKTVGQQSVLVLHRARDLLMRQRTMILNAIRGHLAEFGIIAAQGPRQVMGLIARLRDEGDARLPEIARSALLALGAHLEALAGEIRALERQLMVWHRADATSQRLETIPGVGLITATALAASVSDPSVFKSGRQFAAFLGLVPRQHSSGGKDRLGRISKMGDRYLRKLLVVGATSVIRRAASNPTKTGAWVRSLMERKPARVVTVAMANKTARIAWAVMTRGETYRTSPIA

SEQ ID NO: 96512 - protein, 412 aa, unidentified
MDTIAAYIGLDWADERHAVHLQSADGKIEHLELEQKPAVLHEWVAQRQQRFGGGKIAVALEQRKGAVVHALLMYDCFVLYPINPKALARYREAFSTSGAKDDPLDSELLLDLVVRHRAKLRAWVPDTVESRTLQALCEQRRKLVNQRVALTNRLTSLLKQYFPQALEWVGDVASVQACDFLVQWPTLAAVQRARPSTVRRFYQDHNCRKRAVIEARLAAIADARPLTTDAAVIEPLSLSVQTYATQLRALIAAIQTFDARIGEVFAQHADHDLFGSFPGAGDVCAPRLAAAFGTDRSRWDSAAELQAHSGIAPVTERSGKSIWVHHRLACPKFVKQTFHEFADQSIRFSRWARAYYDQLRGRGKDHHAALRALAYKWIRILFRCWKERRPYEEETYIEALRRRGSPLAKNLA

SEQ ID NO: 96513 - protein, 393 aa, unidentified
MKQRKNAESEPGNDTERTSSIFISGLPACLNPDPDSRLTSIVKVVRLSSNSSFPKSVKNKSMENFYFIGVDVSKKKLDFCIMFEGKVVHEEETANHQSAIMSLLHHLEEDYGIDNTRMLVCAEHTGQYTFPLACACKAVECRLWLENAAEIKYSSGVQRGKNDKVDAKRIAIYASRFQDKVHYYERPTEDIERLKQLESERTLYVTDLAKYKGQMKDQKDYMPKALYERKMKRLQALMDDLEEAIQSITDEIDEVIASCLVLSRQRELLMSIDGVGHVVATNMIITTEAFTRFDDPRKFNCYAGVAPFSYSSGSSQHSKARVSHRADKVMKRLLHLAAVAVTHRIGGELKKYYERKVAEGKNKMSVINALRAKIVARMFAVIKRNEKYKPILS

SEQ ID NO: 96514 - protein, 355 aa, unidentified
MREEKYIGMDVHQATISVAVVDVHGKLIMECLLETKAATSIEFIQGLRGTLSLTFEEGTSAAWLHDLLKPHVNRLVVCDPRKNALLKEGNKSDRVDARKLAELLRTDQLKPVYHEEHGMRTLKELGRSYLTLTKDVTRVMNRIKALYRSWAIPCSGTTVYTPGHRAEWLAKIAEPGVRVRAEHLYQQLDSLQPVRLQARRELLRESQKHAAVKLLRQIPSIGPIRAALLVALLQTPHRFRSKRQLWAYSGFAVETHDSGEYRNVRGKLQRNRERMTVRGLNDNHNKDLKNLFKSAAISASTRPGPLHDFYVARVEKGMRPTMARLTLARKIATIALTMWKKGVGFDPQQLHRQAA

SEQ ID NO: 96515 - protein, 321 aa, unidentified
MQSYHLGIDVAKAKLDCALRLPDGKHRNKVVNNNAGGFKTLLEWLQKHGAAAAHVCMEATGVYWEEVATYLATQGLPVSVVNPAQIKAFGASHLVRTKTDRVDAQLIAAFCFERSPALWQAPSAKEQALRAMVLRLDALQNMRTQESNRLEVARETVKAGIASHIAWLNKEIDQLARQIRQHMDNDPDMKDKQELLDSIPGLGERTIACLLAFYGDLQRFDNARQAVAFAGLDPRQHESGSSVRGKPRLSKVGHSFLRKALYMPAMVALHKTAWGKVFRQRLAAAGKPPMLIIGAMMRKLVHVAFGVLKSRKTFDPTLHGA

SEQ ID NO: 96516 - protein, 356 aa, unidentified
MEKLTTVGIDLAKDVIAVCVLDVHGAVIERRVLRRDAFERWAGQLPVSNVVMEACGSAHHWGRWFAARGHSARLISAEFVVPFRKGGKNDTADAEAIAIAGRQPTMRFVPIKSVDQQAILAWHSVREGWKEERTALLNRVRGLLAEYGVVVGRSADRFLAALPKLSEDSRLPDPVHALLLEAREQFAALHVRLARCDAQIAAHARNSPAAQRAGELLGVGPVTASALAATVPDARIFKSGRQFSAWLGLTPRQHSSGGKTRLGRISLRGNVYLRTLLIQGARSTLQAAINMEPARASRLQRWIIELYGRKGYYKTLIAIANKHARILWAMLAKGERYDALAWRRHPMNQLPPAGDA

SEQ ID NO: 96517 - protein, 363 aa, unidentified
MLSEIQVAVDVGSTRHRVAIGAPDGKLLAEFDIPHTPAGFGEFFRRIERLSQQRPVAVAMEGYNGYARPLDRMILGQGFRLYSVNNLKLARYKEIFPAPAKTDAIDGRKILELFRLRDHVPLARDVLQEVAPVPPAHEKLKRLTRRRRQLVNEKVRLLNRLQADLQAVCPGLLQITGQADNLWFLRFLICRGEITQLAHLRNTTLLGLAGVGKTYAAQIRAWQQTAQFGEEVAWVGPMIVADGRRVLALLAEIGELDREIAATAEASSFAATMSSIPGFGATCKAELAAEIGTLDRFLGEASLALYLGMSALDNSSGKRTGTKAPRQVNTRAKAAMMVATAHHMASVPRSRAYYDKKRAAGNP

SEQ ID NO: 96518 - protein, 417 aa, unidentified
MGDGMASVGCDIAQTVVCAPFVLGVAPGAIVAGFDVHRRQITVDALDTLTGELWRGQLDSTPAAVERWVARFRGRIVHVAVEACTGWLFVCRALERAGAVAHLAEPVETSALRGRKRRAKTDRADAKWLRQLLCEGRLPESWCPPEHVRQWRSRARLRNALLAERTSWIQRIRATLYHHGVAGAPDDLRTLQGRQFLSGLELPLDASERIRVALEIIDLLEIQLAGIERDLRALARHQTGCRALMSQYGMGELSSLVTLVELGDVTRLHASRQAVRMAGLDIGVHRSDRHAQLGKLTRQGSAPLRWALYEAAQSACRPKSPDYADYHALKNRGLSHNRASLTIARKLARRSYHLLRALGPAALDPPDTATPPASSSSDRGTHAQRGGRQKTERPQSLHRNDRSTITSPAASRGRGPR

SEQ ID NO: 96519 - protein, 371 aa, unidentified
MKDKQEMAFVGLDASKATLAVSVAQDGREGEIRDWGTVPTTPVSVNRLLKKLAARFHRVEVCYEAGPTGYGLYRQITSFGFACYVVAPSLIPMRAGDRIKTDRRDAERLARLLRAGELTPIWVPDESHEAMRDLVRARESAAEDQRHKRQLISAFLLRHGRIYHRPKTWSMRYRRWLQRQSFDHPAQQIALQEMVLAERHAVERVARLTTGIEELVPNWKLGPVVEALQALRGVALISAVTFMAEIGDVRRFENPRKLMAYLGLVPSEYSTGQTVKRSGITKAGNSRVRRTLIEGAWSYRFPARIGEKKLYVLQKLPPEIQDIAWKAQSRLTARYRRLSQRGKKKTVITTAIARELSAFMWDIARRTMPVM

SEQ ID NO: 96520 - protein, 343 aa, unidentified
MYYIGLDVHKKTISYCVKDAAGHVHLEGKIGSTRCELDAWIKTLPQPRMIAMEATIFTGWIYDHLLPHAEKVKVAHPLMLRAIAAAKRKNDRIDASKIADCLRCDFLPECHMVSTEIRNRRRVLRYRNLVLRQTVQMKNRVSGLLMETGVSYNKLRLHRMGYFAELMSTNEEVQESIRPLLRLCREQIDRSIKLDTTLLRSLERDPMLSDRLRRLRTIPGVGPITALTWALEVGDTSRFRSIKQAISYCGLCSAEKSSADKAMRTPISKQRNKHIQQVLVEAARLAPRYSDELALVYEKERQRGNGNRATLAVARKLVAMMLAVERRNTDFVPAGEFRRTAAA

SEQ ID NO: 96521 - protein, 347 aa, unidentified
MKITRIGLDLAKNVFQVFGVDAQDKRVLSRQLKRKDMQAFFQALPACLIGMEACASAHYWAWVLTEMGHTVKLIAPQFVKPYVKGNKNDANDAEAICEAVSRPRMRFVPVKTIEQLHIQARHRVRSELIKQRTAKANQIRGLLAEYGIVIGLGVRCLRHHLPEILEEAENRLQEDFRLLLTGLRDDLVYLDERIKTEDKAIGTLANTHASARRLQQLRGVGPLVATALIAALGDGRQFRNGRQASAWVGLVPGQHSSGGKQTLLGISKRGDTYLRTLLIHGARAALRAARSKTDPLSLWLQGLCARRNPNVAAVALANKTMRLAWVLLRREEDYDPLHGHARPAQPA

SEQ ID NO: 96522 - protein, 408 aa, unidentified
MEQNIVFGIDVSSHSSTVCVVIDRIKQGKPFTISNDSFGYQKLLDHLNRYLITPLVVFESTGVYSLSLQAFLEENHIKYLKLNPLKAKKLMDNNLRHNKTDKLDAYHLALIEFCAPQKLREPQPKEYHEMQNASRYFEELTKNLIVAKNQLHRNLQSTFPQIESIMATPTGKIYWTIVSLFPHAQYVLDSDETRIYQELLSISGIGKQRARYLTARLYSLAEQAYPYDSKDSITVRAIQRNISDLFSLSEERDNVINYLEKLAKIVNSRALTIYQSIPGIARTTALRLIAELGDLRRFDTSARIDAFIGIDPGRYQSGEMDNHLGITKHGNHIARKILYRVIGQMESTKLSQPCHITDYYDNKKQSSHSRGYKKIAIASVHKLIRTMFALIKQNQLYDYNVATKNKRL

SEQ ID NO: 96523 - protein, 343 aa, unidentified
MEYYVGLDVSLKQTSICVVDQSGSVVREGVVDSDPEAISVYVRSKAPGAVRIGLETGPTSTWLWTELKRLGLPVICIDARHAKAVLKMQINKSDRNDAIGIARIMQTGWFKEVHVKDIDSHTVRALLASRALLVKIKRDLENHVRGLLKNLGLVIGRATFNVFAVRAEELIEGRPELIAAIRPLLEARNAVEQQVSELDRKVMKLARHDAQVRRFMTVPGVGPITGLAFKATIDDPARFARSRSVGAYVGLTCRRHASGEVDWSGRISKCGDAMLRSYLFEAAGVLLTRVPKWSAVKAWGVKLVKRNGLRKAKVAVARKLAVILHRMWVDGTEFNWSKKEIAA

SEQ ID NO: 96524 - protein, 355 aa, unidentified
MAQVDYNPWEYNTFIGIDVDKGSFSFTVRDHGIMNRQRKIPSKAADIYHYIQNTLDGRKVVCAYEAGPTGFHLYDYLNGMDIPCYVTSAASIPKPSNERVKTNRIDSGKIVEYLMSGKFKPIRVPEGPYRELRHLVETRERYVSDRKATKQRIKALLLYTNLHTVLQDVDANWSNSYLQELNRLECSFAIRHRLDLLLEDLVYAREKTALIHQTIRSFCREHSEINEYMQYLQSIPGIGFIVAVTTLARIGDPSTLKNQREIAAFLGLTPTERSTGDSVNKGSITHLGNKVLRSLLVEAAWVAIRKDKQLNQFYYRIRKKHHVSYASNLAITAVARKLTHIIYRVLKDRRNYIQY

SEQ ID NO: 96525 - protein, 326 aa, unidentified
MEHELHYIGIDTAKEKLDVDVLRPDGRHRTKKFANTTKGHDELVSWLKGHKIDHAHICIEATGTYMEPVAECLYDAGYIVSVINPALGKAFAQSEGLRNKTDTVDARMLAEVCRQKRPAAWEAPHPLERALRALVVRHQALTDMHTQELNRTETSREVQRPSIDAHLLWLEAELKRLAKQIKELTDDDPDMKHRRKLLESIPGIGEKTSEVLLAYIGLKDRFSHARQFAAFAGLTPRRYESGSSVRGASRMSKAGHVSLRRALYMPARVATSKTEWGRAFRDRLAANGKKGKVILGALMRKLAQVAYGVLKSGVPFDASRHNPVAA

SEQ ID NO: 96526 - protein, 364 aa, unidentified
MDVHTTNFTFCCFTADSDRGFAVAQTEPDYRQVIKYMERVQKQRGEECKFVCGYEAGCLGYSLYHQLTRCGVDCVILAPSTMHQEKGKRIKTDRRDAENIARCLAFSLYSPVYVPTTEDDAVKEYIRMRDDIKADLKRVKQQIIAFTTRHGFAFDGKSYWTQKHLKWLETLVFEHPLYKETLQEYLILYYMLDEKVAVYDTRIEEMSHLEHYEENVQKLCCFRGVAAHTALSLLVEVGDFQRFRSAKHFAAYLGLVPGEHSSSDKQIRTSITKAGNTHLRRLLVEAAQSYNRGAIGKKSAALKARQGGNPAEVIAYADKANERMQRKYYRIAFKSRHNIAKTAIARELACFVWGMMTGNISNAA

SEQ ID NO: 96527 - protein, 390 aa, unidentified
MERPVKRNDLSRSLIAFDQASTLVAVVELSLANWLVAGLVPHLTRQPIKKLRSDPDALLGLLSRWRDQAIKAGGRIKRIVVAFEAGRDGFWLARWLRARGIEAYVIHSASIPVSREHRRAKTDRLDTGLLMRAVLGWLRGEPKHCGMAAIPSIAEEDARRPTREREKLVGEQTRAINRIKATLIRFGIRTFKVKLRQASKHLEELRGPEGERLPANTMAELRRDLARLQIIRGQIREIERARLERLKRAPRQGTHPMIRMLARIMGIGIETADMLVHEVLLRKLRDRRGVARYGGLTGSPDESGSKRRERGLARAGNARVRRGMIQLAWRWLMFQHRSALAQWYRTRTAGGTPGLRKAMIVALARKLLIALWRYVTIGEVPAGAVLRPAT

SEQ ID NO: 96528 - protein, 435 aa, unidentified
MNCVNDIRLEQFLQLKKEIRGSEKHLIVGIDAAKEKHNAFFGTARGKTLVKNLVFDNTLEGFQKLLAYVERIKVQYSLMAVVFGIEPTANYHKPLAEHLIKCGHLVVLVGGVAVKNNRQLLDGRWDKHDVKDAANVADLIAQGKCLFYEYPLMTLRNVRILIALKRRLRRREHGMSVCIRNHIIAQYFPELDQYYGPSETLAVVRECLDPLEIAGMEYDAFCRTVAPGKITLAKSRRVGAIWRAAVDSIGCTMGEAASFEAQVMVDSLQQIRQTIKSVEEKLEDACMEFPEYTFLLSIPGFGPDVSSKVLGAIGDPHRFTSAKQVLKMAGLDLCADRSGKRSNSAIPVISKQGKADLRYGLYQAAFIASLKDKDFIAYFTGKLQGRAKEKGIVTKMRVKLAAKLLVIAWTLMKKKECFDPKYLTQEDQDAQKKAA

SEQ ID NO: 96529 - protein, 313 aa, unidentified
MAQLAPNVGIDVSKEWLDVAVYPGGEHVRVSNNAKGWRALVCRLTALQPRAIGIEASGGYERDVIGVLAEQELPVRSVNAWKLRQFAKAAGVLAKNDRLDARVIAWFVATLPCREVRHNPARARLAELVTARRQVLEAKLQISNRLEHLRDPDLRRLQQRRIRQLDADERLISTRIAAAIAADAVMRERHKLMTSMRGVGPVLAATLLAGLPELGTLTHRQIAALVGVVPYDFDSGKMRGLRSIFGGRASVRRVLFMAAQAAAIWNPTLKAFKHRLMNKGKPPKVAIVAVMRKLIVTLNAMLRDNAPWQPKTA

SEQ ID NO: 96530 - protein, 409 aa, unidentified
MYFVGIDIAKKTHQAAIICSDGKLIGKPFKFPNTVDGFNLFLEKLTAVNTDLSQFEIGMEATGHYWLNLYTWLSDKSFRLHVINPLQSDALRNLYIRKTKTDSVDAKIIADVIRIGQYSETQLADENIIALRDLNRQRFYLVDMAADLKRKIIAMMDRIFPEYQDFFSDMFGKTSVQIMKEYTSPEQILQIPTERLTQLLKKASRGRFTETKAKELKALAANSFAALLSSEMTTLLIRQMLEQLDLLEKQIADIEHIIAAQFTQFNTKLTTIPGIGTTLGATILSEIGDINRFDKPKQLIAYAGMDPSVKQSGNFVGTQSHMSKRGSPYLRRALWLAAVVAVSHDDLFKYLFQQKMNAGKTYAQAMGYICHKLLNTVFAILKTGEEYKPVYPPQIDVSKFADQPINSQL

SEQ ID NO: 96531 - protein, 346 aa, unidentified
MTIVEDRPVITGGVDTHADMHVAAALDPVGGLLGVREFPATAAGYASLLRWLGEFGDVALAGVEGTGSYGAGLARHLAAASIRVVEVDRADRQDRHRQGKSDPLDAVSAARAAQSGRASGVPKGRDGAVEAIRALMVAKRSARHERTQAINQARALIVTGPDELRGRFAGHAPAALAAAIAALRPRPGDVPGYATRVALREPVRRDWFLDAQLERLDELIGPLVTARAPGLLGLHGAGPDTAALLLVAAGDHPERLRSESSWAHLCGVAPIPASSGKTSRHRLNRGGNREANHALWRIVITRMSSHPATRAYVARRTREGLPEKEIIRCLKRYVAREVYHQLRDSA

SEQ ID NO: 96532 - protein, 430 aa, unidentified
MKQYELLHSLFVGIDVSMKENVVHAMPFSPEDHPGHAHLRFSAPNTPAGSVGIVEKVSDFLKFYPDVIQVVIALEATSVYSFHLATFLSVAHFNGHIPAIVYSVNPKEIHAYKKTFTDVGKDDYVDAMVIADYARSNKIRSRPWKGPELLGLRVLTRLRFRIAKLMGIVKNSTGNSIYLECSGLMTGENPFCNVWTTTCQELLTTFQGPDEILSLPDEELLNFITEKGHGRFSHPLDVVEKVKKAARNSYRLDKRVYEPLTSGLSVSFFIIHSLEAAIKKLDKSIETMAKSFSSDSYQILLSIDGVGPVIAGGLLAEIGDIKRFKTDDALAKYIGLTWRGKQSGQSESPVKHLSKAGDVYLRYYVLLATGQIINYSAKYREAYERIRSRKTLCPYRAALNLVARKIVRLIFTLLDKHQLYSDNKVMVTLE

SEQ ID NO: 96533 - protein, 440 aa, unidentified
MKRVTVFETVHQNAAGIDVGAKKIFVSVDGTEVVSFDTFTSDYYKCAEYLQQKAITAVAMEATGVYWMALYAMLESCGLQVCLVNPKETKQVKGRKTDIQDCRWIQKLFSAGLLRQSFIPQGKFMEVRQLVRERLDIIEMGSMYVNKMQKFLELMNIKIKEVISQIHGVSGLKMIQAIIDGNRDKEYLLNLCDKSMVAKKGEAILKALEGNYNDTYIVMLERNLHMWHMHQQQLAIIDKEIEKLLIQISETKQKVEVTSKPKPIRHHAPRIENLHKMMVQMYGVNLSSISGINDYTLLRLIGETGTDMSHYPTKKNFVSWCGLAPKHHQSGKSNKRVKATRCNKAGQIFKECAQGLMNSKYVAIGSFIRRLKARKDSAIAIKAGARKLSEAFYDALTKGIDYVEQGTKKYEEQIKQREKATLCRLAKKHNIKLVENHQAA

SEQ ID NO: 96534 - protein, 408 aa, unidentified
MRQLLERCCGLDVHKKSISACARVPDERGEVAELYATFGTTTPDLLELSDWMMGLGVTHVAMEATGDFWKPVYYILEADFELLLVNPAHIKHVPERKTDAIDAAWIAELLSYGLLRKSFVPPPPIRRLRDLTRYRKALIRDRSREVNRVHKVLEDAGVKLSAVATDVMGVSGRAMMEALIGGTSNPDALASLAKGRLRAKLPELQKALTARFKDHHGFMLQQMLAHIDDLDADIVAISGRIEAEIGPFAEKAKLLPSITGVGPRAAEAIIGEVGVDMSVFPTSGHLASWAGLCPGQRESAGKRKSSRTRKGSELLRTTLVECAHSASHTKDTYWAEFFWQVTRRQGKDKAIVAVAHEILIACWRVLSTGTAYCDPGPGALRARSEEQIRRRAIRQLESLGLRVTLDAA

SEQ ID NO: 96535 - protein, 411 aa, unidentified
MQPILESCCGLDVHKSMVMACIAHGALDKPPKFEIRKFSTMTSDLRDLKKWLEEYNVTAVAMESTGIYWKPIFNILEDGFDVVLANAQHIKNVPGRKTDIKDCQWIAQLFRNGLISGSFIPPRDIRELRDLTRTRRKLVEEMASEKNRVQKVLEDANIKLSSVVSKVFGVSSMSMIVLLLEKDELSAEEISKLAKGKLKKKVNQLVKALEGNVTDHHRFLLKQHLAHIDFLVKQIETFDDAIRKKLSPYETQFNDIQSVTGVKDISAASVIAEIGVNMSKFPDEAHLSSWAAICPGNNESAGKKKSGKTRRGNNYLKATLTESAWAASRTKGAALNAVYHIIARRRGKKRALVAVGHRILIEIYRVLKTGKPYQDVGEDIVNERRSKKREQAMIRDLERRGYAVSKVMTTI

SEQ ID NO: 96536 - protein, 347 aa, unidentified
MRFYNQQHKYYCGIDLHARKMYVCILDKKGKTHVHQNIKTDPELLFELVFPYIDDIVIGVECVFCWYWVADLCAEHQIPFVLGHALYMKAIHGGKTKNDKIDSYKIALLLKGGNFPIAYPYPAKWRATRDLLRRRMYLSRRCSELVAHILNTNTQYNLPGFNKKLSRKYNHEGVAERFEDPQVRKSVEVDLEMINSLNQVLKKLEWHIEKTARQHDYHTLYLLRSIPGVGQVLALVILYEIHDIKRFPKVQDFSSYARLIRPKKESNGKWAGHSNKKIGNHHLKWAIKEAAILMLRDSADAKYYVSKLERKYNKGKALGIFTHKLGRAIYFMMKNKEAFDMKRFFAK

SEQ ID NO: 96537 - protein, 413 aa, unidentified
MDVILERCAGLDVHKATVTACIRYPGPAGERTQVSHTFGTTTPDLLALRDWLAAHRVTHVAMESTGVYWKPVYYTLEDGFPEVLLVNATHVAKVPGRKTDVSDSVWIAQLLECGLLRGSFVPPPVIRELRDLTRYRKTLIQDRTREANRLHKVLEDAGLKLATVATDVLGASGRAMLTALVEGTTDPGLLADRARGRLRAKLPALRQALTGRFRGHHAFLLTQLLAHLDYLDEAIATLSHAIEEHLAPFAEAAVRLQTIPGVKQRTLEVIIAEIGVDMRRFPTAGHLASWAGLCPGNNESGGKRRRGRVRKGNRWLKAALVEASLAAIRTKGSSLGAVYRRICRHAGHNVAVVAVAHAILEIAWHLLAQGTTYRELGADYLHRRNTEQTARRHVRFLETLGYRVTLEPLSAAA

SEQ ID NO: 96538 - protein, 345 aa, unidentified
MTTMPQPMPTPVTVGVDTHAEVHVAVAKDAFGRRLDTTSVATTPAGYAELLGWAQCLGQVEAWGIEGTGSFGAGLTRFLRGQGQVVVEVNRPDRAARRRRGKSDPLDAEAAARTAQAQQGSVPKAGDGQVEMIRSLRVARATAMKARTQAINALKALVVTAPAELREPLRNLSTVRLVQTTAALEPGPVTTPLAAATLGLRTLARRYQLLSAELTILDTELDRLTRAAAPRLVALFGVGSDSAGALLVAAGDNPDRLRSDAAFSMLCGSSPIEASSGKTRRHRLNRGGDRQANAALHRIVVARLRHDQQTKDYLARRIREGKSKKEAIRCLKRYVAREVFAALPR

SEQ ID NO: 96539 - protein, 355 aa, unidentified
MTSTKYIGMDVHKESISSAVMNASGKIVMECVIETKASMILQFMSGLRGDLHVTFEEGTWAAWLYDLLKPHVTKLVVCDPRRNALLKDGNKSDRIDARKLAELLYLNKLNPVYHGEHGVRALKELVRSYLTITKDLVRVMTRVKAIYRSWGIPCTGKQVYAPRHRGEWLAKISELGVRRRAEFYYQQLDALRSLRQEVRRDLLAESKKHQAWKRLCQIPSLGPIRAAVLLGILQTPHRFRTKRPLWKYSGFAIETHSSADHRSVDGQLQRARKQISVRGLNQNCNHDLKNLFKGAAIVASSKPGPFQEFYAALLAKGMRPEMARLTLARKIATIALIVWKKGVCFDAQYLKPQTA

SEQ ID NO: 96540 - protein, 351 aa, unidentified
MPRATSSTNVIATIGIDIGKNTFHVIGLDVKGAIILRHKLSRGQVYARLANIPPCLIGMEACVGAHHLGRQLSALGHDTRLMPARYVRPYSKGQKNDFRDAEAIAEAVQRPTMKFVAIKTVEQLDLQALHRIRERLVCQRTSVINQIRAFLLERGIAVRQGLRTLRTEMPIVLAKTDKLSQRMIHMIEDLCTDWRHLDRRIATVSKEIETLSEQDDGAKRLMTVPGIGPIISTATVAAIGTGEVFSKGRDFGAWLGLVPKQMSTGGRTILGPISKRGNRYLRMLFVQAARAVLLRPQSWEKHGLKLWIEAAARRLNRFKLAIALANKIARIAWGVLHGGRNFEVRPMNQVA

SEQ ID NO: 96541 - protein, 367 aa, unidentified
MEKSSKVFVGMDVHKESIDITLAELGGEVRRLGQIGGDRVSLLKMVRKQQSKGGERVFVYEAGPCGFWIYREITALGERCMVVAPALVPKRAGDHVKTDRRDSERLASLARAGELQAIHVPDIRDEAIRDLVRGRDDAVIAQRRVRQQLKALLLRNDIRYVGRTSWTGAHRRWLSDLKLPEPAQQIVFEEYVDAIAVATGRIERLTRAIETQVLPWRFAPVVGALQAMRGIQFVHAVTLLAELGDLTRFGSARQLMGYLGLVPREDSSGEHRRQGSITKAGNSYARRALIEAAWAYRHPARVTRLIATRQTGLPKATCDIAWKAQLRLSSKYRRMNARHLHHNKIVVALARELSGFVWAIGQSVKPQ

SEQ ID NO: 96542 - protein, 451 aa, unidentified
MEKKNVKMEVINPSCAGIDIGSRSHFVAIGQELTDVREFGVYEEDLIAICHWLSESCITSVAMESTGSYWQNLYVELIRHGFEVVLANGKFTKNIKGKKTDVKDARWIQKLHSIGLLTGSFLPDEQTEKLRTYCRQRENWITLAAEATHKMQKYLKLLNFRLDVVVRDVTGLTGLTIIKDICEGNLDPVALSKHRHYNCRKSEEEIAKALKGNNREDFLFGLKQEYESYNFYQKKIAECEKIINHYLKQQINTDPAKKKLKAPDKKHKRINKNAIKGIDLNQASFQYFGGVDLMSIEGVSHSTILSIISEVGPEGFKEFATAKQFTSWLRLAPNNKISGGKLLSSKTPKGSNRLKIALRNAANAIGNLKDTHLSNFFKRVCYKKGRTVAVSATARKLAVIIWNMVVKQIPYNPPTEYLFLDEKRKLGLVSRIRKQIDKFALTNADLGFATN

SEQ ID NO: 96543 - protein, 403 aa, unidentified
MDTTVSDFMKGRYNLMIYVGIDIAKLNHFAAAISSDGEILIEPFKFTNDYDGFYLLLSKLAPLDQNSIIIGLESTAHYGDNLVRFLISKDFKVCVLNPIQTSSMRKNNVRKTKTDKVDTFVIAKTLMMQDSLRFMTLDDLDYIELKELGRFRQKLVKQRTRLKIQLTSYVDQVFPELQYFFKSGLHQNSVYALLKEAPTPTAIASMHMTHLAHLLEVASHGHFGKEKARELRVLAQKSVGVNDSSLSIQITHTIEQIELLDSQLFHTELEMANLVTCLHSVIMTIPGIGFINGGMILGEIGDIHHFSEPKKLLAFAGLDPSVHQSGNFQAQRTRMSKRGSRVLRYALINAAHNVVKNNATFKAYYDAKRAEGRTHYNALGHCAGKLVRVIWKMLTDEVEFNLE

SEQ ID NO: 96544 - protein, 355 aa, unidentified
MNSEKYIGLDVHQATISVAVMDSRGKVVMESILETKASTILEFFAGLRGTLSVTFEEGTWAAWLYDLLKPHVAKVVVCNPRKNALLKDGNKSDRIDARKLAELLRLDNLKPVYHGETGVRMLRELARSYLTIVKDLTRVMNRLKALYRSWAIPCAGRDVYYTRHRTEWLGKIREAGVRRRAEQLYQQLDMLQHLRQQARRELLAESRKHPITAKLRKIPSLGPIRSALAVALIQTPHRFRTKRQLWAYSGLALETRTSGEHRYVRGQLRRSKKQVSIRGLNKDHNHDLKGLFKAAATRASVQPGPFQDFYQRSLAKGIKPTMVRLTLARKIAAITLTLWKKGENFDATKLKSQAA

SEQ ID NO: 96545 - protein, 343 aa, unidentified
MSEYDGKQFVGIDLHRRHSVIVRQTGTGERLSAVRIVNDPGSLALQLEEAGEHPDVVLEATYGWYWAVDALQAAGATVHLAHPLGVKGFRYRRVKNDVRDAGDLADLLRMNRLPEAWIAPPPTRELRELVRYRAKLVALRSGLKAQAHAVLAKAGVLIAVSDLFGVEGRQRLARVPLGAAYAQRMSSLLELIDVLDTHERRFAEQIAAKLHDDRGYGAIQQLPGVGPVLGAVFVAEIGDVHRFADPSHLCSWAGLTPQHRESDTVVHRGHITKQGSKLVRWAAVEAIQRQPAGTKISVDRKRIEARRGKNIAKIAAARKLLTLVYYGLRDGHIRALTHQPAAA

SEQ ID NO: 96546 - protein, 315 aa, unidentified
MRDVPCFIGIDVAKAQVDIAVRPSGARWAVPNDPSGVMTLVDQLQPLHPTLMVLEATGGLERAVTGALATAGLPVVVVNPRQVRDFARAIGQLAKTDAVDARALAHCAAVIRPTPRPLPDTQTQELRALLGRRQQLIGMRTAEQNRLAGTSGHLAQDLTAPMAWLHTRIATLDDDLTTMLRASPLWRENDDRLQSVPGIGPVCARTFLLELPELGTLTRQPIAALGGVAPLNCASGTLRGRRTIWGGRAHVRTVLSMGTLVATRDNPRSKACDERLLAAGKVQKGALTACRHKVLTILNAMLKHRTPWQAREVQG

SEQ ID NO: 96547 - protein, 269 aa, unidentified
MENFYFIGVDVSKKKLDFCVMFEGKVVHEEETANHQSAIMSLLHHLEEDYGIDNTRMLVCAEHTGQYTFPLACACKTVECKLWLENAAEIKYSSGVQRGKNDKVDAKRIAIYASRFQDKVRYYEHPTEDIERLKQLESERTLYVTDLAKYKGQMKDQKDYMPKALYERKMKRLQALMDDLEEAIQAITDEMDEVIASCPVLFRQQELLMSIDGVGRVVATNMIIATEAFTRFDDPRKFNCYAGVAPFSYSSGSTYSGAYPFTFRQLIRV

SEQ ID NO: 96548 - protein, 347 aa, unidentified
MNVYIGLDVSLASTAVCVLDEKGKIVTEAQVASTYEALISFMGKLPQEIVAIGLEAGPLSHWLHKGMTDAGFEPVLMETRHVKAALKAMPIKTDRRDAEGIARLLQMGWFRPVHCKSVSSQEMRALLTSRKTVVNALSNIELSLRGVLRNFGLKLGQVSKGRYEARVRELIAGNAMLEAAVKPILRARANLRRELTGLEKLVRNLARQDPVCRLLMTMPSVGHIVALTFTSASDDPDRFRRSKDVGPWVGLTPGRDQSGERDIVGAITKCGDAGLRTALYQAVTVLLNRGRPNRLKAWAQRLTKLRGKKRATVALSRRIGVVLHRMWRDSTEFRFTREQAIALRTAS

SEQ ID NO: 96549 - protein, 392 aa, unidentified
MIYAGIDVSKYKHDCFVLDSSGEVLEDVFSFDNSIEGFRLFLSNLKKHTRSLSDEKIRIGLEATGHYSSCLEEFLYGIGLTPVILNPLSTNMYRKASTLRKTKTDKSDAKLITSMLIAESTSPTTRKSYHIRELKSLSRHRFRLIGYQSKLKISIRRILDMVFPELSASVWSIHQKSSYQLLLTFPNPRSIASCHLTKLTHLLSESSHGKYGRDKALEIRNMAKTSIGLNSPSLAFELQQTILLVQSLKEQIFALDRKIKDAVTSLDSPLMTVPGISYTLAATILSEIANINRFVNPAKLLAFAGLEPSMHQSGRYTAGNTPMVKRGSIYLRWALLNAARLVAMRDPTFSDYYHRKRAEGKHHYVALSHTARKLVRVIFHMLKTGCNFIPQA

SEQ ID NO: 96550 - protein, 339 aa, unidentified
MWYSGIDQHKRDSYLTTYGAEGPAVKQARVPNTPLQLERYFAPFPGPHRAVVESTGAWYWLADTLALLGVDLVLAHATRLKAIAAAKVKTDQVDADTLALLLRADLIPVAHMIRPAQRGPRDLMRTRLRLVEKCVSAQNSIDRLLEKFNVDTVAALDPCSQLQATCHTAQLQLLTAQIATLERALYPFLLPDADVQRLLWIPGLGKVNAFTIHTEIDGITRFPSARQFFSYCRLVPGAANSGGRTRHRSGSKAGNRYLKLAFSHAGIRAVQYYPEIRAFFKAKARRKPIKIARTLVALELARIVYHVLATHEDFNGQFKGRILSHRKHAQWPRRASPPV

SEQ ID NO: 96551 - protein, 346 aa, unidentified
MNSNDPHYKLYLGVDTHLELHVATLINGLGQVVKSNAFSANLSGYRELFAWCKSYGFLQKAGIEGTGSYGAELTKYLIKNGVDVYEVMRPNRMERRLKGKTDGIDSENAARSVLSGEVKVIPKSHAGPVESLRSLLLTRNSAVKARTQAMNQIRALLVSGPDELKQSLYLPKPQACATACLAQCSNSSEPLMISLVLLAQRWNFLNEQVKKLDKALKKLTLSAAQDLVSRFGVGANVAATLLVAAGDNANRLRKESSFAALCGVNPIPASSGKTTRHRLNRGGCRSANNALWTVAMVRMRSDPRTKDYVARRTAEGLSTKEIARNLKRYIARELFPLILKDLARLA

SEQ ID NO: 96552 - protein, 414 aa, unidentified
MSKTLYVGIDPHQKENFCCLLDQEGNKIINTFSVANNLEGAKELEDRIDLVMKEHCFTELKAATEAVSFLDLHIVDYLASSKLLSKYSPSIYQFNPKITSGFKKAYPDKDKTDAIDAFVVADRLRFGRLPEPYEDSQPYFPLKRLTRYRYHLVSNISKEKNYFLTHLFLKYSSFSDVKPFSNVFGKAGIAVITEFFSSDELASMDIEELVEFLIKEGKNRFSNPEAVAQVARESYRIRPALANSVNLILSSTIENIRALTSSLKEVNEAIANELKAFPNTLESVKGLGPVYSAGIFSEIGNIKRFSSHAKLAKFAGLTWRKTASGNFEAEETYMTKTGNEYLRYYFVEAANSLRMHNEEYRLYYESKYKEVPKHQHKRALALTARKLVRLVFALLTKNRLYQENEAFSKNGINF

SEQ ID NO: 96553 - protein, 328 aa, unidentified
MSMIATHNEFNHVVAFEVSKAELLVHCLPADTQCVIANTSKAARRLLTAELKKLHKLANARLLVVCEATGGYERHVLEVCVALGIACHRAHGSRVRFFARYLGVSAKTDTIDAHVLARYGLKSERLRLYVPPSPQEQALKELKARRDEIQAMMIAEANRLEHARHASVVRSLKSHLAALKKAFDGFEKEIAGLIAACPVLARKTKLMRSVKGVGIVTAATLLAFMPELGTLSKGEAARLAGLAPMNRDSGRLSGPRHVEAGRAAVRRTLYMAALVAMQTNANLRGFAEALKTRGKPFKVVVTAVMRKLIVILNAILRTGQPWRYAQAA

SEQ ID NO: 96554 - protein, 344 aa, unidentified
MEKHTTIAMDIAKNVFEVAVSEEPGRVRERRRLTRSQMLRFFANREPARVVIEACGAAHALARELEGHGHEMVLLPPAQVRRYVLRDKTDRTDTKGLLEADRNEEIVPVPVKTVAQQSLVAVHRLRSGWMATRTARLNAIRGFLRELGVTVPVGATRVLPALTGAMEGGRVPGTLEALLKTTAEEVRDLELRIEEAEKTLKRMAREMDAAVRLQTVPGIGLLTATALIGSVGEPGRFPSGRHLASFLGLVPRESSSGDRRRLGAITKRGDGYVRMLFTHGARSVLRAASVRKQNDRLRTWALETQKRKGHNKATVALANKLTRIAWAVWLKDRPYEGRAPEETL

SEQ ID NO: 96555 - protein, 346 aa, unidentified
MKITTIGIDLAKLVFQIHGVDERGKVAIRKQLKRAEMSVYFANLEPCLIGMEACGSAHHWARKLEGYGHTVKLMAPQFVKPYVKTNKNDMADAEAICEAVSRPNMRFVAMKTVEQQAILSVHRARQGFVKARTAQGNQIRGLLSEFGIIIPQGIRSIMKQIPEILEDGENGLPGTMRNLLERLTENLKEMDRQAKELEAQIQLWHRENAASRKLAEIPGLGPITASAIVATVGEAREFKNGRQLAAWMGLVPRQHSSGGKQNLLGISKRGDTYLRTLMIHGARAVIRFAENKAESESWLRKLMARRNKNVAAVALANKNARIVWALLAHDRIFRPDYTPAAVAVGM

SEQ ID NO: 96556 - protein, 385 aa, unidentified
MFYIGIDISKFKHDCCVIDEVGDVVTPSWSFANDQEGFEQFKSLLTSLKEETRIGLESTGHYGTNLKLFLEANDYSFMEFNPLLINRFVKSKSLRKTKTDSLDCEMIARYLMTVEYKPYPSSFYHIEKLKSLTRFRDSLVRQRSRQLVELTNILDKVFPEFKPFFKNRFSVTALYILAHYPSPEKIANMKAFDNIRKISRGSFTAIDFANLKILAKNTVGNTSDFLIDEMNTVLDIYGQLDSKVDEITITIEDCISDINPPCLSVPGIGKLSAAVIIAEFGDFSKFNNPGKLLSFSGMEPGYFQSGTAESNGRMVKHGSSLVRYTLMNCTQTVINNNPVFAQYYAKKRSEGKSHRVALSHTAKKLLRVIYTLQTKNVLFDSSLVR

SEQ ID NO: 96557 - protein, 340 aa, unidentified
MQQQITTIGLDIAKRIFQLHGADAQGRPVLKRRLAREKVREFFANLPPCLVGLEACAAAHYWARELAKLGHTVRLMPPQYVRPYVKTNKHDAADAEACCEAVQRPGMRFVPVKEESQQSLLMLHRVREQLLKQRTATINALRAHLAEFGVVAAQRRAGLRELLAVVGDQEDRRLPPLARELLQGLVEHLRGLEERTAELDRRLVAAARDGAACERLAAVPGIGPVIATTLVAAVGDAKAFTSGRHLAAWIGLVPRQHSSGGKERLLGISKRGDAYLRRQLVHGARALVRVSPGREGGLWTWINGLLARRPFNVVVAAVANKLARIAWALLSRGEGYRAAA

SEQ ID NO: 96558 - protein, 415 aa, unidentified
MALKIVYKICCGIDVHKTFVVACIASTNDKGVTTYENHRFSTYTKGLKDLLQWLLKRNCKDVCMESTGKYWIPVYNILENDCTIVLAHPKYVKAIRGKKTDKKDAKWIADLFKHDLVAGSFMPPADIRQLRDLMRYRFKLTCFQSSEKNRLQNCLTVSNIQLGNVVSDTFGKSAQAILDKLLENPADTSFDLEPLIYKNLKKKLPELRDAIDGYITPEQAGKLKIIKAHYEDLESRKAELEELILALAAPCQQELVILQTAPGIRSIFTAIGIISEIGTNMEAFPSAKHLCSWAGLTPTNNESAGKKKSVRVSKAGCYIKPLLVQCANAVIKSKKHPEIRNRYLRLKKRRGHKKAIIAIARMLLTALYHMLKNGENYNAELYRKSDLPPADREITVEQAIIIARNQGYKVKSATA

SEQ ID NO: 96559 - protein, 356 aa, unidentified
MLNDKKYIGMDVHKESISIAVRNGAGKIMMECVIETKASMILQLIDGLRGELHVTFEEGTWAAWLYDLLKPHVTELVVCDPRKNASMREGSQSDKIDARRLAELLRLNHLSPVYHGEHGLRSLKELVRSYLTITKDLGRVMSRVKAIYRSWAIPCTGKQVYAPRHRAEWLAKLTELGVRRRAEFYYQQLDALRALRQQVRRDLLAESKKHQAWKRLCEVPSIGPIRAAVLLGIVQTPHRFRTKRQLWTYSGFGIETQSSADHRSVNGQLQRAKKPSSIRGLNRNCNHDLKNLFKGSAIVASSKPGPFQEFYTALLTKGIRPEMARLTLARKIATIVLIVWKRGASFDAQHLKPQTA

SEQ ID NO: 96560 - protein, 316 aa, unidentified
MKQPGSATYIGIDVSKATLDIGVIPTGETWSISNQSDDIAALVKKLRGLKPEKIVIEPTARLELPVVGALAAAGLPIVVVNPRQVRDFARASGILAKTDRLDAMVLARFGEAVTPEIRPLKDEDAQALDALMTRRRQLGNMLTTEKNRLGNAPGPVQEDIKDHIVWLEKRLKDLDDDLDGTLRNSPVWREKDALLQSVPGVGRVLSLSMLSQLPELGQLDRRQIAALVGVAPFNCDSGSFRGRRRVWGGRSHLRSVLFMATLASTRYNPVIKTFYERLRASGKPSKVALTACMRKLLVILNAMIKSQTPWRYQVID

SEQ ID NO: 96561 - protein, 391 aa, unidentified
MSMYFVGIDISKYKHDCCIISAADQQIVSKFTITNDKDGFEYLLSTFNSLSNPEDIKIGFESTSHYALNLELFLENAHHSFMEINPVLIKEYKKSTTLRRTKTDSVDCESIARWLMTVEYKPHSKGFYHAYSLKSLTRLRDRLIRQRSFYLVKITNVLDHTFPEFKPFFNERLSKTAIYLLENYGSAEKMAHMNSASYDKLRCISRGKFSIQQFLRLKELAANTVGVNNSIFDIELNSLLTLYNSLCKEIKTLEAEITRLIEEVHPHYMSIPGIGPISAAVIYAEYGDISNFSNPGQMLAFAGIEPGINDSGTESHGGRMVKHGSSQLRYVLLNACLPLIRFDITFASYYAKKRAEGKKHRVAITHVAKKLIRVIYALERQDVDFNTQKLR

SEQ ID NO: 96562 - protein, 436 aa, unidentified
MEDVEDEPLFCERVAGIDIGKATVMVTIRVPSDSRAKGRQQETREFGTTRRELLALADWLRSWQVEKAGMEATSDYWKPVYFLLERAGFECLLYQASQVRALPGRPKTDKLDSAWQAKITERGSLAGSFVPPEEIRRLRTHTRYRRKLVQMRTAQKERCEKLLEDAHLKLSSVISDIHGVSGREMLRAIAAGERNAGVLAQMARGVMRGKIARLEQALDCSFFTEEHAFILTMMLDSIDQLSAQVAVLDVRIAEMCAPYERQIEQLDGIPGFGITTAQDLIAEIGVDMTVFATAGHLASWARQAPRMSESAGKRKGKNATGRGNPYIGGALGEASISAGRTQTFLGEQYRRKCRRMPRKKAQGAIMRKQIVIAHALLSDPGAVYEDLGTDYYERRADIRREVLGHARAIERHGYKVILEPLEPGPDPGILPVTRAS

SEQ ID NO: 96563 - protein, 482 aa, unidentified
MHPRVTNICPITRDVHRFTFELAGALEITNEYSGLAVAPAHLYCFRRSQAGMSHTLNLAQWSIVMEKQDDLPFAAYVGIDWADKKHDFCIEIPAEGTQEFDVIPHRINLIDQWVRTLHARVKGPIAVAIELTRGPLISALQMYDFIVIYPVNPGSLAKYRQAFTPSRAKDDPTDAALAVDMLRRHPERCKPLRPQSADMRALITLVEQRRQLVGERVRLTNRLRAALKQYYPNALEWFDHVDTMVFCDFIAKWPTLVQAKRARIATLNRFFHEHNVRFPSVVQSRITAIKEAVPLTKDDAIIVPYRMKAQAVVEQLKLLLGSIKAFDVEIDSVATRHADYGLFRALPGAGPSLAPRLLVAFGEDRDRFGSATEVQMYSGVAPVTERSGKKEWIHWRLQCPRFLRQTFVEWAAQTINKSYWAGEFYRQQREKGCTYQAAVRALAFKWIRIVYRCWQTGIPYDEAKYLKALERRGSPLMVKKTA

SEQ ID NO: 96564 - protein, 419 aa, unidentified
MKLFVGLDVSKATLDACFLSHEDDTHTILWQTTVANSDAGARTLKNKIIEFHEKLEYDKIVVGMEATGQYSMHPSLFFSNDPDLKLLNVQTIVENPRVIHRFSKVWTDEKNDKLDAQLIAEFISTGKHSAAQPREEKFVALLRLTRTRYQLIRQQSEAQQHYVENLYYKCNTLTSDLQDENISTSIFSSTMIQLMTGNMTMADIRTMKTADLAELLQTFGRQRFKDPEKLAQVIKKSVSDSYRLGKVAQESIDINLGIQMRVIRSFEQEIKTIDKAIADIMETVDEAKSLLSIPGIGPVYAAGIIAEIGQIDRFDHESKLAKYAGLYWPKHQSGKFQKEQTPMSKSGNRYLRYYLVQAANSIRRYIPEYKDYYDKKYNEVPKAQHKRALVLTARKFVRLVFALLSNHQLYIARSGAVES

SEQ ID NO: 96565 - protein, 363 aa, unidentified
MQVRHIFVGIDLGDKNSVGRIAVDRDKSERFGFLNTRQGRARLFREAKRRSEQADGATIVMAYEASSCGFVLSDEAEALGIKCRVLAPTKMEKSVEQRQHKNDDRDANDVLEKLRGHVLAGNRLPTVWVPDLETRDDRELIRTRLDLTEKQTQIKAQIRMLIKRHGLEKPSGLGAGWTIGYRRWLQALRESEQLLGWSTRQALDSLLRQLQCLEAEIDRVQKPLEELANEPRHKPIIEELRQEAGVGLLTAMVYRTEIGQAGRFGRGRQVGKFVGLTPTSHESGQQSDRKGHISRQGPPRLRKVLCQASWVHIVHDARAGRIYQRLVSRNPKKKKIALVAVMRRLAVRMWHRMRKIELQQVRA

SEQ ID NO: 96566 - protein, 461 aa, unidentified
MKIRLGVDIACRAPHQASCADEHGVMLVTGHRFRTDPDQLETLWARLPDDVDEVMVIMEPTRNAWVALAAWFRRRGATVVMVPPEQSADLRAYYSKHAKTDRLDSKILARLPLLHPEGLHREDTLGPGDALKRAVKIRSGLVHRRTSSMARLDALLEILGPAWAAAIGSDMTLTALRLLARYAHPEKVKTLGTARLAAFLRRSSRQQWGEQRAAAIVDAAAATLRLWGTDGMDFDALAADIAVEARLALTLSEEIKALDRRIADLYEQVDPDGIVRSAPGVGTVGAPQIAGRLGDATRFANLAAIRCFAGLVPHQDSSGQAARAGGPTKAGDACLREALYMAADHARKIDPTLAARYHRLITEDGKHHNSAVCTIAAVLLTRIAACLRNGTPYQLRDTDGTVITEQQGREIIARRYTIPPAVRAARRQLTGTTRQPRRNERAEKGVAKRSEAPPVHEPACT

SEQ ID NO: 96567 - protein, 412 aa, unidentified
MEGETVIAGVDTHKDVHVLCLLDGLGRKIWSGSFGADPEGYDRLAEAIGDPGSCAVVGVEGTASYGAGLTRRLVELGYNVVEVLRPKRDKARPGEGKSDPLDAERAARKAASGRGCSVPKSQDGWVEAVRQLYVARRLAVATSTSCVACAKSMLTTAPGALRERFRGRERPKDLMPLLARGRKAGDALEESVLASLRSVAAVWKEARSQVESLDERIRALLEANAPALLGVEGCGTTTAAALVVAAGDNPGRLKGEAAFSMLCGVSPIPASSGKTERHRLNRGGNRQANWALYEIAIKRMAYDERTRRYVARRTSEGKSRREAVRCLKRYIAREVYRVLMDPNPDGAAPEGPELAKMRKAMRVTQKKAAAELGLSAATLGHLERGRRRSTKLERRYYELLCELERALPQTAS

SEQ ID NO: 96568 - protein, 406 aa, unidentified
MIDDELAEVTVPQIWAGVDIGKTHHHCVVINTNGERLLSRRVQNDESDLFQLIGDVLAISPDALWAVDLNHGGAALLLGLLVNHGQPVAYLTGFAVHRASGTYRGEGKTDAKDAFVIADQARVRRDLGLLRPGDDIAVDLRTLTARRLDVVFDRTRQINRLRAQLLEIFPGLERALDLTLKGPVMLLTGYQSPAAIRRAGVRRIETWLKNRKVRGAATLARTAVETAQGQLTALPGEKLAAAMVARLAKAVMDLDAEIAELETLIEATFRQHPHAEVIRSLPGMGPRLGAEFIAATGGDLGVFGSSDRLAGFAGLAPQPRDSGRVSGNLRRPKRYHRGLLRTLYLSAMVSLQCCPASKAYYDRKRREGKGHKQALLALARRRVNVLWAMIRDGECYHETPPVTLAA

SEQ ID NO: 96569 - protein, 411 aa, unidentified
MDTIVERPGALDVHKAQVTACVRTPGAGRVREAHFAEFQTTVAGLLTLRDWLAAHGVTQVTMEATGVYWKPVWAILEDDFELLLVNARHVKQVPGRKTDMSDAAWLCQLAEAGLLRASFVPPKPIRALRNLTRYRKTQIQERAREANRLHKALEDTGIKLDCVASDILGVSGRAMLDALVSGTTDPQVLADLARGRLRAKLPALREALQGRFDRMHALWIGSILAHIDFLDEQITGLTEMIAEQIAPFEKAVELLCTIPGVQRRTAETIIAEIGIDMTIFPTAKELASWAGQCPGNHQSAGKRRSGKTRNGSKWLDWGLEEAALAATRSKDTYLAAQYARLRPRRGHKKALGAVKHSIIVACWHMLSTGEIYKDLGGDYFQRRDPTKTTKRLVAQLERLGHTVTLQDAKAA

SEQ ID NO: 96570 - protein, 355 aa, unidentified
MTHRECEIFAGLDVSMELTSLCLVDAGGDLIWRGVCATDPRLLVAEIRRAGAGRRTRIGLETGALSPWLVHGLRAQGFDVICLDARHVRAALSSRPNKSDDADGEGIAQILRSGWYREVHVKSLATHHLRALLAARGLMINQRTMLSNQMRGLLKVFGVKLGSGVAGSFVRRVMAVADADEDLAQITRPLLTAWQTLNEQIAVLDRTLRATARDHPACRLMMTVPGVGTLVALTYLTTIEDPTRFASSRRVAAHLGLTPRRWQSGEMDRRGRISRCGDGMARTMLFEAANVILTRVRAPSQLKAWGEALVPRIGKKKARVAVARKLAVLLHRIWVTGRAFQASGVGHEIGLLAAA

SEQ ID NO: 96571 - protein, 349 aa, unidentified
MTMVGGFDVHRKQITFDYVDGDGLVRWGEIRPATRKSLRGWLGEHCPAGDAELALEGCTGWRYVVEELAAAGVVAHLGDPAEIAGRRGPKKRAKTDRADARLLRTLLLQGRFPESWIPPAHVLEVRTLGRLYCALMEERRGWQQRIHAQLFHQGCPPITALLSSAGRETLAGAELSAAGRQYVDTALRRIDELGTEIEPLRAQLVNFARRQQGCQALQARHFGIGWLCAAIIWAEIGDARRFNSSDKLVRFAGMDITVYSSDAKRAPGHLSRRGCPELRWAVFEAAKCAARRGSPDYAYYHQLAAKHDGHNGKNPTLAVQRKLLRRCYHTLRALGDTALSAPTSNREAA

SEQ ID NO: 96572 - protein, 353 aa, unidentified
MDRYIGLDVHMQSCTMAVMGPTGRRLREEVIATNGRELVAAIRKVEGQRHLCMEEGTQSEWLYELLEPEVKDLVVTVPEASPGQKSDARDAWARADELRQGSIKTKVFKAAAGQYTELRYAVRGYRFMVQDMTRAKNRLKALYRSRGINGMKDEAYDEATRGPWLAKLGPSQRKLAELIGEQLDRSVELVTQAKERLEAAAGEHRIVRRLATAPGLGTIRAAQVVATVVAPERFRTSRQFWSYCGLGIEMRTSSDWVQEKGRWVRSRVQQTRGLNRNRNAVLKSVFKGAAKTVTTRMTDHPLARAHQALLAAGTKPNLAELTIARRIASAVLAMWKHQEDYDPGKQEAKPQTR

SEQ ID NO: 96573 - protein, 400 aa, unidentified
MTTRHERIWVGIDAGKGHHWAVAVGADGETLFSTKVLNDEAQILALIDTAREKADEVRWAVDISGRASALLLALLIAYGQQVVYVPGRTVNRMTGAYRGEGKTDAKDALVIADQARMRRDFTPIEIPPELVSTLQLLTGYRRDLIADRVRLINRLRDLLVGICPALERAFDYSAAKGPVVMLTEYQTPAALRRIGVKRLTTWLERRKVRGAGDIAAKAVEAAQSQLTALPGEKRAAKLVCDLAHQLLTLDERIKDNDREIRETFRADERAEIIESMPGMGPVLGAEFVAIVGDLTGYRDAGRLASHAGLAPVPRDSGRRTGNYHRPKRYNRRLRWLFYMSAQSAMMRPGPSRDYYLKKRAEGLIHTQALLALARRRVDVLWAMLRDKRLFTPTPPVTQAA

SEQ ID NO: 96574 - protein, 437 aa, unidentified
MSQELPMLDPLAAFVDVGSEHMHVSVGGNTPEVFGTVTSQLHALRDWLLAQGVRSVAMEATGVYWLPLYGVLESAGLEVRMVNGRQTRNLPGRKTDMADSQWGATLHMHGLLHAGFVPPADIRRLQDYLRLRADHVAAAATCVQLMQKAFERMNIKLHDVISSLAGVSGLAVARAIVAGERSPEALVALCDVQIRRKKEQAVIEALRGTWADEHIFALAQALQSWDHYQKLIADCDARIAAVLPPHDDTQPPLPRSTRRTGVNAPEIARLREILAQMCGGRDLTKLPALSSYGVLQLIGEVGTDLSAWPTEKHFTAWAGLAPGNHDSGKRTKGVRRGRNRTGRLFCMMAQSLVRSKDIALGGFYRRLAARRGGLVATKALARKLAAWFWRVMVKGDDYVEKGLARYEEQVRKTREHALKRLARELGRELVPLPGVSD

SEQ ID NO: 96575 - protein, 416 aa, unidentified
MEVIVSRCAGLDVHKNTVMACVRVPGPNGGRTSTVRQFRTFTAGLRQLRDWLVAEQVSQVVMEATGVYWKPVWHVLDPTPGLELMLVNAYAVKNMPGRKTDVADAVWLAELGECGLLRPSFVPPPVIAQLRDLTRYRKKLIEERARETQRIQKLLEDAGIKLDSVVSDILGVSARQMLEALIAGVRDVAALAELARTRMRPKIPQLRQALEGRFGAHHALMLRMHLEHLDQLSVSIDRLDSEVDRVIRPFRSVLQRLITIPGVGRRTAEVIIAETGADMRRFRTAGHLASWAGMCPGNHESGGKRRSGRARKGNAALRAALCEAAWAASHARSGYLPAQYRHLLRTFGKKGQTRAVFAVGHSILVIAWHLMAHDRDYADLGGDHFTRATDAEARQRYLVRQLEALGHKVTLEPAAA

SEQ ID NO: 96576 - protein, 481 aa, unidentified
MGKQKMSTFERLNRQQRRKLRRQLALPDPGLTIVHANAGGVDVGNESHFAAVPPGRDPQPVQEFGCWTADLVRMAQWLQACRVDTVALQATGVYWIALYDVLTRHGIRVALVNAQHTRNVPGRKSDVQECQWLMKLHTYGLLRDSFHLDEAIQKVRTIWRLRDGHVKEASQAIQHMQKALTKMNVQLANVISDLSGLSGQTIIAAILAGERDPYKLADLRDRRVQASREEVARSLEGHWREDLLFELQQAVEAYQFAHCQMRECDRQLEQYLTALPTRTLRASEASEPAEPRAAPSKTKRRRKPSGNAPAFDLRTELRRIAGVDLTTIDGIDVLTAQTILAEVGPDVSAFPDEDHFASWLGLTPSKDITGGKVIRRGRRKVKSRAGQALRMAATTLRESNSYLGARYRHWRYRFEVKAAAVKAMAHQLAVLVYRLLKYGQAWVDQGAAKFEQKQEQAELARLRTRAAARGLKLVPLGAEIQ

SEQ ID NO: 96577 - protein, 354 aa, unidentified
MGLKHQKEKRSMDYFGGLHVSVKDTSVCIVDDTGGIVREVKVASEPEALLAVLMNPLSRFKRIGLEAGPLSQWLFSALVEAGLPAICVETRHMRAVLKAQINKTDRNDARGMAQMMRVGLYRPVHVKTLRSQKLRMLLTHRKLLQSKAIAIENDLRATLRNFGLKVGVVGTVRFEARIRELVENHPDLTLLVEPLLVVRGVLREQLDILHRRLLAGVRDDNVCRRLMTVPGVGPVVALTYRATVDVPARFRKSKSVGAVFGLTCSRDQSGERDRPGAISRCGDEMMRAMLYEAAQSMLRSKKWSWLKAWAMKIARHRGMKRAIVALARRLAVIMHRIWVDGTEFRWTREAAAAA

SEQ ID NO: 96578 - protein, 324 aa, unidentified
MLPTLGIDISKDSFHVELSVNDKLHHRRFSNRKAGFAELSVWLTKHKVAGLHACLEATGPYSEALALYLHEQGHTVSVVNPARIKAFGQSELLRNKDDRPDAALIRRFCEKQQPSAWTPPTPQLRELQSLTRHLENLLETRQQQVIRLEAPNAKSVVKSLRKLVAQLQAEIQRTEQQIADHIDRHPDLKQQCQLLTSIPGIGPRTAAKLLAEIEGLNKYESARQVAAYAGLTPLNNRSGTLRGRTRLSKTGNARVRKALFLPAIVAQQHNPIVRTFCQRLAQRGKPKMQIVGAAMRKLIHIAYGVVKSGKMFDPNHELLLKSVS

SEQ ID NO: 96579 - protein, 417 aa, unidentified
MDTLFVKVAGLDVHLKRIQCAVRCYQPTGKLFTQVRSFGTMTRDLRALADYLQRLGVTHVAMEATGVLWKPVWNVLEGRFTLLLVNPRHLKKVPGRKTDVTDAAWIAQLLQCGLLRGSFVPARPLRELRDLTRHRAQLAGEHTRVANRIHKLLEDANIKLGAVASDVLGKSGRNMLRALLDGQQDVEQLADMALGVLRKKIPELKLALEGNCTEHHRYMLGRLLSHLGYLEGQTEALSRRIAHRLADLLPAVLQSRLDKIPGVNRTTIENVIAEIGVDMSIFPDEHHLASWCGLCPGNEESAGRRLRSRTRKGNRWLRRALAEAAWAASRVKQSYLRSQFRRLAARRGKKRALIAVGHSLLVIVYHMLKNNVAYSDLGADYFERLEPERLRRYLVKRLERLGYDVTLSAKNPDDHEA

SEQ ID NO: 96580 - protein, 332 aa, unidentified
MLYENYVGIDVSKLSIDAFIRESRIHRQFRNEESGFKQLIQWIKKHIGETWEALLICFEHTGLYSFSLALFLEREHIAYAMVPALDIKRSLGITRGKNDQIDAKRIAEFAYRFNDRVMPTSLPAKDIRKLHSLLAIRDKMMRNMGGYITSRNELFRVIPDRELPVLTSVYENIISTLKNEVHELEREIRSIIMANKELKTTFELITTVKGIGFIVVSFLIVYTCNFTRFENWRKFACYSGIAPFEYQSGTSVHARTQVSSIANQQMKRLLHLAAMTAIHFDAELHNYYVRRQAEGKSKMATINIVRNKLIARVFAIVKRGTPFVDIQKYVYL

SEQ ID NO: 96581 - protein, 342 aa, unidentified
MTIATIGIDLGKNTFHLVAFDEIGGVVARKRFSRSQLIRFMVTLRPCRVGMEACSGAHLLGRQLTEQGHDVRLMPPQYVRPFVKSNKNDFIDAEAIAEAVQRPTMRFVPLKTAEQLDLQAFHRVRERLVTRRTAVINQIRAFLLERGLVLRQGRAHLARVFPDVLSAPTHIVSERMRILLEDLRAEWRALDTAIMQATREIETLATHDPACHRLVGIPGVGPVIATALVAAIGDGTAFTKGRDFAAWLGLVPQQHSTGGKPRLLGISKRGNSYLRRLFVQGARSVLLHADPTRHAFGPWLTTLRARVHHNVAVIALANKLARIAWAVLVRQQPYRALAPAIP

SEQ ID NO: 96582 - protein, 334 aa, unidentified
MKSDTVHIGVDVSKEKLDIYVPAKKEGSRPLTKEVDNDIKGFRELRDLARKAKATVCVEPTGGYELELIAFMHKFDVAVAYTDALRVRQFARAEGNLSKNDTIDAALISRFADKIGVRVLEQQEVEAVELKRKAKFRQTMVDSRTAMINRLETEIDPEMKALLKEQIRLADRIIDKAEKLCLDTVKKNERMDSLRERFTTIGGVGDLTAISILSSLPEIGTLSDGKLNRLVGIAPEEKQSGTKEWQRRIWGGRKDVRNALYMAAVASIKWNAILGGYYHKKRAEGHPHKWAIVPTMRKLLSLLNRIARDPGFTPTPEPKSTKQNANVGRKRKAA

SEQ ID NO: 96583 - protein, 375 aa, unidentified
MSDHSEAFVAFDTSKSRNAVAIAEAGRAGEVRFFGEIENTAAATAKLVRKLAGKYQRLTFCYEAGPTGYGLYRQIRSLGHECLVVAPSLIPRKPGDRVKTNRRDALGAVKLLRAGELTAVWVPDPRHEAMRDLTRARGAAVEDLRRKRQQVSAFLLRQGRHYSDGKKTWTKAHMNWLASQKLEHPEQRIAFEEMLLAVRQAQERIERLEQAIRAAVPDWSLAAMVTALMAMRGIDLVSATALLAEIGDLSRFQTAPELMAYLGLVPSEASTGDTVKHGPITKAGNRRARRMLVECAWSYQHPPRVGKEKQEKVAAAPRAVREIAWKAQCRLSARYRALIRRGKLKTVAVTAVARELAGFIWAIGREVTTADAAAR

SEQ ID NO: 96584 - protein, 391 aa, unidentified
MHYYVGIDIAKSFHVAYVVNQDDKTIKSSFKFNNDEDGFSKLLLLLNSIDEVSTFTIGMEATGIFFENLYIYLKEKEFNVILLNPYQTNRFREMDTMKKVKNDNIDALMIASLIKSGRYSKAYVSEDMYQSIKSLYRHKNTLLEEMKKHKRQISTLLAVVFPEMEQVIKDPFNVTGLALLEKYPTAKHYEYASIERILKTFRGIKGNNFNEQKAQKLLELAQHSVYQGNGKDERAYVIKSHIRVIKLLQEELKELENEMLKLFKQSPQLNKNEEQEIIDIIDNLRTIPGVSDKTIFALISECGDLSRFKSNSHFIGYLGLYPTLEQSGNKVSYGPIAKRGAKFAKKALYQASIAAIRHNNELNKLFMDKVSQGRAKKEAVVIVQESLLKLF

SEQ ID NO: 96585 - protein, 348 aa, unidentified
MRFYTHQHKFYCGIDLHARTMYLCILDQEGKVLQHRDIKTDPAILLKTIAPYREDIVVAVECIFTWYWLADLCSQENIHFVLGHALYMKAIHGGKAKNDKIDAYKIAALLRGGMMPMAYVYPPEMRSTRDLLRRRTHLARRRAELITHIQNTNHQYNFADLGRVSRKCDRIKAKVADRFTDTSVQKSIELDISLIEHYDKLLNHLEHELSLIAKVHDADSYFRLRSIPGVGRVLGLTILYEIHDIHRFPSVQDFVSYCRLVKSAKESAGKIIGSSGKKIGNAHLKWAFSEAAVLFLRRNPEAMKYRAKLERKHGKAKSLTILAHKLARAVYNILKRKEVFQPETFFAK

SEQ ID NO: 96586 - protein, 433 aa, unidentified
MLLTPYNSIEPLVPKGVPMALKIVYQICCGIDVHKTFVVACIASTNKQGVTTYKRHRFSTFTQGLKELLQWLLDNHCKDVCMESTGKYWIPVYNVLKNDCTIVLAHPKYVKAIRGKKTDKKDAKWIADLFKHDLVAGSFMPPADIRQLRDLMRYRYKLTCFMSSEKNRFQNCLTVSNIQLASVVSDTFGKSSQRILDKILENPHDTSFDIESLIHGSMKKKLPELELAIDGFITPEQAGKLKIIKKHFEDLESRKAELEELILALASPYQQELDLILTAPSFKNTFTAIGIISEIGVNMEAFPSAKHLCSWAGLTPTNNESAGKKKSVRVSKAGCYIKPLLVQCANSVVKSEKHPEIRNRYLRLRKRRGHKKAIIAIARMLLTALYNMLKNKEPYNSELYRKSDILPVNREITVEQAILMAQFQGYKIKSATE

SEQ ID NO: 96587 - protein, 429 aa, unidentified
MSAHPYKKIGRGFMFKIVYPVCCGIDVHKQFVVATIANTDKRNLTTYQTQRFSTFTKGLRELVSWLAQTNCSVVCMESTGKFWIPVYNILEPSCQITLAHPKYVKAIRGKKTDKKDSVWIADLHKHGLVPGSFIPPATIRQIRDLIRYRSKLVSFASSEKTRVQDSLTVSNITLASVVSDTFGKSASAIIDHLINHPEDRDCDFRRFLHRSMLNKADSIALALEGDISPVQAEKIGWCKKHYEQLQSHIATIESRVRSIAQPYQRQLTIIESVPGLKAFSALAVLSEIGPDMNQFHSHKHLCSWAGLAPSNDQSAGKKKSVRISRAGVYIKPLLVQCALAAIRNKSFPFYRIRYQKLKSRRGHKRAVIAIARMLLVAIFHCLKDDTPFDPKRYEARLVASSSEAVRDRAVSALFADAKRLGYTVLFSGT

SEQ ID NO: 96588 - protein, 396 aa, unidentified
MTAIWAGIDAGKTHHHCVVIDDTGKRLLSRRVANDESELLKLLGDVLALDDEAVWGIDLADGGAALVIAVLLNHGQQLLYISGRVVNRASEGYRGDGKTDAKDAAVIADQARIRHDLTPLRAGDELVSELKVLTRHRRDLSDDRTRTINRLRGHLTEIFPGLERELDLGNIGPLVLLSGYQTPAAIRRTGRRRLATWLRNRKVRSPDELAGKAVQAAEGQHTAVPGEDITAHVVHSLAGEVITLNEKIAETDKLIEGRFRRHRNAEVIASMPGIGVLLGAEFLAATGGDMGAFAGPDRLASFAGVSPVPRDSGKVSGNLHRPTRYSRRLQRVFYTSALISIRCCDESRRFYDRKRAEGKRHSQAVMALARRRVNVLWALLRDGRCYDPTPPVTLAA

SEQ ID NO: 96589 - protein, 341 aa, unidentified
MKNKSFIGIDISKNVIDVSIFCEGTPIKDFPHDVFNNSRKGFGEMYTWLKKNHVVLSNCLFGMEFTGSYSMELEKFLNARNYQFCMLSTHVVKHYPMGPKDKSDKIDSAKIADFLYRYNGTECVKPYNMPDKTMQRLKALMNERKFLVEQRTCFMNRRQLCITKEDAQLYDGYIKKFSRDIENIELEEQKLLATDDSLLTTYKNLLTIPGIGFVNAINVIVITRNFTAFETARQYASYVGVAPHFRTSGTSVKWRPRPSARCDGQAKADLSMAATVVVQYDAELQSFYNRKLGGKQDSDTKRKALNAVKFKLVLRMFAIGKQNRKWEPLDSKSSNEKLAIS

SEQ ID NO: 96590 - protein, 420 aa, unidentified
MGMLNQVGETMHYQEKFIYVGVDLHKETHTAVIINCWHQKLGEIQFANKPSAFPELIKAVKKHSKGLTPVYGLEDVGGHGRSLAVYLNEQNQSVKEVNAALAHSLRLSRPIVHKSDSWDAECIANTLLANLNTLPDANPQDLYWTIGQLVLRRRALVKAMSALTNQLHGQLTCAYPSYKQFFSEVDGKTALIFWEKYPSPHHLDKVSQEELTAFLRECSNNACSTSKAQQILELIKKDGDTKRGYQNSRDFLVRSIVRDIQFKKQEIARVEAELKTVMSELDYKLESMPGISTVTAAELVTEIGDVRRFSSANKLARHAGIAPVSFGSGGKSKTIKSKQGNKELHSIIYFLAVRQIGVDRTTKKPRNEVFYNYYTKKVAEGKTKGQALICVMRRLVNIIYGMMKNKTEYMLPAIPEKEAV

SEQ ID NO: 96591 - protein, 341 aa, unidentified
MYYIGLDLHKKTISYCIKDISGKVFGEGTIEATRQGLDEWMKQLPGAWMAAMEATIFTGWVYDHLRPHGVAVKVAHPLMLRAIAAAKKKNDRVDAATIADCLRCNFLPECYMAPMEIRDRRRTLRYRNLLVRQATQLKNKTAGLLMETGVTYNKKKLHQGGYFTEFLATNEEISESLQPLLRLNRGMLVGLKKIEHGLLRSLEQDPQLVERVSRLLTIPGIGPVTALSWVLEVGEVKRFSSVKQVISYCGLCADEKSSAGVAKRGPLSKQRNKHLQTVLIEAAKLAPRWSPELALVYDNVLEKGNRNRATLAVARKLAAYLLAVDRGERGFEIRGREVTAA

SEQ ID NO: 96592 - protein, 349 aa, unidentified
MRFYTKHHQFYCGIDLHARTMYVCIMDHEGKILTHRNMPATAETLADVLQPYREDLVLAVECIFTWYWVADLCNRIGIEFVLGHALYMKAIHGGKVKNDKIDSQKIAALLRSGMFPVAYVYPQPMRSTRDLLRRRLYLSRQNAQLQTHIQNTNTQYNLPSFEKRINHRSNRTGIGDRFTDPMVRTSVEVDVALMDTLHEQILTIERQINAQVPEHDPVAVHLLRSIPGVGKILALVIFYEIHDINRFPKVGNFISYARLVKCAHESAGKRRTGKNSKIGNVHLKWAFSEAACLFLRRNERAKHYHKKLVSKYGNAKALSIIAQKLGRTVYTMLKRRTPFDAKRFFETVG

SEQ ID NO: 96593 - protein, 347 aa, unidentified
MSITMIGLDTAKSVFQIHGVNETGKVELRRKLRRSDLIAFFEKQERCTVVMEACGAAHHWARILSGLGHTVKLIAAEAVKPFVKKGKKNDAADAAAICEAASRPDATFVPVKSVAQQGILALHTTRSLLVKQQTMLANAIRGLASEFGLVVPKGLHNLEPLVALVEADEAVPAQARRAIAELYKRFGELATGIQAFETAIVAHARSDATARRLATIPGIGPITASLIAATVVDISRFKTARQFAAWLGLVPRQNSTGGKTRLGRITKAGNREIRKLLVLGATSMVGRAEGWHSAVGSWLRDILQRRPVRLVTVALANKMARIAWSVMTRNEVYRPQGGVAAKAQAAE

SEQ ID NO: 96594 - protein, 400 aa, unidentified
MNDNDGIDVFLGLDVGKTNHHGHGLTPAGKKVFDKPLPNTEPKLRDVFEKLKAKFGTVLVIVDQPASIGALPLTVARDAGCKVAYLPGLSMRRIADLYPGEAKTDARDAAVIADAARSMPHTLRSLEAADEITAELTVLVGFDQDLAAEATRTSNRIRGLLTQFHPSLERVLGPRLDHQAVTWLLERYGSPAALRKAGRRKLVEVIRPKAPRMATRLIDDVFEALDEQTVVVPGTGTLDIVIPSLARSLGAVHEQRRATEAQISTLLGAHPLSPVLTSIPGVAVRTAATLLVTVGDGTGFPTAAHLASYAGLAPTTKSSGTSIHGEHAPRGGNRQLKRAMFLSAFAALHDPASRTYYDRCRARGKTHTQALLRLARQRINVLFAMLRDGTFYEPRTPRLA

SEQ ID NO: 96595 - protein, 355 aa, unidentified
MKRGSSAVPKLTTGLDVGDRWTALCTVDEGGAALERGRIATTPAGVERRFRQGPVQRIVLEAGKQSPWMSRLLASWGHEVIVANPRRVKLIAAAANKDDPRDAETLARLGRLDPQLLRPITHRSAEAQQDLAVVRARDALVRSRTLLINHVRGVVKSLGSRVPRCSAPAFARQADRVVPDALRPALAPMIAIIEQLTGEIRRQTRAIEALGQTRYPEALPLQQVQGVGPITALAYVLVLEDPTRFATARSVGPYLGLVPRRRQSSRADPQLRITKTGDGLLRRLLVQSAHYILGPFGPDCDLRRYGERISARGGKNAKKRAVVAVARKLSAVLYHLWVTGDVYEPVHRAASQVAA

SEQ ID NO: 96596 - protein, 314 aa, unidentified
MAHQSVVVGIDVSKDILDVALLPSGECLQFSNDRSGLRALVSVLKRKKASLVAFEATGGYEKGLLTALTKAKLAASRINPQRVREFAKACGVMAKNDRIDAVMIARFAATLAPRLTVSNVRIEALAELVTTRRQVVEDLTRVGNQSAQTTQALIKRLALRRLRQLTIHLKALDLAIAKMVADDPDFARDDDLMRSMLCIGPVVSHTLLALMPELGKLDNREISALAGVAPFTRDSGKFKGQRTIFGGRQPVRDVLFMAAMGASRLNPTLKVFYDRLIAKGKLPKVALVAVMRKIITTLNVMLREGQKWRRPATA

SEQ ID NO: 96597 - protein, 312 aa, unidentified
MNTQQIFVGIDVAKAWLDIHVLPDGASRRIANRPAGHRALVRSLTARRAARVVLEASGGYERAVAAALRSAGIPVDVANPRQVREFARGRGVHAKTDAVDAHILALFARQDPVHATAAPDPARDKLREYVAFRDWLGQELIALGNHLEHLQDRDLRADLEDRRQQLRTKIRKIELRLLQLVRAAPALARLYRRLCAVPGVGLITACTLIARLPELGRLSHRQIAALVGVAPFPRDSGNWHGKRMISGGRAAVRKVLYMAALVATTHNQTIKARYRKLRTAGKPSKVALVACMRKLIIALNAIVRDDAEPKTV

SEQ ID NO: 96598 - protein, 340 aa, unidentified
MDTSKHFFQLYGVNAAEEPVLRKKLRRKDMVAFFEKLAPTVVAIEACGGSHHWARLLSSFGHQVKLIAPQLVKPYVKRGKNDAADAEALCEAMSRPTMRFVPVKTAEQQAAVMLVGVRDRLIRNRTQLANSIRGYASEYGLTAAKGMAHLDPLIERIQADESLPVLARELFAAQAKEYQQLQAQIDEVDVKLKAWYHADECGRRLAQIPGVGPIGAALLMMKTPAPEMFRSGRQFAAWIGLTPKDHSTGGKVRLGVITRAGDEALRSVLVVGATALLRFVANGKSKSALSPWLGQLLKRKPAKLVAVALANKLARIAWKLMVTGQSYVRKSTPTTVAGAA

SEQ ID NO: 96599 - protein, 338 aa, unidentified
MLHSGIDLHKRTIALSTVTADGQPVRDAELPTTRAAVRAYFDALPGPHRAVVESTSNWYWLRDLLAGAGVDLRLGHSKYIKAISYAKVKTDAVDAATLAQLLRSDLVPEAHMVSAEWREARDLLRARLQLVSQQVRCKTTVAGLLAQYNVTAPAALPPLVQLRTAMLAEQYALLGAQAKRLAATLNPVLIPTPDVQRLLWIPGIGRVVAFTIWLEVDGIQRFPSARDFVSYCRLVPGAGNSGGRTRHKRTKDGNRYLKLAFSHAAVRAIQYYPEIQRFYRALARRKPPAVARAVVAKELARIAYFVLSKQEAFNGAFKGKPLSRTKQPKWPRLASPPV

SEQ ID NO: 96600 - protein, 387 aa, unidentified
MPKATSSANASLHSGAGLAELGDWLLSIAGAASTVAVAIEVPHGPVVDSLVDRGFVVHAINPKQLDRLRDRFSVAGAKDDRRDAYVLADGVRTDRRLFRPLHIADPGLVELRAWSRLAEELKEEQCRLSNRIGQQLWRYYPQMQKVTDDLAAAWFLELWTIAPTPAKARQLRKPSVERILKQHRIRRVDADTVLHTLREPAIKVADGVAEAASIHLRSLVARLRVVNRELREAEVQLDKLCMIIGESKATSGDCLRRQDVLILRSMPGIGRINLAALLCEASGPLGSRDYQALRTLCGVAPVTKRSGKSRIVIMRYAAHVRLRNTVYHWARVAAQRDPKCRARYAALRQRGHSHGRALRGVADRLLALACVLLQRQTLFDPHLAQAR

SEQ ID NO: 96601 - protein, 336 aa, unidentified
MRYIGVDLHTTQITVCYLKAEEECSIRKYQLVEMEKFVNTLEISDEIAVEATCNTRWFAEQVAEKVRRVVVVNPRQFEVVKNSCKKTDKHDALNLARFLRADLLPEVRAKREEAERVQSLVNTRTKLVRLKTSLINKIHALYVSNGRKLKKASLASEKGLEKVLLQEWSAIEGIELEIIIEQIRSLKVSIKKLDKAIEAESGKLKGFENLVSMSGIGSLSAGILLSVIGNVKDFETADKLASYFGIVPRVSNSNETVKHGRITKRGNKTGRTTLVQCSLSAIKKSEYLKKYYEQVKARRGHGKAKIALARKYLGIIYNTLTNNWVFADFNNFELAE

SEQ ID NO: 96602 - protein, 414 aa, unidentified
MESEYRLMVGIDWATEAHQVCVLNRQGRLLEQRRAEHRAEAIATMIDRLIELAGGDPASIAVAIEVPRGAVVEALVERGLHVYAINPKQLDRFRDRHTVAGAKDDRRDAFVLADSLRTDLSAFHRVHLDDAWTIQIRELTRIEENLNTEINRLANQLRDLLLRFYPQLLRLCPAADQPWLWALLKLAPTPAKAQRLRRSSIQRLLRQYRIRKWTADQVRTELKTAPLSVAPGVTEATCAHIALLLPRMELLMAQYKLCSKAVQTALDERVSAEEERREHRDVEILLSLPGVGRVIAATMLAEASQLLAQRNYHALRTLGGVAPVTRQSGKRWAVRRRYGCNHRLSNAFYHWARVSSQRDPRAKHHYQTLRQIGHSHGRALRGVADRLLALLVAMLRDQTLYNTTRAHAPNPIAA

SEQ ID NO: 96603 - protein, 337 aa, unidentified
MLVSAPSYRLFVGVDIAATSFASAWTLSGPARGRAQTFSQSPDGFTAFQAALARTGVEAAQTLIVLEATGSYWITLAVTLHQAGYAVSVVNPAHAHNFLRSLPRRAKTDALDAQMLAQFAAERQPPRWSPPEQVYHELRQRLLVRDGLLTMRQQARNQRHALEQWPVTIEAALTALDKVVAECDRQLQSLEREIATVLQEGAWAETAGLLASISGVGLVTSAWLLVSTVNFTACASAEAAAAYAGLVPLAHESGTSVRGRRQIGHAGNARLRTALYMATLSAARYNPVIRAQYERLRAAGKPTKVARCACARKLLYLAYAVVTKGQEFDPHYREHSG

SEQ ID NO: 96604 - protein, 413 aa, unidentified
MVAVVYDRCCGLDVHQQTVVACLITPGPDGQPAKEVRTFGTMTADLLELADWLRAAACSQVAMESTGVYWKPIWNLLEDEFALLLVNARHIKAVPGRKTDVKDCEWLADLLRHGLLRASFVPDRPQRELRELTRYRTALVRERTAESNRLHKTLEGANLKLSSVASKLLSLSGRQILDALLAGTTDPAVLADLAKGRLRAKLPQLERALAGSPGLHQHFLLARQLAHIDFLDETLEQVSAEIAERLRPLEPTIERLDAIPGVGRVTAEVLLAEIGTDLSRFPSAEHLASWAGMCPGNYESAGKRQKGKTRKGSMWLRTALVEAGQAAARKTDSYLAAQYHRLVPRLGKKKAAVAVGHSILRSVYYLLVRETTYQELGGNYFDERYRHRVEQRLVRRLEQLGFEVQLTPKDPAA

SEQ ID NO: 96605 - protein, 387 aa, unidentified
MPQPNDLSRSLVALDQNSTVIAVVELSHSSWLVAGMVPGIERQPRKKLEPNPERLLGLLHRWRYEAVKAGRTITRIALAFEAGRDGFWLARWLAARGVEAHVIHASSLAVSREHRRAKTDRLDTELLKRGFLGWLRGERGHCSMARVPTIAEEDAKRPNRERDCLVGERTRIVNRIKSTLVRLGIRTFKPTLRKAAERLATVHTPEGMPLPPNTLAELQRDIARLGLVVSQIREIEDARRKRLEEAPETGPHAMVRLLARIVGVGAETADMLVQEVLSRPMRDRRAVARYAGLTGSPDESGARRREQGLARAGNARVRRGMIQLAWRFLMFQKESALTLWYRARTADSRSGTRKTMIVALARKLIIALWRFVTTGEPLEGVVLRPAT

SEQ ID NO: 96606 - protein, 360 aa, unidentified
MNEEDRTRLEDFRQFRKEIRGSSEYLLVGIDVAKDQHHAFFGTATGKTLFKRLVFENNLEGFRKLLVQTEAMKVQAGLTQVVFGREPTGNYHKPLGEHLIRCGHRVVLVSGVAAHENRKTLDGRWDTNDTRDAANVADLISQGKCLFYEFPVGALQDLRNLLSLKRRWKRMEDGQRVRIRNHLVAKYFPELDRYYDQSESTVLAIVRWCLDPSEIAGLEYKKFIQRVSSIRGRSSQEKRLQIIWKMAVDSVGCEAGPVVEFEAQVMVEGLRQIRERIEEIEEKIQGVCSQFPEYEFLLSIPGFGPDVSSKVLGAIGDPLRFQNGRQVWKMAGFDLSAERSGKSSPSAIPVISKKGKADLR

SEQ ID NO: 96607 - protein, 374 aa, unidentified
MKDGQKFIGLDVSKDIIAVGIADEGRAAPRFHGNIANTPEAIRKLFKKLGDPENLLVCYEAGSCGYSIYRQLLSMEIECIVVAPTLIPKRTGDRVKTDRRDSLRLAQLLRAGELTAVWVPDEIHEALRDLIHARSDTREDLQKARQRLVHFLLRHEIRPPQGVRNWTIKHRTWLNTLTFEKSSLRIVFQEYLHSIYEVEERMKRIEAEVHEEAIKSEHAPVIQALQTLRGIAEVTAVTLVAEIGQFSRFSNPRQLMSYAGLVPKEYSSGSSRWQGPITKIGNSHIRRALVECSWAYRHRPSLKGELLKRQAGQPIEAQRIAWKAQHRLNLKYNRITARGKAGKFAVVAVARELLGFIWAIGCSIEDQKLIQSVA

SEQ ID NO: 96608 - protein, 375 aa, unidentified
MENMAVGNNRLCGEKVAAGIDPARYSIQIALLSPTREYYNRTMPLSAKTVDEVKSLIPESAPVVVEGYATSGRLFFLELINKGIDIYELNPNLGKHLRILEKEGHSDTEDARSIARSGIYFPQRLGRIYLYENLESISVLVKMRQRIRKDLTSETNRCHALLSETYGDTYQELKHLIHSKKGRAFLHHFPSINALLKDEVGLNLKKKVRAEKPWKASLLVSSLEENIRFLLHKIELCETQIKDVDKRLESALSEIPQGIRLMRIPGIGALSAATILTEVKDIARFKKESKFAAYCGLAPCIWQSGKAKARGIRRKSYSRVLKGIFFNIAFTAVRIDDKAKAYYEKKIKEGKCHRQALLCVARQISRVVYATLKEK

SEQ ID NO: 96609 - protein, 409 aa, unidentified
MVVQAAPVTSSTVVVAVDVGKAEFAFSVTDVSRTSLLKPRTGCPMTGPSLAQIVGEIGRVLPAGAVVKVGVEAAGHYHRPLLLAAAWPAGWELVELNPGHVTEQRRVLGKRTVKTDVIDLQAMTELLLAGRGQPVRERSLVLGELAAWSAHRTGRVVVRTATKNQLLGQLDRTFPGLTRALPDVLGTKVGRLVVAEFPDPARLAALGSTRFIRFGATRGLQIRRPVADRLVQAARDALPTADAAVARAVLAADLALLADLDAQVEQATEQLARLLPVSPFAPLLTVPGWGAVRAGTYGGAVGDPARFDHPRQVYRTAGLNPIQYESAGRRRDSVISREGSVELRRALIDLGLGLWLNDPAAKAYGAQLRARGKKGKVIGCAMAHRANRIAFALVRDQSAYDPRRWIRED

SEQ ID NO: 96610 - protein, 379 aa, unidentified
MVRTFGTMTGEILELVEWIKEHQCTHVAMESTGVYWKPIYNLLELSEIEAIVVNAQHIKAVPGRKTDVKDAEWIADLLRHGLLKGSYIPSREQRELRELVRYRKSLIEERSREVNRLQKILEGCNIKLSSVVSDITGVSARSMIEAIISNISDPKLLSKLAKGRLQSKKENLEQALHGLVGPHQRKMLAAQLDHIDFLDGKIKELDQEVEDRQRPFEEELELLDTIPGVGRRSAEVILAEIGTDMDRFPSDAHLASWAGMSPGSNESAGKRKSGKTTKGNKHLRSTLVQCARAAARSKQTYLSAQYHRIAARRGSNRAATAVGHSILVIAYHLLKKRQPYHDLGANYFDKRKSAAVLNSAVKRIEALGYKVIVEEKIAS

SEQ ID NO: 96611 - protein, 423 aa, unidentified
MYYVGIDVAKRFHIVCVLDERDVIVKKNFRIESEISDFSLLGSMLCEIDSDKSNFIIGMEATGLLFENLYLSLQQQGFNVVLLNPYQTTKFREMDTMKFVKNDNIDSQMIAALLKSGRYSKAYVSEELYQSIKSLYRHKATLSDEMKKTKRQVSTTLAVVFPEFEQIIKDPFSVSGMALLEKYPTAKHYKHASGERILKLFRNIKGNNFNLEKANTLLDLALTSIYQGNAKDERAYVILSNLRRIRFLKDEIIQCETQMKALLDDSSKEVSQTITKDDEIYIADLVDNLRSIDGVSDKTIFALLSECGDISRFKDAKAFIGYLGLYPTLSQSGNTTKYGRLAKRGAKLAKMALYQASIASIRHNDELRKLYLDKKSSGRAAKECVIVVARKLAKIIYAIYKYNTPYEPMRVFNSQSQTNTLSH

SEQ ID NO: 96612 - protein, 455 aa, unidentified
MRFIGLDVHKDFCEVAVVEGDACWSGPRVRSTPEDLEVFGQSLGPKDHVVLEATGGALAIARILERYAGRVVMANPMAVRAIASAKAKTDRLDARMLAKLLAAGFLPAVWMGDERTRLLRRMVSRHAQLVKQRTRAKNEVHAVLQRTLKGRPPASDLFGKRGRAWLDDQDLPADERQTVQASLRHVDFLDGELRLVDRAIAEQVLGWPEVRRIMTIPGMGAMAAAGVMAAIGDIRRFPTPRHLVGYLGLDARVRQSGSAPARHGGISKHGSSEARHLLVEAAWAAIRTPGPLRAFGERIRARRGANIATVAVARKLAVLSWHLLTREEDYAFARPSLVRQKVRLLELAAGDPRRVGYRNPVRVFATPAQHRLECEVGAQAENAYRRFVKDFQATGKKGAGATTGARISVPPRGASSAAGTIPRSCSLARGSPHPGPMVKERSRHVQTHLTFIRSG

SEQ ID NO: 96613 - protein, 577 aa, unidentified
MDFKNNPHNFFNTNLLFNPHGFYISSAGLLNFCWGYEKHHWSCCFNNIQEIALSIPNFRLLLLYIILIKCSVIARKMCILTLLFKQHRIIVYPVIPSLGKLHIRKLSYRHLPVMIHDKQGCSTLFITPEKVYHPSVPPDIWTVVLATISMSEKEAITFVLVHFKEELKMNNYISNPPDQSSRAGSNPLVVGIDPHEDILGVVFLLNNTIIKGFSIPNCSKQHFDNLIADALSKSSNVAFVIESTNVFWRPLFSYLTNKGLPVFTVNSYQTNSSRKTKMRKTKTDLIDANNIAELYLQGKAHQTLFPEGQLFDLRELTRFYFWISDIKGRILNRIYAYMFQVFPEYSSVFPKRYFSKTLFYLLKHKLFHPQSLSKMDPEKLSEIIRKVSHDKYTNKVKQLVSLANNSTGISEGKKAFETTLKLLATFYQFLETMLDFMELKSISPILETVPNKFSTIKGFSKIAQASFISELGNPKKFDNADDVLAFFGLDPSLGQSGRRNGQGKHISKAGSKFARETMFLAATTVMLHNPVFKQRYQRLRKQGRHYIDAKTILAADLTKICFAMYRDNSEFDSNKVI

SEQ ID NO: 96614 - protein, 398 aa, unidentified
MKVSGLDVHKNSIFCAIYDGKSYSQVKEYDSTLPKIRQMGDYLRSEGVTKVAMESTSTYWVPVWDVLLEMGFELMLVNPFLIKQMPGRKSDIKDAQWISCLLHKGLLRGSMIPSPLIQQLRVYSRKYTKLQEQKTRSLQKMDRIMVMCGYRIGSCMSNLGTKSVMLIIRALIMKETNPEILESLVYGNTANKVSGKLREALTGNLKEHHRQQLEWERQEYDLFELQTEQCLAQMRAICKEHYSKEIELIKSIPGVSDISAMIIIAETGGDMSVFENSGKITGWVGLRPRNDESAGKFKSTATTKGNKYLRSVLVQVSWAASRIKDGWFKEKFIRLSIRKSRKKALIAIARKLLTVTWNVLYYKTPYNPQLVHIYDPVKVEAKFNYHQREMERMQKLLK

SEQ ID NO: 96615 - protein, 323 aa, unidentified
MQGKTLPEQNAQMRVYVGVDVCKDWLDIYLHPLGQKLRVANAPEGLKALKRQIAGMPVALIVMEATAKYHRLPHRSLHAAGFAVAIVNPLRSRLFAEAIGQLAKTDRLDARVLAIMAESLEPRAAAPAPEHLEAMQEIVRARSAAIADQTALSNQRLASQTAFLRAELGRRLKTLAASIARLDVEINRRLRADPALKRRFDILISIPGVGPVAAIAMIVGLPELGACSGKAASQLAGLAPLACESGEKAGERHIKGGRGHVRKGLYFAALTAARFNPQFSPVYKRLRAAGKKPKVAITAIMRKLVVLANVLIREDRPWTPIHA

SEQ ID NO: 96616 - protein, 369 aa, unidentified
MKKDSTLYVGLDLHKDSIVAAYASSEGGDPVHLGAIGTRQCDIDALVRKLQSKGARLVFVYEAGPCGYWLYRYLTGKGLACLVVAPSLIPRKPGDRVKTDKRDALTLARLARSGDLTPVYVPQVADEAIRDLARAREDALGDLNDARFRLKALLLRHDIRYTGRANWGDEHRRWLARFVFPTPAQQIVFQEYVRTVTERTELLGRLEAALLEQAKTWRMYPVVEALQALRGVQFTVAIITVAELGDLTRFERPPELMKYLGLTPSEYTSANRRRLGGITKAGNGHARRALVEAAKAYRHRAKVSEQIQARQQHLPKAICDIAWRAQVRLCGRYRKMLARGKHPNTIAAAVARELIGFMWAIAKEQPVAA

SEQ ID NO: 96617 - protein, 371 aa, unidentified
MSHYREAFVGIDVAKLKNAIAVAEFGRDGEIRYFGEVEASDVSMRRVIQRIAAKFDRVHFCYEAGPTGYGLYRLIKSLGHECIVVAPSLIPRKPGDRVKTNRRDALALARLLRAGELTAVWVPDEGHEAMRDLVRARTAAVETLRVHRQQISAFMLKHGRIYPRKKGWTMRYLIWLQEQRFDHPAHQIALQEMVDAVRVSRERVDRLEKVIEEFVPNWSLAPIVQALQALRGVDLVVAVTFATEIGDVSRFESPRQLMGYLGLVPGERSTGETTKRSGITKAGNSRVRTLLVESAWTYRFPPRIGSKKLYKLEKVPPSVREIAWKAQSRLSARYRLLTSRGKKSTVVCTAIARELAGFMWAVSKEALQPRL

SEQ ID NO: 96618 - protein, 371 aa, unidentified
MEEFKYVGLDVHKETIAVSVADDQGGEVRYLGEIPNTPEAVVKLARQLKKGGSTLSFCYEAGPCGYELHRQLKGLGHDCQVVAPSLIPTKPGDRVKTDRRDSLNLARLHRAKELTSVWVPDEPQEALRDLTRGREDMKRMQRQARQRLLAFLLRQRKTYSGKKRWTQAFDRWLETLKFDQSIQQIVFQEYIDLVHAMDKRVAAFDQQIEVASTHSVFAPMITGYMALRGVDRLTATTVVAEIGDLRRFSSAPQLMAYLGLVPSEHSSGPSKVRGSITKTGNGHVRRVLVEAAWTYRHPARKSATLQRRAERSPQAVQDVAWVAQKRLCGRYQLLQDRNKLKVQVCTAIARELTGFLWAIGQAMPSPAPATL

SEQ ID NO: 96619 - protein, 340 aa, unidentified
MNHYAGIDVSLECSSVCVVDASGKIVREDKVASEPEALISWFAALGLSLERIGLEAGPLSQWLYAGLRGAGLAVELLETRHVRNAFKTMPVKTDRKDARGIAELMRIGWFRPVHCKSMEAQETRAMLTARKLVQKKLRDFEASLRGLLRGFGLKVGKTTPRTFEGRIRELVAGHPSLETITAGLLSVRAVLLREFNAFEKRVRSMARADARARLLTSVPGVGAIVALTFVSAIDDPARFKSSKSVGAHFGLTPKKYQSGETDITGRISKIGDGGVRTAAYEASHVILTKPVKGCAALKSWATKLARRAGMSKAKVALARRLTVIMHRMLADGTTFANRPA

SEQ ID NO: 96620 - protein, 428 aa, unidentified
MNHNTQNDKIEAIDSETLVGGIDIGSEYHFIRFFTDRKIELSKKPFKFENNQEGFDQIIGLIEDLKAKYHKKDVYLGMEPTGHYWFNLMIALEFKGYHVVIVNPMHVKKSKELDDNSPAKNDRKDPKVIAGLVIEGRYQKPYLPDGVYAELRSFNILIENATEEMTCKKNQIARWFAIYFPNFKDAFSDYTRKSAMLILKVAPLPADILKLGEEGVNKIWREAKLRGVGMKKAKELVEAAKCTVGMQRAPKSATLEIRHLIEDFECLSERRMELETEAAELLKQVPNADKLQEIKGVGFKTTLGFVAEIGDLTRFDNAKQIQKLAGLSIVNDESCKHVGEHHISHRGRKRLRYTMYLAGVSVIAHNEAFAEIYQHLITRSENPLKKMQAVIAVSCKLIRIFYGVLAHGITFDENKMLRDITWYGKDAA

SEQ ID NO: 96621 - protein, 339 aa, unidentified
MTLYAGLDLHSSNTYIGVLDQQFKRIFKKRVANDLDLILETLEPFRGQLQGLVVESTYNWYWLVDGIMDAGYSCVHLANPSAIKQYEGLKHSDDQHDAFFLAQLLILGILPQGYIYPKEARPVRDLARKRMFLVQQRTAHILSLQSLLARCCGQKVSSSQLRKVTGQDLKRWLKEEHLVLSAQANLDNIVFLKQQIGRIEAAIQKQVKLTEAFNCLLTVPGIGKILAMTIMLEAGDIRRFANVGNFASYCRCVSTQRLSDGKSKGSGNRKNGNRYLSWAFTEAAQMARRFNSRFRSYYDRKAAQTNSILATRALSNKLARVCYYIMRDRVEFREELASH

SEQ ID NO: 96622 - protein, 363 aa, unidentified
MNIPVRIGMDTSKSVFQLHGVDENEVVVVRRQFRRAEMIRYFERLPPVLVAIESCGSSHHWGRLLQSFGHEVKLIPPQYVKAYVKRGKNDAADAEALCEAVTRPSMRFVPVKSKERQAACMLMTVRERLVSVKSQLSNAFRSYAAEFGIVGPAGRQNVAALIKRVLEDDSLPEMARDLFRLQADEYAAVQARLAKIEAKLMKWHREDDISRRIATIPGVGPIGSSMLSMKAPPPETFRSGRDFAAWLGLTPKDHSTGGRQRLGGITKAGDSILRSTLIVGATALLRHVRKGRHKPTPWLASLLERKPPKLVAVALANKFARIAWRLMISGGVYNQPVATSRPDLKSAREQACSADCPRTCRTQ

SEQ ID NO: 96623 - protein, 321 aa, unidentified
MKPTTDIPPFVGIDVSKEWLDLHILPSNTRRRIPNTEEGCKKIALILKPLQPKNIVMEGSGGYEKLIATQLAEKELPVAVVNPRQVRDFARSLGILAKTDKIDAEVLARFAQQVAPEPRFVPDQQRMELKELATRRRQMIVIRGAEQNRLEQTHSKAARLSIQRIIQTLDEQLKEIDDEIERTIKFCPIWRVQGQLLQSVKGIGPATASILITALPELGLVNRREIASLVGVAPFNVDSGKKRGKRMVRGGRTNVRKSLYMAALTACRWNPVIKTFYKRLLENGKQKKVAITACMRKILIIINAMMKQEYAKSASKVALAA

SEQ ID NO: 96624 - protein, 411 aa, unidentified
MQVVVERCAFLDVHRDTVMACARTPDGAGGRREEVVEFRTTTSQLLMLSDWLVERGVSLVGMEATGVYWKPIHWVLEEAIDAVWVINARHMRNVPGRKTDVADAQWGAQLLEHGLVRPSFIPPRPTREQRDLTRYRKSVIEERGRETQRLHKVLEDAGVKLSSVASSVLTKSGREMIDALVAGQRDPAVLAEMAKGRMRTKIPELKDALAGRFNDHHALLCRAMLARIDQADATIDGLTARIEALQDPHEAAVTLLVGIPGVSYRSAQVILAEIGTDMSRFPTAGHLASWAGMCPGNNESAGKHRSGRTRYGSKWLRIALVEAAQAAGRSKGTYLGAQYARIRGRRGPGRAAVAVGHSILVIAWHLLSTGEPYDDLGGDYFDKRRTSTAHQKRLVAQLEAMGHKVTLEPAA

SEQ ID NO: 96625 - protein, 398 aa, unidentified
MTESSDYESVQVFIGVDVGKDTHHAVAINRSGKRLFDKALPNDENKLRSLISDLKQHGQILLVVDQPATIGALPVAVARSEGVLVGYLPGLAMRRIADLHAGEAKTDARDAAIIAEAARTLPHALRTLKLADEQIAELSMLCGFDDDLAEQTTQASNRIRGLLTQIHPALERVLGPRLDHPAVLDLLQRYPSPEKLASLGEKKLAAQLCKLAPRLGKRLAADIAQALAEQTVVVPGTNAAAVVLPRLALQLITLRKQRDEVALAVEQRVLAHPLYPVLTSMPGVGVRTAARLLTEVACRAFASVAHLAAYAGLAPVTRRSGSSIRGEHPSRRGNKALKRALFLSAFAALRDPLSRAYYTRKMSQGKRHNQALIALARRRCDVLFAMMRDGTFYTPQAS

SEQ ID NO: 96626 - protein, 320 aa, unidentified
MAEKKFKSFIGIDVSKQQLEVAAHESEYRFRCANKVSAFGELIAELLALRPTLIVLEATGGLETRVVGALHTAGLPVVVVNPRQVRDFAKALGQLAKTDRLDAHVLAHFAAAIKPPLRPIKAKEQQELDALTGRRGQLVEILADEKNRRASAASDTVRDQIKEHIDWLEDRIAELDEQIKALLQTSPRWQVKDQILQSVPGIGPVASFSMIADLPELGTLNRQQISKLVGVAPLNRDSGQQRGTRHIYGGRAGLRRVLYMAALTASRHNAVLKAFYQRLRANHKPFKVAITACMRKLLSIINVMIRDSTTWKIKDEHVSA

SEQ ID NO: 96627 - protein, 418 aa, unidentified
MTRRDDSRIIRIVHPICCGLDVHKESVSACVIFPDDNGEEQHEVKVFGTFTDDLTRLREWLMEHDCPVVAMESTGIYWRPVHNVLEDSVQVVLVNARDMHNVPGRKTDIGDSRWIAGLLRHGLLKSSFIPPQDIRQWRDLTRLRKKYVHTVGDYRKRTHKLFESANIKIDSVVSDLFGVTGRNLMQLLVANRKLTLSAIQTCVRGKLKGKEAELFRSIQGFFTDHHRFVLKMILETIATLEGQIEALDLQISGAMKEHEALLDRMKQAPGIADVSSREILAEIGPTLDSFPKDTALVAWSGLCPGNNESAGKRKSGKSSVRKHHLKTIMIEVAWAAIKKKGSYFKDKYYRLKARRGAKRAIVAIAHRILLGIYHVIKDGADFRDLGGDYLTLKNKSQKVFHLRKQALAMGFDLVPQTV

SEQ ID NO: 96628 - protein, 346 aa, unidentified
MEYIALDVHKKYSWARVENPQGERLYECRLAHAHGTIKNFVHRWSEGSPVAVETVGNWYWVVDEIEAGGGKPQLVNARLAKLMMGSVNKSDKLDAKGMNRLQRTGTLPTVWIPGASVRDARELPRTRMVLSRQRTQLKNRVHATLGKYGFTVEGASDAFGKKGRKIVEELLPKLPPHTEQALRRILDQLDHVADNLKEIEAQMMEAFAPCPQTQWLKTLPGVGDILAVVIWTEIGTIERFGRGEQLASYCGLVAREHSSGGKFRYGPVRRDVNVYLKWAFVEAANSSVLNRERCQYNHISQLYQRIKARRGHGKAKVAVARHLSEASFWILKKGEPYREPLSSTQR

SEQ ID NO: 96629 - protein, 367 aa, unidentified
MKKVSTVAAKASRKISPQKLTVGLDLGDRSSWYCVLDEAGSVLLEQRVSTTPKALREVFGGMPRSRIALETGMHSPWVSRLLGELGHEVIVAHARNVRLIGESRKKDDRLDAQTLARLARIDPELLSPVKHRSAKAQADLSVIRARAGLVRARTALVNTARGLAKSYGERLRGCNVRNMNLEKAEGLSPELQAALQPLLAALESLSERIAEYNQRIEKLAQESYPQVALLKQVKGVGTLIALTFLLTLEDPHRFRKSRDVGCYLGLQPGRRNSGQSEPQLHISKEGDPYLRTLLVQGAHHILGPFGVDCDLRRWGLKLAERGGKSGKKRAIIATARKLAVLLHHLWVSGEEYEPLHNSSQTTVAAAA

SEQ ID NO: 96630 - protein, 350 aa, unidentified
MLIIGCDYHPAFQQIAFVDTATGDCGERRLEHREEAEKFYRERAAQGMKVRVGMEASGQARWFERLLAELHFELWIGDATVIHAKRVRKQKTDRQDAQLILRLMLQDDFPQIWVPSGENRDLRQLLWHRHRMVQARTRIMNQLQAVAINEGLRCKKRLWGESGREQLEAFRLAPWASRRREDLLKLLDGLNPTIAELTQAIEQEVEKCPAAQRLRTHPGVGPLTALAFVLIIGRADRFQCGKQIASYLGLVPLEDSSGNRRRLGHITKQGSSMLRFLLVEAAQVTARSLPEWRSQYVHLTMRRGRKIAKVAMARKLAVRLYWMMRKEWDFGKLTKFGSHAGKPGTGDGVK

SEQ ID NO: 96631 - protein, 419 aa, unidentified
MNTLNTTSFTAFIGIDWADAKHDICIQSADGDEREFDVIPHQVERIDEWAHAMRRRFGSPIAVAVELSKGPIVYALQKHDCFVIFPVNPSTLAKYREAFQPSRAKDDPTDAELAVDLILRHSARFKPLQPQSVEIRMLASLVEQRRHLVDDKIRITNRLRVVLKQYYPQMLEWFDHIDTPLFCDFLTRWPTLVQVKRARKSTLRKFFHEHNMRFEYVLERRLNAIKTATPLTLDEAVVVPHRLQALVYVEQLRVMLNAIKRFDIEIESVAKQHEDYALFTALPGAGPSLAPRLLVAFGEQRERYKSAADIQKYSGVAPVTERSGKKHWVHWRWQCPTFLRQTFVEWAAQTINKSYWAGEFYRQQRAKGSTYQAAVRALAFKWIRILYRCWQTRIPYDEVVYLKALERRGSPLLTAAKVA

SEQ ID NO: 96632 - protein, 317 aa, unidentified
MNTPENQTLINIGVDVGKANLDIALHPSGQSFTIPNSTTHIRELVKILKGYAIERIVVEATGRYEHALVRAISQAGLPIIVVNPISVRRYAQAIGVLAKTDRIDAQVIAKYAATLKPEFKPIPDKTSQKIKDLLARRSQLMEMSTMEKNRLQILPKTLHSSINSLLKTLQTQIKTITKQIEQEVAKVDHWQSKTDILTSVPGVGKVMAFTLLSELPELGELNRREIAALVGVAPINRDSGKLTGKRRIRGGRHRVRTVMFMSMMSAIQCNPVFKQFYERLKAQGKLPKVALIACMRKMIVMLNTMIKNQEPWRKKTA

SEQ ID NO: 96633 - protein, 409 aa, unidentified
MNKYGNEYLNLRICGIDPHKSFCKAVVVDEETLNTVDEFDFKNDRNGVLFLIERLRALGCHKVVIENTNNFSTALYHTLMRYGFDVASVNPALVPKKRKKSDRIDAKWVAISYLYELVEADYIPPTEIQYLRDLTRLRTKLVDIRSTLKNKVHAVLTRADIHLGDVFSDIFGKQGLAVLDSLAGGLVNSLRELDVRRDIVDRVENTIENSFLELLNRAVLRVLLSLIKVFDDEIKRLDEMIAAHIDEHEELKRLTEQIMSIPGVGFITAAVIVAEVGDFNRFSDAKKLVSWAGLSPRVSESAGKQKDGKITKRGSPYLRRALHEAANVVTRSKRPLVLYRFYRRVSGRRGLQKAKTALARKILTIIYHLVVQGELFEGKNESYRGLHERKVKRFIHLSKAGRSVIERCM

SEQ ID NO: 96634 - protein, 358 aa, unidentified
MQRNKISFKVQKIFVGIDVHAKNWEVAIAPEIGIVRRHSQKPSAKELFDFLKKNYPDGEYQAVYESGFSGYSTYYALKEVGIECMVIHAADVPTTQYEEVMKTDRVDAVKLVRSLKAGLLKGNYIMEKQYIDDRSVVRIRRTIQKQLSGYKSRVKHLLHCHGVEFPERFSKKQTHWSRAFITWLMKDVCLMSDTRASLDLLIRQVEVLRGTLLEATRQLRKMSQTERYKRRHDLLRSIPGIGLIVTMCILTEVCDVKRFHNENQFAAYLGLIPTSHSSGEKIVHGEKTFRGNKQLGPMIVEAAWITIGRDAGLGAQYYQYKKRMEPQEAIVRIARKLSNIIFSVLKDEKEYVPYQTGN

SEQ ID NO: 96635 - protein, 317 aa, unidentified
MPQPDLFVGIDVAKNELVVRLHPLGEEWRFANDKAGLKALEHRLKAFAARYHLLIGFEATGGYERKLAALLDRLGLTAYLLDPARVRNFARAERQLAKTDPLDAAVIARCLAALHPELTPYRHDPQAARLAEHVRMRDLAVAQRIQLGNQFETLDDPAMRRLVKAQVGKLKALALRIEKAIAALIAASPDLATRERLMRSAPGIGPIVAACLLAHMPELGALSSRQAAALVGVAPFDRQSGATRKPGRCAGGRPAVRRCLYLAALAIARSKKGPLAQTCQRLRDNGKPAKVALVATMRKLIITLNAMLKSQQTYRHA

SEQ ID NO: 96636 - protein, 387 aa, unidentified
MHTVTSTTVVATAARANDITLFASLELSKLKWVVTINSPGSEKFSKHVIEGGDGAGLLDLLSRLRAKAEQRYGVQVKAIVIQEAGLDGFWIHRLLLANGIESHVVDAASIAVDRRHRRAKTDAIDGETLLRTLMAWARGERRVCSMVRAPSPEDEDRRRLTRERGTLLKERIQHTNRVRGLLSGQGVRDYNPLRRDRFERLEALRTGDGRELPPLLKAEIRRELDRITLVTTQLAAVERARDALIRTDAEERNNPAALLLKLKGLGPEFASLLWLESLFRSFGNRRQVAAYAGLAPSPWQSGGVERDQGISKSGNRRLRKTMIELAWFWLRHQPDSALSRWFQARVGAAKGRIRRIAIVALARKLLVALWRYVTQGVLPEGAVLKAA

SEQ ID NO: 96637 - protein, 330 aa, unidentified
MKFKEFIGIDVSKATLDVFLYCKQLHAQFDNNKLGFRKMIKWIKQQSQSKDDEILFAFEHTGLYSLNLSLFLDEHQYAFTIISGLELKRSRGIKRGKNDKIDAKEIAGYAYEKKDRIRLYQMPSETILKLKRLTSYRERLVRDRAAFKNRLKGYKTFLDSAERSQLIDSNKRMINALTEEIKTIESELYSLIKKDQKLLRQFKLINTVKCVGPQTALMMIILTDGFTRFETWRKFSSYAGIAPFPNESGTYKGKARISQLANKRIKTLLSCCANCAIQYSPEMRIYFTARTGEGKNEMSTLNIIRNKLLSRIFAVVRRGTPYVDTYRFAA

SEQ ID NO: 96638 - protein, 409 aa, unidentified
MQLYRERVAGLDVHKKVIVACARVVLAGELFVASARFKATPAGLRALAEWLHENQVTSVLMESTGVYWRPVFYALEDDFDQVEVANAHHVKNVPGRKRDSTDAQWLAEVAAHGMVRPSFVPPPRIRELRELTRYRKNQIEERTREKLRFERLLQDAGVKLTSVGTKTFSKTNQAIVRAMVNGERDPDTLAGLACGTLRNKIPELREVLPARFGDTHAVIFREILHHIDQLDRSIGHLDEIIAIRMAGFGEDIELLCTIPGVALRTAQVFIAETGGDMSVFPTAGHLAAWAGVAPASHESAGRSRPAGSRHGNQQLKTTMMEAAQSAARTKTYFGAKFHAVNKRRGAKRAVGAVANKLVVTMWHVLTDRHEFIDLGADWFKRQRDPEADKARLVAQLERAGYKVTLEPAA

SEQ ID NO: 96639 - protein, 423 aa, unidentified
MSKKSQNRYIVNNNTLVVGVDIGKSSSVARYLLPDGRPSKQFIFTTSRSGFDAFAAWLEESRVRCGMESVMVGMEPTGHYYELLARYLKDKGVRAVLVNPYHTKCSKEIYDNSPGKTDAKDALVIAGLVRQGNCFNIRLPEGVYADLKALGRAREKKAVELTAKVNYLIRLMDTLFPEFFGIFKKHAGMTALYLLANCPTPASMLALGEAKLTEIIRAQSHGKLGTARAAALIKAAENTIGTGGSALVVEVRETVEDIIVLQRRLKDTEAAQREALKQVPYATDLLSLKGVGVVTIAGIIGEAGDIRGFHSAKGLVKLAGLSLYEESSGTHKGVLKITKRGRPLLRKLLYLLSLRLVKSGHDLHEYYQGLRGGEKPVPAPKALVAVSRKAAKIIFGVVKYGRQVVKDQVPCPCTSEAGLAEAA

SEQ ID NO: 96640 - protein, 347 aa, unidentified
MKFYTKSHSHFCGIDLHARCLYVCILDASGEPCLHKKISASPQALMKVISPYRDDLVIGVECMFSWYWVADFCEDNNIHFILGHALYMRAIHGGKAKNDKIDSLKIALLMRGGMFPLAYVYPRQLRGTRDLLRRRIHMMRKRSELLAHVHNTTSQYNLPAIGKNLRYSFNREGIAEIFSDPSVRKSIEFDLALIDFYDKQLSKVEWHIKQKVTAFDQHALLLLRSVPGIGLILSLVILCEIHDIDRFSRVQNFSSYARLVKCKHESAGKTYGTGGSKIGNAYLKWAFSEAAVLFLRKNPEAQAWLEKKSNQHNKAKALTILAHKLGRAVFFMLKRKVTFNQEQFLTG

SEQ ID NO: 96641 - protein, 400 aa, unidentified
MKIEVTIGLDVSKETARYHCLDASGKTLRKGSIGRCSKEAGALVACLPAKPESVLVVAEATGMLHIGFCHSFAAEGCEVVAINPLYSKARSQRNAIRGAKSDPIDAEQLAELGLREPDELLRRFAMASDQRVRLQRFVSARKQLRSCLTNLLKHTGELANAMFPEFSELGFKLTASKTRAMLSRYPTTAEISRTSEAELAKYAGSKARALKLAAGRSEGVKAVSSACSKGLLACLIRELDSLYRCLDELDGKISALVRPCVGARQLELAMSLVGFGEKTASKVLAFLPPQILSGGSKRKVARKIQALFGAEPRTRSSGKWKGKERISKRGVEIARTALFQASFCSLKFDAQLKSYYDKQKAAGKSHRQAVVDVMRKQIERLVCVLKEDRPFRPDKQSNPQ

SEQ ID NO: 96642 - protein, 433 aa, unidentified
MKVKYEDRLKQKLLAITPDTLVVGVDIAKNYQWARFVDFRGIEHSRALKFKNRKGGFEIILARIRQICKEENFVKVVVGMEPTGHYWKAFANWLEKQDGITVVLVNPYATKQAKELDDNSQTKSDKKDALTIAKLVKDGRYFELYLPHDIYAELRGLSTTRTGLNKRKNALKNTITALLDEFFPEYEEVFMHPLTGKASRHILKTCPFPRFILELGEEGVTAEIKKAVKKTVGRKKAGQLAEAAKRSVGVDYGEEAARLKLRLMLEELELLEKQTEELESQMESALEKTGYAEFLLSIKGIGVVTLAACLGELGDPTRFENPRQMSRMAGYNLVEDSSGKNKSGTKISKRGRKNLRSVLYQMALTMVATNDEMKQLYHYLKTREKSPLRKMQALIVVSKKILTLIHTLAKKKESYDPEKVFGHVRREQFKAAA

SEQ ID NO: 96643 - protein, 353 aa, unidentified
MNSLTDLREVVDVVIGVDTHVHTHSAAVVDAATGGVLGEITVDATAQGYAELVEFANNHATLRAWAIEGTSSHGAGLSRHLVERSEIVIELDRPKRAARRNGAKSDPLDAIRAAREAMARPRLGTPRAGGERQALSVLLAARRSAIDASTEAQQQVFSLVIAAPEPIRVRFRGQKLAAMLNTAAKLRVQSAWDVETISTVVALRTLARRAHAMLKEARELQNAMVAIIRSWRPELLEEFGVGPIVAATVLCAWSHPGRVHSEAAFAMLAGVAPIPANSGQVTTRHRLNRYGDRHLNNALHTVVASRIQYQPATRDYVARRTAQGKTNREIKRCLARYVARDLYRLLENTATAA

SEQ ID NO: 96644 - protein, 376 aa, unidentified
MKNVRFVGLDVHAETIAVAVAELNGEVRSLGVIPNRAESVRRLIGKLGKPEQLRVCYEAGPTGYVLYWQLTQWGVHCEVVAPTLVPVKTGDRVKTDRRDAEKLARCYRAGDLTRVWVPDAAHEALRDLVRARLAAKRDQLRARHRLGKFLLRQGRRGPEGITAWTGKYLAWVKQQRFEHEAQEATLLDYLHEVEHVAERIVRLERSIDAAVELMPESMRAVIAGLQCMRGIAKVSAVTLASELGRISRFAHARQLMGYAGMVSREHSSGERIRRGSISKAGNAHLRRIVTEAAWSYRHRPNIGKTLAARQSGTSETVKAIAWRAQQRLHARYRSLLARGKTKQKVVTALGRELLGFIWAIGCELERTQPQEVRRAA

SEQ ID NO: 96645 - protein, 456 aa, unidentified
MKASVFARPEERKINQNLKMNQTKLNRKTTAASGRGDFAALIGLDWASQRHALCLYDCATEKRENSTLEHTPEAIAQWAQCLEQRFGGKKIALCLEQAKGPLIYALLEYSFFVLYPVNPATAARYRQAFKTSRAKDDPADAQVCLELLLHHREKLTPWLGNDGATRELSRLLEARRSLIDLRTLLTNMLRDALKSYYPQALELAGQDLFAPLGCQFLLKWPSLQELQKARTESVRKFYYAHNCRRMDVIEKRLQGIGQMKPLCRDRALIEPALIQVKMLARQLLQLGTALKEYDSSIEHLFAQHQDATIWQSFPGAGPTLAPRLCCAFGSERSRYQSVLAIQQYSGIAPVQEKSGKNQHWVHRRWARPHFVHQSFFEYASQSALHCPWAKLFLKEQIARGKTYPTAVRALAFKWQRIMFVCWRDRVLYHETIYLDSLKHRGSYLARKLDQELPKAA

SEQ ID NO: 96646 - protein, 353 aa, unidentified
MRFYTQQHQYYCGIDLHTKNMYVCILNQGGNILFHKNISSSPQSLYRVIKPYLPDIALAVECMFTWYWIADFCSAYNIPFVLGHALYMKAIHGSKTKNDKIDSHKIAVLLRGGMIPMAYVYPAEMRSTRDLLRRRMHFMYKRSELLAHIQNTRSQYNLPEFNKCISRKRNRTGISEHFEDKSVRKSIELNLTLLKQYDNLLNEVELFLVRHTKENRPNDLYLLRTIPGVGKILSLVILYEIQDISRFQRVQNFSSYARLIKPKKESAGKIKGASNRKMGNAYLKWAFSEATLLLIREKQEIKDLHLKLKNKHGKARALAIISHKLGRTVYYMLKNKQAFDIRHFLQIKDRAAA

SEQ ID NO: 96647 - protein, 370 aa, unidentified
MQQSSTLYVGLDIHKDSIAVAYVAKEHHAEVVSLGPIGMRQCDSDTLIRQMQSQSHHLVFVYEAGPCGYWLYRYLSKKGHICWVVAPSLIPKKPGDRVKTNRRDAIKLARLMRSGDLTPVYVPQVEDEAIRDLCRAREDAIRDLKTAKFRLKAFLLRHDIRYTGQATWSPAHLRWLSEVVCPTPAQQIVFQEYVRAITDHTERLARLEQELTEHVQTWRLAPVVDALQALRGVQFTVAVTTVAELGDLTRFDNPRQLMNYLGLTPSEYSTGERRQQGGITKTGNSHARRALVEGAWAYRYPAKVSRHLQLRLEKVSKPIQDISWKAQIRLCKRYRQLSARGKNANQVVVAIARELSAFMWAIAQEVPLTP

SEQ ID NO: 96648 - protein, 375 aa, unidentified
MIKHSEVFVAFDTSKLRNAVAIAEAGRAGEVRFLGEIENTAGATTKLVRKLGAKYERITFCYEAGPTGYELQRHIHGLGHECIVAAPSLIPKKPGDRVKTNRRDVVSLVKLLRAGELTAVWVPDPRHEAMRDLTRAREAAVIDLRAKRQRVSALLLRQGRSYPADKKTWTKVHMNWLASQRFEQPERGIVFAEMMFATRQAQERVERLEQAIRTAVPDWSLAEMVTAFMAFRGIDLVSATCLLAELGDLTRFPTAPEVMGYLGLGCSEGSTGDRIKRGGITKSGNRRARRTLVECAWSYQHPPRVGIAKQAKVAAAPAKVREIAWKAQCRLNRRYRVLLRRGKLKTVAITAVARELAGFLWAAARELSSPERVAT

SEQ ID NO: 96649 - protein, 404 aa, unidentified
MLYAGVDWASRSHELAVVDSNGQVVTNFGFAHSEQGVLGMLGRLAALAPPEEIRVAIERPNGLLVERLLAAGHGVYPVHPNAFAAARPRWGASRAKSDPGDAYRLADYLRTDGHRLRLLQPAEPYLAELRALCRLRDIHQKACMAASNQLGSLLELYWPGARYLFAHLHSPVALAFLTRYPTPESAAHLGEGRMAIFLKREGYSGRRSASELVERLREAPQPISPLDPEILAVLVEAQVGLLRTLRGTLADLEAALKVRLAGCEKARLLASLPRVGEVNLAQIVAEVGPILERAESVELVSAEVGASPVTRASGGYRNVSFRHACNTKARKALTTFADNSRRASPWAAEVYRRARERGCRHPHAIRILTRAWLRVIWACWHSGRPYDPAHHGVTRPLILAEGLT

SEQ ID NO: 96650 - protein, 432 aa, unidentified
MKNKINAKIEEITINTLIVGVDIAKETHYARFVDYRGIEVGKTVSFRSDRGGFDHIISQIEKINKSKVLKVPFDKVIVGMEPTGHYWKSFANYLMKAGKHKAVCVNPYHTKKAKELDDNSPTANDKKDAITIARLVKDGRYFEPYLPEEVYAELRVLTNIRHGLLKRNSSAKNNITVVLDEYFPEFTKVFRCPLKGKASRQILKNCPFPSMILSLGEAEVLKKIKEAVKKTVGLKKVRELMSAAEESVGVEYGLESSRMKLKMQIDELELVEKQLDEVEKAMEKMLEATGYAEQMLSIKGIGVVSAASFLGEVGDPLRFDNARQISNYAGYNLTEDSSGKNKSGTAISKRGRSQLRSILYKMALVMVATNDDMKQLYKYLKTRKDNPLKRKQALVVISKKIITVIYSLLKKREVYNPELVLGAVRKEMLAAA

SEQ ID NO: 96651 - protein, 404 aa, unidentified
MNNVAGVDVSKGKSMVSVLRPFGEVVAKPFSVGHTGSELKELANYLKSLDGETRVVMEHTGRYYEPVARFLHEEGIFVSAVNPKLIKDYGNNTLRKVKTDKADARKIARYGLDNWTELRQHTPMDTIRMQLKTLNRQQGLYSKTKTMMKNNLIALLDQTYPGVNNLFDSPVREDGSQKWVDFATAFWHVDCVRNMSLVAFTERYQKWCKRHGYNFSQSRVVEIHARAQDLIAMLPKDALTKTVVRQAIDALNAVSASLERLKAEMRTLAAQLPEYPVVMAMRGVGDSLGPQLMAEIGDVTRFTHRNSITAFAGVDPGADQSGIHEAKSTRASKSGPPELRKALFLVMDCLLKTMPQDDPVYCFMDKKRAEGKPYLVYMTAGANKFLRIYYGRVKEYLASLEDTD

SEQ ID NO: 96652 - protein, 339 aa, unidentified
MKRLYCGIDLHSNNSVVVLIDDEDRAVYEKRLPNSLEVILLELSRYRKKIAGVVVESTFNWYWLVDGLQEEGYKVHLANTAAIKQYEGLKYTDDKSDARWLAHILRLGILPEGYIYPKEERAVRDLLRKRSQLVRQRSVHILSIQNLMSRNTGRSMSGTKIKTLTELDVDGMFGSDDVAAAVKCNLRACRFLAKEIILLEKMILSRASIKPEYENLLTVDGIGKALALTIMLETGDISRFGKVGNFASYCRCVDSRRISNEKKKGENNGKNGNKYLAWAFVEAANFAIRYNQFIRRFYERKKAKRNGIVAIKAVAHKLARACYHILKDNVPFSVELAFS

SEQ ID NO: 96653 - protein, 341 aa, unidentified
MKIIGCDFHPSYQQIAMVDTETGELWEGRLEHEQGEARRFYQALQGQTVRVGIEAVGNSQWFEQMLAEMGHELWIGDAAQMRRLVVRPQKTDRRDAKHILDLMVDGRFPRLWVPSQQIRDVRQLLRHRQKLVELRTQVKNQLQHLALNQGVRRKRRLWSVPGRAVLEQLPMQGWTARRRSDLLAMLDRLQEQVGELDGAVRAEAEQRPEVRLLMTHPGVGPVVGLAYVLTLGPITRFPRGKQVASYLGLIPKEHSSGGHQSFGPISKQGNTLMRTLLVEAAQTAARFDEELRRAYGRLKAKKHSAPAKVMVARKLAVRMYWMLRENKSYAQLYAQRPVARM

SEQ ID NO: 96654 - protein, 343 aa, unidentified
MRKSNDLSRCLAALEQDSTLIAVIEMGKSSWLVAGVVPGIERRPLKKLAANEGALLALLYRWRDEAKKAGHPIKRICVAYEAGRDGFWLARWLRKRKIEAYVIHSTSVCVSREHRRAKTDRLDTEHLMRAFIGWLRGETDHCRMCAIPTLEEEDGKRPSREHEHLVGERTRIINRLKSCLARLGIRDFNPASCKAPERLAKVRTPEGTPIPPNSLDELKHDMAHLRFISDQIDEVEKARLARLQKAPKKGPHAMVRLLASIHGLGIGTADTLVHEVFLKNFRDRRGAPRYAGLTGSPDESGERRREKGLARAGNTRVRRSMIQLAWRFLQFQKESALVHNPEF

SEQ ID NO: 96655 - protein, 320 aa, unidentified
MQRPNAGVDVSKQHLDVCLHSSSGRLGNDAQGWSELVAMLKAAEVDLVVIEATGGYERGAVCALRAAGVAVARVNPRQARDFAKSMGILAKTDQVDARTLRDFADVLARHDKRGQYITPIEEPARRELGELMDRRRQLVEMRVAEHNRSEHAGPRARRSIDSVIKLLDKQLGLIEGQIDDHMDRHFKRQRELLDSVKGVGPVTILTLTAALPELGRLGRRQIAKLVGVAPLADDSGSRQGKRRVWGGRANVRAVVYMAAIVAIRHNAVMRAFYERLLAAGKPKKVAIVAAMRKLLTILNAMLRDQRLWDATRHLNIAQPG

SEQ ID NO: 96656 - protein, 343 aa, unidentified
MTKISTIGLDLAKNVFQLHGVDASGAVVLKKQLRRGALEKFFAQLPPCLVGMEACGSAHHWARVIGRYGHEVRLMPPAYVKPYVKRNKNDGRDAEGICEAVGRPTMRFVPVKSVEQQATLAVHGTRALLVRQRTMAANALRAALSELGIVAAQGYEGLRELMAKLEEPGEEIPEAMRGALLVLAKHWQALDADERLLERQIAKAARSDQDARRLMEVPSVGPIIASTVLAKVPDAKVFRSGRDFAAWIGLTGKDHGTGGKHRPGRISKQGDRMLRAMLICGASAYLRHQKARGVSDPWLRELLARRPYKVVMVALAAKTARIIWAMLAKGEAYRDRASASAAA

SEQ ID NO: 96657 - protein, 453 aa, unidentified
MASISNAPVRHRTVGIDLAISAVQVAQIFDDGRAIGKPIRFRLTSTDLRRFVSAIKSGVSAGTPITAVMEPTGMAWFPVANWLQRAGIKVIRVKGQRVKALRKYLSEHAKTDAADAHVLGAIPGFGGRGLDPVHVPGPEQHALQRLTKQRHRYQELVCSSRRRVLDLIRWACPTLEPALPDTVTQLTLAILGELFDPRKVVAMRRDVLARFLSRHASGNHPKSGPFIDSLVEKLKSVAEETIELHGDSVDFVALQFEVAQEVEHLRLWDCHVRAIEREVEQIYQRVHPSDALRSIPGIGATLAPLLIGVLGYAKRFRNEDHIRGFCGMFPTRNSSGGIEKPGQRLTKSGSDRVKRALYIAADVARKIDPDLAAVYWRLMVNKGHHHKQAICAVATRLVNRIYRVLKTGEPYVLRDQEGNAITVQQGKRIVAERFTVPLEVRQSRRNQPMPEPA

SEQ ID NO: 96658 - protein, 312 aa, unidentified
MATNISNHKQEKKNNSSLKNSYAGKQVYVGIDVHKRTYSVVTVVEGMVVKKWRTVASPEKLAQQLARYFPGASIETAYESGFSGFVLHRVLEKAGIHNIVVNPGSIEVAVHNRVKTDKRDALKLATLLEAGRLKGIRVPSRRQEQQRLLTRTRQQLVEERSALKNKISMKRHQMGLIDPDDTREMSHKLVGEILSRSPSPEFSLVIEAYWQVWKSIETQIKKIEQKLKEQAEIDPNEIIYRSAPGIGSLSARILSNELGDLSQFSNERQLFSYTGLTPSEFSSGDTIRKGHITRQGNKRVRYIRVASRLASD

SEQ ID NO: 96659 - protein, 347 aa, unidentified
MFADELDFVVGVDPHRDSHAIGVVEVRSRVVVFESSVTADSSGYAEALRVAEQHAPGRRAFAVEGAGSFGAGLTRFLADHGEQVFEVGRVRRERRSSGKTDALDAVRAARSVFEQKRPATPRSSGEREALRALMAAREGAVNAKRAGLCQLRDLLITTPEPLRSELRPLSRARLLGRLSATRPERRQDPELRGTLLALRAVARRVQQLTAEERELAREIEKLTTKLAPQLLNQPGVGPLLAAQIVLSWSHRGRVVSEAAFARLAGAAPIPASSGQTIRYRLDRSGDRQLNRALHQIVVTRRRMHRPTIDYIERRIQEGKSRREATRCLKRYLARKLYRLLETPPLTT

SEQ ID NO: 96660 - protein, 359 aa, unidentified
MNTITVGVDLAKSVFSVCEVDAAGHVLRRRELKRDAFAVWLAQLPAGTVVAMEACSGAHYWARRCLEYGLQPRIIAAQFVTPYRKGRKTKNDRADAEAIATAARQGNMRFVPVKSVDQQVRLSWHRVREGYKAESLAIGNRIRGLLAEFGVIVAQSDVALRRLLGDLDAQIGLPVEFKELLRDLAGHWSQVRTALDACDARIDAHARQDERCVRLRAVTGIGPITADAAVATVGNAREFKQGRQMSAWLGLVPTQHSSGVHVQLGEISCRGDAYLRTLLIQGARSSLQRAKAVATEKATPEQRWIRTLDGRMPFGKVIVAIANKHARQIWAMLAHDVDYDPHACLNHPMHQHTHAAHAA

SEQ ID NO: 96661 - protein, 405 aa, unidentified
MATPDEVDVWIGLDVGKEEHFADVLDDSGDALFGRSVRNDEADLEALLERASMHGTPGLVIDQPGSIAQLAIAVAARREVPVAYVPGLVMRRAADLYPGEAKTDRRDAFVLADTGRMRRRQVHWLDTASDELLARLRVLNGYDIDLAADLTRVSNRLRDALVSISPALERAVGSKLGHAGVRDLLVKFATPSALAAAGKARIANTVKKRSPRMADKVTAAVLDALEAQTVTLPAEATVGRVIVELAGELDRVHRRRDTLAAEIEEAFLAHPFGPVLVSMPGIGPRTGARILAEIGDGSRFANGSKLASYAGLAPVTRQSGTSIRGESKSRRGNHRLKNAMFLAAFASLHSPDSRRFYDRKRAEGKKHNAALICLARRRCNVILAMLRTGQHYIDPSHNNPLPAAA

SEQ ID NO: 96662 - protein, 322 aa, unidentified
MAMLSFGGIDVSKDRLDVMVLPEEQCSSVSNDAAGWDKLIEQLRGSSIAAIGIEASGGYERGVMRALLAADLPVRQVNPFKLRQFARASGVLAKNDPLDARMIASFVAIMPTRPAQRPAPAAERLTEMLAVRRQLSAEKVAAENASRLLEDAMLQRLSRRRIARLAADIAMLDERLVEVVATDDALVHRYRLLTSIPGVGAVLSCTLLALLPELGCMSRKQLAALVGVAPYAFESGTLKGRRCIWGGRAHVRQVLYMAAMSASNWNPAFKTFHDRLKAAGKLPKVAIVAVMRKMITTLNAMVRDDVIWADRLTGRHSVPTAR

SEQ ID NO: 96663 - protein, 404 aa, unidentified
MNMNAVGIDVSKTKSTVAVLRPGGQVVVKPFDVPHLSADFQSLIKMIRGLEGETRVVLECTGRYYEPVAHELAQAGLFVSSVNPQIIRCFQGQDNPLRRVKTDKADSVKIARYTLDSWDKLKQYTLMDELRSQLKIMNRQFDFYMKHKTAMKNNLISLIDQTYPGANTYFDSPARDDGSQKWVDFLDTYWHVDCVRKMSLEAFTDHYQKWCGRKKYNFSKSKAEEIYGKAKGLIPVLPKDSFTKRVIKQAVEQVNSVSQTVEQLRCLMNETASKLPEYPVVMAMKGIGPSLGPQLMAEIGDVTRFTHKGAITAFAGVDPGVNDSGDYSQKSVHASKHGSPVLRKTLFQVMDILIKTKPDDPVYLFMDKKRTQGKPYYVYMTAGANKFLRIYYGRVKEYLASLPQ

SEQ ID NO: 96664 - protein, 313 aa, unidentified
MNELFVGIDVSKARLDVAVGGVEQFSVSNDLAGHTQLCERLRELNPRLIVMEATGGLERAVAAQLTAQELALRVVNPRQVRQFAQAAGILAKTDQLDAAVLVRFAQAMQLEPRALPSEQVQALQALIARRHELTEMLTMERNRLRLAHPSVRRALKKSIQWLESQLKDTDDDIGGMLRECGVWREKVELLESVPGIARVTSLRLVTTLPELGALNRRQISALAGVAPFNQDSGQWRGRRRIYGGRTAARSALYMAALVGSRHNPVLRAFYRRLRTAGKPAKVALTACMRKLLTILNSMLRDGRRWSPTLVDVA

SEQ ID NO: 96665 - protein, 312 aa, unidentified
MSERVAVGIDISKEEIVVAVAPSGEQWPCATTPEALERTMARIARSQPAVVVMEATGGYEAVVAAAAAAAGLPVAIVNPRQVRAFAQALGRLAKTDVIDAHVLAVFGLRVDPPVRPLPDADTQALAALVARRRQLLEMLIAERQRFAQATTRAVQRDLQTHIRWLERRLTQVDDGLTTHIQHSPLWRAQDNLLRSVPGVGPNLTRTLLAELPELGTLNDRAAAALVGIAPMNRDSGHYRGHRMIRGGRPTVRRALYMAALVASRYNPPLARFYQRLRAAGKPAKVALVAVMRKLLVILNAMLKHQTAWNPAA

SEQ ID NO: 96666 - protein, 343 aa, unidentified
MQIHSVGIDLGKTTFHLVALGAAGKVIVRKKFNQKQLLAYTANVPASLIGLEACSGAHFLGRALRQQGHDVRLIPAQFVKPFVKSNKNDFVDAEAIAEAVERKNMRFVPIKTDDQLDLQAIHRVRDRLISRRTAVINQVRAFLLERGLVFAKTPAKLRAALPDILENADLDLTSQMRSLIDLLWREWKTVEDQIEGLSLELERISAADPGCTRIRQIPGIGPIVATAIVAAIGNGAAFRKGRDFAAWLGVVPRQYSTGGKARLLGISKRGNVYLRKILIHGARAAVLRIKRDRAPIGAWLDALDARAPKNVVVVAMANKLARIAWAVLSSGEDYRPMGNIVTA

SEQ ID NO: 96667 - protein, 361 aa, unidentified
MELHVGLDVALESTSVCIVDATGGKLLETTALSEPEAICIAIRPHVTGIARIGIEASALGMWLARELKAEGLPVTVVETRHMRSALSAMRNKTDRNDAHGIAQMMRMGWFRSVHVKPAETQRLKTFLANRRLLKRKLIDLQNHIRGALRVHGLKVGPVAAGRFDGRVRELIEDHGDYLFRTMIESMLEVRAVLFDSFRKLHAMLLLIVKHDPVCRRLMTVPGVGPVAALSFRVSIDDPHRFSRSRTVGAHLGLTPRRYQSGTSVDWGGRISRMGDIDARAALCEAAASLLLRVQRYSALKAWGMRIAKRSGMMCAIVAVARKLAVILHRMWIDETEFDWKSGAKITAKRRRDPATGRLLPC

SEQ ID NO: 96668 - protein, 341 aa, unidentified
MNEVTMIGVDLAKSVFQAHGATATGEPVFRKKLSRGQFLKFLSEQPPCVVAMEACASSHYWGREIMKLGHDVRLIPPIYVKPFVKRQKNDANDAEAIAEAAVRPTMRFVPVKSAEQQSRSMVFKTRDLFVRQRNAIINALRGHLMEYGIIAPPGRNFVKKLAEQIENPGSDLPSIVMELSRVHLDQLSVITDKVVAIERRLKEESKSDPETIRLQTAPGIGPVSAMAIKAFSPPLEGFKRGRDYAAWLGLVPVQKSTGGRQILGKTSKMGQRDIRRLLIIGAMSRVRWAIKNGPPKGSWLEQMLERKPRMLVAIALANKTARTIWAMMTKHEDYRDPIAAV

SEQ ID NO: 96669 - protein, 343 aa, unidentified
MQAVTTICLDIAKSVFQVHGVDAEGNVLIRRQLKRRYLLAFFEKLQPCLVGIEACASSHHWSRELKALGHNVRLMPPAYVKPYVKRQKNDAADAEAICEAVTRANMRFVETKTPEQQSCLMLHRTRQLFIRQQTSVINAIRAHLAEFGIVAPVGRQGVEQLLAVVTDASDQRVPELARACVAALGAQLRRLKAQILEFDRRIMAWHRSNETSRRLDAIPGIGPALATALVASVADPKAFRSGRHFSAWIGLVPKQHSSGGKDRLGSISKQGDRYLRSLFTAGALAVIRYAKIHGSQHRPWLTALLARKPTKVAAIALANKIARMAWAMMARGERYKEPVALAA

SEQ ID NO: 96670 - protein, 347 aa, unidentified
MEYIGFDYHKQFTIATGLDAETGEKRWAKLANTSQAIKGFIKDSATTHAVLEASRTWGVLYDILKDSVASVKLAHPLRVKAIAAARIKNDKIDSRILAELLAADLIPEAHIREGTNRTKQSIVRQRVFFFETRTRVKNRIHVLIDRQSYEVRKYVEGMSDLFGKAGMDWLRNHVKLSKDDRILLNQLLEFLDIINKLISQSDAYIRQVYKEDHNAQLLSSIPGIGSFLAVLISTEIDDIHRFDNGDKLASYTGLVPSTYASGKMVHHGRITKQGNKWLRWAFTEAATNAKKTNIQLQEYYTEIKHRRDKHRAKIALARRLVKITYSMLVHNRPFETYRESNQLKHVS

SEQ ID NO: 96671 - protein, 356 aa, unidentified
MSNGNRWVGVDLHRRRSQIAIIDEHGELTLSRRIVNDQDTFKELLGDPDGTHVALEATYGWEWLADLLQDAGYEVHLAHPLRTRAIAAARVKTDAVDARTLAHLLRTGLLPEAYIAPPELRDLRELLRHRAVLTRMRTAVKNRVHALLARQGVRPEYSDLFGKAGREFLAALELPEGSRRRLDSLMSLIADFDREITATTLEIDQRAKLDQRVKVLCQIRGIGRYTAMLVIAEVGDVRRFPTARHLCAWAGLAPSVRSSDGKARLGHISRQGSPALRWALTEAAQKIPTGGGPLRAMFERIAKRRGRSIAKVAVARHILTLCYYGLRDGEIRCLEHQPDIDDHDIDDHDNELAEAA

SEQ ID NO: 96672 - protein, 421 aa, unidentified
MNQLTDTVYTAYVGIDWADAKHDICVQAAGSEERAFDRIMHKPERIEAWAQAMVQRFGGPIAVALELTKGPIVTALEKYDFFVIFPIDPKRLAKYRQAFTPSGAKDDPTDAEFALDYLVRHPEKLTALTPQSVPMRKLMYLVQMRDRLKGDRSRWVNRLVQALKQYYPQVLDWFSQRNTVVFCDFLHQWPTLKQAKRARKSKLETFFKAHSVRFARVIEERIEAIKAATPLTHDEAIITVHRLQVATLVAQLKLTLQALKEFDQEIAATVEQLPDYALLFSPLPGAGAVLAPRLLAAFGEDRSRYPSAEEVQNHSGIAPVTKRSGQMEWVHWRWQCPKFLRQTFVEWAAQTINKSAWAGAYYRQQCAKGSSHQAAVRSLAFKWIRILYRCWQDRTPYDESKYLEALRRSGSPLLKLLAEAA

SEQ ID NO: 96673 - protein, 363 aa, unidentified
MAFKIFRKNCCGLDVYKTWIYACIGITDADNGTEYKQARFSSFSKGLQELSSWLAKYSCTEVCMESSGKYWIPVFNILEKTCWVTLAHPKYTKPQKGNKTDRKDAKWICDLFMCDMIKPSFIPPPDIRHLRDLLRFRMKLTYQITGMKNRALNCLTVSNLKLDDVFTDVFGKSSRSIIQQILDHHNVNFDVTPYVDKHCKHPIEEIQTAIDGAICTEQATKLKICLDFIDEQKKHIAELDTEIFRLAEPYTSVLEFMRTVPGFSKEPLTAIRLLSEIGPDMSVFPTSKNLVSWAGCCPRNDSSAQKVKSTRISRAGSYLKPLLVQIANALLKSKEHPEFKERYRRIKARRGHKKRLLHYAVCS

SEQ ID NO: 96674 - protein, 358 aa, unidentified
MVQSNGINFEGQNIYIGIDVHLKTWSVTILTQSGYKRKHSQKSSAKELYEHLKKHYPNGNYLAVYESGFSGFSTYYALQEFGIRCMVVHAADVPTTQYESVMKDDAIDSDKLARSLKNGSLHGIYVHRKENLDDRNVLRLRRTFLKQLGGFKARVKHLIYNHGIMIPERFSRPGTHWSGSFMKWLREDVVLLSSTRRSLDILLDTVEMLRKNLLSVTRQIRTLSRSERYAEDFDNLVSIPGIGLLVGMCLLTEIDDIRRFQNEKQFASYLGLVPMSHSSGEKVCNGEKTFRGNKLLGLMIIESAWVTIQHDSVMAMAYGEYCKRMKGQKAIVRIARKLANRILYVMKNGKKYKYDKCR

SEQ ID NO: 96675 - protein, 402 aa, unidentified
MNAVGIDVSKSKSVVAIMRPFGEIVSTPFEIKHTASDIHSLIELINSVEGESRIVMEHTGRYYEVLAHQLLEANLFVSAINPKLIKDFDNDSLRKVKSDKADAVKIARYALDKWQNLKQYNVMNELRNQLKTMNRQFGFYMKHKTAMKNNLIGILDQTYPGVNTYFDSPARSDGSQKWVDFASTYWHVDCVRKMSLNAFIDHYQNWCKRKKYNFSQSKAEEIYGKAKELVPVLPKDAITKLIIKQAVDQLNSASTTVESLRTLMNETASKLPEYPVVMAMKGVGTSLGPQLMAEIGNVSRFTHKSAITAFAGVDPGVNESGSYEQKSVPTSKRGSSDLRKTLFQVMDVLIKTHPQDDPVYQFLDKKRAQGKPYYVYMTAGANKFLRIYYGRVKEYLASLPES

SEQ ID NO: 96676 - protein, 320 aa, unidentified
MSTKKSKAFIGIDVSKQLLEVAAHESDYQFRCANKASAFGELIAELIALRPALIVLEATGGLEIPVTAALHAAGLPVVVINPRQVRDFAKALGQLAKTDRLDARVLAHFAAAIKPPLRPIKSKDELELDALVGRRGQLVEMLTAEKNRRGSAATDTVRKEIKEHIDWLQDRIAELDEQLQALLKSSSLWQVKDDLLQSVPGIGPVVSFSMLADLPELGTLNRQQISKLVGVAPLNCDSGQQRGTRHIYGGRARVRSMLYMAALTATRYNPVIKEFYQRLLAKNKPFKVAITACMRKLLAIINVMVRDGSCWKNKDKPVLA

SEQ ID NO: 96677 - protein, 342 aa, unidentified
MQITTIGLDIAKNVFQVHGIDADEKVVVRKQLRRSKLIAFFKALPPCLIGMEACATAHYWARELTKLGHEVRLMPAKDVKAYVKRNKNDAADAEAICEAVRRPRMRFVRIKSAEQQGQLMQHRTRDLLMRQRTQLINALRAHLAELGIVAAQGDQGVAELLAVVADDRDARLPIDARASVIVLAAQLEALQTMIGSLEKRIKMQHRGNEASVRLETIPGIGVIGASAIAATVTDATVFRSGRDFAAWIGMVPRQDSTGGKQKLGPICKQGDRYLRRILVLGAISVLRRAMQNPDKYPWLTQLLARRPFKVVAVALANKMARTAWALLAHGGTYRAPQLAAAA

SEQ ID NO: 96678 - protein, 403 aa, unidentified
MNSVGIDISKGRSTVAVMRPFGEVVISPFEVHHTDSELSALARRLKSLNGETRVVMEATGNYHAPVAKLLHDAGLYVSVVNAKLVHGYGNNELRRVKTDKKDAVKLANYGLDRWLTLPRYVPEEGARLLLKNCYRQYRQYSKVQTVLKNNLISLLDTVFPNVNRLFSSPIRGDGSEKWVDFVAEFWHCRCVSEKSEKAFANKYQRWCKKHGYNFSVAKAHTIHAEASGHIGVMPKSETTKLLVEQAVAQLRATSVALTALKREMLTLAAQLPEYPVVMGMFGVGPTLGPQLIAEIGDVRRFYSKKALVAYAGLDAPPNDSGDVTGKHKSMSKIGASSLRRTLFLVMSVYLRSAPLDEPVYQFMDRKRAEGKPYHVYMMASANKFLRIYYATVKAYLESLEHTT

SEQ ID NO: 96679 - protein, 346 aa, unidentified
MKTLYCGIDAGSSHCHVAMMDRDGKLKVDVEIPTSELQLAALLESLQKKGESVRVHLEAAELAQWIRGIVMERTNIDEVVVSDPKEMSWIAKDPHKKDSLDARKLAELLRINRTHPVYYSDDKKMQSLKKQVQYQESISAEKARIKNKIKASLRTGGLIIKTSGAYSKRRRPDILESIEDQMVRESTEDLYELLDTTGYLCQKAEKRLRKMATNWPIIEYFMEVPGVGLIMACRFVAYIQTPWRFATKEKLWSYCKLGLIMRNSDGKLLSSPRLDKQGNGTLKDLSRKVFESARRRKDDNAFKRAYYRYLKTTHNEMHARLSVQRKILTTLWTMWRKNERYDDRRG

SEQ ID NO: 96680 - protein, 335 aa, unidentified
MSLYCGIDLHSNNQVIVVIDDQDKRLLERRVPNELGATLSVLEPFREDLLAVAIESTYNWYWLVDGLSDHGYSTRLVNTAAVQQYPGLKYTDDQHDAFWLAHLMRLGILPTGYICPREIRDVRDLLRKRLGLVRERARNLTSVQNILARELGHRVATAKVRGILNGDDKFRPAVRTAIAANLAVIETLDTVISGIQGQALEVIKPTSRHRRLKTISGVGDVLAPTIMLETGEIERFKSVGNYSSYCRVVESRRESNERKKGEGNKKCGNRYLAWAFSEAAHFAVRYNDRARRFFDRKAAKRNRMVAIRAVAHKLARAAYFIQRDRVEFDAAKLFG

SEQ ID NO: 96681 - protein, 310 aa, unidentified
MSEEVVGIDICKARLDVASSTGEEFSVGNDEAGHQQLCERFRAAQPKLIVMEATGGLERDLALQLAAAGCEIRVINPRQVRRFAQAAGVLAKTDRLDARVLVQLAQALKPEPRAVADEEVQRLQALIGRRRQLLEMLTMEKNRLRVAHPRVRKDLKETIKWLESRLRNTNGDIGGALRECGVWREKVELLETVPGIARITSVNLIAALPELGRLNRREISALAGVAPFNDDSGHRQGKRRIYGGRAAARTALYMAALVGSRHNPVLSAFYQRLRAAGKPAKVALTACMRKLLIIVNTMLRDRRPWSPTTA

SEQ ID NO: 96682 - protein, 312 aa, unidentified
MNTVFIGIDIAKDSLDIHCNPDGEHWTSAHTPSSIDKTVDRLIALKPTCIVIEATGGLEMQLAAALTTACLPVAIVNPRQVRDFARAMGRLAKTDTIDAEILALFAEKVGPECRPLPSEDEQALKDLITRRRQLVDMRTMESNRRQRIQSRQVTDSLQTHITFINNEIKEIDRKIKQFIKASPVWQAKETRLKSVPGIGDGTAAMLMAALPELGTLNRRQIAALVGLAPMNRDSGTFRGRRMIVGGRAAVRCCLYMPALSAIKCNPFIQQYYNRLIAKGKAFKVAITACMRKLLTILNAVMRDSRHWQPLIP

SEQ ID NO: 96683 - protein, 377 aa, unidentified
MNSELYLGLDVDKEWIVIAVAEWGRNAPVHDLGAISNDVHALEKLLARLRKRYGPEVMMRACYEAGPCGFGIARRLGQLGVDCAVVAPSLTPTRAGDRLKTDKRDARKLARLLRAGELSAIYIPEPTDEAIRDLCRARSDAVDDRRRSRHRLKAFLLRHGYHYQGRTAWSAAHERYLRELVLPHPAMKVILEEYLISVQLASERIARTEAAMSDLLGKWRLEPAVRALMAMKGFQTVAAMIVVSELGALDRFTHPRQLMAYLGLVPSEKSSSDRRRQGSITKCGNAHARWLLVECAQHYAAPPKVSKELSRRQETQSAQVRAISWRAQNRLHNRYRRLLARRLQRNKAIVAIARELCGFIWELLRTQLCYQAQSTPV

SEQ ID NO: 96684 - protein, 410 aa, unidentified
MEIVREYVSGLDVHKKSVVAAVITPQGRRVKTFSTTTRALLELVDWLKAEGVRHVAMESTGIYWRPLFNLLEQTEMEVLVVNAGHMKQVPGRKTDVKDAEWIAELLQYGLLKGSFVPHRGQRELRDLLRYRRTLIEQRADEVKRVQKLLEGANIKLASVAADVLGVSGRAMLEGLIEGQQDTAELAHLARGRMKSKQRQLEEALEGSFGAHQRWMLRHHLDLIDFHDTKLKELDAEVAERMRPFLAALNHIDAIPGLGQQTAQEIVGEIGTDMSQFPTDRQIASWAKLSPGSNESGGKKRPGRTGKGGPIRHIMIRAALNVSRNPNSYYGAMYRRLCKRGSKERALVAVAHALLVAIYHMLRDGTVHQDLGANYFDERRREQSARNAVRHLQRLGFRVTIEKEPGQRPAA

SEQ ID NO: 96685 - protein, 348 aa, unidentified
MKNLFIGIDFSKEKIDVTMISAIGLTEQSARVSSEFKATPCGYRQFLKWVEEHSCGIDVSSWLFCGENTGDYSKPLCNYLYGKGYDMWLENAKCIKDASGLRRLKTDRADSAMIAEYAMRNHDRALFYRPLSNSLSQLRELFLYRHMIVRHKCSFQVRKEEKRMTMEKSPSRTLISNTGKHFITEFDKAIAKLDKKIKEIIESDEELKHTYTIVTSVPGIGTQNAVCLMVYTNNFDKFDFDARKIACYYGVAPFGKESGTSVHSTPRTHYMANRIIKSMLTQSALIAIRFCPHLKQYFTRLISKGKKMQVALNNVKNKLLHMVTAMVKNDMLYSPDYINACQRIANTL

SEQ ID NO: 96686 - protein, 406 aa, unidentified
MRCVIAFDVSRKSSTMAAYNEQGNCEFEGRLIHSKTGFSNLSKIIKDLSEKNNYTLEFVFEATGVYSAALERFLRENNLVYYSLNPLLAHLNTQSLRRNKTDISDAHQLAKNHFKNDYFQTYREDSYYEQMRTMSRRYDEIMKERIQYKNRLHASLQLSFPDFDTAFINKSKLYYNLVQVFPHPNLILKRSKTVIKNRIKKCTKKNYSLKKLEERAILLIEIAKDSFPAVDETDYSCELVRDYAKKILEMEEEQDEIIQRMTEMSKDRKEYRILRSFPGIKDKLACRIIAELGDLTRFKNNKQLNAYAGIDIVRYQSGNMEYKDRINKRGNSRLRGILYFMIVSMLSAKGKQINHLVDYYYKLKKQPYNKHHKVAVVACMNKFLKVAFHLIQNDLLYDYEKASSQQ

SEQ ID NO: 96687 - protein, 313 aa, unidentified
MTAIICGVDVCAAWLDASVRGVVDGYRRFENSVAGIAELAAFCRTQGVGLVAMEATGGHERLAFGLLWAEELPSAIVNPRSVRQFAQAMGLLEKTDRIDAVAIAWYAEAKRIAPRPPATAGQQTLAAAVTRLRQLVDLRTMQSNQRRLVRDPDASRSFDELLALVGRQIRELESRIVALIGSDPLWGQLDKSFRSIKGVAGRTVARVLAEMPEIGTLSGKAVAKLAGLAPLANDSGKRTGKRSVRGGRSGVRSILFLVAAVVAKHEPDFAAFYRKLADAGKPKKAIRIAIARKLLVRLNAKARDVRAQISQTT

SEQ ID NO: 96688 - protein, 343 aa, unidentified
MGDVITIGVDLAKSVFQVHGVDAEGVVVVRRQLRRGQMLPFFEKLPPCLVGMEACATAHHWGREIERLGHRVRLMPPRYVKAYVKIQKNDAADAEAICEAVTRPTMRFVELKTCEQQSILVLHRTRQLFVRQRTTLINAIRAHLAEFGIVAPIGRNGVEKLLETIGDGQDARIPDVARSCLEALAMQLHLANRQILEADRRVLAWHRSNEASRRLDRIPGIGPLIATALVASVPNPQAFKSGRDLAAWIGLVPKQNSSGGKERLGGITKHGNRYLRTLLTIGALSVIRYAETHGTAHRPWLARLLERRPAKVAAVALANKIARMAWAVMARGEAYREPGVQIA

SEQ ID NO: 96689 - protein, 399 aa, unidentified
MVSVGIDVSKGKSTVCLMRPFGEIVAGPMEISHVDSELKTLVKLMKSMSDEVKVVMEATGIYHLPVLTYLKENGIFTVVINPYQMKQYRVQGLRRVKTDKADSMTIAKYGLDNWDKLKDFVSSEDKYRELTLLSRQYRHYMRIHVASLLELTHILDYTMPGIKKEFNSWDPEKGKDKLSDFVEKYWHYDNIRRKSERQFVESYLAWAKKKGYHRNQNKAAKIYSMAKEGIPTLPADQTTKMLVIQAIEVLRRVDETLNTILARMQEIAKTLPEYTVVRSMGGVGDVLAPKLIADIGDVRRFHNSKALIAYAGIDAPPYQSGQFIGTNRNISKRGSSAIRKTGYEVMRSLKSHPMPEDGAVYQFILKKEAEGKPRKVAKMAGLNKFLRIYYARVMEVYSR

SEQ ID NO: 96690 - protein, 311 aa, unidentified
MDATVVVGIDVSKDRLDVHVLPSGENFAVARDEEGVSKLVARLAALGPYAIAMEATGGLESLVAASLNGANLPVIIVNPAQVRAYAQALGKRAKTDAIDAAVIARFVEATKPIIRALPDADTVLLAQLMTRRRQIVQMIVAERQRQTQLPTRHLRRSAARLIKALQRELDVLDRDIDSSVRGSPIWREKEELLRSVPGVGPIIARTLLAEMPELGTLTRREIASLAGLAPWTRQSGRWRGKSFTGGGRAPVRAVLFMAALVGARFNPILKAFHQRLIAAGKPKMVALIALARKLLTILNAILRDNSPWQSA

SEQ ID NO: 96691 - protein, 343 aa, unidentified
MLSFGIDTHKATLAVSAVDPLGRQLAARTFSNDRRGHAALLSWTRQQGQPRRIGIEGAGSFGAALAELLLASGEDVVEVPAQFTDRARRSLRQRGKSDPGDALAIARLTAREPRLAAVRRPGPTADLKLLVTARDQLVAERTRLVNQLHADLLVLSPGYGRRLSNLTSARHQAAVAQLLGRRAGVRSALAKGRLQRVRRLALDIGRLEARISSTLSAAHCSLPRLVGLGPMMAAKALGEVGDVRRYRGPAAFAAASGTAPLSASSGQVQRHRLNRGGNRQLNRVLHTMALVQVRCDERAQAYLARRLAEGKTRREAIRALKWHLARVVYRTMLADAVSSELAT

SEQ ID NO: 96692 - protein, 391 aa, unidentified
MVYVGIDVAKDKHDCFIMGQGGEILHDVFTIPNNMMGFCNLLSEIQAATSGGGNIKVGLEATGHYSYNLLGFLLDKGLATFVLNPLHTNLYRKSLSLRKTKTDKVDARTIAVMLASDVNLKSYTDTAYHNEELKSLTRYRFDKVKERAKLKQAISRLVTILFPELEKLVPTLHLSSVYALLSEFPGAGQIADAHLTRLKALLHDTSKGRYGRDKALELRNAAQDSIGSHMPAKSLELKHTIRLIGEMNAEIAEIEAEIRAIIDEVASPILTIPGISYRMGAMILAEVGDFSRFDSPDKILAYAGLSPSTYQSGQLSSSYARMEKRGSRYLRYAIFNATKYVCLWDKSFAAYLAKKRSEGKHYNVAISHAAKKLIRLIYALEKSRQPYTPVA

SEQ ID NO: 96693 - protein, 409 aa, unidentified
MKLFAGLDVSSFDIKICLLDGEGEKVKSFTVSNDLPGASELRDTVLEYLRDQAVDTLKFGLESTSVYSFHPSMFLHHDEALKALGAEVFVMNPKQIANFKKSYSDMDKTDEIDAFVIADYLRFGRLPMSVVKESQYVALQQLTRSRYQLVHQVTKEKQHFLQHLSFKCNTFKEEVDSSVFGNAMMELFFEKFSLDELAQMPVEDLADFLQEKGRNRFGDPECVAKSIQKAVRSSYRLDKVVEDSIDVILGTTIEVIRTLQKQIKEIDKAIERIMAGLPQTLVTIPGIGPVFTAGIIAEIGQIERFDDETKIAKYAGLYWRKHQSGRFTADDTSLTRNGNQYLRYYLVEAANSVRRHVPEYQAYYAKKYSEVPKHQHKRALVLTARKLVRLVDVLLRNHQIYTPKRSVNA

SEQ ID NO: 96694 - protein, 327 aa, unidentified
MEPSVIGIDVAKDSLDVFLINGSQQAYKQFANDLGGFRHLLAWLKHNRADRVHACLEATGQYSDGVAAYLYEQGLAVSVINPARIKAYGRSKLQRNKTDKADAELIARFCTEQNPALWTPPTTCFKELQALVRRLDDLQINLTQEQNRLQSGTQSETVIAGLKTHIAFLEEQIEQVQRAIQSHINQCPELKQQQELLISIPGVGKLTAAKLLGEINHITQFEDARQLAAYAGLTPKNFFSGSSVRKKSILTKTGNANLRKLLYMPAISAKRWNPIIKAFCERLLASGHSPMQVIAAAMRKLLHLAYGILKSGRPFDPNYLVNVQAFS

SEQ ID NO: 96695 - protein, 351 aa, unidentified
MPRATSSTNVIATIGIDIGKNAFHVIGLDDKGAIILRQKLSRGQVYARFANIPPCLIGMEACVGAHHLGRQLRTLGHDTRLMPARYVRPYSKGQKNDFRDAEAIAEAVQRPTMKFVAIKTVEQLDLQGLHRIRERLVCQRTSVINQIRAFLLERGIAIRQGLRMLRTEMPIVLAKTDKLSQRMIHMIEDLCTDWRHLDRRIATVSKEIETLSEQDDGAKRLMTVPGIGPIISTATVAAIGTGEVFSKGRDFGAWLGLVPKQMSTGGRTILGPISKRGNRYLRMLFVQAARAVLLRPQSWEKHGLKLWIEAAARRLNRFKLAIALANKIARIAWGVLHGGRNFEVRPMNQAA

SEQ ID NO: 96696 - protein, 393 aa, unidentified
MPRKRILVKSIDTSISYQVIGIDLAKHLVSACLITGAGEIFGIDRLNYDDLLKSAERMSPTLFCMELCPEVHYLAEKLQGYGHHTKVIDGAAVKEYIKTHFGGQKTDLNDAQAIAFLSLDTNLPEITPKNTSNSVLSSIQAVREQFRKEYIQSFVSLKGICQRWGLPISKGVMNKNKVEELVSESKKIPQEVKDWLLELLQSCRELQKRLNKISKYLKEYADNDEICQKIMSVPGIGPITATRLKATIGDIQRFEKPKSIVAYYGLVPKSKATEHNEKKGGITHRGDRVARSLLIEGAGVVLNLAAKGFLRSKPLNKWIEKKRKLKMPWGKLCCALAAKMLRIVRAILIQGTSFNAKIAGVARCSLPKESRNNVMGNNKLSEIPSPNGSVYIH

SEQ ID NO: 96697 - protein, 340 aa, unidentified
MEITTIGLDIAKNVFQVHGVDREGRAALRRKVKRDQLLTLLGGLKPCLIGIEACATAHHWARQLQALGHEVRLMPPAYVKAYVKRNKNDAADAEAICEAVTRPTMRFVPIKSADAQSVLMLHRARHLLVRQRTAQVSAMRAHLAEYGVIAPKGRTHVRELVAGLTDGTAPIPDLARQTLLLMADMIEGLSRQIRAIEVELMAWHRANAACRRLETIPGIGFITATALAATVGDARVFRSGRQFAAWLGLVPKQHSSGGKDRMGGISKMGDRYLRHLLVVGATAVIRYTRRKATTVSIWANRLLERKPARLVSVAVANKMARIAWAVMTREENYRAAPAIV

SEQ ID NO: 96698 - protein, 338 aa, unidentified
MNNGLKLLGIDIGKNSFHLIGHDAGGHQVLRKCFNRNRLLQFAAQIEPCTIAMESCGGSHWLARKLASLGHRVKLIAPQHVKPYVTGNKNDFIDAEAICEAASRPRTHYVAAKTVEQQVLSVQHRLRESLVCHRTEAINRVHGFLLEFGIALPATKAAIAKVPELIDNSRSDLPLQLKRIMEHLLEDIRRLDAEIKACDVQIKQQLAQDDAGTRLMTIPGIGPITASALVADLGDASNFKTSRDLSAFLGLVPRQFSTGGRPVLLVISKRGDRRMRTLLVQGSRALMIRIDRREDALGQWVRNLLARKHPNKVACALANKLARIVWAVLRRGGTYNAS

SEQ ID NO: 96699 - protein, 454 aa, unidentified
MRKPQVIPDEDHEVVYERVAAVDVAKASGVVCMRTPDPARPGRFVNRVWDNVPATRARIAELGGELLRGQVQMVTLESTSDYWRIWHYVLESTGLAVQLVSASQAKNLKGRPKTDRLDAMWLARLTQWGMLRPSFVPPAAIRRVRDFTRARTDLVRERTRCLQRLEKLLEDAMVKITSVAKDGLKAKSVVAMVAALIAGERDPRTLAELAKGPLRGKRDQLAEALDGMFDSHHGVIAQMLLDQVAFLDERITAMENQAIAALAQVQESWGVDAGGETGPGHGTSPDSPVLAAAWRLAEIPGVSVWLAIVIIAEIGLTMAAFPTPAHLVSWIGLCRSATQSGTRHGKGKQKKGDSYARAAAGQAAIGVAGTSTFLGERYRRIARRRGGAIAQVAVARSIMIIVWHLLNDPAARYRDLGPDWHARRTDRDKKIRTHIQGLKALGVTVAITGDDQAA

SEQ ID NO: 96700 - protein, 412 aa, unidentified
MKRIRDRVAGLDVHRDTVVACCRVVDPSGEVEVSKQSFATTRKGLGELAEFLSDAAVSTVAMEATGVYWKSVYYGLEGLFEELWLCNAQHVKNVPGRKSDLSDAEWLADVAAHGMVRPSFVPPPEIRELREITRYRKTQVDARAREIQRLEKVLQDAGIKLTSVASAVWSVSSREMIEALISGTRDPVILAQMAKGTMRKKIDRLEEALSGHFGEHHAIVCRQIIDHIDFLDRSIGALTKEVTTRLVPFEAAVGIVTSVPGISRRTAEVIVAETGADMSRFPTAHQLCAWAGVAPASYESAGKRRPVGTRHGSQRLRRALIEAARSAARTKNSYYSAQYARIARRRGANKAAVAVANSMLFTIWHLLSNGQLFEDPGADYFERRHDPVVEAKRLARRIEALGFDVSLIERAA

SEQ ID NO: 96701 - protein, 483 aa, unidentified
MRLRITNNPTPTVDVFSFSFEFAGALEIVNEYSGFAVTSARYIAFAELKQCTSHQITLSLWEVFMSSLTQEFSAFIGIDWADTKHDICLQPANSQHREFDQLPHQIPAIEQWAYSLQKRFGGTIAVVLELSKGPIVYALQKYDFFVLFPVNPSTLAKYREAFKPSRAKDDPTDAELALDLLLCHGDRFKPIKPQSVEMRTLTYLVEQRRQLVGDKTRFVNRLCDTLKQYFPQTLDWFEHRDTVLFCDFMTRWPTLTQVKRARKASLETFFKTHNVRFDTVIATRISGIRAATPLTLDVAVLTAHQLQAMAQVNQLRTTLQAIDQFDDAIAKLAPTLPDYALFNALPGAGPHLAPRLLVAFGEQRERFTSAAQFQQYSGVAPVTERSGKKCWVHWRWQCPTFLRQTMVEWAAQTINKSFWAGAYYRQQRDKGCSHQTAVRALAFKWIRILYRCWQNRTPYDESKYLNALKRRDSPLLKQVTTTS

SEQ ID NO: 96702 - protein, 340 aa, unidentified
MKITTIGLDLAKSVIQVHGVNEHGKAGLKKTLKRDQVLPYFANMAPCLIGMEACGSAHYWARKLQTLGHTVKLMAPQFVKPYVKTNKNDAADAEAICEAVTRPTMRFVALKNGEQQAILSLHRARQGFVKARTAQANQIRGLLSEYGIVMAQGMSHIAKRLPVILENSESDLPCIFRQLLQRLGEHLKELDRQVSELEVQIRTWHQQNEMSKKLEKIPGIGPITASALVASIGDAKSFKNGRQLAAWLGLVPRQHSSGGKATLLGISKRGDSYLRTLLILGAQSALRVAARKVDHACSWLAKLMARRHQNVAAVALANKNARIVWALLVHNREYRTDLAI

SEQ ID NO: 96703 - protein, 310 aa, unidentified
MAQNIGVDISKDRLDVAVLETGEAFQESNDKAGWARLVARLAGRQIAAIGLEASGGYERGPIRALLKADLPVRRINPYRLRRFADALGIKAKNDKLDAGVIAQFVALLPTRPVEVDPKLERLAEQATARHQLSDELTRAQNQAEQVRDPVIKRLGKQRIAQITRQIALLDKLIAQAIAADPDLAHKDRLLRSVKGVGPVYSHTLLAFMPELGKLTRAQAGSLLGVAPFDHDSGKLKGQRCIWGGRQNVRDVAFMAALSASLHNPALKAFHQRLRAAGKPPKVALVAVMRKLITILNAILRDNVQWQSQPA

SEQ ID NO: 96704 - protein, 359 aa, unidentified
MRTQSNKLNFEGENIYVGIDVHLKSWNVTIYTEYLHHKTFNQPPVPSILRDYLNTNFPGGTYYSAYEAGFCGFNIHFELKKLNINNIVVNPADIPTSQKEQILKNDSRDSMKIARSLRANELIGIHVPFIETLENRTLIRTRDVMVKDMTRFKQRIKALLYFYGISYPPEFEKSTRHWSNRFLKWLKEEVSLSTANGNDALSLLIREVEQQRVLLLEINRKIHSLAISEKYVKEIELIRSIPGIGLVTGLTFLSEIEDIERFPNTDKLAGFVGLIPTCHSSGEVENYGEITFRKKTTLRRWLIESAWVAVRIDPALTRCFSQLCKRMEPNKAIIRITRKLLNRMYYVLKKRQKYECGVV

SEQ ID NO: 96705 - protein, 346 aa, unidentified
MSFKILKNNCCGLDVHKTWIYACIGITDSNGRTEYKQARFSSFTKGLQELCDWLVKYNCNDVCMESTGKYWIPVFNILEKNNLWVTLSHPKYTKPQKGNKTDRKDAKWICDLYMCGMVKPSFIPPADIRQLRDLVRYLFKLTCMITGEKNRAQNCLTVSNFKLDDVFSDVFGKSSRSITEQILQHPGETFDVAPFVDGRCKTPIEEIQAAVDGAISMEQAVKLRQCLNHIDELEKHQAEIEREIFRLSDKYESILNLIRTVPGFDKNPLTAIQVLSEIGGDMSVFPTAKNLVSWAGCCPRNDRSNHKIKFTRISHAGSYFKPVLVQIANARSNLRNILNLPLGIDV

SEQ ID NO: 96706 - protein, 334 aa, unidentified
MKKGSTVVAKRRRKISRQQLTIGLDLGDCNSCYCVLDESGQVQLEQRVRTTARGLREVFGGMPRCRIALETGTHSPWISRLLSELGHEVIVANARQVRLIGESRKKDDRLDAQTLARLARIDPELLRPVKHRSRQAQADLSVIRARAGLVRARTALVNTARGLAKSYGERLRGCNVRNMNPEKAEALSPELQTALEPLLRAMESISEQIREYNQRIQTLAQERYPQTALLQQVKGVGTLIALTFLLTLEDPHRFGKSRDVGCYVGLQPGRRNSGQSEPQLHISKEGDPYLRTLLVSEVSPVWESVSGFRSGATRAILPSEFLVDGEALWHFEAC

SEQ ID NO: 96707 - protein, 339 aa, unidentified
MKLYVGDDLHANNNFLALVDRKGKRVEQKKLPNDLFVIRDFLTPYKKDIVGIAVESTFNWYWLVDGLMDSGFKVHLANPSAIQQYSGLKHSDDKHDAFWLAQMLRLGILPEGYIYPKEDRPIRDLLRKRRHLVRLRTSLILSLQNIISRNCGVSFRANEVKRLTEDRVSPLLESNEDLALAGKASKEMIDQLTRQIQKIEASIVQRVELKEAYRYLLTLSGVGKILALTIMLETGPIGRFAQVGDYASYCRKVPSRWTSNEKTKGKGNQKNGNKYLAWAFSEAAEFARRYDAQSRAYYTRKMRQTNFMVAHSALAHKLARAAYYLMKDQVPFMPEKLFS

SEQ ID NO: 96708 - protein, 338 aa, unidentified
MKTYAGIDLHSSNNYIGIVNEQDQRLYEKRIPNELDRVLMALEPFKDTLQGVVVESTYNWYWLVDGLQEHGYKLHLANPSAIKQYEGLKHTDDKWDAFWLAHMKRLNILPEGYIYPKDERPVRDLLRRRLLFVQQRTSHILSLQSMITRNLGFKMSGNEIKKLKEEEVEGMFDSSNLVFMAQNNIAAIQFLKKIIKDIEKKVKPQVKLQKEFNKLLTIPGIGNILGLTIMLEVGDIKRFAKVGDYSSYCRCVKSERLSNGKKKGKNNKKNGNKYLSWAYVEAANFAIRHSVKAHSFYQRKKAEKNKIVAIKALSNKICRASYYIMRDRVPFDEEMLFR

SEQ ID NO: 96709 - protein, 344 aa, unidentified
MDATTVGIDLAKNVFEIALADERGHIVERQRLSRARFDRFFVNRPACRIVMEACGSAHHHARRLSSQGHEVVLLPAQYARAYVRRNKTDAADAAALIEAARCPDIRPVPIKSVDQQALQQLHRLRSQWTSARTARINFLRGCLREFGVGIPVGAKRAIQAVRDSLCSGGSVVPVLLHESLLELLAEIDALEQRCRQIDRELVRLNEHDPIVERLLKIPGVGPLTATALRASVVDIQRFPTGRHFASWLGLTSREHSSGERRRLGRISKQGDPYLRTLLIHGARSVLLAARSTQRRGSRLDRLRTWALELQERRGHNKATVALANKLARIVWASWRHERDFCSKL

SEQ ID NO: 96710 - protein, 391 aa, unidentified
MSMYFIGIDISKYKHDCCIISAANQKVVSKVIIKNNKAGFNELLTIIHSLANPADIRIGFESTAHYALNLELFLENSLLTFMEVNPVLISEYKKSKTLRRTKTDSVDCESIARWLMTVEYKPHSKGFYHAYSLKSLTRLRDKLIRQRSFYLVKITNVLDHTFPEFKPFFNERLSKTALYLLENYGSAEKMARMNSASYEKLRSVSRGKFSPQQFLRLKELAVNTVGVNNSIFDVELNSLLSLYKSLVKEIDTIKKEINQLIEEVHPHYMSVPGIEPLSAAVIYSEYGDISNFTNPGQMLAFAGIEPGINESGTESHGGKMVKRGSSQLRYTLINCCLPLIRFDMTFATYYAKKRGEGKPHRVAITHVAKKLIRVIYALESQDIDFNAQELR

SEQ ID NO: 96711 - protein, 353 aa, unidentified
MKKLFIGIDFAKEKFDAAIIEACGLKEFGNREYGTFTNDKKGYRQFFKWVKTNADKSVENEWLFCGEDTGSCSLGLSKWLYGKGLDIWIENAYSIKHSSGIQRVKSDKADSSMIAEYAWRHQDKAVLFEPLSESLSQLREVFLYRHKLVQQHIAMDVRKQDKEAAEPSSAISFIKRKSKHLMSEIDNAIKECDLMIDRIIESDAELKENYAIITSIKGVARQNGACLLIFTNNFRRFDLDARKIACYYGVAPFGKDSGTSIHSPAKTSHFANKLIKSLLGQAAHCAKKFNPEIREYYNRLIGRGKKPQVALNNVKNKLIRIIVALVRKKVYYDPKTYMFYNAKFTDVKKMLNS

SEQ ID NO: 96712 - protein, 445 aa, unidentified
MWTTRGWIEKFSFRRALREDRARDGDVRLPGRFRSPVQRCSPSLARVLHQKTGHHHGVQPAFARPGRWAHHLNPALDAPRKATTMKNIPEIPHDVSTQNPLVWAGLDVAKATFDAAVCLGCPGTYTLRDLPVQTFPRTAQGACACVQWLDHILESADRTAVVRGVMEATGKYSQELAGWLVSQRPALAPAIINPQQASAFTKSLFLRNITDKTAARALACYGMERHPAPYAPPSQEQAVLRDLSRHRETLVAMRVAQENRMEEGSESVHVRQAQKRLLATIERQIKNVDKELRKQATAMANVHRDTRLLQTIYGVGFLTAVTILAELGDLRRFERGRQLSAFAGLSPRNIHSGTSVSKRPRLCKKGAPRLRRTLYLSAMVVIRGDNDLSDTYQHLIAQGKSRMAALGAVMRKLLLVMRAVLLSGKPYDPHYARCGKLSPKTAIST

SEQ ID NO: 96713 - protein, 340 aa, unidentified
MDNIGLDLHKRESQLCILTSDGEVVERRIQTSRERFTAVLGERAPARILVEAATESEWVAQHLEALGHEVIVADPNCAPMYATRSRRVKTDRRDARTLAEACQLAAYRRVHRLSPARRHVQVELTVRDALIRTRTRYVAVVKARVRREGLRVPGGDPEHTVAKLMALPLSVAVAAELAPLVALLEPLNAQIVAADARLAALAAADAVVQRLMTAPTIGPVTAVAYVATLDDVGRFATARRVAAYLGLAPTERSSGEQQRRGPISKTGNPRVRCLLVEAGWRILRSTQPAAAPLRAWAERIAARRGRAIAAVALARRLAGILYAMWRDDVDYRAAAISAVV

SEQ ID NO: 96714 - protein, 401 aa, unidentified
MTGDDRPLISLGVDIGKTAHHAVAVDREGHTVYSKPVANEESALRLLVLWARAHQAVVIVDQPGGTAALLLKLCWDATIDIGYVPGLAMARARDFYAGDAKTDPKDAFVLADVARAHPSRVVWLRETSAARAQLELLNSYDADLREDANRVTNRLRALLATYWPALERALDDRLDTIGGTALLARYPSAPQLRQAGARRLVALLRATRRVHEPETWVKQLLDAAKSQTVVVPGAETAAGLIAELAEQLYRVLVRRQSLEKEIERAFFALPEATILRSLPGIGPRLGARILIEIGDIRQFRTSAQLAAYAGLGPTPHQSGTSIRGNRVTRFGNHRLKNAFFLAAFSSLKHPPSRTYYDRKRAQGKRHTQAVLCLARRRVDVLHAMLTRGQPYHMPASLAAAA

SEQ ID NO: 96715 - protein, 369 aa, unidentified
MLILAIDLGKAKSLACWYQSDDATHEFRTVRTCPSDFHTLLTDRPIDRVVIEICDAAGWIVDLCRTLGIPVQVANTNQQAWRWKNVKNKCDRSDGLKLARLSAMDQLALVHVPVKTVREWRSLILYRHKLIDRRTAVRNAIHSILVAQGKAIPGRRSVWSDDAMSKLRSLAQPLDECSTMQDLWRGHLQMELEQLDELCRRIVELDQKLDGIGQADQRVRRLRSIAGVGPRLSELVVAMIDDPHRFKSTRQVSAYAGLVPRRYQSGEMDRSGRINKAGCGTLRKLLVEIAWGMLRHNMHGRTVFNRISKGQKTRRKQAAVALGRKVLCWCWAMLRDGRDWHVPANGLKQHQQRQQQQPCSTMPPALATG

SEQ ID NO: 96716 - protein, 355 aa, unidentified
MNDEKYIGLDVHQATIVVAVLDSTGKLVMESILETKAATILQFFAGLRGTLAVTFEEGTWSAWLYDLLHSRVDKLVVCNPRKNALLKDGNKSDRIDARKLAELLRGNQLKPVYHGETGVRMLRELSRSYLTIVKDLSRVMNRLKAVYRSWAIPCAGRDVYYRRHRAQWLAKIREAGVRRRAERLYEQLDMLQHLRQQARRELLAESRKHAITAKLRQIPYLGPIRVALAVALIQTPHRFRTKRQLWAYSGLALETRTSAEYRFVEGQVRRSKKLLSIRGLNKDHNHDLKGLFKGAATMASVRPGPFQDFYTAALAKGIKPTMARLTLARKIAAITLTLWKKGENFDAEKLKSQAA

SEQ ID NO: 96717 - protein, 348 aa, unidentified
MQNTIVHYEGAASLEAAATKVKPSGARIKIGLDVHARLYVAVAQYDHLLPKAALRLGPGEFVPWVKALLGRGHSVHVVYEACGFGFSLYRQLIAAGAHCYVIAPRKLDEERSRVKTDRRDATTLCQRLSRYLEGNTGELAVLRVPSEVEEQARHVSPQRGQLVHHRQKLQAQGRSLLISHALPAPAHWWKEQTFSRLGRHLPAWITTGLQTARPALLSLQQQIDTLTSELEASAPSILPRGVGKLTSVVLTREICDWHRFNNRRAISSYTGLCPGERSSGSKRVPGSVTKRGNPRVRAALVECAWRMVRFQPQYPPVQKRLAILSKGSHALGSRAQEGHRSRGAPARR

SEQ ID NO: 96718 - protein, 478 aa, unidentified
MTAGKSAKKDGAAAGSPAVAGPGGGDGAEVAEERVEVVTYAAAIDVAKASGMMCTRVPGSRPDRKRQTVWQVEATYAAVVALMDHLRCEGIQRLVLESTSDYWRIWYYLAEAAGLEVWLVNAREAKHLPGRGKSDREDCVWLCKLNERGMLRRSLVPPQAVRDLRSLTRTRSRLAQDQVRHQNRVEKILEDALLKISVVISDLFGTSGRRFLDALVAGERSPAALAALGDRRLKATRQQLAAALTGRFREVHAFEIATHLRLIDTINEEITRLDARIGQQLASIPGVAPACAGCGLIGGGHSPGCASDGTPVLGLVARLDEITGVGVCNARVLIAELGTDMSVFPTPGHAAAWARLTSRTLQSGNSARPGRTGKGNPYLRGALGQCVMAAARTDTRLGEQYRRLARRRGKQKAIVAVSRVICEIACILISDPGARFTDLGADYCNRGDSRRQTRSRIRELERLNPGMKVTLTPVQQAA

SEQ ID NO: 96719 - protein, 354 aa, unidentified
MSSMTVSTPTRQPMFAGIDTHKATHHVAVVDADGAVLADQEFPADADRSVLAWLSRWPIARVGVEQTGTYGAGVTRALTGAGFAVIDVNTPDRTVRATAGKSDPIDAVMAAHAVRTRRARVIPKNRDGVIEAIRLLQTARHSAVKARAAALTQLQDLAVIVPSDVRRRVGTTGRSTAAAALAMRADRTRLHTPTQAAKLALRSVATRIRVLDAEIRDLDAALTEQVTATAPRLLALPQVGIHAAAQLLVTFGQAPDRISSDAKFARLIGVAPIPASSGKTNRMRLHTGGDRQANKVVHLIAIGRLRSHQPAIDYLTRRQREGLSKKDAIRAMKRLITRELYGALKADLTALDEL

SEQ ID NO: 96720 - protein, 429 aa, unidentified
MNFNTQNGRIAALKDDWMIVGVDVGCDKHFARAFNNRKMELSKKPFCFENTEEGFASFKIWLTDLMVRNHMNHVMVGMEPTGHYWFNLANYIKENSMTLCHVNPAHVKKSKELDDTNPSKNDRKDPKVIAGLVCDGRYALPYMPEGIYAEMRGLNNLNYRETEEMIRKKNRYARWICIFFPELKKTFADAEDSATIRAVLKEAPLPEDVLKLGVDGINAIFRKNKMRGAGMKQAKKLYEAAEHSIGHASSPSVARMEIKAILEDIETHENRLRELDDLMEQTLRKIPNVDKLFEIRGIGLKTISGFIAEIGDVSRFEDPKAIQKLAGLAIVDDQSGKHNGKTTISYRGRKHLRYVMYKGAISILMHNSEFAAIYTYYTTRPNNPLKKLQAVIAIACKMIRVFYTILTKGVRYDSRKLTADILRTVPQLV

SEQ ID NO: 96721 - protein, 322 aa, unidentified
MRYIGIDVSKATFVVAYSSDKGGEIRTFNNTTAGIRQFIGTLPKDGSIHCVMEATGNYSALLLYMLNVAGITVSMENPLKVKNFAKALLSTVKTDKSDARLITLYGEKMNPRPFKVQGEAILRLRQKRTVIRQLTKQITAMSNLRGSLACLPVPDKGATHTVDETIKFLEKKRDRLQSELTDLVEVEFSRQLALLTTIKGIGITLATALILTTGGFTYFQNAKQVSRYLGICPTYEQSGTSVNIRGHINRNGDAYTRGLLYIAAWPASRFNAQCKETYTRLRQNGKPGKLAMIAVANKLVRQAFAVVAHDKEYIDGFVSNRP

SEQ ID NO: 96722 - protein, 368 aa, unidentified
MNDIIRIGVDTSKSVFQLHGVDAAEQPVLRKKLRRRDLLAFFERLPATKVGMEACGGTYYWARELTALGHEVKLMPAQHVKPYVRRGKNDRNDADAICEAMSRPRMSFVAIKTAEQQAAQMLMTTRERLVAYRTQLINTIRGHAAEFGLTAAKGPAHVEPLLARVAEDGRVPEFAKELFAIHGQELNRLKIELREIEAKLKAWHRQNEMSRRLAEVDSIGPIGGCLLAIKAPDPKAFHCGRDFAAWMGLTPKDHSTAGKVRLGVITRAGDEALRRTLVVGATSVIKQVSKGKGNPSPWLRGLVARKPPKLAAVALANKVARVAWKLMVSGERYNAARAGIVSPIARIAPCSRRQGRCAPPAAVASGQP

SEQ ID NO: 96723 - protein, 356 aa, unidentified
MSHDVKYIGMDVHKEAVVIAVLNSSGKQVMESIVETKASSILQFIHGLRGELHVTWEEGTWAAWLYDLLQPQVKRVLICDPRRNALLKEGNKSDKIDARKLADLLRTGMVRPVYHGEHGLRTLRELGRSYQTISQDLNRVMNRIKALYRGWSIPCAGTQVYAPRYREEWLQKIEHVGVRRRAELLYQQLDGLQALRRTLRPELLAESRKHKASKLLRQIPCIGPIRAARLIALMQTPHRFRSKRQLWTYSGLGIETRDSAQYCYVHGQLQRTKKPQQIRGLNRNHNHEMKEIFKGAATRASCGVGPLRDFYVALVAKGMKPEMARLTLARKIAAIALTLWKKEERFDTEQLKPQAA

SEQ ID NO: 96724 - protein, 310 aa, unidentified
MDAIYVGIDVSQARLDVHVLPSGEAFAVARDGKGLEELIERLRAFSPQLIAVEATGGFETIVAAAVAGAGLPLVVVNPAQIRHFAQALGKRAKTDPIDAAVIAHFVEAVKPELRALPDEAQRLLAELVGRRRQIIEMMVAERQREKRAANVRVRKSILRHIRVLEKELPEIDEDIGTLVRGSPVWREKEDLLVSFPGIGNTLARTLLAEVPELGELTRREIASLVGVAPFTRQSGRWKGKSMIAGGRGSARTALYLAALVASRHNPILKAFYMRLLAAGKPKMVALIAVARKILTTLNAMLRDKRKWQSA

SEQ ID NO: 96725 - protein, 337 aa, unidentified
MEQEKYIGMDVHQATISVAVMDCRGKLIMECILETKAVTILQFFRGLRGGLSVTFEEGTSAAWLHDLLKPHVHHLVVCDPRKNALLKDGSKSDRIDARKLAELLRGNQLSPVYHGEHGVRTLKELARSYLTISQDLVRVMVRVKALYRSWAIPCSGQQVYAVRHRAFWLEKIGEAGVRRRAEFYYQQLDALRSLRQEVRRDLLAESAAHKATRQLRQIPSIGPIRAALLIALLQTPHRFRTKRQLWAYSGFGIETHDSGPAQAPETGGLSEIAIFHQLRSSNVERRAARQTGNETLCGNRLSRYLLVCDRLSNRKKQHIRAMWAFLVGAERKCPALC

SEQ ID NO: 96726 - protein, 413 aa, unidentified
MTEERWYVGVDWASESHHVFLTNGEGRKIGEKVFKHSGEGLAEMATWLLATSHAGSPHQIHVAIEVPHGPVVETLMERSFKVHAINPKQMDRFRDRFTLAGAKDDSRDAEVMASALRTDARCFRLLAKLDPTVIELREWSRIGEDLSAERNRLTNRMREQLWRYFPAMLDLESDLGAAWLLDLWELAPTPGKAARIREATVAKLLKRNRIRRFDAAHVLGVLRKPPLQIAAGTVEAASAHIAGLIERIRLVDQQLKQAHRQIDVLTAKLIPEAETAPTKQHDVEILASMPGVGRIVLATLFAEAWDVLQRRDYAALRSLAGVAPVTKRSGKSCIVVRRQACHNRLANAMYHWARVAVQHDPRSRSKYAALRGRGHSHGRALRSVADRLLNVACAMLKNRTLFNPLAAAQEHPC

SEQ ID NO: 96727 - protein, 339 aa, unidentified
MNLYVGIDLHSTNSYIGIINDDFKNVMEKRVPNNKDKILNILAQYSDKIIGVVVESTYNWYWLVDALMAAGYKVHLANPAAMKQYEGIKYLNDKHDANWLAKMLKLGILPEGYIFPKNTRAIRDLLRRRGSLVQKRTAFKLMLQQIYSNQKGESLSNNAMEKMKYAEAEKLFEEEAWQMNGLCLYETSQHLKKQITEIEKYVLKQCKDEWSYKGLKTVPGVGVVLGLTIALETGPIERFLTAGDYASYARCVPTAYWSNKKKKGTGNQKNGNKYLAWAYAEAASFCMRHCEEAKMFYQRKTAKTNKPKAYRALANKLSKACYFIMRDGMAFDVNKLFQN

SEQ ID NO: 96728 - protein, 419 aa, unidentified
MSFKIIKKNCCGLDVHKTWIYACIGIADANDRVEYVQARFSSFTKGLQELCDWLAKYHCSDICMESTGKYWIPVFNILEKNNLWVTLSHPKYTKPMKGNKTDRKDAKWICDLYMCGMVKPSFIPPADIRHLRDLVRYRFKLSCMITGEKNRAQNCLTVSNLKLDDVFSDVFGKSSRSITEHILQHPGETFDVAPFVDKRCKTPIDEIQAAVDGAVSPEQAVKLRQCLDHIDELEKHISEVAQEIFHLSEKYEAALELIRTVPGFDKNNLTAIQILSEIGGDMSVFPTAKNLVSWAGCCPRNDQSDRKIKSTRISRAGSYIKPVLVQIANALIKSKKHPEFTDRYRRIKARRGHKKAIIAICRMLLTAIWHILSDLKPYTADGFLEPRPVNESRVLTTSQALNLLKQRGYTIKDDPATAS

SEQ ID NO: 96729 - protein, 337 aa, unidentified
MSIIRIGLDTAKHVFQVHGVDEAEQPVVRRRLGRKEVEQFFAARPATRIGLEACGAAHHWARILSGLGHEVVLLPPQYIKPYVKRGKNDALDAEAICEAMSRPSMRFVPIKSADQQAALMMLKTRDLLVKQRTMLINAMRGHAAEFGVVAAKGVGKVSELLQLAHAEAAGVPALALEMLRLIASQLDALELRLKTIEARLMTWHRQSPVSQCLATQPGIGPIGAVSFALKVTDPKAFRSGRHFAAWLGLTPKENATGGRSRPGRISRQGDESLRRLLVLGATTVIQFAKPGRASPWLMDLLARRPRKLAAVALANKMARILWAMMVSGELYRRQQPA

SEQ ID NO: 96730 - protein, 369 aa, unidentified
MAPRERDRSQRSGSTIKKTEGQLGSSRSSGHQPEQLRGPRARIVQGRETRRCPMSSACFVGMDVSQKTVDVAVQPGTAFQVTNDEPGIAESVERLRALQPMLIVLEATGGLEVPLAGALAAAGLPVVVNPRQVRDFARATGQLAKTDRLDAEILARFADAVPPPVRPIPTEDTQALAAIVARRRQLIEMLTAEKNRLRLTARALQKRVQAHITWLETELERFNTDLTTTMQKSPVWREKEDVLRSVPGVGPVLTTTLLANLPELGTLTRKEVAALVGVAPFPRDSGTLKGRRAIWGGRAHVRAALYMAALVATRKNPVIRTFYQRLCQAGKAKKLALTACMRKLLTILNAMVKSGTPWCHAGETAAAST

SEQ ID NO: 96731 - protein, 386 aa, unidentified
MQKLNDLSRSLTPLDPDGTLIAVIEMSQSSWLVAGIVPGVERQPLKKLAVDESALLNLLNRWRVEAEKAGRKIERIAVAFEAGRDGFWLARWLRARSIEAYVIHASSVAVSREHRRAKTDRLDTELLKRAFIGWLRGERDHCKMVAIPTTKDEDAKRPNRERESLIGDQTRIINRMKAALIRLGIRGFNPKLKKAAGRLEDLRTPEGEPIPPNTLAELRRDMERRRLISDQIRQIEDARLERIKQAPGDGPHAMVRLLTRVIGVGIETADMLVQEVLARNMRDRRAVARYAGLTGSPDESGTKRREKGLARSGNARVRRGMIQLAWRFLMFQKESALAQWFRARTETARGTRKTMIVAVARKLLIALWRLVREGVVPDGVVLRQAQ

SEQ ID NO: 96732 - protein, 313 aa, unidentified
MLYVGIDVAKNKHDVTALNVPGKTVLKPLTFSNNKAGFELLDLSLRQLNQDCLIALEDTGHYAFNLLNFLHEQGYEVYTYTPLLIKEFAKSLSLRKTKTDKKDAHGIALKLLSDPNREQFQHDNRQVELKILARHIHRLKKKQSDWKVQYTRCLDIIFPELDKIVGKHSEYTYQLLTRYPNPQKRIEAGFDKLIEIKRLTASKIQDILSVAPRSIGTTSPAREFEIIKHYKRLIDKVEKCVNDLMAEFNSVITTVTGIGNRLGAVILAEIRNIHAFDNPAQLQAFAGLDSSIYQSGQIDLAGRMIKRGSPHLR

SEQ ID NO: 96733 - protein, 337 aa, unidentified
MKHSVISIDLAKNVFQVCIMGSNHKIISNKKVKRHQLLDVLRQFESTTVVMAACYTAHPWGRAIERLGHKVKLILPYQVKPFVVGNKNDHNDAIAIIEASQRPKATFVPVKRLEQQDIQSLQRIRERYIKQRTSASNQLRGLMAEYGVVVPVGLSKLRAAVPDILEDAENGLTTISRGFIDRLYQELAHWDEQVDELEIELHSLLKENDDYQRLQTIPGIGPVVAATLVAAVGDANYFKNGRQMAAWIGITPGHHASGDKTQYRGITKRGNRALRKMLIHGARAVLNWCGKKNDKLSLWLKALSLRAHPCKVVVALANKMARIAWAILATKQVYKAA

SEQ ID NO: 96734 - protein, 373 aa, unidentified
MPINLRYVGLDVHAETIAVAVAEADGEVRSLGILPNRLEAVAKLIRKLGPREHLRVCYEAGPCGYVLYWQLTRLGVHCDVVAPTLVPMKPGERVKTDRRDAEKLARCYRAGDLTAVWVPDAAHEALRDLVRAREAAKQDQLRARHRLGKFPLRQGRRPPEGVKPWTQRHRRWLDALHFELPAQQATLADYLYEVDHAAARVARLESALDEAVAAAPAPMRAVIAALQTLRGIRQVIAATIVSEVGSLARFTHPRELMGYSGTVPSEHSSGDRVHRGAITKTGNAHLRRVLVEAAWAYRFPPKCAKGLRQRQRGQPAAIIDIAWKAQQRLCHRYHRLLARGKPTPHVITAIARELVGFIWAIGVAVERGQAMAA

SEQ ID NO: 96735 - protein, 429 aa, unidentified
MTRISVGVDVSKNRSTVCIIDQDGKVIMRPFLVWHSTEELDFLADTLKRLNGEVRVIMESTSIYQYPIALHLKEKGIFISIVNAYKVKKFANTDFRGGKTDKKDSRTIASYGISYWDKLVEWQIPKDTYFNLDLLNRTYMNAKKHRQIILQELQHYIDCAMPGMDKELHSLNLNTKKDFMLDFVEKFWHRDEIVNMTEAEFTEVFTAWAKKKGYRPVEGKAAKIYAIAKSCIPYYPANPTVKTILQCIVDKLSGVNRTLVTIVTQMIEEAKKLPEYQIVREMPGVGDPLAARFFGSAGDIRRFKNSKALVAYAGIDSPPDESGDFSSTHRHITKKGSKVFRDTGYEIMMALRAQKRTWEKVRKNPDVYDYMLRKEAEGKPPKVAKIAALNKFLRIIYARIKELYDNMALAERAKTKTRSKTRAKTKVTA

SEQ ID NO: 96736 - protein, 467 aa, unidentified
MPKTLRRRTPNTRRTKLPKGRVPQLEQMHFHAAGIDVGATEHWVAVPADRDAQPVRRFGTFTADLYALAAWLTQCGIETVAMESTGVYWITLFEVLEERGFDVQLVNPQHLKQVPGRKTDVSDCQWLQELHTYGLLRGCFRPTDEVCILRSYLRQRESLIATAAQAVQHMQKALEQMNVKLTEVVSDITGETGMRIMRSIIAGEHDPQVLARHRDRRCKHDAETIAKALKGHWRQEHLFALTQAVAHYDFVQQQLGACDAQIAACLHAMLPSEELEEPPAPPGGRPRRHSKNAPAFNVWAYLYTLTGVDLTRIDGIDAVTALKVISEIGLDMTRWPSAKHFASWLGLCPGNKISGGKRLSSRSKPTANRVAMALRLAAQSLARSHSALGAYYRRMRGRLGGPQAITATAHKLARLIYSLLRYGTEYVDAGQHAYEQQYRDRVLSNLQRKAHVFGYKLIRVEEAPAMP

SEQ ID NO: 96737 - protein, 428 aa, unidentified
MNCNTQNAKIASITEKTLIVGIDVGSETHFARAFDWRNYKYTKKPLEFSNTEAGFMMFKAWVEDIAEKQGKTAVIPGMEPTGHYWFALGKFLQDSGMKPVHVNPHHVKKSKELDDNNPNKNDRKDPKTIAALVNEGRFSYPYIPTGIYAEIRSLSNLRFQTQEELTRIKNRIARWFAIYFPEYKDVYGDLMAVSGRMILKEAPLPEDIRILGVNGVNQIWRNAKLRGAGMKRAKILVSAAEHSVGSKEAPEAARIELKNLLNDMDVYVSRMEELLQTIEEKLKTIPYVDKLMEIKGIGLITVSGFIAEVGDIGRFDNPKQLQKLAGYAIVANDSGKHNGESRISYRGRKRLRYVLYEAAISLVGKNAEFKEIHEYYRTRKENPLKKMQSVVAVACKIIRVFYTILTKGVDYDPMKLMSDIRRPQLQAA

SEQ ID NO: 96738 - protein, 350 aa, unidentified
MEYVGIDWSYRRAAWCAVSEVGKVVDEGAVAADEDGLGRLVIRRGVEVRAVVEMMSGAIWVRDTLAAAGWHVQIAHARKVRDVAPLACKTDKVDARVLAELCRRDLVPELWVPSLGDRELRERLRRRTHLVRMRASAMNRIFGLLTQWGLRLSLRRLREPDAMELLAQRGVPSVWRDSIVEALAVIDLLDARIAPIDRELGPLARGDARVRLLDTIPGVGDLLGLTLASEIGDVARFCSPRKLIGYAGLAPKINQSGDRSRTGALSKAGSRTLRWAAVEAAQHAWRPTNPWHQLYTDLAQRAGKNPSKAAVARKILIAAWHVLSRQQPFKAAAPRRPDPVSASSRCLLAA

SEQ ID NO: 96739 - protein, 331 aa, unidentified
MKKVDDSVGIDVSKLTIDVHIYHLNIHLVFANKKSGFIEMEKWIRKQVLSPSIVLYCFENTGWYSMTLSYYLYGLGRFYVCENGLEIKRSIGLKREKSDKADASNIAHYAWLRREELECSVPTTEKLIELHRMMSLRDQLTKQIVSLKNMKHGMLPVTSSPSTDRTITILEQSLSSLVKQLKKIDKEMELLISQEVEMKLNYELVLSVRGVGKVLATQLILHTHNFTCFENARQFSAYCGLAPYPFQSGASIKGKPRIHSIGDKKMKSLINTCAVSAVQHDKELRAYYQRRIEEGKPKMLVLNIIRNKIITRAFAVIKRGTPFVELNQYAA

SEQ ID NO: 96740 - protein, 345 aa, unidentified
MYVGLDVHKQVCYGTVMDEKGKVVKQAKFTNDLEALDEFMEGLDEALVAMEAGYCWQPIYDWLEEAGHGVKLAHPLKVKAIAEAKVKTDKIDSETLSHLLRADLLPESYVPPRDIRELRDRVRRRAFLVGMRTMLKNRVQADLAKQGISTGGPLWTREGRELLRGLGLEAVDQVLPVMDALDRQIAKMSWGLKRMCGEDPRARLLTTIPGVGYYLALLLVSEIGDVRRFPDSEKLCSYAGLVPSVRRSGGSAYHGGITREGSRWLRWGLSQAVHVHLRSETDLTRFYRRLAGKKPKQVAVMATARKMLKVVYWMLRNNEPYHPGPGVVDPVAGVGYSSETDVTPT

SEQ ID NO: 96741 - protein, 374 aa, unidentified
MGTQGITFVGMDAHKKAINVAMLLPGQLEPVEWQVANEPAAIRRLARKLEREASGEVRCCYEAGPCGYVLMRQLEGAGGVVCEVVAPSLIPVKPGERIKTDRRDARKLARLLRSDDLTMVHPPTAADEAVRDLCRCREDARRDLLRTRHRLATFLQRRACLYTLTRRTWGQPYRAWLQGLKFEHAPDQVTLADYVTGIEQLEQRLASLDQQLAALAEQAPYREPVAWLRCFRGIETVTAIALVSELHDFRRFETARALMAYLGLVPSEYSSGEQRRQGAITKAGNTHVRRLLIEAAWHYRHRPHVGVALRQRRANQPSSIIAIADRAQHRLYHRFHKLMQRGKPSPKAVVAVARELVGFVWAALYPAASEASAR

SEQ ID NO: 96742 - protein, 455 aa, unidentified
MKHEPEEIPDAEHELVIERVAAVDVAKASGKVCVRVPGKAGRRVSRVWDVAATTAAVTELAEDLVELGVERVTVESTSDYWRIWYYLLEAAGLEVQLVNARDVKNVPGRAKTDKLDAVWLAKLTEKGLLRPSFVPPTEIRRLRDYTRLRADLTHDRSRQVQRLEKLLEDALVKLSTVATDIMGVSGRAMIEALIAGQRDAKVLAGLARGRMKTKRAALIEALSGRFDDHHAELARMLLAQIDALTAQIDTLTARIEQLLAAMPEAQPVDPRRDGPTSGHPVGVTADTLAECARLTTVERLDEIAGIGEHNAQVIIAEIGLDMSRFPTPAHLVSWAKLCPRTIQSGPVTRGGRTGKGNPYLKGVLGDAAAAAAKTNTFLGERYRRIVKRRGKLKALVAVARSILVIVWNLLNDPTARFHDLGPDYHTNRIATERRMRNHIAQLTAMGYRVTLEPAA

SEQ ID NO: 96743 - protein, 345 aa, unidentified
MSIVGGLDVHRKQLTFDYVERATGELTRGQIAPADRRHLAVWLRRFDGVGDVAFAVEGCTGWRYVVEELQTAGVRAYLAEPADTAAARGRKKRAKTDRADAKLLRELLDGDRLPQCWIPPGQVLEYRALLGLYHDLRREHTGWVQRIHAVCFHQGVQALGNGGVSTADGRVRLGQIASEQLSPAGQLQVATAVAMLEVLEVHLEDLRRRLVHTAKHLRGAKTLTEAIYGVGPITALALCCWLGGADRFRSSRQAVRFAGLDVTVHSSDTKRSPGHLSRQGPAVLRWCLYEAGKTSARNSAPAHRYYADVKQRLDGKRAALSQGRRIVRQACHLLTTLGDDAFVTV

SEQ ID NO: 96744 - protein, 315 aa, unidentified
MSNHSTRAAGIDIAKDKLDLAIHGLPIRLTVENRRPGWRRLANELAKAGVNRVGVEATGGYERGVIAYLRAAGLTVVLLQPLQVKAYARLHLRRAKNDAIDAALIAACTAALDEPHSAPDVRLEPLADALTFVEQIEEELIRHKTRLEHIQQARLRRIVMADIRRLEARRLAELRRIARELRRHHDLSRRLDLIQSVPGIGERTALALLLRMPELGQVTREEAAALAGLAPFDDDSGTHKGQRHIIGGRQRLRRSLYAAALPAAFRWNAALISLYKRLIARGKSHKIALVACARKLLIMANAVVARASPWQVRPA

SEQ ID NO: 96745 - protein, 339 aa, unidentified
MLKRKFTLGCDIGSSTIVCSVLETPEKMVLEPKEFANNFAGFEQCISWLKASDLKAKDILVCMEHTGVYSESFCYYLYDQKIKVVIESGAKIKKSFKLATHKTDELDSIAIAEYAIRYADHLIAWEPRQSAVESVKSLLSSRELFVKHRTAQKNALSAYKRKVVQNEMLREEYEKSIQGLNQTIKNLENEIESILKQNEHWITVIKTIKTVRGVDKLLPYNMFVMSNAFSVKLEHKKLAAYLRICPYQYSSGTSIKKRAKSPKYGPAIMRKLLFLAAKNACQYDPDFQAYYARKESEGKCYFLIMNNVGNKLLKIICAMINSGKPYIPNYRSVNPILVK

SEQ ID NO: 96746 - protein, 354 aa, unidentified
MTSTKYIGVDVHTESISIAVRNAVGKLVMECVIETKASTLLQFIHGLSGDLRVTFEEGTWSAWLYDLLKAHVTEVLVCNTRKNGSRNGSKSDRIDARKLAEQLYMNNIKSVYHGEHGLRTLKELARSYLTLTKDLTRVMNRLKALYRSWGIPCGGTEVYAPRYRAEWLGKITEGGVRRRAEYYYQQLDFLQPLRQEARRDLLLEAKKHKAWKLLRLIPGIGPIRATLVMALMQTPHPFRTKRHLWTYSGLALETYDSAEYQTVAGQLERRKKSATVRGLNKDHNHDLKDIFKGAATRVSGSRGPLRDFYENLLTTGRRPTMARLTLARKIAAITLIVWKKEVRFDANYLKPQAA

SEQ ID NO: 96747 - protein, 341 aa, unidentified
MEQFIGLDVSLKDTFLSVREGGKRTWRGKCPSDPKLIAEVVRKRAPNAERVVFETGPLSVWFYHALKQKGLPAICIDARHAKAALDMAPNKTDANDADGLAHLAEVGFYRKVRVKSFDSMLTRTLVAARNQMLRATTQLSNQIRGLMKTFGLVVPKGAGRVFESHVRSLLASNAGLEQIILPVLEAWRDIRARAAELSKQLVASARASEQCQLLSSIPGVGAVTASSFVAAIEDPENFRRSRSVGAWIGLTTRRYQSGEVDYDGRISRRGDNHLRGLLYEAAVVILTRTTADSALRIWGLKLKEKIGFKRAAVAVARKLAVIMHTMLRTGELFNRSIAAEA

SEQ ID NO: 96748 - protein, 380 aa, unidentified
MSQTLNTSIAVVGIDIGKNSFHLVGQDRRGAIVLRQKWSRGQVEARLANLPPCLVGMEACVGAHHLSRKLQMLGHDARLMPAKYVRPYSKGQKNDFRDAEAIAEAVQRPTMKFVATKTADQLDLQALHRVRERLVGQRTGIINQIRAFLLERGIAVRQGLRFLRAELPSILATRNDVLSPRMLRLVEDLAADWRHLDERIKGLSGEIERLARQDKGCERLMTVPGIGPIISSAMVAAIGTGDAFSKGRDFGAWLGLVPKQISTGDRTILGSISRRGNRYLRSLFVQAAWVVLVKVGPKHCGTAMGSSRGSRPQESASTTMCWQLRSRTSSPASPGQFSTTGAPSSASRQMRCRPDQLDHRAVLGPVKAWPGSKARKARPA

SEQ ID NO: 96749 - protein, 330 aa, unidentified
MKQENLLGIDVSSKEVVVKIRRSGKSYPCATFENDVAGHKKLIRWATKGGKTARVCLEATGVYSFELALALHRHPHSKVMVINPRALRNFAQALMQRAKTDPIDAEVALEFLERMPFRAWQPPCDEILQLQAISRRICQLKMELNRAGNRKHACLQRPSVCRVVINDLDVHIRHLKRRVQQLEGEGLKLIQALPDLERQFQRLISVKGIATTSALRILAEIAVLPKDMQPEQWVAHAGLDPRPFESGETIKRHRYITKAGNKYLRAALFFPALVAIQQEANVKAFYARLIARGKKPMQAVVAVMRKLLRTIWGMLEYDQDFNGEKFYKMA

SEQ ID NO: 96750 - protein, 377 aa, unidentified
MTTTDAAAETRETVYAAIELSKKTWVLGIAHPDRDRPSIHRVSGGNIAELVSRLRVAARNNRRILVCYEAGYDGFWLARALAKMGIECRVLDPASIQVNRRARRVKTDRIDVLALLRALIATDRGERHVCAIVRVPSVEEEDARRSHRERQRLVRERTGHINRIKGLLFAQGIRDIKPKLRRSRIDFAALETAEGHPLPDRLRRELEREYARLSLIATQLREVEKERDTADAQDPVVEQKRQLLVALHGVGATSAAILAREVFARSFASRRQLGSYLGLTPSAYDSGSTTRCQGISKAGNSWARRILIEVAWLWQKYQPASPLSHWYIQRTAGQSSRIRRIMLIALARKLAISLWRYVETGLVPEGVAIAKAKLRPT

SEQ ID NO: 96751 - protein, 383 aa, unidentified
MSQEDAAAGSRQKDLGAIFASIELSKKTWLLTSMSPGAGDKMSRHIIVGGDIAGLFAQLSTLRRKVRDRTGREYPFVIIQEAGLDGFWVHRALAAEGYESYVVDAASIATSRRKRRVKTDRLDGESLIRTLLAFKRGEPRVCSMLRVPDPDEEDRRRIVRERKVLMEERIRHSNRIKGLLFSQGIRGYDPLRRDRREQLETLRTGDGRVLPLHMKRQVLRELDRLELLIEQIKGVEAERDEMLANERQSTREVALLSQVVGVGPEFAAVLWGEGLFRHFENRRQVAAYAGLAPTPWQSGSIDREQGIGKSGNPRLRSTLLEMAWLWLRHQPASTLSRWFNERVAQSGGRFKKVMITALARKLVVALWKYASAGVIIEGAVIRS

SEQ ID NO: 96752 - protein, 417 aa, unidentified
MKCFVGLDVSSTKLDVCIMLNDTSTPVTASLSNDLSGATEIKNHILDLNHTYHFERIVIGMEATSLYSFHPAMFFHEDSQLKELHVEIMVEQPNKIKKYRDAFEENKNDTIDAFYIADYFRIERFSPSFLKEEKYMALQHLTRTRLQIIEQLTRTKQHFIENIYYKCNTLAYQFKKEELSTNLWSSTMMTLITDEMTLDELANMPLQELADWLQQLGKGHFKDSEKLAQTIQAAIRGSYRLSKLQQDSVNVILGLLAREIRNLEKMIKEIDKAIEDMVETIPEYQCLTSIPGVGKAYAAGIIAEIGQIERFKDHPQVAKFAGLNWREKQSGNSNSQHTSLVNRGNRYLRYYLVEAANSVRRYDDEYKDFYKKKYHEVPKHQHKRAIVLTARKFVRLVVVLLRNHQLYTPPRRLMEDK

SEQ ID NO: 96753 - protein, 404 aa, unidentified
MNNVAGIDVSKGKSMVSVLRPFGEVVAKPFSIGHTGSELKELADYLKSLDGETRVVMEHTGRYYEPVARFLCEEGIFVSAVNPKLIKDYGNNSLRKVKTDKADARKIARYGLDNWAELRQHTPMDTIRMQLKTLNRQQSLYAKTKTMMKNNLIALLDQTYPGVNALFDSPVREDGSQKWVDFATAFWHVNCVRAMSLTAFTERYRKWCKRHGYNFNQIRAIEIHTQAQELIAMLPKDALTKTMIRQAIDALNAVSKSLEQLRREMRTLAAQLPEYPVVMAMRGVGDSLGPQLMAEIGDVTRFTHRGAITAFAGVDPGADQSGAHEAKSNHTSKSGPPELRRALFLVMDCLLKTQPKDDPVYRFMDKKRSEGKPYLVYMTAGANKFLRIYYGRVKEYLASLENAD

SEQ ID NO: 96754 - protein, 351 aa, unidentified
MAAKKCQVTGGVDTHGKTHHAAVIDGAGRVLGDQEFPASAVGYRQLLAWLRRFGQVIKVGVEGTGTYGAGLARHLTAQGVTVVEVDRPDRRARRAKGKSDPLDALAAARAALSGQASGTPKTRTGPVEAIRALRVARRGAMKARTAALNQLHGLLASAPESLRHDLSLPGAPLVDRCAALPVEETRLTDPVEATKAALTAIAARIQALTAEITQADRRLRPAVTRTAPHLHAVYGVGTDVAGQLLTTAGDNPDRLRSEAALAHLCGAAPIPASSGRTDRHRLNRGGDRAANSALHTIALVRMRHDPRTRAYVDKRTKQGLNKKEIMRCLKRYIVREVHTALLADFTALSTP

SEQ ID NO: 96755 - protein, 282 aa, unidentified
MENIALIGIDLGKNSFHIHCQDHRGKAVYRKKFTRPKLIEFLATCPATTIAMEACGGSHFMARKLEELGHFPKLISPQFVRPFVKSNKNDFVDAEAICEAASRPSMRFVQPRTESQQAMRALHRVRESLVQDKVKTTNQMHAFLLEFGISVPRGAAVISRLSTLLEDSSLPLYLSQLLLKLQQHYHYLVEQIKDLESQLKRKLDEDEVGQRLLSIPCVGTLTASTISTEIGDGKQYASSRDFAAATGLVPRQYSTGGRTTLLGISKRGNKKIRTLLVRHCCK

SEQ ID NO: 96756 - protein, 384 aa, unidentified
MKVVCGLDVHKDSVFCCILCANGEKIQHKFGVLTEELVTLRDLMVSEGVEECAMESTSIYWIPIWRVLEGSVKLHLVNPYFIKQLPGKKSDVNDAEWIATCLSKELIASSFVPDDKIQRLRQYDRRIFDLNASISRNLVKLDQCIQRCNIRISNYISTTDSKGYRSIVKLISQGVTDAEVLVKELHGRTINRHGRETLVKALTGVVSETDIDIIKQLVEEIELQQRHKDEAQQKMTALCMEWFPQEVENLQTIPGVKERSATSIIAEIGTDMTHFQTPKKLVSWVGLRTRNEESAGKIKARGITHGNRFVRKTMIECSWGAARMKDSFFAEFSYRQCIERRKNKMKVQVAIARKILVAVWYVLSQGTQYIKPTDHYTAAHMTAV

SEQ ID NO: 96757 - protein, 470 aa, unidentified
MKESTKSPEGRKRKAVARGSGLPASLKTVHLNAAGIDVGSAEHYVAVPEDRDPQPVRRFDCFTVDLERLADWLEACRIDTVVMESTGVYWIPLFQILETRGFEVKLVNARHVKNVPGRKSDVQDCQWLQQLHTFGLLSGSFRPDDQTCVLRSYIRQRDTLIRDCAAHIQRMQKALTQMNVQLHKVISDITGATGMRIIRAILDGERDPVRLAAMKDPRIRSSREQIAKALHGDYRSEHLFALRQSTSLYDIYRKMIADCDGHIEHCLAGFDAKVDAIQKPLGPPKHVHRKPRGNEAGFDLRSHLYRIVGVDFTQITGFDALTVQTILSEVGLDPSRFPSEKHFASWIALCPDNRITGGAVKNTRTRKVVSRVATALRRAAQSAANSNTALGGFHRRMRARLGPAKAITATAHKLARIFYRMWKYRDAYHDLGLDYYETKHRERTLNSLRKRAAAFGFQLVQLQPLSAEVS

SEQ ID NO: 96758 - protein, 463 aa, unidentified
MCAELRFQAQISVFLSTETYLCNDATRSCLRDSVNVGLHYFFIGGFLLALKIVYPVCCGMDVHKSFLVACIASTDSAGVTTYKSKRFSTFSHDLRLLAAWLSNNNCRDVCMESTGKYWIPVFNILEPTCNIVLAHPKYVKAIRGKKTDKRDAKWIADIFKHDLVSSSFIPPYDIRQLRDLMRYRYKLTNFTVGEKNRAQNCLTVSNVKLDDVFSDVFGKSSSTILDRLSLCPNGNFDVAPLVNGKCKSSVEKIQAAVDGSICPEQLQKLAIIRSHINAIYECKSNLDLLICSIADKFRAQVNLVSSVPGIQFFSAVSVISEIGVDMSVFPTAKHLCSWAGLVPQNNESAGKKKTTRISRAGAYLKPLLVQCALTVCKSSKHPEIRNRYLMLKKRRGHKKAIIAICRMLLTAIYAILKTATPYNPGLYRSQNSAPESRTFTTISAIAFLKSHGYVVVDCDGVMT

SEQ ID NO: 96759 - protein, 418 aa, unidentified
MTATDTTASTLLVAIDISKHRHEVLISIPGKTRRRRLTILNTLEDFQRLSATLASYGLPVRIGFEATGNYHRTLAHHLGRAGFELKVVSSVGLARTREALHNSWDKNDPKDAQVILHMLEIGAVQFFHDPIMVGTADIQELSKTHEIVSRSKTELWHRILTHYLPLYFPEAERFRRSSRTDWFLAFLEKYPSPRMISAMSRDAFIADAWEVVGRKVSKEQMLSDIYATAAGSVGLPVKPDSDAVRMFRLVLAEGRSLIRQRNEIEARAVELLSDLSDYQLLTTIPGIGPINAMTILAEAGDLRRFRHHRQFLKFCGMDLATVQSGMFRGQSRISKYGNARLRRTLWMAGQTAVLKRTNSFRDKFERYISKDRHNAHLRRKAYTAIAAKMARTVHAVVNHGEPYRPFFEGVSPGGRTSL

SEQ ID NO: 96760 - protein, 312 aa, unidentified
MELFVGIDVAKATLAVALSTGEQWDCANDADGIARLRERLLAARPVLVVLEATGGYEGELLAALIGAGIEARRVNPRDVHHFARARGQLAKTDRIDARVLAQFAECMRPKARALPDLEREQLKALVTRRSQLVQMLTAERNRRAQAPRWLGKSLERTIRGLARELAVIDREIAERLDRSITLKPLRDLITSVPSAGPVLSATLIARVPELGQLSRRQIAALIGVAPFTRQSGQWRGHDMIFGGRAPVRAALYMAVLSAVRYNPPLRAFYRRLRARGKPAKVALTAVMRKLLTILNAMLKHHSPWSAPCPTPA

SEQ ID NO: 96761 - protein, 313 aa, unidentified
MIIPLRCVGIDVSKHHLDIFDEADGVPRRVANATQAITELVARWRCDALVVFEATGVYDLALREALERAGINFARINPARARDFARASGLLAKTDPIDARMLAAFARAMRPTTEQAANPARNALAKLAKRRDQLVLMRAQEKNRRSEADDRAMADRIGRLIDVLDSEIAGIEADISALIKAEAEISDDAQLMRSLPGVGPVACMQLIAQMPELGKVGPKQVAALAGLAPFNVDSGAFRGKRKIAGGRKRVRDALYMAALNAVRRADAFKAFYTRLRQAGKPAKLALIAVARKLLTVLNAMMRDRKPYRLKPAS

SEQ ID NO: 96762 - protein, 341 aa, unidentified
MKNKSFIGIDISKNVIDASIFCEGASIKDFPHDVFNNSRKGFGEMCTWLKKNHVVLSNCLFGMEFTGSYSMELEKFLNARKYQFCMLSTHVVKHHPMGPKDKNDKIDSAKIADFLYRYDGTECVKPYKMPDKTMQRLKALTNERKFLVEQRTCFMNRRQLCTTKEDIQLYDGYIKELSHDIENIELKVQKLLETDDSLFTTYKNLLTIPGIGFVNAMNVIVITRNFTAFDTARQYANYIGVAPHFHTSGTSVRWRPRPSARCDGQAKADLSMAATVAVQYDAELQSFYNHKLGGKQDSDTKRKALNAVKFKLVLRMFAIGKQNRKWEPLDSKSSNEKLAIS

SEQ ID NO: 96763 - protein, 362 aa, unidentified
MRTQTYKKSEPELVNFAGKTIYSGIDVHKNSWNVSICLDDMFVKRFHQEADPKALHAFLTNRFPGAKYVACYETGFSGFSVQRELSELGIECVLAHAADIPQTNKEKLNKTDKVDSRRIAEALSKGMINSIYILDKQSEADRAFVRYRRGCKERLKARKAAIKMKLFTLGIKIPPQFDKSHISKKYISWLSSLTFDEPITKFTLDFMIEDIEALRKKEYELNKCLRKMSVSDRYKDIYIELNKIPGIGLISIMTLLTELVDINRFGSFKKINSYVGLCPTEFSSGEKSMHGKITPRANKGLRTVLVEAAWTAVSCDPAFTQKYSELCKRMKKNDAIVSIARKILSRIYAVWSKKIDYKIGVR

SEQ ID NO: 96764 - protein, 405 aa, unidentified
MSVVAAPVSSSTVVVAVDVGKNCVALSVTDANRHRLFGPVEFAMTRPALDRVVARIGAVIPADGAVKVGVEAAGHYHLPMITGSTWPVGWEVLELNPAHVGEQRRVAGRRRVKTDAIDLEAITDLVLAGRGMPVTAREEVLSELTAWAAHRYRRVGTRTATKNQLLGQLDRSFPGLTLALPDVLGTKVGRLVAAEFADPARLAALGVTRFIRFAAHRELRVTRPVAERLVAAARDALPTRDAVIARRVLAADLALLADLDQQITQAEDELAELVPVSPFRTLTSVPGWGTVRAAGYGAAVGDPTRWPGPSQLYRAAGLSPMQYESAGRRRDGGISREGSVELRRALIDLGIGLWHSDQPARAYAAGLKARGKHGGIIACALAHRANRIAYALTRDTATYDPTLWA

SEQ ID NO: 96765 - protein, 391 aa, unidentified
MINIGIDVGKFKHCATVLDDSTGEVLIKPFFLTNDGKGFDILYSKTKQFIHRKHSVGMEDTGHYMINLTNYLLDKKFTVKYINPRATCLRRKELGVSAKNDRKDALLIAEMLSEKRFWRSISPRTIENSKFRDITRLYHQLQEQQNQDMNRLQRALDIVFPEVNSLSWTRYSKAYMKFLSTYPSASSIALEDIRNLRKALKTEGKGRQSKVTAEEIRELAKCSVGEDNISIDLEVTSIIAIINTREEQIRILGKKIEEFSHKLNSPIISIPGISHISGMTILAEIGDINQFQNTGNLISFAGMDPLVYQSGKYDAAHMPISKHGSRYMRKALYQAVFTVCKYSPTFHDYYTKKRNQGKSHRCAQGHCARKLLRVIYKLLSTNSLYDQNHIQ

SEQ ID NO: 96766 - protein, 326 aa, unidentified
MQSVLGIDVSKDKLDVVLVSDRRSIHKVFSNNAPGHQHLQNWLIAQRVGQVHACLEATGQYGEVVAEHLYGSGQLVSVVNPARIKKYGESKLHRNKTDKADAALIAEFCQKENPQIWSPLAAEVKQMRALVRRLDDLQANYQQERNRMLSGERDAWVLADLQTHLDYLQERIRAARQAIQEHIKQHPILISQQELLISIPGIGKLTAARLLAEIGDFSAFEDAPQLAAFAGLNPKIKRSGSSVYKKSHISKEGRAALRAFLYMPAIVARKHNPIIREFCERLSERKLPEMAIVTAAMRKLLHLIYGVLKNQLPFDPNYGKQFVFNP

SEQ ID NO: 96767 - protein, 408 aa, unidentified
MNAVGIDVSKGKSMVAALRPMGEVALLPQEFLHTGVGLEQMAYAILALGEDTRVVMEATGRYHEPVAAALHEYGIYVCVLNPLYIKQSGGGSIRKVKTDKADAMKIAKYGLDNWVDLREYTPMDTVRQQLKLCSRQYNLYMKTVVSLQNNLISLTDKTFPGVNELFSSPERADGHQKWVDFVMTFWHCDCICRVSEKAFTERYQKWCKRKGYHFSEEKSLDIYAESCGHFTTLPKNDNTKLLITTAAQQLLAGKTTLAALRAEMTRLALQLPEYETVRAMYGVGETTAAQLMAEIGDVRRFPRRSSIVGFAGVDPAVDQSGKHETQSTSTTKRGSPHLRKTLYQIVCTYLRKAPADEPMYQFLDKKRAEGKPYFVYMTAAQNKFLRIYYARVKECLEAFDAQQGTSQG

SEQ ID NO: 96768 - protein, 396 aa, unidentified
MNRTTKEPKKVNHRKSGRWSRSRKSAARLRREGERSPRVEEAVASIDLHSTTSVLGVMDSSNGEMICRWRFPTTGAELVSHIKAVRAKRLELTIEQTPMTRWAAALLRPLCDRLVPCDPRENRAVAGNSFKSDEADVDILCRLLRLGELKEVHHEEDDSRFAFKAAVQHYRDIVRDKVRARNKVKAMMRRVGAHFESKKDRSLSPKHRAEVLEFMPTDTWRRSLSRCLRHHDWLVEETKAARKEYEGMGCAYAEIARFLEIPGVGSVTAHTFSAFISTPERFATKGRLFRYCALAITDRSSDGKQLGYQRVEKNAGCRDLKDVSYHAWLGAITGKDNEVKRWFQAALRTNGGNQKKARLSTQRKILHTMWAMWKNDRPYDPDLMIHPSDRLNADSG

SEQ ID NO: 96769 - protein, 493 aa, unidentified
MKTPACWSAAKRRARNVRKLQRQSRKPAPVPAKPLEDLTPVHRRAAGIDVGSAENYVAIPVEGLAPGESAVRVFGVFSAQQDALVEWLQQHQITTVAMEATGGYWLSLYDKLEAAGIEVYLVDPHGVKAVPGRKSDWLDCQWLQKLHTYGLLAKAFRPDLPVRRLRTLTRQRAELVCGGVVHQHHMDKALVAMNLHLSLVVSDLVGDTGLRILQALLEGRRDPKELVQLRDVRCTKSSVAEMEAALSGSYDPEQLFVLQQSLESWPFYQKQMAQCDPRIEQALATIPKAPPVLKTPPLRPIPAAAEATATKRPKRPRAGNNAPTLDFSQALIRICGMDLMKVCGLNVLSVLMLIGEIGVDMSRWRSARAFCSWLGLCPGTKISGGKVLSRRTRKVNNRAATLLRLAAWAAGRTDTWIGRFYRRIKARRGAPKAVTATARKLACVIYHLLKYQEEFVLLDTKIYEAKAKTQRLSRLKKEAQAMGCELVELQEVA

SEQ ID NO: 96770 - protein, 295 aa, unidentified
MNNYAVYVGVDISKHSFTTTLLFEEIRKTFNVSSKPEEFENKFRPHLNEIGVDKSNVLILMESTGNYHLHLAEYLAERQYNVGLVNPFSMKRFMDAKMSRAKTDKVDSYFIAEYGRQIFEGPLFRPKTEAQKQIEAKVKILEDFYKELTRVKNQREALSLRPMKGLKKNLAYYDRVIEFLKEQIKELEKEIRRLCKEHFPEEYRLFKSIPGIGDRAIEVVVSILRNFKGFKRAKEIASFVGICPSPVESGSSVKGKGSIKKRGNAYVRQVFYMCALSAVRCNRYCKDLYERLLGK

SEQ ID NO: 96771 - protein, 344 aa, unidentified
MNSIKVVGIDLAKSVFQVCVWMSDGTVASNRKIPRNKLLDTLRQFPANTLIAMEACATSHYWGRTFKSIGLLVRLIPTQHVKAFTRHQKNDANDALAICEAALRAGIHFVTIKTVGQQDIKALRSARQLMVEQRTAVANQARALAAEQGIELPVGIHILSQRLPELIEDPALDISPVLRGLLFSLLENLHLLDERIRSTEHNILALCQQLPKYKVLMTIPGVGPLIAAAFLSEVNAEQFTNGRQLSSWCGLVPRQRSSGGKNNLSSMTKNGNRDLRTLIIHGARSVMFWSQKRDDALGSWMKHLIERRGKMKATVALANKLTRIIWRLLTGSENFNINKAFATN

SEQ ID NO: 96772 - protein, 336 aa, unidentified
MSPGQPVMRESVMREPVMRELVVGIDVAAAEVVVALRGAAALAPPTAWSNDAAGHAGLVAWLVPQQPCLVVLEATGGLEAPLVAVLQDAALPTVVANPRQVRDFARGVGQLAKTDPIDAAVLALFGAVARPAVRPRPAAARALAALVARRRQVRDLRTAETNRHKLAPASVVGSIDRVIAVLEDELADLERRIAEQLARDPVFTAKATLLRSVPGIGPIVAATLLAELPELGALDPKPIAALVGLAPFTQRSGTFRGRARIQGGRAPVRVALVQAALTATTWNPAIKVVYDRLRAAGKPHKVALVACARKLLTILTAILRSGAPWCPTTPRPAVSA

SEQ ID NO: 96773 - protein, 391 aa, unidentified
MIYVGIDVAKDKHDCIIKNSVGEVVCKTFTIKNNLDGFNDLYQKIESVMEDVSKVKVGLEATGHYNYNLLGYLVDKGLPTFVINPLHTNLYRKSLSLRQTKTDKVDANTIASMLMSDVNLKSYSDTSYHNEELKSLTRYRFDKVKERAKLKTSISRLVCILFPELEKLVPNLHMNSVYSLLYEFPGAKQVASAHLTRLSNLLAEASNGHYDKNVAITFREVARASIGSNMPAKSLELKHTIKLIRELDSEIDEIEGEIKAIMDTINSPILSIPGISYRMGAMIIAEIGDFDRFDSADKILAYAGLSPSTYQSGQLDNCHPRMEKRGSRYLRYALFNATIYVCHWDPTFNAYLAKKRAEGKHYYVAVSHAAKKLVRLIYQLEKSHQSYNKAA

SEQ ID NO: 96774 - protein, 410 aa, unidentified
MEKKGKRYIGLDVHKHYLVALGVDDNLEVVLPVRRVEFSYLESWMKKNLTKQDEVVLEMTTNTWQLYDELIQHVGKVTVVHPPHVALITRSQVMNDKIAASILARLLAKGLLVGIWVPPQEIRELRGLVAQRRKMTRLATQAKNRLHAVIQRHHLKPPEGNPFSKANNAWWEKLSLGKLEKMNLQSDLETLQFAEQQEVRIEKEMTGIAAEDAEIGRLLHMSGFGVVTAVTVYAAIGDIRRFLEPKKLVGYAGLGARVHDSGMTTRTGKITKAGRRDLRVAMVEAAHVVANSHPHWKAELARLEPRLGRNKAIVAIARKLLISVWYIMSEQTADRFADPGRVAQKLLKFAYQVGKENRPEGQSAAQFVRQRLDALQLGSDLTSIAWGSKKPIPLPPSALLEKKKSDVPNR

SEQ ID NO: 96775 - protein, 467 aa, unidentified
MKQIETEAKKWIPTRKKRGLCQQDRPVVEANAAGIDVGAREMYVAIPPDRDSEPVRVFKTFTADLECLVDWLIARGITTVAMESTGVYWIPLYQMLEDRGVRACLVNARHMKNVPGRRTDWHECQWLQYLHAAGLLRAAFRPEQDVCGVRTLLRHRNELVRMAVQHVQHMQKALTQMNVHIHHVISDITGLTGLAIVDAILSGERDVAKLAELRHRSIQADEETIRKSLEGDWRDEHLFTLNQSRQMYITYRNNIEACDEKIAKLLGDFEAQVDIKLKPLPAHPGPSRKRRTKRTGDFRFEVRTEAYKLFGLDVTRIPGLNELAVPIFSEVGRDLAARFPTAGHFASWLGLCPDNDKSGGQVLWTGVRRINNRAAQMFRMAASSLHHNRSPLGDFLRRMKAKLGPAAGITATAHKIAIIFYTLVTKQIEYDDSIWATRDKNRQKRFEQKVKRQARQLGYELVPVQPI

SEQ ID NO: 96776 - protein, 387 aa, unidentified
MARKRTLSTLDTSIAYEAVGLDLAKTDVALAAFDSDHKEPYLIDRIPYDKLYELLANMAPTLVAMEPCSGAHQIAEQIQELGHEVMMISGRHVQAWVKDHCNGQKTDLNDAFAILNLAYDRWLTPIRGKTREECRLLALQASYRQLKGQRTKTMVHVKATLHAWGFPIRTGSFNQKALHELIDANREAFGDEVVETLHLMINRVHDLDHDIATVLKLLTEATQRDPRASLLRSIPGFGVLTTSRWCAVVGDIARFDSPKQTMAFIGLVPNNRITGHHTETSSGREARGQGKMSKRGDKMLRSLCILGAGALCLMVRNDRLPDCPFVASIKERLASPRPWFKVLVYVAAKLVRIATALLKYGETFSFEKAGISKAVLKQWELEQAKAA

SEQ ID NO: 96777 - protein, 342 aa, unidentified
MRLTDKDSLAKERVNMQAGEAVIGIDISKASFDSVMRGAGKEQHQVFSNDQKGYEKIVAWIRKQPERVVHVGMEATGRYWVGLTEYLYQEGYTVSVINPFQVKRYGDHVLNRNKTDKSDASLIAEFCEKDRERLRVWKPNSPEIKALRSMERRLDELQGMKRQEQNRLKSLVSDLVVKESLQENIKNLEQQIENLMKKIEELVKRHPSLREEQRLLTSIPGIGKLTAIRLMAEIGDFKEFESAAQLAAYAGLSPKQFQSGSSVHKQTRISKQGKRELRKYLYMPAVVATNYNPIVMDLKRRMLASHHVKMEIIVAAMKKLLHLAYGVLKSGKPFDPLFSTQT

SEQ ID NO: 96778 - protein, 383 aa, unidentified
MQASNVCPPIAGQSGTIFVAIELSKASWLVVIHSPDRDRMSHHRVTGGDHAGLVALIESVRARAARALGSVPAVVSCYEAGYDGFWLHRRLTAAGITNFVFDPSSIAVDQRARRAKTDRIDGEQTLRTLMAHCRGEPRVVRIVRAPSPEQEDARRKSRERDRLVKEQTSHINRIKGLLRLLGIYEANPYRRDWPDWLKEQRNWDGQPVPTELLAELEREHARLMLVRKQIDELSKAKVTAEAPAAVVQMAEQTKRLQQLKGLGPVFATTLAHEVFYKDFSNRRQVASYCGLTPSPWQSGRMDREQGVSKAGNGRARTAAIELAWLWLRHQPDSPLSQWFREHTVKATSRIRRIAIVAVARKLIVALWRYLTTGLVPEQALMKA

SEQ ID NO: 96779 - protein, 251 aa, unidentified
MPCFVGMDVAKAQWDMALRPAGERWAVPNDARGIAPLVDRLQALHPTLSVLEAPGGLERAATAAWAAAGLPVVVVHPRPAREVARATGPWAKTEALEARALAHWAAVIRPTPRPRPDAQTHAWRALLGRRQPLRVMRTAAQHRLAGTSGRLQTDMAAPLTWRNARLATLDDDLATTLRASPRWRENDERWPSAPGLGPVCARTLRRELPELGPRTRQQIAAWVGVAPLHGASGTLRGRRTRWGGRAPVRTV

SEQ ID NO: 96780 - protein, 365 aa, unidentified
MTKVRTWVGLDVHAAKVVACVVDALTGEMTVHRLPGTTGGLVAFCAALPGPTRVAYEAGPTGFGLARALTAAGIGCVIAAPGKIERPAADRVKTDQRDAERLVRLLMIDALHAVRVPSDSEEAIRDLVRAREDLRGDLMRARHRLSKLLLRHDVRYEDTTSAWNDRHRAWLANVDLGERGAQATVTDYTGAIDALVLRRGTLEATIAEVIPGSPLADTVARLRCLRGLDTLSAVGLAAEVGDFARFQRPAQLMSYVGLVPSEHSSGQTRRQGAITKTGSKHARRLLVEAAWHYRRPPRLGTTLERRQDGQPQIAVAISWKAQQRLHQLWRRLDTKRGKRRTIVAVAVARHLAGFCWAIINTDQQP

SEQ ID NO: 96781 - protein, 387 aa, unidentified
MYFVGIDISKFKHDCAVIDDSGEIVTPSWSFTNDSEGFSQLKTLVDSLDAETRIGLESTGHYGMNLKLFLESNNFSFMEFNPLLINRFVKSKSLRKTKSDSIDCMMIAHYLMTVEYKPYPTLLYHTEKLKSLTRFRDSLIRLRSRQLVELTNILDKVFPEFKPFFGGKFSVTSLYILSNYSSPEKISNMNSKSYETLRKLSRGRFSTVDFAKLKQLAKNTVGNTEDYLLQEMQIVLELYKQLDSKIDETEASIKECVSAMNPPMLTVPGIGVESTAIILAEFGDFSKFKNASQMLSFAGLEPGYFQSGTSETTGKMVKHGSSYLRYALMNCAQTVVTYEPTFAMFYAKKRAEGKPHRVALSHVVKKLLRVIYTLHTKNIVYDADFVR

SEQ ID NO: 96782 - protein, 346 aa, unidentified
MMIIGCDFHPSWQQIAWFDSEAGETGEQKLVHATGEAETFYRQLPAPALIGIEATGNSQWFIERVQDLGHEIWIGDAAEIRASYVRKQKTDRRDAAHILKLVVEGRFPRLWTPDREQRDLRQLVLHRHKLVEIRSRVKNELQHLSLNKGMQKKRTLWSQAGQKMLRELPLRPWAACRREDLLGLLGMLDEQIEKLDRAVQQAADQHPQAKLLMTQPGVGPNTALAFVLTIGDVSRFPRGKQVASYVGLIPREESSGGRQKLGAITKQGNRLLRSLLVEAAQIAVRFDPGMKKQYWHRCHQKPKGVAKVAAARQLAVRLYWMLRTEKPYPEIVRIESSPRVPLVGAS

SEQ ID NO: 96783 - protein, 424 aa, unidentified
MLAVGIDWAEAFHLVALGRPGEGVIGVRRVEHTPAAVAALLADIAALEPDPAEVRVVLETRHGVLVERLVDAGFVVLPVNPDLIARRRGPAKKKDDAEDARLACLLALDRYTSLRPLLPHGELAAELRAIARDDERAARDQRRLLNRLRQDLLSTFPAALQLAGEELGAPTILKLLARWPTAAALGTATRHELVAFARGAHHGWPERLADQVAAALATDQFTPRDYLVRAKADTIRLAATQLLAIATQRRVWERRMGTLLLGAPRRGRANTPRQDELDQGQAFPGGEVYLSFPGLGDRLAARVAGEIGDHPQQFQSPNALACYAGKAPVTRRSGKSELVVACRLACNRYLAGAVQQWAFCSLRESGWARAFYDAQRARGKTHQAALRALGNRWLEVLWHCLRKGVRYDEATHVANRNRALGKAA

SEQ ID NO: 96784 - protein, 358 aa, unidentified
MHYVAIDLHKRYSVASALNEQGQRTREARIEGNSAAGFAQFFHGLGGPSKVVIEATWNWGRVHDLLEAIEEVEEVVLAHPYKTRIIAEAQVKTDKLDARALARLLRADLVARAHIPSPETRRRKEVLRQRVFWVRVRTMVRNRVHQLLDRQPKIDLPQVSDLFGARGLAAMKKLQLPEPDDTQLRQDLGLLEELQRRIKELEAMIEAQNAGDGPTEILSSLPGLGKILAAVVAAEIDNIERFAHPKKLLAYAGLAPTTHSSGGKTYNGPLMPMCNKWLRWAFVEAAWVAVGHSNYLGGLYRQHRARGKSANTAIVIVARRMAEIAWQMLRHRRSYEDRPLTQNTFPDRSEHALVEVAS

SEQ ID NO: 96785 - protein, 347 aa, unidentified
MEKAFPTRVQVFAGIDVSARELSVAVQCGDEARIAVTTFSNKAAGHKALLLYLLRGNARARVCLEASGNYSLDLALTLQAHPQVEISVVNPRRARRFAESLGERSKTDPVDARVLCEYAMRMRWVPWVPPNLAALRLRAITRAIEDLVAMQTQEKNRRHSLLASRALPALVMRELEQHLRYLKLRITRLRREALRLIGRHPELNRRFHLMLTTPGLGEASTLQILGELAVLPETLDARQWVAFSGLDPAQFSSGTSVEKRSRISRGGSRHLRRALYMPALVAIRREPFVRGFYKRLLRRGKAPLQAVVAVMRKLLHALFAMFRLDQPYDGSKVCPAEFARDTTVVCA

SEQ ID NO: 96786 - protein, 339 aa, unidentified
MSRCEKPEQSPGPIEESESTSEGYLVVPDEIFVGIDVSEERLDVHVLPKGLSISFQNNTKGIDDLVKQLKKSPPSIIVMEATGGLERLPAAELGSSGLAVAIVNPRQVRDFARGIGKLAKTDSIDAYVLARFAETTRPVPKALESDEEALLKDLVKRRRQLVDLRAGEKNRLRRARSQLIQQSILMLIQSLEDQIRKIDLDLDNNLRKSPIWREKEELLKSFKGVGTVTARTLLALLPELGQAHRGQIASLVGLAPRNKDSGKMRGTRKISGGRADVRKTLYMAALTAISHNSTIRKYHERLIAAGKPFKVAITGCMRKMLVILNAMVKSNKRFEEVSS

SEQ ID NO: 96787 - protein, 430 aa, unidentified
MKSNTQNAKIEAITEKTLVLGIDVGSETHYARAFDYRGVEYSKKPFKFSNTEAGFVTFKAWVLDIKEKHGKDKVIPGMEPTGHYWFNLGKFLQDNEMKPVLVNPHHVKKSKELDDNHPTKNDRKDPKVIAGLVREGRYMIPYLPDGVYADLRTASNIRFQLQAELTRIQNRINRWFNIYFPEYKTVYGKPDAKSGILILKEAPLPEDILTLGIDGVNQIWRDAKLRAVGKARAKTLIEAAEHSVGSKEGAVSARMEIRMLLEDYESRNIRLQEVMGLIEGLVNQIPMAEKLLEIKGVGIKTVSGFLAEVGDIRRFNDPKELQKLAGLALVENSSGKHKGKTTISRRGRKRLRYLLFEVAMSLVAKNPEFRELHNYYTTRRLNPLKKMQSLMAIAAKLLRVFYAILTKGVGYDPKKMVNDIRRPATYAQAA

SEQ ID NO: 96788 - protein, 346 aa, unidentified
MKILALDLGKYKTVGCAYESESGAHQFQRGYTTPAGLVRMVQEVKPDRVVIEICSIAGWVCDLLWGLGIEVQVANTSDDAWRWRKVKQKDDRRDALKAARLSAVNQVREVYIPQIEVRQWRALITYRQQLVRRRTKIKNHIRDLLLREGQLLGRGSSCWSQAGFKQLEEQARCFSECGPAELWRGELQLELEQLREMQRQLATVTAQLDKLGAGDARVQLLRTVPGVGPRLAEAIVALLDQPQRFRKASQVSGYIGMVPKALDSGETERRGHITRQGSRLVRSLLVEVAWAGLRHNAWVRQTYQRLSGGKKGRKKIAIVAVGRKLLVKCWAMLRDNRAWDWQPQIT

SEQ ID NO: 96789 - protein, 331 aa, unidentified
MNMHVGLDVGSRTTAMGWRNGGRFAGQCNIDQTPAGRKAAVGKLLELKPISVVMEATGIYYLDLAMELAAAGLPVSVINPKSFHNFAKLMLKNSKTDAIDAQLLAEYGERMSPRLWTPPTSIQLELRAIGRHINRLTGHRTRAKNELHALKATQTTLLMLIEDEEEAINAFDKRIERFRLAGRALIDNCPTLSAQFAHMIAAPGMGEISVFAALAELTTLPVTLKSAQVSRHAGLDVRLTQSGTGIDKPGRISKGGNAYLRSAMYMPALTAIRCDPNVKAFYEALVARGKRKMQAIVAVMRKYLTGLWACMRAGEDFDTAKLFSGKHAQKA

SEQ ID NO: 96790 - protein, 357 aa, unidentified
MAASSMAHRRASGIVVGVDTHKDLHVARAKNELGRGLGEPTIPASAKGYRALLSWSHGLGNIRAFGVEGTGCYGAGLTRHLRDHGEVVIEVIRPNRQARRRRGKSDPADAEAAASAVLSGEASGTPKQSDATVEMIRALRVTRSTANRARTQAINALHALVVTAPEELRGDLRGLPGPRLVRTCTGLRPGELAGPVGATKAALPSLARRHQALSSVLELDRELRRLTAEACPALLGIFGAGSDTAGAVLLAAGDNPERLRSEAAFAKLTGVSPVQASSGKTTRHRLNRGGDRHANAALHRIVLVSLRSRHPPTIDYVARRSAEGKSKRQIIRCLKRYVAREVYRTLTDVQADLSSAA

SEQ ID NO: 96791 - protein, 301 aa, unidentified
MFALRSLSLKRTFAGTEEGRRELTSWLRRRKVGKAVMEASGGYERDWAKVLRNAEIEVRIVDPKRVRSFAQSAGRLAKNDTIDAEMIAWFAETFDEARGQAYDETREQLHQMVNARQALKGMQAKLESQGEHALPAAVQRMHARILKTITVELVKFEAAIAAMIQATPRFTELAEIIESVPGIGRTTSAALIAAMPELGQANNKIVAALLGVAPYDDDSGRRRGERHIKGGRRRTRNVFYMACLGAATQHNPVLKAFYDRLVAKGKEKKVALIACMRKLISILNIMIERRQKWDASRYAVS

SEQ ID NO: 96792 - protein, 366 aa, unidentified
MKKTSTVRVNGNMIFKGHKLTIGVDLGDRWSCYCVLDKAGKILLEQKLATTPEAMKQTFGKIPRSLIALESGTHSPWVSRLLTELGHQLLVAHAQKVQLITKSTRKDDRHDARTLARLARIDPELLGPVRHRSAQAQIHLTVIRARAELVRARTALVNAARGLVKSYGQRLPRCGTEQVSRELAAGLCTELREVLEPLLKEIESLNERIQEYDARIEKIAKESYPHVALLKQVKGVGTQIALTYVLTLEDPHRFRKSRDVGCFLGLRPGRRNSGQSEPQKHISKEGDRYLRTMLVQGAHYILGPFGEDSDLRRWGLKLAKRGGKNAKKRAVVAVARKLAVLLHRLWVNGEVYEPLHNSHKEMRAVA

SEQ ID NO: 96793 - protein, 340 aa, unidentified
MNPTTYGLDIAKRVFQMYWVEGEGGEIVNRRFSKQELIEFLGQRSAGRVALEACGSAHWWARKIKALGHEVVLLHAKFIRPFVQNNKTDAADARAIWTAVQQPGTRKVAPKTEDQQAMLGLHRMRALLVKSRTMQINQLRGLMYEFGVTFKAGRRAGLAEIRQRIDEVEQAVPGVLFDALRDQLQHIGQLDSEISKLEKRLATWQRQEVACRTVAEIPGIGPLTATALVATIGDPTAFKSGRELAAFLGLVPRQSGTGGKVRLGGISKRGDTYLRTLLIHGARMVLFRAKDKGKWCEDIAQRRPANVAAVALANKMARTAWALLARGGTYQKDYVGAKPA

SEQ ID NO: 96794 - protein, 424 aa, unidentified
MNFKMQDKQNQLIERISDTHLIVGVDIAQQLHVARAVNFRGIVVGDPLSFENNEEGFVKLLSWIQNLQKLKNLDSTIVGMEPTGHYWINLSKWLDRQNIEVVTVNPHLVKRNKENRDNTQSKSDKKDALVIADMVKNGYYSFVRPTSESFEKLRVLISNRDVIVKRLVMSINQVNRWVDVVFPELRQVFKDVTCKGAIATLRLFPTPDEISSLETLDVMRGWKSLMKRQPGSKKAQLLINLAKSSIGTGQALDAYKFHLEQLLEEYDLAVKQLERVEQQVKEVLYKIPFAKKLLMIKGISEISLAGILGESGDLSGFSHGNSLLRHAGLHLAEASSGKWKGQIVISKRGRSRLRRFLYLATMSLVMNNPEFKALHSHNVKVKKLKKMKSIMKLIGKLARIFVGIARSNESYCPSKVQVLIPLAA

SEQ ID NO: 96795 - protein, 367 aa, unidentified
MKKVSTAVVRQNRNICPPKLTIGLDLGDRNSWYCVLNGAGQIQLEQGVRTNAKALREVFGKMPRSRIALETGTHSPWISRLLSELGHEVIVAHARKVRLIGESRKKDDRLDAQTLARLARIDPELLSPVKHRSAQAQADLTVVRARAGLVRARTALVNTARSLAKSYGWRLRGCNVRNMNPEKAEGLSPELQSALEPLLAEIESLSERISEYNDRIEALAQHSYPQVALLKQIKGVGTLIALTFLLTLEDPHRFGKSRDVGCYLGLQPGRRNSGQSEPQMHISKEGDPYLRTLLVQGAQHILGPFGADCDLRRWGLKLAERGGKNGKKRAIVATARKLAVLLHHLWVSGEVYEPLHNSSRMTVAAAA

SEQ ID NO: 96796 - protein, 353 aa, unidentified
MKKQHEISLRQTDQVPVSEKLLVGVDIAKAEFAAGTVWQAQYQYQGKTANTVEGCAAFAEALETRKAEQGATTIHLIIEPTGGYEVALVSEAYRRQWRVTLVNPLTVRHWQQGRGKRGKADRLDTQMLTLFGADKNPPAQPPTDEAAAQLDSLLRRQDDLQLLLRSEHNRHTQTALNPNTPKAVRESIERTLAALAQELAAIEQAIRQLFADHVTLARQLKQLLTVPGIGAKSAPYLLAFFHRFKAKTNATGTAKQIVAYTGLDPQPFESGSSVRQRPTISKQGDAAIRSRLFLCALGGVRGRNRLQDTYTSLCARGKAKKLALIACARKALVWAWSVFIQDTTFDPSRFVNA

SEQ ID NO: 96797 - protein, 322 aa, unidentified
MQHESSTQPVAGIDVSKSTLDCFIDVIDKSFSVVNDQSGIASLIEQLRAANVRLVLLEATGRYHRRCAAELLDAGIEVAVVNPQRAREFARSMGRLEKSDSIDARILAAFARAGNAHRRLSKTSAQQAQMDDLVSRRRALVQMRIAEKNRLHDDLPKLARNQGNKLLRLIEQQIEDLDRAIARLIESDDDWQNKSNLISSIPGVGPCSAHQLVADLPELGKLNRQQIAKLVGVAPLNCDSGQHRGQRRIAGGRGPVRTTLYMAAFNAIHYCDRFRGYALRLKQAGKPFKVIMTACMRKLLITLNQMIKTNTAFNASLTASIT

SEQ ID NO: 96798 - protein, 405 aa, unidentified
MNAVGIDVSKGKSMVAVLRPFGEVVTLPYSVSHTASELSELANSLKSLDGEVRVIMEYTGRYYEPVAKALHEAGIFVSVVNPLLINQYGNNSVRKVKTDKADAVKIAKYGLDNWAELREYDPMDTTRQNLLLVCRQYNLYMKNKTAFKSNLIALLDQTFPTVHKLFKSPVRDDGSQKWVDFATTFWHCECVCGVSEKAFTERYRKWCKRHRYIFSPRKASEIYAAASEQVPTLPKDNHIKLLVTEAITQLNAISRTVEALRSDMQSLAQSLPEYPVVAALYGAGDTTAAQLIAEIGDVRRFKSKQALSAFAGVDPSPNQSGTREAKSTSITKRGRAPLRKTLFQIMECHLKRAPHDEPVFQFLDKKRAEGKPYYVYMTAGANKFLRIYYGRVREYLNALDSGDES

SEQ ID NO: 96799 - protein, 415 aa, unidentified
MWVQLMEPARITDLADLPMKGYTMQGFDVIVGLDVGKSFHHMYALGKGGEVLANRVIGQHERMLLDAFECLSGHGSVLVVVDQPNNIGSLAIACARKAGCAVAYLPGLAMRRASGILPGDAKTDERDAFVMAMTARSMPQALRNVLDEDALRADLIALASCDDDASCDMTRETNRLRAHLVEVHPAFESALGNDVTSPFALKLLMRFGGPWGMRKAGKATVMRWVKSQKRPAMKLLERLLASLDQMATEPAGTALREEYGILACAGRIAELAAIRKGIRHTAELMLKDCPTFRLLTSMPGVGTKTAITFMTHVDIACFDNPSKLASYAGIAPRTHQSGTSIKGESAGKAGNKALKNALFLSAFASLRSDPLSREYYDKKRAEGKKHNAAVICLARRRLKIMFAIVRDQRPYCLAA

SEQ ID NO: 96800 - protein, 347 aa, unidentified
MKYSATTIGLDIAKNSFYAVGVDKGRHEVLKRKLTRAQVRTFFRDHPPAAIGIEACAGAHYWARTLNAMGHDVRLIAAQHVSRRVVGNKNDYRDAQVIAELRGNPEMPFVPINTEHQQDIQMLHRVRERLVTHRTALMLQIRGLLGEYGAVFAPGVRPLRQGLVEVLGGEHLSLSASALETFADLYRQWQQLDEQVLGYDRRVQHLAAQEETVARLMEMPGIGPLNGTALLASLGDARHFRAGRIFALNLGLTPREFSTGGKQRLFGISKRGDRYLRTLLIHGARSALRCAEGKPDRLLQWALRLKNTKGFNVAACALANKLARVAWALVAHDRRYQPQGVAVTAHE

SEQ ID NO: 96801 - protein, 341 aa, unidentified
MATIALFGLDIGKHSFHLVGQDANGKPVFKRQFTRSSLIHYLAQHPACRIVMEACCGAHWLARQLAGFGHQVQLIAPQYVRPFVTGNKNDFLDAHAICEAASRPSMRYVGVKTPEQQASSALHRLREARIADRVQTANQIHALLLEFGIVLPLGARGIKQVPDIVMNASADLPHAARRILSAQYEHYRYLAELIAGLDSQIGAQAKADALTSRLMTIPGIGPITASQLAADAGNAQSYGSARHFAASLGLVPRQHSTGGKSKLLGISKRGDKSLRRLLVQCARVVMQNAGKWQSAVAQWTQQLMTRRHSNVVACALANKLARIVWAVLVKGEEYRPNPNAA

SEQ ID NO: 96802 - protein, 327 aa, unidentified
MFFIGIDVSKAKLDCTLLTAEADKRKTKVVVNTAAGVQALLAWCAKHGAQPAQLHAILEPTGLYHEQAATALHDAQVRVSLVNPAQARDFAKALAMRSKNDALDSYVLARYGQTLSPALWHPAPLHARQLRALLRRREALGKDLLRELNRKEKSQFSPSAPLVDGSIDKAIAFLREQIKQIERAIDQHIDNHPDLKQDRELLNSIPAIGPQAGNAILAVMHNRRIDSAQTLAAYLGVVPVQRQSGSSLNSCARLSKAGPSQVRATLYMAALVGTRHNPHIRALYQRLLKAGKSKKAALGAAMRKLVHLCFGVLKNRIPYQPNYAMNA

SEQ ID NO: 96803 - protein, 393 aa, unidentified
MIFVGIDVAKDKHDCFILNSEGTVLADVFTIANNRIGFETLLSRIQSCSQGESKIKVGLEATGHYSYNILGFLLDKGLDTYVINPLHTNLYRKSLSLRKTKTDRVDARTIAAMLMSDVDLKSYTDTVYHNEELKSLTRYRFDKVRERAKLKQSVSRLVTILFPELEKLVSSLHSASVYALLSEFPGAKQISSTHMTHLKAVLKNASQGRYGQEMAETIRNAARSSVGSVMPAKSLELQHTIRLIRELDAEIEDIETAIQAIVDEMQSPITTIPGMGVRMGAVILAEIGDFSRFDSPDKILAYAGMSPSTYQSGQLSLSGAYSHMEKRGSRYLRYALYNATKYVCHWDSTFAEYLAKKRAEGKHYNVAISHAVKKLVRVIYHLEKTNQQYIKVA

SEQ ID NO: 96804 - protein, 339 aa, unidentified
MREFIRIGVDVSKGFFQVDAIEGEGSSAVRRKLSRAKFLSFFAGIAPTRIGIEACGSAHHWARELRALGHEVVLMAPAYVKPYLKRGKTDANDAAAICEAMSRPDMRFVPVKSADQQAVLMLHKTRALMIKQQTMAVNALRGHLSEFGLIAARGIHRIKDLLALAETDERLPEAAREATAMLAAEIQGLDGRIDGLEAKIAAASSPMIRHLDEIPAFGPLIASAMVAFNPDPRAFRSGSDFSASLGLTPSQHSSGGKEKLGHITKAGNRYLRTMLVVGCTSVLRVAHKYKGALAEWIVAMRARKPERVVAVALANKLARIAWAMMATGEAFRKELYFKA

SEQ ID NO: 96805 - protein, 400 aa, unidentified
MVYVGVDIGKTRHAVAAVDDAGSVVLPPEYFAQDAEGFAALLRRLQTLGDPSSVVVALEATGPYWKVLHHFLQQHGYRADVINPLITAHEAAADVRGRKTDKLDAVAIAQVARRGGYSSVPATDPAGAALKSLARHHRHLVNRRTEAKLRLANCLDVLFPEAHRFFDDLYSVTALAVFERFPSARQIADAHPRTLTALVARASRGKLGSAFAQQLRQAARRSVAYSLRNEGEEFVCVQLIAEIRSLNELIAQTEERLNANPPPPAAQMLQTIKGAGPTLPRLVAAELGNLERFRGPRMASRILAFAGAEPRVRESGRWRGQTKMSKRGSGALRHALYLMAGTVRLHNPSFNAIYQRQIARGKHHKVALSHVVRKLVEVLCGMYKSGTRFVPPSPATTPCS

SEQ ID NO: 96806 - protein, 286 aa, unidentified
MKKFKEFIGIDISKLKFDIRIHSNQIASVFDNNNTGFKKMVNWVLKNVDCDKEEILFALEHTGLYSLPISVFLSENKFHFILLPGLEIKRSLGIQRGKNDKIDAKRIAEYAYQKKDKIVPSQLPFKNILQIRRLLKLRERLVKYRAGFLKDKSENKIFLNAKENKLLFEIVDKSIIELNKKIDKIEKEIDIIVESDTLISKQFYLITSIKGVGKQTALFVIAYTNCFSNFDNWRKFASYCGTAPFPYSSGTSIKGRNKVSPLANKKIKSLLNQFAISFIIFNPEMK

SEQ ID NO: 96807 - protein, 349 aa, unidentified
MDYRVYCGVDFHARQQTICSLTTESGVMSTHELKHQNKAELKAFYAQFSGPVLVGLEASGYSPWFEQLLESLGHEVWLGDATEIRRRARRRQKNDRRDAELILDLLIHNEFPRIHRPPATSREILRMLRYRHKLIKIRTIIKNSLQSLSIQSGLSLRARLFTHAGLAQVRAAAMSPVMQYQRDQWLQSLEPLNQRILEAANWLQQQAAGDERIERLRTHPGIGLLTGLGLVHTLAPVGRFRNQRKVAAYVGFDPKERSSGEKKRYSGISKAGSRVLRFLLVEAAQTACKGDPELKRFYLRLLHRHGKPKAKVAVARKLLVRSYILLRDGIDYAEFNRRAVAARLAREAT

SEQ ID NO: 96808 - protein, 465 aa, unidentified
MSKLRKPILPRQANGQPAQPQPPKLDALAQINHHAAGLDIGDAEIYAAVPESATDPAVRVFRTFTTDLQALADWLTACHVDTVAMESTGVYWIPIYELLEERGFQVYLVNARQLKNVSGKKTDILDCQWIQQLHTYGLLQPSFRPPEDLCALRAVIRHRGNLLRSCAAEIQHMQKALQQMNLKLTNVLSDITGLTGLAIIRDIVAGVRDPLKLATHRDPHCRKSAAEIAASLTGNYKREHLFVLQQALAAHDFYQAQLAACDAETESLYHTLDAQADAVAQPLPPPRRPHSRRGNEPRFDLRTALYRLAGVDLTTVDGLDGLTVQAVLTETGVDMSRWRTSKHFASWLSLCPENAKTGGKIIKRGTRPGANRAALALRLAARSLHHSDSALGAFYRRMCSKLGKPQAVTATAHKLARIIYAMLKSKQPYKDPGADHLEAQVQERKLKQLQRQAKELGYELTRSAA

SEQ ID NO: 96809 - protein, 402 aa, unidentified
MNAVGIDVSKGKSMVAIMRPFGEIVSAPFEIKHTASGINSLVELINSVEGESRIVMEHTGRYYEVLAHQLSEANLFVSAINPKLIKDFDNDSLRKVKSDKADAVKIARYALDKWQNLKQYNVMDELRNQLKTMNRQFGFYMKHKTAMKNNLIGILDQTYPGVNTYFDSPARSDGSQKWVDFASTYWHVDCVRKMSLNAFIDHYQNWCKRKKYNFSQSKAEEIYGKAKELVPVLPKDAITKLIIKQAVDQLNSASTTVESLRTLMNETASKLPEYPVVMAMKGVGTSLGPQLMAEIGNVSRFTHKSAITAFAGVDPGVNESGSYEQKSVPTSKRGSSDLRKTLFQVMDVLIKTHPQDDPVYQFLDKKRAQGKPYYVYMTAGANKFLRIYYGRVKEYLSSLPES

SEQ ID NO: 96810 - protein, 355 aa, unidentified
MQSNKISFKGQNIYVGIDVHLKTWHVTALTESGFKYPFAQCSDAKVLFDTLNRRFPGAHFLSAYEAGFCGFAAHYALTEQGFENIVVNASDIPTTEKEKLMKTDAVDSEKIAWSLKRGELTGIHIKRKEYMDDTNLLRLRQRLIKDLARQKVRTKHLLYTQGVKYPDRFQKSGSHWSHRFMAWLRDEVKLLSEEKQTLLLLCDEVENTRKAILKVTREIRRLSRTDKYRENFELLSSVPGIGLVIAMSVLTELDNDPLRFPNERAFVSFLGLIPTCHDSGQKKVNGEKTYRGNKQLGPLIVECSWVSIQHDAALSAYYLDCCQRMKPQMAIIKVARKLACKAYAVLKTRKKYVPS

SEQ ID NO: 96811 - protein, 355 aa, unidentified
MNQEKYIGMDVHDATISAAVKNAEGKLLMECVLETKAATILDFIQGLRGTLALTFEEGILAAWLHDLLKPHVSRLVVCDPRKNALMRDGNQNDRADARNLAELLRTNQVKAVYHGKHGTRALKELGRSYLTLTKDSTRVMNRIKSVYRSWAIPCGGTSVYSRRHRAEWLAKLVEPAVRIRAEHLYQQLDSLEPVRQAARRELLRESRKHPAVKLLRQIPSIGPIRSALLVAILQTPHRFRTKRQLWAYSGFAVQTYDSGEYRMVRGKRQRNRERITVRGLNRNHNHDLKNLLKGAAISAIQRPGPLQDFYAALVEKGMRPSMARLTLARKIAAITLIIWKKGVSFDPQQLQRQAA

SEQ ID NO: 96812 - protein, 452 aa, unidentified
MPRKRKTKVQTIQPVINAHAAGADIGAREIYVAVPTAQTAEPVRCFATFTEDLRALVAWLQAEHIKTVAMEATSVYWIPLAELLEEAGIEVCLVNPRHVKNVPGRKSDVMDCQWLQYLHSVGLLRGAFRPAAEIRGVRALWRQRDALVRHSSWHIQHIHKALDQMNLQIHHVIADITGVSGLAFLDAILAGERDPARLAQLRDRRLRAGEATLVKALTGDYRAEHLFCLRQALAGFRFLETQIGEIDTELERRLRQLTPAEPTAATEAIVKKPTGKHVPAFDLRGLLTQLHGVDLCAVPGLSVLTVQTLWSELGADLSAFPTGKHFASWMGLCPDNRISGGKILGSSTRPTANRVAKALRMAAQGLHHAQNELGDYYRRMRARLGGAAAITAVAHKLARIVYAMVRTHQPYRAEPHDTTSTVHRERTVDRLKAKAKALGFHLVELQPAGEVT

SEQ ID NO: 96813 - protein, 319 aa, unidentified
MIPMATPCIGIDVSKATLEIGLDTSEQTFSVKNDPQAMPELIARLQELAPERIVVEATGGYETQVVAACIAADLPIVVVNPRQVRDFAKALGKRAKTDRVDALVLARFARAVRPEQRLHKTEAAQAVTVLVARRRQLTEMLVAEENRRQSPLFAEMADEFKEHIEWLQKRIAELDRDLQNQIRQTQQWRERDDLLQSAKGVGPVLSVTLLTQLPELGRLDRREIALLVGVAPISDDSGKHRGERHIAGGRAAVRSVLYMGTLAAIRFNPVIKEFYQRLLAKGKLKKVAITACMRKLLTILNAMVRDQKAWHQSAKPVLS

SEQ ID NO: 96814 - protein, 344 aa, unidentified
MHIASIGIDLGKTTFHLVALGERSKVLVRKKFSRTQLLAHTANLQPSLIGLEACSGAHFLGAALREQGHEVRLIPAQFVKPYRKSNKNDFIDAEAIAEAVTKQNMRFVPIKSQEQLDVQAMHRVRDRLVQRRTALINEIRGFLLERGITFPAQPIHLRQNLPTVVEDCEQNLTPRLRWLLDRLWQEWKRTEIDIETVTDEIERIGSEDERCRRLRQIPGFGPLVSTAMVAAIGNGAAFRRGRDFAAWIGVVPRQYSTGGKQKLFGMSKRGNIYLRRMLIHGARAVLFRVKYDTGGLGQWVHRLSQRAPRNKVVVAIANKLARIAWAVLSSGKDYRHQPLQRAAA

SEQ ID NO: 96815 - protein, 333 aa, unidentified
MVEGTKGSHHKEGSTKMSRHTMICAGIDTGKCKLDVALDQSPDRLQVDNDGEGHAELVTWLRKRRVERIGIEASGGYEQAVVSALRRNGFVVIVFQPAQVRAYAKYRLQRAKNDKIDAALIATCTAEAKKIYPPPDPRLAPFAELLTIIEQLTDDVARYKTRREMSRDEEARRFWSEEIARLKRLVRERLKQLVTAIRQHRDLAHRLDLIASVEGVGLRTAVAILVRMPEIGRITRGQAAALVGVAPYDADSGGHVGSRHVEGGRERLRESLYTAALPAAFHWNPELIAIYRRLRAAGKPHKLALIACTRKLIIFVNTVVARDATWVPRVAIT

SEQ ID NO: 96816 - protein, 457 aa, unidentified
MNRKRTKSKVDRTMPMVHPNAAAIDVGATIHMAAVSADRTPEPVRSFGTFTTDLHRLVNWFKECGVETVVMESTSVYWIPIFELLDARGFTVFLVNARDAKHVPGRKTDVSDAQWLQRLHSYGLLRASFRPKGQIAELRAYVRQRERLLEYAASHIQHMQKALTEMNLQLHHVVADITGTTGLRIIRAILAGERDSKALAHLRDYRCHASAETIEKALTGSYRAEHLFALEQALALFDAYHEKVSACDVRIEAVLKELSIGRSRGSGSLTSSPRRTDQTNAMAFDVRAALFALLGKDITQINGLGPYLSLKLIAECGDDLSAWPSAKHFTSWLCLAPSNKISGGKVLSSRTRRSGSRASALLRLAAVTVGRTDTALGAFYRRLSARIGKAKAVTATARKIAVLFYNAVRHGMEYVDPGASFYETRYRKRVVDNLHRRAKAFGFVLHPAEPTPSVAVS

SEQ ID NO: 96817 - protein, 342 aa, unidentified
MQITTIGLDIAKNVFQVHGIDAKEKVVVRKQLRRSHVIAFFKALPPCLIGMEACATAHYWARELRKLGHEVRLMPAKDVKAYVKRNKNDAADAEAICEAVRRPTMRFVQIKSAEQQGQLMQHRTRDLLIRQRTQSINAFRAHLAELGIVAAQGDAGVTELLAIVADEQDTRLPIDARASVIVLAAQLEAMRTLIGSIEKRIKTQHRSNEVSQRVETIPGIGVLGATAIVATAADPKVFRSGRDFAAWIGLVPRQDSTGGKQKLGPISKQGDHYLRRILIVGAIAVLRRAQENPGKYPWLTQLLARRPFKVVAVALANKMARTAWALMVHGGTYRAPELAEAA

SEQ ID NO: 96818 - protein, 348 aa, unidentified
MLADEVDYVVGVDTHRDEHTLAVVVAATGVVVGQRSIRASGRGYAEALRFADQQAGARVWAVEGAGHYGAGLARYLSGCGETVLEIGRGPRDERRLQGKDDSLDAIRAARTALASKTLALPRSGQRREALRLLLLARRSAVDVRRLALVQLRSVIVTAPDPLREELRALPVQRLIVRCSRLHRTSSAPPDELATKQVLRSLARRIETATAEAAELEREILAHVRALAAPLLDEPGVGPIVAAQLIVSWSHNGRVRSEAAFARLAGAAPIPASSGQTVRHRLSRGGDRQLNRALHTVILHRRLHDPATKDYIARRVSEGKTTRDAVRLLKRYLARHLYRVLNNQAPLMA

SEQ ID NO: 96819 - protein, 408 aa, unidentified
MLFVGNDWAEAYHDVEVVDESGRCLVRRRCPEGIVGMAELHAVIADNLPVDAEASEVVVGIETDRGPWVAALVAAGYQVYAINPMRVARYRERHSTSGAKSDRGDAHVLAEIVRLDRAHHQPLTPDSELVEAIKVLARVHQNLIWTRQRQANQLRSMLREFYPSALAAFDDLAGRDALAVLAAAPTPAAGLALGEEAIIDLLRQAGRRRYLSVTAEKIHHALGAEHLQVRPQIADAYGASARALVSIITELGHQIDAVQAQVVTHFGRHPDGEIYLSQPGLGHILSARVLAEFGDARGRYADGKARRNYAGTSPITRASGKKKVVLARYARNNRLTDALFQQAFAALTGSPGARAFYDSLRARDIGHNDALRRLSNRLVGILHGCLRHHTTYDEATAWPSQHDQHQAA

SEQ ID NO: 96820 - protein, 487 aa, unidentified
MAKRKKSTFERLSSGGMNRKQRRDLARRLAGQDPGLTIIHSNAGGIDVGNESHFVAVPPDRDANSVQEFGCWTADLKRMAAWLKACRIDTVAMQATGVYSIPLYDILTGYGIQVVLVNAQHTKNVPGRKSDVQECQWLMKLHTYGLLRDSFRLEETMESVRTIWRLRDRHVKDASRAVQHMQKALTKMNIQLANVITDITGVSGQAIITAILKGERDPWKLADLKHEMVKASREEVARSLEGNWRDDLLFELRQAVESYHFAHLQMRECDRQLERFLASLPTRILERPPQPSDATAATAPQTKKARKPKKTRRNEPTVDLATELKRICGVDLTSIDGIDVITAQTILSEIGTDMSGFKTEDHFASWLGLTPNKDITGGKIIGSGKRKVQNRVAMALRMAATTLLRSQTYLGGRYRHLRKQWPSHASAIKAMARYLAVLVYRILTHGEAWVDRGAARFEQRRTELEMASLNSRALAKGFKLVPITEAS

SEQ ID NO: 96821 - protein, 433 aa, unidentified
MSESQTNTPIPTPDYAAFVGLDWGDEKHALSLCASGSNTLERATLEQTPEALAQWANTLRTRFPNGKIAVALEQARGALLAGLTQYEHIVPFPVNPKSLARFREALHPSRSKDDPVDADLLLELISKHRDHLRPWQPDTVQTRQLALLNEQRRHFVDDRTRLTNQLLAHLKAIFPQAPKLIGDDLASPMATAFLKKWPTLQAVQKVPPAVLRKFYYAQNSRSEEVMTRRLELIKNAIALTNDPALLAVHSLAIQTVVGQLAALRPFIEQYDEQIAELFAAHPDAAIFDSLPGAGPVLAPRLLTSLGTDRGRFPEAVTVSCYSGIAPVTEKSGKTQKWIHLRWSCPKFLRQGWHEFANSSIKFSAWAATCYTEFRKKMGHHEAVRKLAYKWQRIVWRMWRDRQPYDEARYLASLQKKGHPLFPAPVAQPAKSGE

SEQ ID NO: 96822 - protein, 347 aa, unidentified
MRFYTQSRPYYCGIDLHTRWMYICILSQTGEIVYHKNHHAGEASFLAAIAPFREGLVVGVECTFTWYWLADLCAREGIEFVLGHALYMRAIHGAKVKNDRVDSHKIAALLRGGTFPMAYVYPREMRATRDLLRRRTYFVRRRADLLAHIQNTNYQYNLPEFGRAISRKANRGGIAETFPDLAVQESIRVDIEIIDHLDVVIENLNSLIERTARVHDPQALMLLKTIHGTGRILALVILYEIHTIERFDTVQQFCSYARLATSKHESAGKISGRSRRKIGNQHLKWAFSEATALFLKDNPEGMKFKKRLEKKHGKAKAMAILSHRLGRAVYYMLKRGRAFDMQTFLAT

SEQ ID NO: 96823 - protein, 360 aa, unidentified
MREISGRIPEMTVGLDLGDRFSQIAVLDAGGELIEEGRVATTESALRQRFSGCGRMRIALETGTHSPWVSRVLADCGHEVVVANSRKLRLIYENRRKSDRVDALYLARVARLDPKLLAPVEHRGAAAQKDLALLRSRDALVATRTLLINHARGLVKSFGGRLPNCSSRAFQKRVTESIPQPLEPGLQAIVETIASVTEAIKRLERRLEAVAEQNYPETKLLRQVVGVGPITALAFVLTIEDPKRFSKSRSVGPYLGLVPGRMSSGDSDPQMRITKEGHPFCRRLLLNAAHYILGLFGPHCDLRRFGLKMATRGGKNAKKRALVAVARKLAVLLHRLWRWAEIYEPLYQQTHQTGRRGKAA

SEQ ID NO: 96824 - protein, 336 aa, unidentified
MTIIRIGLDTSKHVFQIHGVDENEKPVLRRQLRRSEVEKFFAQLPPTRIGIEACGASHHWARLLRGLGHAVLLMPPQYIKGYVKRGKNDAIDAEAICEAMSRPTMRFVPVKTAEQQAALTMLGVRDLLVKQRTMLINALRGHAAEFGVAAAKGPHKIVELLQRLATGEGVPALAREMLGMLASQLEAVNGKLKAIEARLMAWHRQDQTSQCLATIPGVGPIAGVSFALKIPEARAFRSARHFAAWIGITPRENSTAGKHRPGKISHEGDESLRRLLVLGATAVIQRAKRGRVSPWLLGLLARKPKKLAAVALANKMARVIWAMMISGEVYRRPQEA

SEQ ID NO: 96825 - protein, 418 aa, unidentified
MNEELFARLSRRYLALDIHKHYSVVAGVNFEGQVILEPVRIEHADLEGRLKKHIQPTDYVVIESTTNAWHIYDLLEPLAEKVLVANPIKVKQIAQARVRTDIRDTLVLARLLAANMIPEVWVPPVHVRELRYLLSQRRHLVGMHTQTVNRMHSVAHRHHLSHARGKRFNEKNTKWQKDNVLSDSEQFQLELDMSTKEHLAEQTEKITKKLGKMSHQKPWAERMMYLMQMPGFGVITGMTVLAAIGDITRFESPKHLVSYSGLNSGLEQSGVKLRGKKITKEGRKDLRWAMVEVAQRAVKSDPLWKHRFIELCRRMHKNQAIVAIARRLLELVWYVLSRKQAYRNFSDERIAYKYLTWSWQLSEKDRDGLTRQQFTRYYLMRLGIGHDLERIELNPRYRRRLASEAEVLALRPELKQTE

SEQ ID NO: 96826 - protein, 461 aa, unidentified
MARRNPGIPTPASPSSRGPALRITHPHAAGIDIGGSSHFVAVPPDRDDEPVREFRAFTADLIALTDWLRACRVDTVAMESTGVYWIPLFELLSSRGFEVLLVNARHVKNVSGRKSDVLDCQWLQQLHSYGLLRGAFRPGDGVVALRAFARQRHALLRTQARAVQHQQKALVQMNLQLTSVIADVAGATGQAIVRAIISGERDPMRLAALRNCRIKASEEEIALALQGNWRCEHLFALKQALEAFDFCGQQLAELDAQIEAQLQRLQVTDDEPAKGRKRSVARNAPKFDLRARLFSMCGVDLTAIPGVDVTTALAVVSETGADLTAFPTGKHFASWLGLATGTKISGGKKLSGRTLPSSNRAAQALRLAAAALRTSQSALGAYYRRLCARMDKPKAVTAAAHKLARLIYAMLTRGQQYTDQGQAYYEERYRERVVANLTRRAQQLGLQLVPLAGASPQTTTA

SEQ ID NO: 96827 - protein, 347 aa, unidentified
MQVFIGFDISLQSTHICVVDSDGKKVREGVVPSDVPALDTWLRMHGKEWAINRIVFETGQLSTHFYHGLRSSWPVICIDARHAHGTLKAQRVKTDKNDARGLAQIARTGWYKATHVKSDDGQALRALVGGRKQLVAIRLEMENHIRGTLKTFGIKLGTVTSAGFSAKVITALVGKNTLVTRTMHTLLQARDGILAQQKALDRHCAAITKNDAVCKRLKTIPGVGVITALTFKAEIDDPLRFRKSRDVGVHIGLTPRRFSSGEVDRSGSITKCGNGALRTLLFEASVTMLTRSGKWSRLKAWGVRLAQRSGFKVASTAVARKLAVIMHRMWVDETDFAYGNPPATQAA

SEQ ID NO: 96828 - protein, 359 aa, unidentified
MIVIGIDPHMKTHTAVAVDCATGASLGTRTVSGDGSGHDGLLAWARGLGPDRYFAIEDCRHVSGRLERHLLGNGERVVRVPPKMMAGARSSARTYGKSDPIDAACVARAALREPGLPEASLAGPAHDVRLLADHRDDLVDERKRIQKRLRWHCHDLEVDLEMPPRVLDRYVWLDRLQDILEAFPESTRRRIALAELRQIRELTVAVRDLEREIRGLMRELAPDLLAIPGCSAILAAHLVGQVAGFSRFSSEAAFAMHIGVAPLPVSSGKSCRHRLNRCGNRKLNSAVHMIAVTQARMHPPAIAYMERKQADGMSYREALRCLKRLIARTVFKTMLRTERAAAGKVVKADFATAPMAVAV

SEQ ID NO: 96829 - protein, 343 aa, unidentified
MKITSIGIDIGKTTFHLVALDEHGSIVIRRKFSRKALLVYCAKLTTSLIGMEACGGAHCLARLLREQGHEVRLIPGQFVKRYREANKNDYLDAEAIAEAVTRKNLRFVPIKTEDQLDVQGLHRVRERLVHNRTEVINQIRGFLLERGVTFNRGPLSLRKEMPDLLEDAEQNLTPSLRTLLSHLWQEWQSLNSQIDRMGAAIEEVAESDATCQRLRKIPGVGPLVSTATVAAIGNGAAFKRGRDFAAWLGLVPKQHSTGGKAKLLGITKRGNRYLRKLFVHGARAVLLRVKYDTGGFGQWVHRLAARAPRNKVIVAIANKLARIAWVVLSSGNEYQHQPVAAVA

SEQ ID NO: 96830 - protein, 344 aa, unidentified
MDHFAGLDVSVKETSVCIVDGTGRIVREVKVVSEPDALLPVLTNPTYHFKRIGLEAGPLSQWLFSALAEAGLPVICVETRHMRAVLQAQINKTDRNDARGMAQMMRAGIYRPVHVKTLRSQKLRMLLTHRKLLQSKAIAIDNDLRGTLRNFGLKVGMVGKVKFEARIRELVENLPDLAVLVEPMLIVRRVLREQIVILHRRLLAIVRDDEVCRRLMTVPGVGPVVSLTYRATVDVPARFHKSKSVGAVFGLTCAKYQSGEVDWSGRISRCGDEMMRVMLYEAAQILLVRSVKWSWLKAWAMQIARRRGMKKAIVALARRLAVIMHRIWVDGTEFRWTREEEAAA

SEQ ID NO: 96831 - protein, 423 aa, unidentified
MDILYERVAGLDVHKDTVVACVRIVAEGKTKRECRTFSSTTEQLIELRAWLEECRCTHVAMEATGVYWMPVFRILGEGPFELMVANAAHIKNVPGRKTDVNDATWIADLLACGLIKASFVPGEDIQELRSLTRTRKQLVREQTRHVQRIEKTLAEANIKLNSVISDIMGASGRRMIEAMIKGVRQPRQLAELAGKQIKATPKELYDALHGRLTDHHCFLLDLHLKQWDGLDGTIREIDREIDQRIGRLHTKRASGEVPFRTLIELLSTVPGISTLSASAIVSEIGCDMNRFPTAGHLVSWSGLCPGQNESAGKRKPSRLRKGAPWLKTMLVQCAWAAKRKKDSYYRAQFFRLQSKRGPQKAICAVAASILTAVYHILKNGTEHHDLGASYFDRRPLELKANRLVARLKKLGFNVQLQPAAEAA

SEQ ID NO: 96832 - protein, 410 aa, unidentified
MRIIALDVHRSFAQIAILENGKIRDAGRVDLERSRLLQFASKLKPDDEIIIEATGNTSAIVRLLSSFVARIVIANPILVRAIAWAKVKTDKIDAAVLAKLHASGFLPEVWMPDEETETRRRVVAERTQLISQMTRLKNRIQSVLHANLIPPYKGTLFSKRGRAWLETQPLAQDQRRVVLRHAGELDRLGAELADVDKSLAQKALAEPRIKRLMTITGVNVTVAMSVLAAIGDINRFCSAQKLVSYFGLNPRVRQSGDKPAYHGRITKQGRAHARSMLVEAAWVISGVPAPLRAFFIRVRDKRGKHVAAVATARKLAVIVWHMLTKDEDYTWNRPALLDWKLRKLELKAGHPSRRGGKQKGSAAAYSDKSVRDSERETIGNAEQAYTRFVANWKQHLSKGRSSAANEVRLS

SEQ ID NO: 96833 - protein, 453 aa, unidentified
MGKQAGKGRSLSLDCIEPNAAGIDVGATEIYVAVPPDRDGEPVRHFKTFTSDLREMACWLLHCGITTVAMESTGGYWIPPYGVLEEAGMRVCLVNSQHVRHVPGRKSDVSDCQWLQYLHSVGLLKPSFRPDAAICALRSLSRHRSSLVESAAVHIQHMQKALTQMNLQIHHVLSDITGISGMAIIDAIVAGQRDPGQLATLCHAKVHSDRQTVIKSLTGNYRTEHLFTLKQSLAAYRNYQLLLAECDQQIQRLTGTMAGKMESGGPAPQQNRRKRRKNQFHFDMGSELHRLFGVDLTAVPGINALTAHALLSEVGTDLNCFPSAATFANWLTLCPGTKKSGGRILSSKTRPTNSRLSHALRVAAQTLARSRSHLGNFYRSMRARLGAPKAITATAHKLARILYHLITTGSAYDETVFDREQQKQNLRLHKRLSKQAKLLGLQLVPINAGESCS

SEQ ID NO: 96834 - protein, 345 aa, unidentified
MQPIYYIGLDVHKRTISYCVKDGSGTIHAEGTIPATRLDLNLWMKTLPQPWTAAMEATMFTGWIYDHLKPHAAALKVAHPLMLRAIAAAKKKNDRIDASKICDCLRCDFLPECYMAPTAIRERRRTLRYRNLLVRQMVQMKIKISALLMEAGVSYNKQRLHKAGYFRELLATNPDIDEGLCALLRLCRETVVRLQKTEGALVRSLESDSLLVDRVERLMTIPAVGPITALTWTLEVGDVQRFSSIKKAVSYCGLCGAEKSSANSMQRTPLSKQRNKYLQTTLIEAAKMAPRSSPELAMLYDKERQKGNANRATLAVARKLVAYLVAVDRRQKEFLTVERENRTAA

SEQ ID NO: 96835 - protein, 336 aa, unidentified
MGKITTVGLDLAKNVFQVHGVSDDGRILVRRQLRRGQVLAFFEKLPPCLVGLEACAGAHYWARELRTLGHEVRLMPPSYVKPYVKRGKTDAADAAAICEAVTRPSMRFVPVKTSDQQAVLLQHRARDFLVRQLTQIANAIRAHLGEFGIVAPKGMHNVERLLGSAAEDGLPANAEAPINLLAAQFRETRAKVEEVTALIKAAQGRDATAARLATVPGVGVLTSSVIAATTPEVANFRSARDFAAWLGLTPKPHSSGGKERLGRISKMGNRYIRRLLYLGAMAQISARRRRGPGDDWLWKMLEKKPAKLVAIALANRMARTIWALLKTGESYRARPA

SEQ ID NO: 96836 - protein, 347 aa, unidentified
MTYYAGIDVSLESSSVCVVDATGKIVREAKVASEPEELIGWFGALGLALERIGLEAGPLSQWLYAAIRQAGLAVELLETRHVRDAFKAMPVKSDRNDARGIAQLMRLGWFRPVHCKSLGAQEVRALLTARKLVQSKLFDVEMSLRGILRGFGLKVGPTTPSRFAGRIRELVTGQATLEVIAAALLAVHEALRREFDGFERRVRSMARADGRVRLLMSAPGVGAIVALTYVSAIDDPARFRSSKDVGAHFGLTPKKYQSGEKDVTGGITKIGDTSVRTALYEAAHIILTRPIKGGGLKSWAMKLAKRTGMKKAKVALARKLAVVLHRMWVDAKYFAMDKALSPTCAAA

SEQ ID NO: 96837 - protein, 346 aa, unidentified
MEHYVGLDVSLKLTAICIVDRTGKIEREGVVASDPETIAAFVKLHAPHVARVGLETGATSTWLWTELSKLGLPVICIDARHAKAALKLQINKSDRNDAVGIARIMQCGWYKEVRVKDLDSHAIKALLVSRALLVKIKRDIENQVRGLLKNLGLVIGRAKMNVFAVRAAELTDARPELAAAVEPLLKAREAVGRQIADLDRKVMRLARNVAQVRRFMTAPGVGPITALCFLATIDDPTRFRKSRSVGAYVGLTPRRYASGEIDWTGRISKCGDKLLRSYRYEAANVLLTRVAKWSALKAWGIRLAKRTGLRKAKVAVARKLAVILHRMWIEGSEFNWSSKEAANQPA

SEQ ID NO: 96838 - protein, 310 aa, unidentified
MDAIYVGIDVSKDRLDVHVRPGGEAFAVARDGKGLEQLVERLRALAPTLVAVEATGGFETIVAAAIAGASVPLAVVNPAQVRHFAQAVGKRAKTDPIDAEVIARFAEAVKPQPRALPDEAARLLAELVGRRRQIIEMLVAERQREKRVDAVRVRKSLARHIAALEKELPIIDHDIDTMVRGSQVWREKENLLTSFPGVGDTLARTFLAEVPELGSLHRREIASLVGVAPFTRQSGRWKGKSMIGGGRAAARSAVFIAALSAIRCNPILRAFYQRLLAAGKPKMVALIAVARKILTILNANLRDKTPWQIA

SEQ ID NO: 96839 - protein, 412 aa, unidentified
MEVVYPCCCGLDVHKKSITACVLWAGAKGKSRKEKRGFGTFTHDLLRLADWLGECGVTHVALESTGVYWKPVWNILAEQFEVLLVNAQHIKAVPGRKTDQKDSEWIADLLQHGLLRGSFVPPRPTRELRDLTRYRVSLAQEINRIANRIQKVLEDANIKLASVATDALGASGRAILEAMLAGEQDSARLAEMAHGKLRNKIPELKLALAGRMTEHHRFLLRQLFDHLHFTESKLAQIEQEIDKRTRPFEDQVARLRTIPGVDRVTAWGLLAEIALDMNQFPSEKHLSSWACLCPGSFESAGKRLSGKMRKGNVSLRRCLSQAAWAISMTKNNYLSALYRRIAARRGAKRAIMAVAHALLVIAYHLLKRKEDYRELGADHFDRIDVNRIRRSLVRRLERLGHRVTLEPLAQTA

SEQ ID NO: 96840 - protein, 346 aa, unidentified
MELYIGLDVSLASTAICAVSGRGKIMMEATAASEPEELVAALKAMPGGVVAVGLEAGPLSQWLYRYLTDAGFAAVLMETRQVKGALKAMPIKTDRRDAEGIARLLQMGWYRPVHCKSVSAQEMRALLSARKAIQQAAINLELSIRGVLRNFGLKMGRVAKGRFEARVQELTEGNPMLEAAANPILATRRTLRQELAGLEKALRDHVKEDPACRTLMTMPGVGPVVALTVKAAIDDPARFRSSKDIGPWVGLTPRREQSGERDIVGQISRAGDVGLRTALYQAATTMMHRGSKNWLTAWAMNVAKRRGKKRATVALARRIGVVLHRMWTDGTDFRFTRKDAAAAAAA

SEQ ID NO: 96841 - protein, 370 aa, unidentified
MNTTHAVAGIDPHKRTATVAVVDVLGVLVTSLSFAVTESGIAELLALLQSTSLSIDRVGVEGSGGLGRPVMLALAAAGYEVREVQANRTADRRKRRRRAKTDVEDAEAIARETLADPDLPPAGKDATPSPASNELDVLRDWRESLVLQRVRLLTEAEPVLVSLPLQLREQLPATSRVLASLKRLAELEGVDAALSAGDRLKLDRLAASRADIVAISARIKKLDAQIPALLKAMGCSLTAIHGIGVVTAMTLLTEVGDPHRFSTEARFARWCGVAPVAMSSGEGDGPPRHHRLDLGGNRKVNSVLHIIHVTQARCHPDAQAYLIRRAEENKTKRAARRAHKRQLANVIIRRMWNDADDLARANSTPSTAAA

SEQ ID NO: 96842 - protein, 466 aa, unidentified
MENNYILYVGMDASKGKADAAILKVSDRRSVKPKFLCKKLSFKFVKSEVASFLETVRSYSDVNCTSICFALEVTGIYSTNVYNYIKANLYENESIKFLNTDFVNQWRNAHKIAKSDPLDAQTISTIIGTDSDVQYVNDNVFENKNGYQDLKALVHRHYQIKKIYSQEINRLIAQCDCLFPELQYVFEPKSAAFIAVLSSYPTTHDIINASRVEVFDVVYEATKHRCSMDKVDKLFELCQDTLVPDDISSYGKSIILDLVENIKNIKGQLKSIERYIRDVVSLNPAYKLLLTITGCDPITTATVIAETGNIRRFKNADCFVSYSGTSPRNKRSGTSVETMGKISKKGSRYLRHAIYMIAEFARRHNPVLKHQFEKIKNGNKKRHKLANIAIANKIARYIYSIMKNKSSFVILHDHIMRLPEETRYTFFNSISLDFPKNTRKQIYQYSDINGEVHRFVYIKTDEMIPV

SEQ ID NO: 96843 - protein, 315 aa, unidentified
MDGVNAAIEVGKQQLVVRLGSDGEQFSEANELRAIKRIAKRLLQAGCERVLIEGGSYQSALIAGLRAAELPVVIVNPRRVREFAKSIGQLAKTDDIDARVLALYGERTQPPLRELPDEQSQTLRALWARREQLIEMLVMEENRLEHAPERAKAVRHNLRSHIDYLRKQIKQADDDLDREVHNSALWDKYEMLGTVPGVGPVLSIALLSELPELGRLNRGEIAALAGVAPFNCDSGTLRGQRRIAGGRPRLRRVLYIATVAAVRCNPVLKPFYLRLRGTGKPAKVALVAAARKLLTILNLMLKTKTAWRPPCNATV

SEQ ID NO: 96844 - protein, 419 aa, unidentified
MRIIKTKKHKIVNGRTLLVAVDLGKSKHMGYYRCPDGTDIKPFEFSNNRPGHQKFYDRICQAKAVHHLEEVVVGFESTGVYGEPLIHFLNNKGIKLVQVNPLHTKRMKELEGNSPGKTDRKDPKVIADIMELGHFLTVIIPEGVSAELRRLTQARERSVERRTTFYNQLQDLVFIIFPEFLEVMKDIKTRSAQYLLRHYPTPQAILQCGVDELSLVLRRVSCGKLGRQRAEALYEATGRSVGIEEGQRSMVLEIEEILLRIERDECFIAKLEREMDRLLEQIPYSRSILSVKGIKTVTAAGLIGEVGDFRKFRTISELLKLAGLDLYEISSGNQRGNRHITKRGRSLLRKLLFFASLNMIRKGGVMHESYQRYIGRGMPKHKALVAISRKLLGILFALVRDHTEYVVHYSERENLKLAA

SEQ ID NO: 96845 - protein, 412 aa, unidentified
MEVLYQTCCGIDVHLATVVACVRHPAKGGRRKSEVHTFGTTTSELLQLADWLTEHGVTHVAMESTGVLWKPVFNILEGNFAVILVNARHMKAVPGRKTDVKDCEWLARLLEHGLLRASFIPPPFIRELRDLTRYRKTLIQQRAAEANRVQKLLESANIKLGLVATDILGASGRAMLQALVRGERDGAVLAELAKGTLRQKRARLAEALTGRFTAHHGLMLNEVLAHIAYLEAAIARLSARIEAALQPHAEQVAHVQSIPGVDRVAAETIIAEIGLDMQQFPSAAHLASWAGICPGNQESAGKRQTGKTRKGNTWLKPVLTECGWGAGRARRTYLGAQYARLGQRRGKKKAVLAVGHSILVSVYHILRDGVPYHDLGPEHFDRLATARLTRHYVQRLEQLGHRVTLATEAEAM

SEQ ID NO: 96846 - protein, 316 aa, unidentified
MIVLSNAAGIDAGRDFLDVAVEPCGHVRRVANAPAGIKALLAWLTRRQVRRVVLEAIGPYAARLVRALADTGFEVGLVDPRRIRAWRTAEGRRAKTDRLDAKLIARFALRMENIIRPVPTPQAQRIKALSTRRRQIVEMIAMEKTRLKQAFDADIAQNHRETIAFLTSQRAALEAELTACLTADDGGARLALLQTAPGVGPAVAITLLADLPELGTLDRRAVASLAGLAPQITQSGLDKGQAHIAGGRPCLRNALYMAALAATRSKSGMRSEYEAMRNAGKPPKVALIAIARKLLVILNHMMRERRPWTPNPSQKT

SEQ ID NO: 96847 - protein, 408 aa, unidentified
MIYCGIDWAEKTHDVALVDDDGKLLAKRHITDDAAGYKILLDLLAEHGDTEDDPIPIAIEASRGLLVAVVRTGKRQVYAINPMAAARYRDRHAVTRKKSDPGDALVLANILRTDMHAHRSLPQDSDLARAIAVLARAQQDAVWNRQQLSNQLRSLLREYFPAALDAYLHWQNGLCRPEARVLLELAPTPTRAARLSIAQLHSALKRAGRQRRIDADAERIHEVLRAEYAHQPPLVEDALGKQMLALLRQLDAACIAADQLAEAVEEAFPQHPDAEIILSFPGLGTQLGARILAEIGDDHTRFTTARGMKAYAGASPITRASGKKSSITRRWVKNDRLNHTGCLWAFAALTASPGAKAHYDRRREAGDWHAAAQRNLFNKMIGQLYHCLQKHILFDETLAFRIELPAAA

SEQ ID NO: 96848 - protein, 312 aa, unidentified
MYHVKEQLVYLGIDIAKSYLDGAIENEKRRFSNDAIGHRQLIQWIKQIPAKVQVICEPSGGYERALVRAVVGAQLKISLVPANRVRQFARAAGILAKTDRIDAKLLCAFGEAMQPGTIGASELEQEHLRELESQRRHLTHLLVMEQNRGARLSDVCVCKLNRRLIIQIKKQIEQLDRLIRNHIQQSPQLSAKAAKLTAISGVGERTAALLLAQLPELGELNRREVAALVGVAPFNRDSGKMRGKRAIYGGRRPVRHGLYMAALVAARHNPILRQFYLRLRAAGKPAKLALTATMRKLLIVLNSALKPDLSYA

SEQ ID NO: 96849 - protein, 387 aa, unidentified
MIYYVGIDISKYKHDFCIISSASELIVENFSFQNNKIGFQSLLDQLKPYNKSEIHIAFEATGHYSLNLELFLVNNGYSFMKVNPLIIHQFLKTRSLRRTKTDKADSLTIAKYLMSAPYKPNSDLLYNIFTLKSLCRAREQLIKERSKYQVLLTNQLDLTFPELKQFLNNRISATLLFILEKYTNTNHISLMRDYDSIKNISRGKFSYAKFAKLKELAKNSIGHHDENNDLLISTYVSIIKTLNDKIDPIEKQISTIIKELNPRMLTIPGLGEISAATILAEYGDINNFSSPNKMLAFAGLEPSIIQSGTIENNGKMVKHGSGHLRYSIMNAAMIILRYSPTFYDYYLKKRSEGKCHRVALSHVCKKLLRVIYTLEKNNIDFDSSLLK

SEQ ID NO: 96850 - protein, 346 aa, unidentified
MEITTIGLDLAKNVFQVHAVNGASEVVVKKTLRRVQMRRFFEQLDPCLVGIEACGTSHYWAREITKLGHEVRLMPPAYVKPYVKRGKSDASDAEAICEAVTRPTMRYVAIKSPEQQAALALHRTRDLFVKQRTQLVNMIRSLLAEFGIEIPRGIGQALMLAKRIAADDVPNIPPLASKVIAGLAGQVLDLQARLREIELELLAWLRSNDIAKRLATIPGIGTVCATALAASVTDPHQFRSGRQFAAWLGLTPLQHSSGGKERLGRISKMGDKYLRRLLVVGMTSLIRRAKYKPEAVDPWLAGLLSRKPARLVTVALANKAARVVWAIMVRGGVYRMPAGASVTTSV

SEQ ID NO: 96851 - protein, 366 aa, unidentified
MDTIYIGVDFHARQQTICYLKTETGELVTCELKHQDKQKVLAFYAQFRGSVIVGLEASGYSPWFERMLEELGCEVWLGHATEIRRRARWRQKNDRRDAELILDLMLHDEFPRLHRPAVQSREVLRMLRYRQKLIKIRTMSKNSLQAIALQSGLAQGSRLFTKDGQEQLGAAEMSPVMRWQRDHWLQLMAPLNQQLLETMVWFKAQSKGDVYITRLRTHPGIGLLTSLCLVHTLQPVSRFRNTRKVAAYAGFDPVERSSAERKCFLGISKAGSRLLRYLLVEAAQTAVRKDEDLKRFYQRLADRRGRPKAKVAAARKLLIRAYIMLRDEIDYAEFRHRAVAARLARRGQGPSKVPEVLIGQPASPEP

SEQ ID NO: 96852 - protein, 355 aa, unidentified
MTSTKYIGMDVHKESISIAVRNDAGKVVMECVIETKASMILQFIEGLRGDLHVTFEEGTAATWLYDLLKPHVTRLVVCNPRRNALLKVGNKDDRIDAGKLSELLRGNQLHPVYHGEHGLRALKELVRSYLTISKDLARVMTRVKALYRSWGIPCSGTQVYSRLYRVVWLSKITEPGVGLRAAFYFQQLDALRELRQEVRRELLAESKKHTAWKRLCQIPAMGPIRAAVALGILQTPHRFRTKRQLWSLSGFAIETRSSADHRQVNGQLQKVKKRVSIRGLNQNHNHDLKNLFKGAAVLASSKPGPFREFYAGLLAKGMRPEMARLTLARKIATIVLIVWKKGVCFDAQYLKPQTA

SEQ ID NO: 96853 - protein, 360 aa, unidentified
MSDGSKGRPMITAGLDIGDRYSYLCLLDSESGEVIEEGRLRTTPEAFRRRFASELPMRIAIEAGTHSPWVSRVLEECAHEVLVANARKIRLIYANKRKTDEIDAENLARLARVDPKLLYPLKHRGEDSQAHIVIIRSREALVGSRTQLVNHVRGAVKSFGHRLPKCPASGFHNKGPEHIPEALWPALGPILEQIGSLTERIRQYDRKLQKISKEHYPETGHLRQVEGVGPLTALTFVLTLEDPYRFEKSRSVGAYLGLVPARDQSGDRDPQKRISKEGDQMLRKLLVSGAHYILGPFGSDSDLRRHGQKMATRGAKNSKKRAAVAVARKLCVLLHSLWVSGEVYEPLRNTHRREQREEAA

SEQ ID NO: 96854 - protein, 394 aa, unidentified
MRYVGIDIAAEKHVVAVLDDERQVVVKPTTFGEDTEGYAKLVALLGEPADALVAMEATGHYWKNLFAALASHGFAVALLNPLRTRRFAGEDLERTKTDAIDALAIARFAAEKHPTATRLPNETTQEMRELVRLRDRLVQDFGDQVRQLHRLVDLGFPELTRHVRDLNSELAQALLSRYPTAKAFAEAREGELANLCYDGRRHVGRALAQTLIAGAKISVGQHHGEAYRIQVECACETLALLRKQLRRVERDIGTKLDAHEVGKLLTTIDGIGPTTAARIIAECGDPADFRDAKALASYLGLVPSLRHSGKRIGMRAGLTNLGNLAVRAKLWMPTLTAVRRNPWLRAFYERLRAAGKLPKVALCAAMRKLVTAIYSVAKNRKPFTPRLIAAEVTP

SEQ ID NO: 96855 - protein, 326 aa, unidentified
MMHPAEAIKPTPTDALITIGIDVSKDHLDAARHPSGDSLRVPNTRKGHTELLRWLGNSGSIARVVFEPTGPYHRMLEERLASVGLQIVKVNPRQARRFAEAAGRLAKTDRIDALMLARYGALLEPVTRPVRSDVQNQLAELVAARRGLMRDRTATLNRLNTLTIELLKRHARHRLRQIEAQVASLDAAIDAIVLGDPVLRRRRDVLASIPGLGLITAHTLLADMPELGAMDEGQAASLAGLAPITRQSGTWRGRSSIQGGRASLRQALYMPAIVAMRFNPDLKRVYDRLIAQRKHTKIAITAIMRKIVVLANALLRDNRLWTPKTS

SEQ ID NO: 96856 - protein, 482 aa, unidentified
MKAKPQEKNKRATNHPTQHHWHEMNRKQRRETMRKIQSEDLSLEVIHPDAAGIDIGNESHYAAVPPSRDSQPVRCFGCTTAELKAMAAWLQQCRIRTVAMQSTGVYWVGVYDILEQAGLEVYLVNARDTKNLPGHKSDVQESQWLMKLHTYGLLRNSFRPSQKIRTMRTYWRQRNDLVQSASRHILRVQKALTQMNVQLANVLSDISGVTGQAIIKAILAGERNPHKLAEFRDPRVQASEEEIAHYLEGNWQPDLLFVLKQEQDGYEFCQQQMAECDRQLAQYLQQREDRSQGAPLPEEKRKGRLKKKSGNKPQFDLRTGLFRMSGTDLTRIDGIDVMTATTVISEAGYDMSKWQTENHFVSWLRLCPDNRISGNKVIGKGRLPTHNPISIALKIAATTLRQSQTYLGAQFRRLRTKLGAPVAIKAMAAKLARLVYRMLRYGMKYVDQGAAVYELKHRELQVQQLKSKAAKLGYKVTLLPAA

SEQ ID NO: 96857 - protein, 417 aa, unidentified
MKLLFIGDDWAEGHHDVAAQDDAGKTLARRRLPEGADGIARFHEMVGSCLGEDAEPDPARVIVVIETDRGPWVKALAAAGYRVYPANPGQAARHKETVANPGKKDDFFDAGCLADMGRTRRHQMRELAAGSDVAEAVKIAARAHQKLVRERTRHLLRMRPALREYFPAALEAYADLTLAGKDALELLAKAPNPESAARLTVTQVTAALKRAGRRGDLAQRARDIQAALRAPHLAQPDVIAEAHAASVQAAAAVITALNEQVKIMEAKVSGLFRRHPDAGLYLSQPGIGDITGARIPGEFGDAPGRYATAKARKNYAGTSPLTIQSGKKKTVHARYIRNRHLIDALPAQALTALSVSPGARGYYDDLRARETGHDDAMRRVASRLAGILHGCLKTGREYDEATAWSHRAGNPEATKAA

SEQ ID NO: 96858 - protein, 441 aa, unidentified
MMAMRKRTDTVFPNAAGIDVGASSHWVAVPPDAAEESVREFGVMTDDLRALADWLMACKVEIVALESTGVYWIPLFEILEQRGLQVWLVDARQMKYVPGRKSDVQDCQWLQRLMSYGLLRAAWRPAGEVCELRAIARLRETLLAEQASWVQRMQKALVQMNIQLTEVLTDVMGMSGQAIIRDIVAGERNPEVLARHRHRRVKASTEEVIRALTGNWRQEHLFVLGQALSMYDDIARHLRECDAQMQVLLGQRAQCAINVGAVPRAGSKARAAFDVRQMLANWAGVDLTRINGLEVSSVMKILTEIGPDLSRFANVKHFCSWLGLCPGTKVSGGKVLSAGTKRSANRVRQALKMAAMTLSHSNSALGAFYRRLCSRMDKPKANTATAHKLARMVYFMLTRGEAFVDQGQQRYEELQRERSIAALKRRATALGFQINPIGAAA

SEQ ID NO: 96859 - protein, 327 aa, unidentified
MEREYIGIDLHKAFFQACALSEAGDRQWEHRWPTTDAGITGLLARCGAHSQVAVEASTPTWAFVDRIVHQVGAVQVVDARRTRLKAGYAAKTDRLDAQRLADALRRASVVGIYYPPPAIRDLRELARYRCHLARLQASVKQRIRALLLRHGIVTPPGLFTQRGSQWLDACPLSGWAGAELVGLRQVLADVRAQLVPVLTAMRTLAATDPIVRALDQRPGFGPVFSVTVRAEVGTITRFPDGPHLASYAGLVPRVAQSGGRRWSGRITKAGSPWLRWTLIEAAIHQFRRQDAFGRWARRLAMRTGMLKARVAVARALCTDVFTAWPRA

SEQ ID NO: 96860 - protein, 371 aa, unidentified
MKQYSTFVGMDVHKNSIEIAIAQHGRNGEVRNYGKIDGTLEALDKVVRKLVSKGGHMHFVYEAGPCGYEIYRHLTAKGYDCAVVAPSRIPKKSGDRIKNDRRDARMLARLDRAGELTPVYVPLAEDEAIRDLTRAREDAKIDEKKSKQRLLSFLLRSGLRYTGKSTWSKVHMRWLSDIKMPHPSQQIVLQEYIDTITECSLRVQRLTHQIQQLLPQWRMFPVVEALQALRGVALIVAATTVAEVGDLKRFESPTELMSYLGLVPSEHSSGEKTRRGSITKSGNGHVRRVLVEAAWAYRLPARVSRVLLKRQEGLAEKVCQISWKAQVRLCSRYRKLWAKGKPKQVVITAIARELCAFMWAIANEIQVPAAI

SEQ ID NO: 96861 - protein, 311 aa, unidentified
MSPTFIGIDVAKDHLDAHLLPQGEALTSAADAAGVTSLVDRLQAVRPALIVLEATGGYESLVAAELAAADLPVAVVNPRQVRDFARALGLLAKTDAIDAHVLALFAEKVQPPVRTPPDEREQRLKALVTRRRQLVAMRTAELNRRAQANPEVRKSIDAVLKILHRQIEDIEHDIDGTIRHSRLWHEKDILLQSVPGVGPGTSRTLLAALPELGRLNRRQIASLVGLAPFNRDSGRWRGERSIWGGRAEVRTALYMATLSAVRFNPVLRVFYQRLRAAGKKAKVALTACMRKLLVILNALLRTQQKWHPQNA

SEQ ID NO: 96862 - protein, 314 aa, unidentified
MNKEKVYVGIDVAKANLDIALYSSEKKWQFTNDEAGISRATELLKELSPVLVVMEATGGYETPLAYALKASGIPVAIVNPREVRDFAKATGKLAKTDALDAKVLAHFAAAIEPEPRPISDEELQELSAILARRRQISEMLTAEKNRLHTARKVVGAGIKAHIAYLEKEMAEIEAGLQNKIQESPIERAKYNLLRSVPGVGPTLCATLLIELPELGKLNKKQIAALVGVAPLNRDSGTLRGKRTVWGGRATVRRPLYMATLVATRHNPVIKAFYDRLCAAGKAKKVALTACMRKLLVILNAMLQHGTPWAYASFS

SEQ ID NO: 96863 - protein, 330 aa, unidentified
MTITTVGIDLAKNVFAVHCVDQHGKTVLVKPKVSRAALPELIASLPPCVIGMEACSGAHYWARLFRQYGHEPRLMAAKFVSPYRMAGKSGKNDAADAQAICEAVRRPHMRFVPVKDESQQAMQCLHRIRQGFIEEKTATYNRLRGLISEFGVIAPQSTDALRHMVSEQKSSLPLQVQQCVNDLLEHIDRIEDNITEYDRILSRMAKTDHRSQRLMELKGIGPTTACALVASIGNAHDFKNGRQLAAWLGLTPSQYSSGGKSKLGRITKAGDSYLRTLLVQGARSVLIGAEKRTDLFSRWVCSLVDRRGYWRAVALLMEWSPPISCATVGR

SEQ ID NO: 96864 - protein, 402 aa, unidentified
MNAVGIDVSKGKSMVAIMRPFGEIVSAPFEIKHTASDIHSLVELINSVEGESRIVMEHTGRYYEVLAHQLSKANLFVSAINPKLIKDFDNDSLRKVKSDKADSVKIARYALDKWQNLKQYNVMDELRNQLKTMNRQFGFYMKHKTAMKNNLIGILDQTYPGVNTYFDSPARSDGSQKWVDFASTYWHVDCVRKMSLNAFIDHYQNWCKRKKYNFSQSKAVEIYGKAKELVPVLPKDAITKLIIKQAVDQLKSASTTVESLRTLMNETASKLPEYPVIMAMKGVGTSLGPQLMAEIGDVSRFTHKSAITAFAGVDPGVNESGSYEQKSVPTSKRGSSDLRKTLFQVMDVLIKTHPQDDPVYQFLDKKRAQGKPYYVYMTAGANKFLRIYYGRVKEYLASLPES

SEQ ID NO: 96865 - protein, 344 aa, unidentified
MRIVEVTGGVDTHADTHVAAVIDHNGGLLGVESFGADQAGYEELSDWIVGFGLVTRVGVEGTGSWGVGLTRFLTVAGVEVIEVDRPNRQQRRKVGKSDPSDAISAARAALSGTAAVTPKSRNGRVEEMRVLLVARRSAREQRIQTLNQLRHLVFCAPEEIRVRFKDRYKTGLITEAANMRPRKGSDPIVYRTNLVIRGLARRIQTLNTETKIIDGALTQLIKKATPSLLALHGVGVDTAASLLVAAGDNPERLHNERSWAHLCGVTPIPANSGKVTTRFRLNRGGDRQANAALHRIVLTRMSSDQDTRRYVARRRAEGLSTPEIMRCLKRYVARQTFKHLPHMI

SEQ ID NO: 96866 - protein, 343 aa, unidentified
MGSTLFVGLDAHKSSIVATVVDREGNRVDQARLGSRDSELTEYLSGLPAPAEVVLEACNVWQHVYDAAASTGARVTLAHPYKVRVISEASLKSDKVDSTALAQLLRLQAVPVAFAPDAPTRELRQLVRDRGFYRDEEGSVRNHIYSVLLQKGIPYDEGILLLKRKREELRSLGLPEVDRGLDMLGSFDAATAELDHRIHEAFLSSKEAQLLESIPGIGEYTAVALVAELCPIDRFPNVEKLCSYAGLVPTNHQSGETSYQGHLKTDSNQLVKTLLVEASWGHRHWAKGSDVAKIAKRVSRRRGKQKGNVAGAHKLLKIVYAVLKRGTPYTPERPSPGPFPAKS

SEQ ID NO: 96867 - protein, 469 aa, unidentified
MSTIYVGVDVSKGYVDVVFLNDAGSVLGEPYLFDDTPKGHKAMMSVLTELVRRDKEISFMIGVESSGGLEKNWLKFFSSISVQLPVSPYYLNPFCVKKFMARELHGGKTDILSANAIALYLKRGLRLSDKPYVEENTSDRLRFNLIRSFSKHCALMTNQLHILLIQVQPYLVQYCRSGFPDWILNLLVKYPTAKKSATAKPEKIAKIPYITLLKAQDLIAQAKESVGALTDSNTARTIELLASELLRNQKLVEDEKKSLIKSNSNNMDKEILTSIPGFGEWTAIGFLTLIGDISKFQKASSLIAYIGSEPVVEISGDLKINRGISHHGSKELRALLYPATLAAISFNKVIRNFYDRLREKGKSHLVAMMACMNKLIRIAYSCLKTRMKFDASYGEKRRQEIETRAQLERKQNVRKRYKVSISLESPISARKAKERREMRKATENITRSHASKIYGVKHHKTQCLPHPSL

SEQ ID NO: 96868 - protein, 330 aa, unidentified
MPLPGQSNYRADLGVIDRIVYQKRLPNELAQIAAALEPYQHDLAGVVVESTYNWYWLVDGLMDAGYRVHLAHPAAIRKYERLKHSGDFADAAYLAQRLGLLPEGYVYPREERGARDLARKRMQLVRYRTAQILSIEGILMRQTGSTMKGEAVKRLTVAQVEQFALAPDVALAVEANRAVSEALGQQIEALEKRLRQRVSLRPEYRLLITVPGIGDTLATTIMLETGSISRFAQVGNFSSYCRCVDSLRENNGRKKGEGNTRNGNKYLAWAFVEAANFAMRYCPQARSFYDRKKSRTNRVLAIKALAHKLARACYHVLRDQKPFDVHLCFG

SEQ ID NO: 96869 - protein, 350 aa, unidentified
MSSRKTGQIAVIGIDIGKNSFHIVGLDKRGAIILRQKWSRSQVEARFANMPPCVIGMEACVGAHHLSRKLNRLGHDARLMPAKYVRAYSKGQKNDFRDAEAIAEAVQRPTMKFVATKTSEQLDLQALHRVRERLVSQRTGIINQIRAFLLERGIAVRQGQHFLRAELPRILGAPSAHLSPRMAQTIEDLAGDWRRLDGRIDGLSGDIEALARRDAGCARLMSVPGIGPIISSAMVAAIGAGEVFTKGRDFAAWLGLVPKQISTGDRTILGKISKRGNRYLRVLFVQAAWVVLVKPKIWERHGLKPWIEAAKKRLHHNVLAIALANKLARIAWSVLARDRNFEARSIAVNA

SEQ ID NO: 96870 - protein, 532 aa, unidentified
MARSIKHNSRNRAKSTRRKNGRKRQSVQKPNGTISGRVRKAGADKFAIVCIDPAKHRSEWMMADYFGNVLLEPSTLEHEVPHFAIAVRQIREAQKEHGIADLIVTVERTGNYHVAPQRAFGKAGFETRIIHPFATKQYRLPADPGNKTDPNDLAAQHRAAVAGFGLLEPELHEPYRQLRLRVRHRRDLVEKSSAIACQIREHLHLAMPGYAGLFDKLFGHRAALAVARLCATPQAVLELGAAGLDTRLRQQAIRFQTRTLEKILAWARQAAGQAPHPDAPLHHAIGTDLCDLYQNLRQQIHPLERDLAGGLVQTPYVRLLAIPGINVVSAADFAGEMGPIGHYANANAITGRSGLFPSRYQSDQTDHADGAILRCANRRLRAAIMRIASNLARFNTHFRGRAAYHRAKGADERALRVKIAKSFTRLGFACVAGDQPLRHPCCADADSILEKLRAFHHEHDTRLDRVLSELETAVGHLPFKTRNHEAKIVTEVLNQQTRRRRGPVQVGKLLPAVLARLGVAEQSKPAGTLVPD

SEQ ID NO: 96871 - protein, 373 aa, unidentified
MNYSTIYVGMDVHKETFSLCCYTNEKEQAEYPQKVDGHYSKVINYIEAMRFHYGDDALFICGYEAGYLGFTLYHQLTDHNVKCVILAPTTMLQQKGRKKVKTDKRDAALIARCLAHHDYSPVHVPTEQDEQTKEYIRMRDDHKLALKKVKQQILSFCLRHNYRFDGTKNHWTQAHLKWLKALKPEGLYAEILQEYLLTYDNLTDKLERFDKRIEELASNETYQENARKLSCFIGVKTVTALAVLTEVGDFKRFASAQHFASYIGLIPGEDSSGGDQNRLGITKAGNRHVRSLLVEAAQSYSRGQVGFKSKALKARQNGNPPEVIAYADKANERLRRKYYRMVLKNNKKTNVAKTAVARELACFMWGMVTGNVA

SEQ ID NO: 96872 - protein, 428 aa, unidentified
MSYRIAGIDVHKKMLAVVVSDVEIESEYQFERRMFSSNPEQLRSLAAWLVEQKAEEIVMESTAQYWKPVWGTLERYWKPLCEKREGARRRSGTLHLAQALSNRGRRGRKRDFVDAERLVKRLVARELTLSFVPDAEQRLWRTVTRKKYQLRRDLVRIHNQLEALLEEAHIKLSSLVSDLLGVSARRMLKALADGETNPAALAALAHQRLRATPEQLCDALGACTELKPVYRRLLKMTLEHLQILEQQIGQLDQELATLLHPHQDAVERLAEVPGFAVDSAQQIIAEVGPAAATFPSEKCLSSWVGACPGEEESAGVNYSHRSPKGNRHMRRLLNQTANAAVKAKGSIFEIIYRRCVPRLGHNQAIGVIAHRQCRLIWLILHQGTRYEERGPAVTKRSRYQRTWRMIRQLRNLGYRIELPNPQASQAQA

SEQ ID NO: 96873 - protein, 342 aa, unidentified
MVYVGCDQHKLFCQLAVLDEEGNMIDQQKLYHDDREALKRYFSALPQGSEMAIEASGFESWLADFVQDLGLKVHLSNPLKTRAIAEAKVKTDKVDAKILAQLLYADLLPHAYLAPPEIRRARYFLRFRLCLNRYRASLKNRIHSLLHFLGIRPPAVTDLFGVRGRQFLDSLKLGSGYQEALNGYLGLLDSTEAKINCLKKRLAANVKENPEAKLLESIPGVGVLLSQVIMAEIGQFSRFASADKLCSYAGLVPSIHQSGQKLYHGPCQRQGNKFLRWAMVEAAQVASRKDPLLRSFYDRIKRKKGPQKATVAVARKLLVIVFQILTKKELYQYHTLARQARL

SEQ ID NO: 96874 - protein, 461 aa, unidentified
MQERRKDETSESSRRQLQGLPVIRRNVAGIDLGSERHWVCAPTPDGGGREIADFGATTPELNRMAEWLKARQVESVAMESTGVYWIAPHEVLEAQGLEVLLVDTRQLARVPGRDKKTDPTDCEWIQRLHSCGLLRGSFRPAEAICMLRTLVRDKANLVAESGDWVRRMQKSLDQMNVRVHRAVSAIDGATGMAILRAIAAGERDAHKLAKLRDPHCHKSEEEIAEQLSGHWREDHLFSLRQALKMYDAVQERIAAYEQEILRRLGEMEHEQSRGQTAPPIHNANKARLIQSRGQEPKRQALYRMSGVDVTQIDAIGVETVEVVVSEYGPDLSRFPTEKQFVSHATLAPHVAKSGGKPVKRKKRNSASTRVAAALRMAALSMRHSQTALGAYYRSIANRIGGDIAVFATARKLATLIYRLLRWGQPYVDEGVEAYESRYRQQRFKRLAAKAKELGYQLVVTS

SEQ ID NO: 96875 - protein, 339 aa, unidentified
MKYTPVGVDIAKHVIQVHFIDEHTGEVIDKQLRRQDFLMFFCNREPCLIGIEACGGSQHWARELTKLGHKVRLLQASFVKAFVTGNKNDVMDARAIWMAVQQPCKEIAVKTEEQQSFLVLHRTRMQLVKFRTAQINSLHGMLLEFGETIHKGRAAMDREFPEALERLKERLPPYVISVLDNQFNKLNELDLQIDDIEKQLTSVARQNETCRRLLDIPGVGPLIATAAVAIMGEASAFKSGREFAAYVGLVPRQTGSGGKIRLPGISKRGDKYLRTLFIHGARAAALLTKEPGPWITELKKRRPASVAIVAMANKLARTVWAIAAHGRKYNKNHVSIRPY

SEQ ID NO: 96876 - protein, 343 aa, unidentified
MQTITTIGLDIAKSVFQVHGVDAAGQVVIRRQLKRRYVLAFFQKLPPCLIGIEACASSHYWSRELQALGHTVRLMPPAYVKPYVKRQKNDATDAEAICEAVARANMRFVPTKTPEQQSCLMLHRTRHLFIRQQTAVINSIRAHLAEFGIVAPVGRKGVTELLHIVADPSDKRVPEVARACLVALGNQLLSLKEQIVEFDRMIMVWHRSNETSKRLHYIPGVGPMLATALVASVAHPRTFRSGRNFSAWIGLVPKQHSSGGKDRLGSISKQGDRYLRSLFVAGALAVIRYAKIHGTKHRPWLTALLTRRPTKVAAIALANKLARMAWAMMARGERYRQPVALAA

SEQ ID NO: 96877 - protein, 407 aa, unidentified
MNAVGIDVSKGKSMVAALRPMGEVALLPQEFLHTGVGLEQMAYAILALGEDTRVVMEATGRYHEPVAAALHEYGIYVCVLNPLYIKQSGGGSIRKVKTDKADAMKIAKYGLDNWVDLREYTPMDTVRQQLKLCSRQYNLYMKTVVSLQNNLISLTDKTFPGVNVLFSSPERADGHQKWVDFVMTFWHCDCICRVSEKAFTERYQKWCKRKGYHFSVKKALEVYAGSCGHFTTLPKNDNTKLLIISAAQQLLAGKMTLAALRAEMTRLARQLPEYDTVRAMYGVGDKTAPALMAEIGDVRRFPRRSSIVGFAGIDPGVDESGKHSAKSVPTTKRGSPHLRKTLYQIVCTYLKKSPADEPVYQFLDKKRSEGKPYFVYMTAAQNKFLRIYYARVKECLEAFDAQTTEQK

SEQ ID NO: 96878 - protein, 415 aa, unidentified
MEVVYPCCCGLDVHKKSITACVLWAEAKGKSRKEKKRFGTFTHDLLQLADWLEQCGVTHVAMESTGVYWKPVWNILAERFEVLLVNAQHIKAVPGRKTDQKDSEWIADLLQHGLLRGSFVPPQPTRELRDLTRYRVSLVQEINRIANRIQKVLEDANIKLASVATDALGASGRAILEAMLAGEQDIARLAEMAQGKLRNKIPELQLALEGRMTEHHRFLLRQLFEHLRFTESKRSEIEQEIDKRMLPFEDKVTRLCTIPGVDRVTAWGMLAEIGLDMNQFPSSGHLASWACLCPGNFESAGKRLSGKMRKGNVSLRRCLSQAAWAISMMKNNYLSALYRRIAARRGAKRAVMAVAHALLVIAYHMLKRKEDYRELGADHFDRIDANPPILGQATGTSGPQSDLGAACSDRLKVFS

SEQ ID NO: 96879 - protein, 392 aa, unidentified
MLFVGIDIGKNNHVASMMDENGKVVFKAFSSPNTTDGGNALFSKLSSYSSNPSDFEIGMEATGHYWLSVYSFLFEKGFLLHVINPIQTDGWRKGTEIRKRKNDTIDSVLIADLIRYGQFIETRLADEDLFSLRTLTRFRTYLVESISDLKRKVVCVLDQVFPEYQSIFSNIFGKTSKEILLQFSSPIDFENVSSETLAELLAQLSRQKVGAQKAEQLKAAASSSFGITFAKNSFTFQLKALIEQISFIENQVKETEAEISSIMEKLGSPITTITGIGNVTGAAIISEIGDISKFGNPRKLVAFAGIDASVTQSGEFEATHNVMSKRGSPYLRKAIFQAALIASFKDPVLSDYYQKKRSEGKHHLTCVGAVARKMCNIIYAVLKNNEPYVPKA

SEQ ID NO: 96880 - protein, 338 aa, unidentified
MAPYYVGLDVHSRQSVFVIEDAAGQVVGQGEVPTTPEGLQQLQTQHRLPAGTPVALETGTVAFFVARHLRRLGLEPVVVDAQEVRLKAHRPTQKSDRRDAYELCEGLRRDIYRILVHVPPPAVSALRDTLSRRRHFVRLQTAEINAVKRLLRAAGLGHLSRALRTEVGWGKLLAAVAPQPDLRAFVEHHRAAWRCAAEQVAALEHALGAQQRAFARDLERLETAPGVGPIVAATTLAVFSEVTRFPSAKHAASYAGLVPSTYQSGTRDAHGRITKRGSAELRAMLCEAAQHALARILFAMLRDGTDFDVHRLGIAVGPFTRTTVDAYRLKRAPRAHRA

SEQ ID NO: 96881 - protein, 399 aa, unidentified
MGIDVAKRQHVAKILFPDGSESPPFSFPNHRRGFETFLAWLFSQLEKASCDSLLVGLESTGHYWEPLAFFLEEIPGIRVVQVSPKHVKKTKEVYDNSPGKTDRKDAGVIAMLIQMGRFQKLVLPKGPFAELRGYARLRERKIVELGVQRNLLHSLVDWVFPEYGSLFPKLEGKTSLTILKHYTTPEQILRAGFNRLSKAIHQASHGRLSEACAERLMEAASATIGLQEGIEAAAFAIRNIVASVERIQEEIATIEKELARVLDQIPYASQLFSIPGVGKITVAVILGEAGDLRRYHKAQELIKLAGLNLFEISSGSHQGRRHISKRGRPLLRKCLFFAALRTVKTGGAFREIYGRWTQRNQMQKTKALVGISRKLLSLLFALARDNAAYHSPRVELRAA

SEQ ID NO: 96882 - protein, 353 aa, unidentified
MRTHYVGMDVHQASTSIAVMNGQGKLISESLIETKAQSLIDFLKGLSGEVHATFEEGTQAAWLYDLIHPHVTELVVCNPHHNHLLKSGNKSDRVDARKLAQLLRAGMLRPVYHGEYGTRTLKELVRSYECLVSDTTRVKNRIKAIYRGRGVRTSGRAVYQASQREVWLQKIESAGLRTRAEFLFRQLEQLQLLRREAKRAMLQESRRHAASQLLLQIPELGPIRIAQIIASVGSPHRFRTKRQFWSYIGLAVVTRSSSDYRLVDNRMQKHGRAAQNRGLITNYNHRLKSVFKAAALGAAHSDAYREYYDRLVAAGSSAELARLTLARKLAATALSIWKSGAGFTIDKVMKQAA

SEQ ID NO: 96883 - protein, 312 aa, unidentified
MADIICGVDVASENLDARIGRDGEWRRFATTAQGIEQLVAFCKAQAVDLVVMEATGGYERRPFAMLWAAGIPAAIVNPRSVRRFAEGMDVFEKTDRIDCGIIAWYAQTKHIKPTPPASQTQQRLAALVVRLRQLTELKVAQTNQRRLVSDAEVLDTFTKVLACITAQIKATEASIAKLIDADPLWSALDQAFRSIKGVAERTVARLMAELPEIGTASNKAVSRLAGVAPLANDSGKKNGRRSIRGGREGVRSILFVVAGVVSRHDPDFKAFHQRLADAGKPRKVIRIAVAHKLLVRLNAKAREVRNELAVTA

SEQ ID NO: 96884 - protein, 364 aa, unidentified
MYDSTTTVTVGLDVHARSIRLAAVRADELLEERTLPYDEQAVEQVLRRWPVVRCCYEAGPTGFGLQRFLVERGIDCSVVAPGLVPQRPGDRVKTDPRDARKLARLLAGGLLEPIHVPSHELEAARDLVRGREDARLDRMRDRHRLSKFCLRQGRVLPTSSWTVMRRKWLGEQRFEFAAQQITFDSYVHTVDLVDARIEQLERAIRETAEQEPWRGLVARLRCLRGIETLTALALVTEIGDFARFTTAEEFMAFVGLVPSEHASGEKRRQGSITKVGNSHVRRLLVESAWHARRRPKVGYELARRQRGQDAVVVERTWRCQQRLYQRWQRMAGRGKPQQKIVVACARELAGFVWAIATEQPLRNT

SEQ ID NO: 96885 - protein, 394 aa, unidentified
MFYLGIDIGKRTHVASVMNDEGKVLLKGFSFVNSLDGTHALLERLTSFSDSTEDFLVGMEATGHYWLALFSFLDEQQFLVHVINPIQTDGWRKGTEIRKRKNDSIDSVLIADLIRYGSFNETALADETMFSLRQLTRYRSYLVGTAGDFKRKVIAILDQIFPEYEKVFSKVGIFGKASKAVLSEFSSPDEFNQVSAETLAETLRVASRSRVGQSKAEALKTAAAHSFGVRFAQDAFVFQLRSMIDQLSFLEEQIKRTEEEIAQLMASLHSVIETVPGIGTVLGATILGEIGDIQKFSTPKKLVAYAGIDASVSKSGEYEATHNVMSKRGSPYLRKALFQAALIASRCDPVFKAFYDKKRAEGKHHLTAIGAVSRKLCSIIHAILTKNEPYEIRQ

SEQ ID NO: 96886 - protein, 351 aa, unidentified
MPRKSSVRIVTTIGIDMGKTTLHMVGLDSCGAIVLREKVSRGRIASRLANQPSCLIGIEAGMATHYVARELAALGHDVKQVPPTYAKPFRQGHKNDFRDALAVAEAVQRPTTRFVPPKSNEQLDLQALHRVRSRLVSQRTAVINQIRGFLLERGIIVRQGLRFLRQLLPDILAKRTDVLSPRMARIVSDLAGDWRQLDDRIETVTDEIETLAKNDDSCRRVMTVPGIGPIISSAMVAAIGNGSAFSRGRDYSAWLGLVPKQMSTGDRTILGRISKRGNSYLRMLFIQAARVILVRPANWPKHGFGAWLVRAIQRLHPNVLAAALANKLARIAWTVLAQERSYEARVTTAEA

SEQ ID NO: 96887 - protein, 405 aa, unidentified
MEVVYERCCGIDVHKKSIVACLLTGKQKETRTFGTMTADIRSMSEWLSGNKCEAIGMESTGVYWKPIYNVLEVFGWDLVVANAHHIKNVPGRKTDVKDAEWIASLLKHGLLNPSFIPDKDQRETREIARYRKSLVEERSREINRLEKVLEGANIKLSSVVSSLTGLSSRNILHKLVDDSLDKESIAGLLHGQLRGKTDELLKACEGVLSRTQKVLVKAIISHIDDMTRRISDMDNFLNGKLEEYDDALKRLQEMPGIGERSAQVIIAELGVDMGRFPNSKHLAKWVGLCPGNNESAGRKKSGKTGQGNKTLKTTLIQSAQTASRKKDSFFKAQYDRLVVRRGANRAKVAVAHSMLIAIYHMLKNGTPFMDLGESYYNQFNPDKKINYHLKKLDQLGWTPPVGVQA

SEQ ID NO: 96888 - protein, 379 aa, unidentified
MTLDKYFRQCVGIDVSKDKFTACLYMYDMASDAGCCTESIDFPNNRTGFNQMVKWSRKESQKGFPLVYLMEPTGSYYEPLAYHLHKIGQTLYVVLPNKARKFCEYEGIKTKTDAMDARCLALMGCKNRKLRPWEPPLPIYRELRQLTRLRADLVKMQTQMLNHIESIDHMEDVAPEVRKSYEKLLDTIEKQLEKNEKDIAAKLAQDKELETKVKRIATAKGIRVGTVTCIVAETQGFHLISNRKQLTSFAGLDVKARQSGKDDPRHHITKKGNAHIRAALYMPALSAAHCNRQMAQAYGRICAKHPDVKMIGVTAIMRKMLLLVYSLWKSGEEYDETRDNTHTPRKKEPQPTNSPEDCLKPNADPPDWNAADKEGNPPF

SEQ ID NO: 96889 - protein, 410 aa, unidentified
MKVLHRRCAGLDVHKAEVVACARVLAGRKVVHEVRRFGTTTRELMALAAWLKSLKVTHVAMEATGVYWKPVWHILEADFTLILANAQHVRNVPGRKSDVNDATWIADLLAHGLIASSFVPPQPIRELRDLTRTRRQAVGEAVRHQHRIEKILQDANIKLSSVLSDPMGVSGRRMLAAMAAGETDAGKIAELGSPRLECGRGALIEALSGRVSEHHRYLIGWHLRLLDEIEARIVELDQRIEAQIAPFRAAIERLTGIPGIKQVAASAIIAEIGADMSIFPTAGHLLSWARIVPRLDESAGKKRSRRVKKGGAWLKPVLVQCARAAARKRDSYYGAQYRRLKARIGDQKAIIAVAASILTAIYHMLRDGTEHADLGAAYLSRREGDSKAIAHQLARRIRALGYQVDLREAA

SEQ ID NO: 96890 - protein, 328 aa, unidentified
MKAFIGIDVGKEKLDVSWLRDVVKNKQKTKVLKNTKQGYQELVDWVLKNTGLEAQNIVITTEPTGIYSEPLMYFLYAQGFTLLHVNPGKAKQYAKSLGLVHKTDKSDATMLARYGHDQQHSLSSWQPEPVEARELKAMMRRLEALEQDLQREENRYEAVGFSGASARVAQSLKDMIAVLKAEIDKLKNEIDEHIDRHPQLKKNRQLLESINGVGEVTSRIMVCLLACKRFKSAKQLASYLGLIPKHNESGKRAGKTTLSKEGPGYIRAKLYMAAIVAGQHNTDIKAQKTRLLKQGKTKMQALGAAMRKLSQICFGVVKNQTEYQPQVS

SEQ ID NO: 96891 - protein, 339 aa, unidentified
MELKRISIDTSKHIFTIHGVDRQEHPVLRREIRRSQFESFFAKLEPTEVALEACAGSHHWGRLLSRLGHRVKLIPPQYVKPFVKRSKNDRNDAEAIGEAASRPAMRTVPLKTTLEQAATIIVKHREMLVAQRTQAINALRGHAAEFGIIAAKGCPNVTALLSVLASDEAIPVSARAMFEAIGQHVADLDTKIEELDRRLLDQHKVNPVSRLLAAIPGVGPITAITMALTVNPGNFESGRHLAAWLGLTPREHSTAGKHRPGKISKAGNERLRQLLVVGAMSVIRVAKPGRQSASGWLLQLLERKPRKLAAVALANKMARIIWAMMARGEAYRRQPVTTA

SEQ ID NO: 96892 - protein, 405 aa, unidentified
MNAVGIDVSKGKSMVAIMRPMGEIARRPFEVTHHHDSLYGLARQLLELGGDTRVVMEASGRYHEPVAAALGHYGLFVSVLNPIVIKQSGAGSVRKVKSDKKDALKIAKYGIDNWPALREHTPMDTIRQQLKLFSRQYNLYMKTVISLQNNLISLLDKTFPGADKFFDSPAREDGHQKWVDFALDFWHCEVIADLGEDVFVERYRKWCADKGYNFSRSKAAMVYDASFNNCPTLPKSPETEMLVASAVNGLLSVMGQRAVIKAEVIRIARQLPEYGCVAAMYGVGEITAAQLIAELGDIRKFANRRSIVAFAGIDPEVNESGSYIRESNPSSKRGSPHLRKTLFQVVSTYLKKSPPDEPVYLFLDKKRSEGKPFYVYMTAAANKFLRVYYARVKEALNAADGLTIS

SEQ ID NO: 96893 - protein, 359 aa, unidentified
MQTQRKELNFEGQSIFVGIDVHLKSWTVSIFTENLLHKTFSQPPKAELLADYLKLNFPNASYFSTYEAGFCGLWAHFKLKELGIQNIVVNPVDVPSTQKDQLRKTDAIDSNKLGRSLRKEELIGIYIPQPETLEDRTLIRVRFSIVKDMVRLKQRIKSLLYLYGIDYPDEFQNTNTHWSKRFINWLKTVELQYSTGTDALNLLIKEAEQQRLILLEATQKIRTLSKTERYKKNIELITSVPGIGLITGMMLLAEIENIKRFESSDKLAGLIGIVPDCHSSGPQEKKGEMTSRGQYFMRKGIIECSWVAASKDPALSRVYNEYCKRMEPNKAITRIARKLTNRIFSVLKNEKKYEIGIVK

SEQ ID NO: 96894 - protein, 346 aa, unidentified
MKTSQKILKITFGIDIDADNFVVSRGIFYDNMEREANNVKKFSNNQGGFNKLLAYARKLQSKINPNGSIQTLYVMESSGVYGENLAYFLTEKGLNVHVALANKVKSFKKTLQFKSKTDDIDSLAISLYGLEKQLGKWKTPYPEMKKLKELSRELSSVKEMLVSLKNQLHARRSAHKINSGSIKRTTEQIKFFNKQIKSIEKDIDATLQENLEFKAKIDKITKVKGIGSQTVVTVLSETNKFEGITNRNQLTSFVGLDVVENQSGKKTGKTRISKKGNSYIRKALYMPAISCKKHDRKMKHLYERVCERHGWKIKKIGIVAVMRKILHLIYALWKNDTEYNPNYGMA

SEQ ID NO: 96895 - protein, 370 aa, unidentified
MSIKRILVNTIDTDLEYEVIGIDLAKNCVSAILLTTDGEIFGIDRLDYQELEKSAQELSPTIFAMEPCTEMNYMVQKLEDWGHHCIVISGKNVKDYVESHFSNQKTDLNDAQALAFLTKDTQLRTVKAKDPEQLKYASLTTLREQYVKQYRQTMVSLKGICQVWGLSISKGISGKARLKDMIENHAAFPAELRTALVGMVAHAQAVQKDLKSVTKILEELAKKDKACQLIQTVPGLGTICSCRLRATVGDIQRFKHPKDFPAYYGLVPRSMATGHNEKKGKITHRGDKTMRSLMVQGAGIVINQATKGNLHSKQLTKWILKKQKEKMPWGKLVCAVAAKLLRIVRAILISGKPYTPKIAGVAKCSLPKAS

SEQ ID NO: 96896 - protein, 388 aa, unidentified
MIYVGIDIAKLNHFASAISSDGEELIKPFKFTNDNDGFQLLISKLNPLDKDSLIIGLESTAHYGDNLVRYLVAKNYKVCVLNPIKTSTMRKNNIRKTKTDKVDTYIICKTLMMQESLRFVAFYDLDLMDLKALGRFRQKTIKQRTRLKIQLTSYVDEIFPELQYFFKSGLHQKSVYALLKEAPTPEAIASMHMTHLAHLLKVNSHGRFDKEMAQQLRVLAQKSVGASDSSLSIQVTHTIQQIELLDSQLERVEAEMTEIMKFNDSVIMTIPGIGYINGGMILGEIGDIHRFSSPNKLLAYAGLDPSVYQSGNFQAKKTRMSKRGSKVLRYALVNAAHNVVKNNTTFKAYYDAKMAEGRTHYNALGHCAGKLVRIIWKMMTDNLEFNLD

SEQ ID NO: 96897 - protein, 341 aa, unidentified
MQITTIGLDIAKNVFQIHGIDAAEKVVVRKQLRRGQVMKFFAALSPCLVGMEACATAHYWARELTKLGHEVRLMPARDVKAYVKRNKNDAADAAAICEAVRRPTMRFVGVKSAEQQGRLMQHRTRDLLLRQRTQLINALRGHMGELGMVAAQGREGLKTLLAIVAKGADEHLPVDARASLIVLATQLEALQTMIRAIEKRIVAQHRASEASKRLATIPGIGVLGASAITATVTDPSAFRSGRDFAAWIGLVARQDSTGGKQKLGPISKQGDRYLRRLLVIGAHSVLRRAKQSPQNYPWLTQLLARRPFKVVAVALANKMARVAWALLARGSTYRVPQLAAA

SEQ ID NO: 96898 - protein, 339 aa, unidentified
MQVSTLGIDLAKNVFVLHGVNHTGQTVLKKKLSRAKFAEFVIRLEPCLIGMEACSSSHHFARMFIRHGHQVRLMPPQYVKPYVKTNKTDATDAEAICEAVTRPNMRFVQVKTVDQQAVLALHTERDIIIRERVACTNSLRAMLSEFGFVMATGRKALKQGVPEILEDGENELSPFVRASTLRQMAHIDALDDHLELIEQQLKSWAETQAACKRMTKVPGVGLLTATYLVASVGDGKQFSCAKQFSAWMGLTPREHSSGGKQHLGRISKRGDGYFRYLLVHGARAVASVIERHREDMRWLDGLLKRKNYNVAVVAQASKTARILWSMLVHETDYRPPAVA

SEQ ID NO: 96899 - protein, 338 aa, unidentified
MMKITTIGLDLAKNVFHVVCCEQHGKIIKRKMLRRSGLLTWFANLPACLIGMESCASAHHWARALQAQGHRVKLIPAQHVKPFVRGNKNDYNDALAIAEAVTRPEMRFVSIKTPQQQDIQALHRLRERRLRDRTALCNQLRGLIGEYGIVFSRGVNVLRKRIPEILEDSENGLSDLFRSLLSQGYQQLTELDAHIDAYTEALDAHSKRDDACVRLQTIPGYGPIISSAFYSAVGNGEAYRRGRDVSASLGLVPRQHSSGDKQVLLGISKRGDRYLRSLLIHGARSVVIQAANKEDALSRWINRTRAARGFNKAVVALANKLARIGWAVLANSTVYQAR

SEQ ID NO: 96900 - protein, 451 aa, unidentified
MSRKRKSNPKTGVSLLSCLNLNAAGVDIGATEIYVAVPGDRDPQPVRCFPTFTEDLHAAAAWLKACHIESVAMESTGVYWIPLFQILEARGFKVFLVNAHHVKNVPGRKSDVCDCQWLQYLHSVGLVRGSFRPEQAVCSVRSILRHRDRLVQMASSHVQHMQKALDQMNLQLHHVISDITGTTGIAILEAILAGERNPHTLAALRDRRIKASADTIAKSLVGDYRREHLFTLRQSLAAFRHYQESIAACDREIAQSVEQFESKLDPPPASPSPSNAGSKPKASEPSFDLQTHLHRIFGVDLTQVPGINVLTAQTLLAEIGPDFSRFPSGPEFASWLGLCSDNRVSGGKVLSVKTRQVKNRAATALRMAALSVHRSQSFLGHFYRRMRAKLGAPKAITATAHKLARILYHMVTTGQAYDETICAQNEVQNRQRMEARLRKQARELGLQLVAL

SEQ ID NO: 96901 - protein, 345 aa, unidentified
MTTMNYIGLDVHKKTISYCVKDASGRIQQEGKVGSTRRELDCWMKTLPQPWTVAMEATIFSGWIYDHLLPHATQIKVAHPLMLRAIAAAKKKNDQIDASKLADCLRCDFLPECHMMPRAIRDRRRTLRYRHLLVRQMVQMKNRVSGLLMETGVEYNKQRLHKVSYFRELLSANEEVHPSIRPLLKLSRETIERCQKTEYALVSSLKRDPVLADRIKRLRTVPGVGPITALTWALEIGDVSRFGSIKKAISYCGLCGDERSSADKAMRMPLSKQRNKHIQRALVEAAKLAPRQNHEMAVIYDQERQKGNSNRATLAVARKMVAYLLAVDRQQRDFVPAEERRTTAA

SEQ ID NO: 96902 - protein, 343 aa, unidentified
MKLSRIGVDLAKNVYQLHGVDRHGKTVWKRRLRRGQWLQALLDKAEPGCEIGMEACTGAHHWARELQSRGYTVRLIAPQFVKPYVKSNKNDANDAEAICEAMSRPNMRFVTVKSVEQQDIQATHRVRTEIKDQRNAKADQIRGLVAEYGLVAPQTLLALRRAIPCWLEDADNGLTDHFRKLLHGLWGDLVALDDRMTELDKQIKKIADSNEVTQRLQQLRGVGPLVATALVATVGTGEQYRKGRQMAAALGLTPRQCSSGDKQRLLGISKRGDVYLRTMLIHGARAVVSQAKHRDDRLSRWVTSIAKRSHPNVAAVALANKTARMAWAMLRDDSNYDPDFATS

SEQ ID NO: 96903 - protein, 415 aa, unidentified
MQTELSNYTAIIGIDWADKKHDVCIHVTATGKQELSQIPHQSEKIDEWARSLHWQYGGPMAVAMELSKGPIVAALQKYDFFVLYPVNPSSLASYRKVFTPSGAKDDPTDAAFILNLLLRHPEEFHPLKPQSVEMRALMTLTEQRRRLMNDRVRLTNRLRNALKQYYPQALEWFDHIDTKLFCDFIRRWPTVVQARRARKATLETFFRAHNMNRKPLLEKRITAIKSAVPLTTDDGVVIPYRLLALTLAEQLETMLECLGRFDEEIATLAPQHPDHELFNGLPGAGPVYTPRLMAAFGEQRERFNNAAEVQKYGGIAPVTERSGQQLWIHWRWQAPTFLRQTFVEWAAQTINKSYWAGLYYYQQRAKGCSYQAAVRALAFKWIRILYRCWQTRTPYDEARYLKALQERGSPLLKTA

SEQ ID NO: 96904 - protein, 363 aa, unidentified
MEYIAFDAHKHYTLASVVRPNGDLVREERIEHDRGSLREFLERCERGSPVAVETIGNWYWIVDEIEAAGCVPKLVHARKAKLMMGEINKTDRLDARGLNRLQRNGTLPTVWIPPGELRDQRDLPRTRMVLVRQRTQLKNRIHATLAKYALHDLEVSDFFGVRGRALLRQRFDLLPPHTAYASQQLLEQVEELDRRVREFEQRIQAVFKPTPAIQLLLTLPGVGLTLGVVIALEVGDVARFASAEKLAAYAGATPRVHASGGKTRFGPSRPDVNRYLKWAFVEAANAICIGRGRAPHCHVSRLYERIARRKGHAKAIGAVARHLAEATFWILRKHEPYREPKASAVSPTGDKRGWPLSSRKLDR

SEQ ID NO: 96905 - protein, 418 aa, unidentified
MKEGYRRCCGMDVHKDSIVICVLPAVGEAGKAIRKTYGSFRNDLIRLRVWLRQLRVNEIAMESTGVYWRPLWNVLEDQGFRLLLVNPAQVKALQGRKSDGRDAQRIAEFLQDGRLDASFVPPPEIRQLRVLLRHRIALLEQRNELHNQIRDLFETASLKLSSVVTDLMGVTGRGIIEALIRGEDSPEILSWKVRGRLRKKEKLVKESLKGYFSEFHRSMLESLYRHHQFLTAEIKLFEQRVAQQMIPYAADIERLVTIPGVDQLVAWHLIAELGADVTVFPDADHCASWAGLVPGENESAGQQKSTRCRKGNRTLRRVLTQAAWAASHCKQGYLRAFFHRVKARRGWAKAIVATAHKILLIAYHLLRHQQPYRDPGDDYFDRLNPARTAKRLIHRLEALGIQVQIPATPYIALKDLSG

SEQ ID NO: 96906 - protein, 465 aa, unidentified
MELTLGIDVACRAAHQASLARPDGTFVWTGRRFFTRPVDLEKLWAACGLTDEDTVRIVMEPTRNAWVVLASWFRHRGARVSMVPTTQSADLRAYYSKHTKNDHLDSKMLARLPLLHPEGLRDHTGEGPAEPLRRIVKIRASIIKRRTAVFQRLDAQLELLGPAWYDALGSRYGKATLALLARYADPNTVIRLGHARLTRLLIRYSRGSWREPQATLILAAAQESLQLWGAGTAARIDFAELAADIAIEAEQAQALTEQIDDLDERVANLYAEADPHGIIASAPGVGPVIAGIIAGRLGNPHRFNSLAAIRAYSGLIPKLNQSGQSHYQHGLTKAGDPLLREALFTAADHARKIDPQLAAKYKRLMQTERHHDSATCHIATMLLTRIATCWRTGQSYEIRDTDGRPIDADEGRRLVIAHHRIDRQTRINAANTRQSQRIKGRTGRGQQESPSAPNHRPVATSLEPV

SEQ ID NO: 96907 - protein, 336 aa, unidentified
MNQITTLAIDLAKNVFQLHGVDARGVAVLRRQLRRAQLLSFIAQLSPCLVAMEACGGAHHWGREIARLGHRVKLIPPQYVKPFVKGNKTDRNDAEAICEAALRPRMPEVAVKSVEQQGLLAVHRMRQLLDKQRKQLGNQLRGLLLELGVAIPCGVAALRRAIPEIIEQMTPLLRPSLRQAWERLLELEDAYATHTKRIEQYAKDNALCRRLMQERGVGPMIASAYIATVGDPARFRNGRQVSASLGIVPRQHSTGGKPLLLGISKRGDGYLRMLLIHGARAVMSHAPGKEDALSRWLQRLAHRRGVNRASVALANKTARRLWAIWRAEGAALAMAG

SEQ ID NO: 96908 - protein, 318 aa, unidentified
MDQSLSPFVGIDVSKDRLDVAVLPSEESWSTANQDEDIQSLVKRIRSLKPELIVLEATARLEMPLVGALAARGLPVAVVNPRQVREFARASGILAKTDRIDAQVLARFGEKMRPEVRPLKDKETQELTALMTRRRQLVAMLVAEKSRLAAAPQAVRKDIKTHIAWLERKLSKMNDHLADKIKNSPVWHEKDALLQSVPGVGPVLSTSLMADLPELGTLNRRQIAALVGVAPFNRDSGAFRGKRCVWGGRGRLRSTLYMATLAATRSNPAIRTFYHRLCEAGKPRKVALTACMRKLLTILNAILKSQTPWQAHYASSIT

SEQ ID NO: 96909 - protein, 399 aa, unidentified
MNVTHIGLDLAKNVFQVHGVDRDERVVAKRKLTRRQVHDYFEKLPSCRIGMEACAGAHYWAREFGRMGHEVKLIAPQFVKPYLKSQKNDANDAEAICEAVGRPNMRFVTAKPVAQQDMLAAHRIRSELVRQRTAKANQIRGLLAEYGVIVPVGINALRRVLPDIQEDAENGLSGLFRRLLEGLRADWVELELRVDQLDGEIEAAAKEDETARRLQTVPGIGPITATDLAASVGDGRQFRRGRDRAAWLGLTPGQHSSGGKERLLGMSKRGDSYLRTLLIHGARAVIQAAANKAGPRSRWITGVVARRHKNVAAVAFEAEKPISPRRADAHHGQEASPSSNRSDIRAQSHLGAGCVIRSWFPRVAELIPIAVARTAGSIHRFAECDALSTAAPGASALKK

SEQ ID NO: 96910 - protein, 471 aa, unidentified
MAADEGMADGAGVPGHGGEGAEVAEDSTQVVEYAAAIDVAKGSGMVCTRVSGSRPDRRRQAVWQAGATYREVIALMDHLRCQGIQRLVLESTSDYWRVWYYLAEAAGLEVWLVNARDVRHLPGRGKSDRLDCVWLCKLNERGMLRRSFVPPQPVRDLRALTRTRARLAQDQARHQARVEKILEDALLKISVVISDLFGASGRRFLDALAAGERAPAALAALGDPRLKATRKELEDALTGRFRDIHAFEISTHLRLIDAINEEIARLDEKIGQQLALIPGTAPACAACGLAGGGHAPGCADQDAEVLGLAERLDEITGVGAVNGAALIAELGTDPSQFPTPGHAAGWARLTPRSQQSGETAKPGRTGKGNRYIRGALGQAAMTAAKTDTRLGAMYRRIARKRGKQKAIVAVSRVICEIAWILICDPSARYAELGPDYYQPLSPARQTRAKIREIERLNPGKKVILADADTAA

SEQ ID NO: 96911 - protein, 425 aa, unidentified
MNYKQNEKINQVKESTLVVGIDIGSTTQYARAFDWRGIELGKVFPFSNSREGFESFKAWMQHLQDKYKKLDAIVGIEPTGHYWFDLGAYLEDEGILLVMVNPYAVKQTKELDDNSQSKNDRKDPKVIAKLVTEGRYSAPYTPDGVYADLRIMVANRKRLIREMTQIKNRFARWFAIYFPEYTDVFGDYEAQSSMLLLKKVCTPEAIVELGAEKINQIWRDAKLRAVGMKRATTLCETAKRSIGLKKGSSAARYEMKLLLEDYEYKKAQLDAVMEEIEKLCRKIPESEQMLAIKGIGVITVAGFLAEVGDVRRFESPRQIQKLAGLSLRENSSGKQKGQTTISKRGRSKLRAVLFNAAIPLIAKNPEFKSLHEYYTTRANNPLKKKQSVIAISCKLIRVFYAILANGVTYDAQKMLSDIHRQPQAA

SEQ ID NO: 96912 - protein, 355 aa, unidentified
MSQEKYIGMDVHQATISVAVMDAQGKLIMECLLETKATTILEFIQGLQGTLSLTFEEGTSAAWLHDLLKPHVDRLVVCDPRKAALLKDGNKSDRIDARKLAELLRTHQLKPVYHGEHGVRTLKELGRSYLTLTKDVTRVMNRIKALYRSWAIPCSGTTVYAPRHRAEWLAKIAEPGVRVRAERLHQQLDVLQPVRQAARHDLLSESHKHAAVKLLREIPSIGPIRAALLVALLQTPHRFRTKRQLWAYSGFAVETHDSGEYRCVRGKLQRNRERITVRGLNDNHNKDLKSLFKSAAISASTRPGPLHDFYAARIAKGMRPTMARLTLARKIVTITLTIWKKGVSFDPQQLHRQAA

SEQ ID NO: 96913 - protein, 349 aa, unidentified
MEQYAGIDVSWDSASVCIVDAQGKIVKEAKVASEPEGLIAWFAAHGTPMARIGLEAGPLSQGLFAGLKAAGLAVELLETRHVRAAFKAMPVQTDRKDARGIAQLMRLGWFRPVHGTSRPAQEVRALLTTRKLLQAKRHDGEMSLRGVLRGFGLKVGPTTPKTFEGRVREVVAQHDTLRTIADALLKARAVLEQEFKALEKRLSALARASAPTRRLMTTPGVGAIVALTFASAIDDPARFRSSRRVGAHFGLTPRKHQSGETDVTGRISRIGDHGVRVALYEAANVILTRAVRGSDLKSWALRVAQRAGMKKAKVALARKLAVVLHRMLADGTPFMASQGAGTRAVAVAV

SEQ ID NO: 96914 - protein, 354 aa, unidentified
MKRTTKYVALDVHQATTVASVREEGGRVLARSILPTEETALVEFFRGMRGAVHVVFEEGTQAQWLYDLLAPLVDRVVVCDLRGQARHGNKGDQVDADQLSELLRRGGLRAVYHGSAHRAALKEFTRTYRNLVEDSTRVMLRLKALFRARAIPTPGTKVYQTRERPRWLAQLADCGARFRAEVLCAELDVLRALRPKAKAAMVAEARRDAAWPVLRAIPFLGPVRVAQLLATMQTPWRFRTKRHLWAYAGLAVVTRSSADYTIIAGQPVRRHRAPLTRGLNRNHNHVLKDVFKGAATAATARPGPLQDFYHGLIARGMREELARVTLTRKLAALTLRLWKKGERYDPTKLTMQAR

SEQ ID NO: 96915 - protein, 368 aa, unidentified
MKQQTSVATETRNKVINKIDYSGKTIFVGIDTHEKDYQVAKVIRGICLGNHRMKASYKELVQHLRTHYPGASFRCVYESGAWGFTLQRRLQEAGIDCMVVHAADVSTTDKERRRKTDKVDALKLARDLESGLLEAIYVPDEEIQKDRNLIRFRKKLKGDLNRSKNRFKSLLKYQGIIIPPQFGKACWSLKFMKWAELEAKKDILLQETLLLMLEEVKQLRQLLLKTEKKLQELMKCKYQQKAQLLMSTPGIGRTLAMLFLLEVGDIRRFRGFDSLNDMIGFCPDTESSGDTERDRGITTRRHKQLRSGLLQAAWRAIRIDPALLEAYQLLTLRMIPHKAIIRIARKLLRRMRTVLLTGQPYQLGIIKG

SEQ ID NO: 96916 - protein, 461 aa, unidentified
MKNKSSSKAKKHSKQKVAIDQNWQLINPDAAGIDVGSREHWAAIPPSRGGQTVRCFGATTPELEALGNWLKEAKVSSVAMEATGVYWIAVFQVLERMGFKVLLVNSRQVKNVSGRKSDVLDCQWIQRLHTYGLLGGSFRPADPYCVVRSYLRYRDELVSARSRQIQHMQKALLQMNVQLSHVISDISGQSGLAIIGAIVAGERNPLVLAGKASQRIKSSRDKVARALIGDYRPEHLFVLQMAYSLYETYQTKIAECDQAMIEELNKLPDRVDVQAKPLPPRTEGKKIDQALRQGLYQKMGVDLTAIEGIGAKVVLTMLTEVGPDLSAFPSEKHFTSWLGLCPDNRISGGKVLSSRTRRVVNRFSDALRLAATSLECSQSALGAYYRRMKGRLGAAEGVTAAAHKLARLIYRLIKHGEEYVRLGLEQYEQKNKNRKLRSLQNIAATLGLQLVPVQAQTEGVS

SEQ ID NO: 96917 - protein, 407 aa, unidentified
MQGSVITLDVSKGSCHYQGFIRKNQPSTKTRILKFTKKSFAELSAYRERLAIKAGQEDIPFIFEATGVYHKPLQKYLDDHGFTYYIISPLMSARYRKLELHSNKTDPLDCANIAKVFYEYDKLRVYQRMDKEYESLRDMNRNYEDMLVHLRKYKVRFKSMLDVIFPYYQKCFKNDGIYADLPLILLKEYKHPDIIHQTSEDIMVKKLSKLCPKHQTGYIRNKVQKVKELAEDVYSGCESTDIYVELFTELIETLQKQMKECDEQLIKIIETAAKSPYFDLIRSVVGIGDNLAARILAEIGDINQFDTRNKLISYAGLDPMIRQSGKKDGIHLSVSKKGNRYLRCLLYQAASANYRLKKNDVIYRFNQKKRQQSNPLNSKAANTATAHKILVIVYGMCKNGTYYNPCE

SEQ ID NO: 96918 - protein, 402 aa, unidentified
MVITVLKTIFGGRTMYLVGIDVSKFKHDCFIVTDNGEVVKKPFSFDNSRDGFLFLINVLNQLDKTKEIRIGLEATGHYGTNLKNFLKRNDFDFAEFNPYLIKKFGESFSLRKTKTDKVDAKLIAQVLMVVDYKTYIKHFNILSFKSLTRLRGKLVKSRSKYLVQLTNLLDVAFPEFKPFFDNRFTKTTLFILKKYKTADKIANMDKVNGFTEIKTMSRHKYKDSKLTQLVKLARNTIGTCDDYTEIQIDIILDMIFKLEEHIINVEKEIENIMSEIDTIISSIPGIGIQSAAIIVSEYEDFNRFENPGQMLAFAGLDVRINQSGTSEQHGKMVKRGSGQLRYGLMSVANALIINNYVFSEYYYKKRSEGKCHRVACSHVVKKLIRIIYHLEKNQMNFDYNKI

SEQ ID NO: 96919 - protein, 459 aa, unidentified
MAKVKSAKAKLIKSSDGNTLAIVNPDAAGIDIADTEMQVCVPENRDGDNNRRFGCFTYDLNNIVDWLLSCRITTVAMEATGIYFLPLFLKLKDSGIDVLLANPRDVKNISGHKTDYADAEWLMLLHRYGLLKPCFQPDNTARKIRNISRQRSNLLQEADRHIQYMQKAMEQMNIKLSTVIADITGLSGRKIIEAILNGERDPEYLASLAHPNCKADKEVISRSLEGTWDDDHLFLLRQSLKSYDFILSQINECDIVIQTFLDEYQSIIDSFDLSTLHRYKRKKNSRSKNAPKFDVEQYAYCLWGVNVFNIPGLKDSAVMQLLGELGHDFVEKFETAENFCSWCNLVPNNKISGGKILSSKLPKRKNPVGQIFRIAASPLSRDKGEMGNYYRRMKAKSGGIQANVATAHKIAKIFFTIVKKKIEYDPCKVGIDEKELIKIKMARLENSLEKLNRKLAEAS

SEQ ID NO: 96920 - protein, 341 aa, unidentified
MSDYSYFCGIDLAKNHFSLHAVDQNGKVILHKSVTRSKLLTTRANMPLMRIGVEACGGAHYWARTLNKLGHDARIMAVKYVIPYRTKGKNDLNDAVAICEAVQRPSTRFVPIKSPEQQAILSVHRMREHWVRERTALMNRMRALLSEFGLIIPVGRSSLMKQVPLMLEDAENELPLLARTLIADAYHHLDELNQRIADTEQVFDSFAKVSTNVQRVMKVRGIGPQTATAILASIGNGSQFDKSRDFSAWLGLVPKQYSTGGKPRLGRITKHGDKYLRTLLVHGARTVIANLGDKQDKLSQWCRGVLERRGMNRAIVALAAKNARIIWSLLHNQTEYENYAA

SEQ ID NO: 96921 - protein, 338 aa, unidentified
MYYTGIDLHKKTSFLTTIDKDGKIVFRANLGNKEEFILDYFTKLDDETRIVIESTASWYWLYDMLAGNGFNVVISNPLKTKAIGSAKIKNDKVDSHMLAQLLRTNLIATVHVSSLETRKLKELMKHRARLVRDVTRNKNRINMILMKNNIQPAVSDLFGKKGIRFITEAPLPEYHREQVDTYFLIYNQLKEQVDAVTKRIRAIVDDNPMAQLLMTIPGIGYITAMYIIAEIEDISRFPSYRNLASYAGLVPSLHASGEKERRGKITKQGSRYLRIALIEAAQAITRMKKGKLNVFFRKRIVRAGYQSAIVATAHKILQYVYYVLKNQTPYSEEYPVSA

SEQ ID NO: 96922 - protein, 312 aa, unidentified
MKREEPSVGIDVSKSFLDVSLYPSGKTWQIEYSPLCIAALTEELADLAPAVVVVEATGGLEMSLTAALGVAGLPVTVVNPKRVRDFARATGRLAKTDKLDAQVLAQFGAMVQPQIRPLPDAAHQELRALVTRRQQLLEMITAERNRLRRTTPGIQHRIEVNIQFLKEQLKELDRDLADFLKSSPLWQEEARLLRSVPGVGPVVTATLIARLPELGSLNCKQVAALVGVAPFNRDSGAFRGKRKVWGGRGALRTALYMATLVATRRNSVLQAFYQRLCAAGKPKKVALIACMRKMLVILNSMIKHHRTWDPAS

SEQ ID NO: 96923 - protein, 345 aa, unidentified
MKQYAGIDISLEYSSVCLVDAAGRIVREAKVLSEPEALIAWFGEHGVVMERIGLEAGPLSQWLHAGMTKAGLAVELIETRHVRAAFKTMPVKTDKKDARGIAQLMRLGWFRPVHCKSLPAQEVRALLTARKLIQGKLYDIEMSIRGTLRGFGLKVGPTTRRTYAARIRDLIEGHPTLEAIAASLLKVRDALADEFAGFERKLRAMARQDDNARRLMTTPGVGVLVALTFVSAVDAPERFRSSRAVGPHFGLTPKKYQSGETDYSGRISKVGDVGVRTALYEAANVILTRPVKGSDLKSWALAVARRAGPRKARVALARKLAVVLHHMLRDGTNFIPHRAAPVMAA

SEQ ID NO: 96924 - protein, 310 aa, unidentified
MSSFVGIDVAQDHLDVHVLPSGETLRSPNDPTGVASLVQRLQALPAPLIVLEATGGHESLVAAELAAADLPVAVVNPRQPRELARALGILAKTDRVDARTLALFAQKVQPRCRPPRDEREQRLKALVTRRRQLVTMRTAELNRRPLATAEVRKSIDCVVQLLDRQIEELEHDLDGTIRHMPQWREKDDLLQSVPGVGPGTSRTLLAALPELGTLNRRQIASLVGLAPFSRDSGQWRGSRSIWGGRAEVRATLYMAALAAVRFNPVLRTFYQRLRAAGKKAKVALTACMRKLLIILNALLRTQQPWQPKKA

SEQ ID NO: 96925 - protein, 354 aa, unidentified
MIIIGVDYHPEFQQIAWVDTETGELKEARLHHPEAAERYYRELAEQGVQVRIGMEASGHARWLERLLAELQFELWIGDAAEIRTKRVRKQKTDRQDAQLILKLMLENRFPRIWVPSSENRDLRQLLWHRHRMVQARTRIMNQLQAVALNEGLRCKKKLWREPGRQQLESFQLGLWASRRRRDLLQLLDRLNPTIADLTQAIEREAEKCPEAARLKTHPGVGALTALGFVLILGNAERFRCGKQVASYLGLVPLEESSGNRRRLGHITKQGSSMLRFLLVEAAQVTVRSVPEWRSKYFHLMLRRGRKTAKVAMARRLAVRLYWMWRQRRDYEQLQKFGSHAGQPGNRDGVQAYIE

SEQ ID NO: 96926 - protein, 339 aa, unidentified
MGIDLAKAVFAVHGVDEAGKATLVKPKVARDQLVPLIAQLPPCLIGMEACSGAHHWARVFAEHGHTVKLMAPKLVSPYRMSGKRGKNDAADAAAICEAVTRPSMRFVPVKDEHQQATLCLHRTRQGFIEERTSTYNRLRGLLSEFGVVLPQSPERLRKEIGPCLDTLPGWARRCMSELLEHTSHIEDRLVELDRAINQIAREDDRSRRLLQLRGVGSTTASALVASIGDGHDFRNGRQVAAWLGLTPGQYSSGGKQRLGSITKAGDAYLRSLLVLGARSVMANLGDKQDPLSRWIRNLMARRGYWRAAVAIAAKNARMAWAVLHYGDTFKPEQAEPTGA

SEQ ID NO: 96927 - protein, 340 aa, unidentified
MNALYAGCDLHGNNNLIGIIDGEGKRVFKKKLSNDLGLVRDTLKPFQEKLVGIVVESTYNWYWMVDGLMEKGYQVHLANPSAIQQYSGLKHSDDKHDAFWLAEMLRLGILPEGYIYPREERPVRDLLRKRGHLVRLRTSLIISLQNILSRNLGRRVKVNDVKALKEDRISPLLERNEDLALAGRVSKEAIDHLTGQIRKIEGVVEKKIKLKGEYRYLLTLYGVGKILSLTIMLETGPISRFETVGDYVSYCRKVPSQWTSNGKRKGSGNSKNGNKYLAWAYSEASEIARQLYPEARAYYHRKMQKTNAAVAHSALANKLSRAGYYVMRDQVPFEPEKLFG

SEQ ID NO: 96928 - protein, 393 aa, unidentified
MYLVGIDIGKLKHSFCLLEKETGEILVEPVFFKNNRDGFNALLSSFKHLPQKDILIGMEDTGHYNLALLKFLLDRNYQVALINPVATNLTRKMQGGISKNDKLDTLTICDVLASNQRVKSYRISKYSSFDLYEQKLLTREHHNLKEEENQLLNRLQKCIDVVFPEFNSLFKSKYGIVYMNILKEFGSADAIAHADIRTLRKCFDTGRGKHISLTAEELKEAARNSIGFPSSSEATQIKHLVARIELIKEQIAEIDKKIEEFSIQNNSPILSIPGISHFSGTSILAELGDIHNYSKPSQIIKFAGVAPLTYESSQFTAQHTAITKKGCKYLRKTLYQIITPVIQYNPVFRKFYLLKIAQGKGHRCAQGHCVRKLMRVIYHLLSTGTQFDPALLR

SEQ ID NO: 96929 - protein, 369 aa, unidentified
MGKSISYVGLDVHKDTIVVALAETGLRGEVRQHGKILNTPAALKALTVKLARTGRDLRYCYEAGPCGYGIQRLLAGMGHDCTVVAPSLIPRKPGVRIKTDRRDATNLAKLHRAGELTPVWVPDQAHEAIRDLVRARQAAVRTLRKARQQLSGFLLRQGCHYHRPAWTQLHRRWLASLKFDQAVHHIVLEDCIAAVEAATTRRDRLEAHIEAALPEWSLASVVQALQALRGVGLVAAATLVAELGDITRFTNPRQLMAFLGLVPSEHSSGSTRRQGGITKAGNSAARRMLIEAAWSYRFPARISREQLLRQERLTKPIREIAWKAQERLCRRYRSLTRAGKLPTVVTAAIARELAGFIWAIAQQVQPAAF

SEQ ID NO: 96930 - protein, 354 aa, unidentified
MKRTTKYVALDVHQATTLASVREDSGRVIARSILPTDGPALTEFFRGMRGAIHVAFEEGTQAQWLHELLAPRVDRVVVCDLRGEQGPGNKGDQVDADALSERLRRGSLRAVYHGSAPHAILKELTRSYENVVEDATRVMLRLKALFRARGIRTPGARVYHPATQAQWLAQLPDRGARLRAAALYAELDVLRALRPTAKAAMVAEARRDPAWAVLQTIPFFGPVRVARLLATMQTPWRFRTKRHLWGYAGLAVVTRSSADYVLVDGQPIRRRRAPLTRGLNRNHNRVLKDVFKGAASAATAQPGPLQDWYQGRLAQGMREELARVTLARKLAALTLRLWKTGERFDPTKLTTPAR

SEQ ID NO: 96931 - protein, 363 aa, unidentified
MKCHLNTELSSLEGTRSEFNRSKAVIKLGIDVHQDFYVVVEQMEGTNPKPAQRFQKQVFLHWAAKLSKSGSKVHAVYEACGFGFGLQRQLTAQGIHCYVVCPQKLDERNKRVKTDGLDAKALCLKLDRFVQGNREALALVRVPTEAEEQKRAIHRQREQLVKARKGLEAQGRSLLVNHGMEPASNWWKGRTFAQLQVPEWMKELLSNSQPILLALEEKIRALTAQLQAAAISKQPRGLGLLSSVVIDREIGSWTRFKNRRQVGSYTGLCPGEYSSGNTRVQSCVTKHGNPRLRAALVETAWRLVRFQPDYRAVKKWRKILAKGALATGAARKKAIVAVARQLAVDLWRIRTGRVATETLGLIN

SEQ ID NO: 96932 - protein, 351 aa, unidentified
MTMVGGLDVHRQQITFDYVDDDGLVRWGQVRPATRKTLRGWLAEHCPDGDAEFALEGCTGWRYIAEELTAAGVGVHLGDPAEIAVARGPKKRAKTDRADARLLRTLLLQGRFPESWIPPAHVLEIRTLGRLYCTLMDQRRTWQQRIHAQLFHQGCPPIKALLSAAGRQALASAELSPIGRQYVDTALRRIDELTAEIKPLRTQLINFARHQAGCQTLQSRHYGIGWLCAAILWAEIGDARRFCSSDKLVRFAGLDVTVYSSDGKCSPGHLSRQGSPELRWAAFEAAKSAARRSSPDYGYYHKLAAKRDGHNGKNPTLAVERKILRRCYHTLRELGDAALALPVPQRKEAAA

SEQ ID NO: 96933 - protein, 358 aa, unidentified
MAKKSLSSSRVLEFVGVEEKTPVWIGLDVHKRSYHVALRRADGLCDAWVTAADPDLLVRQLAPISERISAIVYEAGPTGYSLERVLKGNGYPVAVVAPSRIPRPVTNQAKTDKLDCLKLSEYAARGMIEGISTPTEQEGAERSVLRRRNQLVDSMRKTKQRIKGFLLFHGIEEEPGVRTWSRLVKEKLSKLALHPDLQFVLRSLLRQLRYEEDELARVDKRLASIARGKRHSEAIKNLKTVPGVGNVVAMAFRMELFRPERFRGAEEVCSYLGLAPAIRQSGEKRRGGWLMHSGQTRLRSVLIEAAWMWRAKDPWARSKYQNHLGRCGIPQKAITALARRLAVILWRLSVENRTYVTV

SEQ ID NO: 96934 - protein, 315 aa, unidentified
MQETLFIGADMAKAKFQVASHEGAIPAAAIDNEPKAIRRWLKTLPPGTCIAVEATSSYHRRLAGLAHAQGFTVYVLNPAQLSYYARSIGRRAKTDRLDAQMLARYLAREHLELHPWQPPTALQCHLDELIGHRALLVKQRTALRQASQQRSVLKKAILQLDKAMSVAIAAVDAELRATTAKHDSLRAQLARLKALPGVGPLVGIALANRLSAVPLRSADAAVAFAGLDPRTCESGTYRGRKKLSKRGDAELRRLLYVAAMAAARNTAIAPLVATWRRRGLSAIAAYNVLARRLLRAAWSLLRHDTPFELKRFVGA

SEQ ID NO: 96935 - protein, 344 aa, unidentified
MQPQEYVGIDLHRRRSVIVRRSSEGETLAVSHVDNDDLLAFERAVTAAGEHPEVVLEACYGWYWATDLLAELGCRVHLAHPLGNNWGNRRVKNDTRDAEDLADLLRLGRLAEAWIAPPEVRELRELVRYRAKLVSLRTNCKLQAYAVLAKEGVNVPMTDLFGVSGTELLETCHLATVYRTRVESLRDLIEAFDREITKLEADVRHELRGHAGYQAIQQIPGVGPLFASVFVAEIGDVTRFRSPAQLASWAGLTPKHHESDLTVRRGPITKQGSRLVRWAAVEAAQRQASGTKLRADFVRITAHHGDSAGARKIARVAVARKIVTLVYYGLRDSTIRSKAISEAA

SEQ ID NO: 96936 - protein, 482 aa, unidentified
MKSKPQEKNERATNHPTQHHWHEMNRKQRRETMRKIQSEDLTLEVLHPDAAGIDIGNESHYVAVPPSRDTQPVRRCGCTTAELKAMADWLKQCGIRTVAMQSTGVYWVAAYDIFEQAGLEVYLVNARDTKNLPGRKSDVQESPWLMKLHTYGLLRNSFRPSQEIRTMRTYWRQRNDLVQSAGRHILRMQKALTQMNVQLANVLSDISGVTGQAIIKAILAGERDPHKLAQLRDRRVKASQEQIARYLEGNWQEDLLFVLKQEQEAYEFCQQQIAECDRQLAQYLQQREDRSQGAPLPEEKRKGRLKKKRANKPQFDLREELFRMTGTDLTRIDSIDVMTAMTVLSEAGWDMSKWKTEDHFVSWLRLCPDNRISGNKVIGKGRLPTNNPITIAFKMAASTLRLSKTYLGAQFRRFRTRLGAPIAIKAMAAKLARLVYRMLRYGMKYVDQGAAFYELQHRQLQVKQLKWKAAKLGFQIVQATAA

SEQ ID NO: 96937 - protein, 341 aa, unidentified
MRTITIGLDIAKTVFQLHGVDASGKPVVSARLRRERLEKYFAALSPCVVVMEACGSAHHWARVIGALGHEARLVPAAYVKPFVKRNKTDARDAEAICEAALRPHMRFVAVKSVEQQSARALHRARDLLVRQRTQLGNCLRGLLAEMGVVAAQGAAGLAALLRLVEAGADPRVPASFYATLQALARQWRALETEDEALYARIEAQARADEKARLLMTIPGVGPITAHAAIAAIGDGRQFHTARDFVAWIGLTPSQYASGEKRRSGHVSKAGDAGLRRLLTLGASAHLRQARAKPERMGPWLSGLLARRPVRVAVVAQAAKTARILWAMLTSGESYRARPAKA

SEQ ID NO: 96938 - protein, 386 aa, unidentified
MHDGTNLPVPERTGIPGDYATLFVSLELSRSTWVATSLAPGSKKMSKHTLVGGDGRKLLDLLARLKTRAEQRIAAPVKVVAIHEVGLDGFWIHRLLEANGVESHVVDPASIAVPRRHRRAKTDAIDGETLLRTLMAWQRGEPRVCAMTVPPSPSEEDCRRVSRERATLLRERIQHTNRIRGLLFGQGITNYNPLHKNRRECLEELRTGDGRSLPTHVKAEILREIDRLELVLRQIGEVEAERDEILRPAEASSPAALLMRLKGIGAEFATVLYFEGLFRHFENRRQLAAYAGLAPSPWKSGSIDHEQGISKAGNPRLRTTMVELAWMWVRYQPDSALSGWFRQRVGSERGRTRRISIVALARKLLIALWRYVTHGEIPAGAVMKPV

SEQ ID NO: 96939 - protein, 397 aa, unidentified
MKTIIGVGIDCSKNKHVVCISDNMGNQCESVFTIHNKLKDVEYLAEKVLEVENKLGKADVVINMESTGIYHLPLYSVISKIFKTNIYQPKQVKDMSSKNIRKSKTDKRDARTLSRIHLEIPPPQTDYGDREMYDIREIIRQRFSYKDIRTNLKNKFRRNLSIVFPNFDTLFKNPYASVPWNLLKICPTPEDVLRLGVQDISKIMEKASRGQKLRVTPQDLIKLTEESIRCDIMDRGALFGLKALMEDIEYLDRRIKQIDNEIEIYWNKIKRTLYFPTFPGLDMVKAVALHTEYGGFRRFPHPDKAVAFAGLENMVYISGDSKNFNGRMTKAGSPIIRRVCWELLNTPVLNIPKITAHMDKLKSKGKQRNIRVHSASKKMIRTLWAMEHHEQVYVRET

SEQ ID NO: 96940 - protein, 421 aa, unidentified
MIEAVLECCAGIDVGKRFVIVCVMTGPADGEALEQTRKYGTNTGNLENLRDWLKACGCTHVVMESTGSYWKPIFNVLEPTPGMQVVLANSKLVKNLRGHKTDPSDSRWLAHLLRHGMIRPSFIPPLAIRELREFTRRRKQLIRAGTQERNRVQKILEDANIKIGNVLSDIFGLSGQLMLEALVEGKATAGQIAQLAQKTARRKIPQIQAAIERHRMTDTQRILIRFSMAHLAFLEEQIAELDQQIVRHIEQTNLQRPYALLQTIPGVKKLAAAAIVAELGTNMDVFGTSRRCSSWAGLCPGNNESAGKRKRSPVLRGNPWLRTTLIECAWAASGKRRSAFQARYQRLAPRIGHKRAIVAVAHSLVLTVFDVLSRDQPYTGSGADNMPATQLQRLIRHHSKREATLRRWLLRTSKNSAFRVT

SEQ ID NO: 96941 - protein, 348 aa, unidentified
MIAIGADVHKRTCTLAMQGEDGQLTMLPSMENTRENWLHRLAKLPPEAEIALEVSTSGHFVMSVLEEAGWRERAHWVHTAGVDSLKKQKNDRLDAKRLARKLSVAERDPLPEAWFPPPPIRELRLRARQRCWTAVGRAQCRNRLRSLLQMYGLRPKGSPFTPQGRAWLEKQPLPPAAREYVERTWRVHDFLSAERESSEASLVAASASFPEIARLQTIPGLGHILAAVIWSEIGDLRRFASADALVNYTGLVPSLYESGEVSHHGGITRQGPAWLRWALITAANAVTRSKSPLARRYWRLRRRKRPNVAKTAVAGSIARCVYGVLKHGGAYQEERWGRQTGDELKQEA

SEQ ID NO: 96942 - protein, 348 aa, unidentified
MEHYAGIDVSLELSSVCIVDEKGKIVRETKVGSDPDALVAFFKQLGFPVARIGLEAGPLSQWLYAGLVQAGFEAVLLETRHVKAALSAMTVKTDRKDARGIAQLIRMGWFRPVHCKSPGSQEVRALLVARKQLLGKLLDVELSIRGILRGFGLKMGVVTRKTFEARARELSSGQTMLETVVGAMLTARAALQSEYAKLHKTMLVIVRDDKICRRLMTVPGVGPVVAITFKTAVDDPTRILKSKAVGPLFGLTPKKYQSGETDVTGGITCVGDTMVRTALYEAANILLSRVTRFSALKRWAVEVAKRRGLKRAKVALARKIGVILHRMWVDGTDFRWTKAELGSGVAAH

SEQ ID NO: 96943 - protein, 346 aa, unidentified
MGKSIINLSSVTTVGLDLAKHVFQVHCVDALGRVVIAKPIRRNKLLEFFASLPRCPVGLEACGSAHHWARELIKLGHDARMMPPAYVKPYIRRQKNDASDAAAICEAVTRPSMRFVGVRSLENQAALMRHKAREMLVSQRTQLLNGLRGHLTEVGVIAAQGPRHARELAELIEACEETVSFEVCEALAPLVVQLRNLDEAIARLDRIIAKLAQKDETARRLMSIPGFGPITASAMAATIQDTSGFAGPREFAAFLGLTPKQNSSGGKPKLGRISKMGNRNLRKLLVVGAHAVLFHRKPHTDPLRMWAKKLIEKKPFKLVAVALANKMARIAFAILRGKTVYREIPA

SEQ ID NO: 96944 - protein, 342 aa, unidentified
MSIAVIGIDLGKNSCSLAVVNADGAVIQRRRMRPDSIVAFTKKLPTSIVAMEACCGAHYLGRLLAAQGHQVRLMSPEYVRPYVKSQKNDDRDAEAIAEAATRPTMRFVELKSEEQLDMQTLHRARDRLVGERTALINQLRAILLERGIVVPQGRCKLEQYLTAMMDEQGASTVGIRMVTLIEDMRLEWHELDRRIGALDDEFAAHARTDDAARRLATIPGIGVLNATALVAAIGTGESFARGRDLAAWLGLVPRQVTTGGKPRLTGITKRGNKYLRKLLVHGARAALPSLATSATPLGHWLRGLIARVHKNAAVVALANKLARIAWAVLRRHETFDAKAAMA

SEQ ID NO: 96945 - protein, 345 aa, unidentified
MPIVGGLDIHRKQITFDYLDTVTGQVCRGQISPADREHLRAWLARFAGREDAAFAVEGCTGWRYVAGELAAAGVTAHLAEPADTAFARGRKRHAKTDKTDCRHLRQLLAEGRLPECWIPPGRILECRALLELYHDLRAGHTAWVQRIHAVLFHQGAPALGEGTLRTGPGLAALRDVSAACLSPAGRLQVATALEVLEALEARLHAVRHQLLQEARHLAGAKVLAARLYGVGPFAALAMTCWLGGAGRFSSSRQAVRFAGLDVTVWSSDRKGPPGRLSRQGPPVLRWAVYEAGKTHARASAPDHRYYATVKDRCNGKRAALSEARKILRQACHILAGLGDDAFAAA

SEQ ID NO: 96946 - protein, 408 aa, unidentified
MQVTFGIDVSKSTSTVCELIGESKNELTITNNRPGFIQLLHELTAFSKHPQIIFEATGVYSRRLQAFLEDYGYDYVILNPLKAKKEMDMGLRHNKTDKTDAYHLALIQRLYHHPINQLQSQTYKQLNSLSRFYDQLTADLVMAKNRLHQALQSTFPEIENLFSSAKGKNYWQIIVRYPHCDLVRREDKKQLINWLMSLKGIAFKHALRTADKLIELAYQAYPVVSCSSIEVEQVQYYAHRLLNLSDQRENLIARMVKLAKSLPNYDLENLESIPGFAQTTAVRVLAELGDLRRFSNPNKINAFIGIDPGRYQSGEMESNLSITKHGNAVARKLLYRAIGQIDNAAKTNPCHIADYYESKKLSSQTKGFKKIAIASIHKLIRTIYALIINDQPYDYNVATHNQKDFSRN

SEQ ID NO: 96947 - protein, 354 aa, unidentified
MSQIPNTAIAVIGIDIGKNSFHVVGHDARGAIVLRQKWSRGQVEARLANIPPCLIGMEACVGAHHLSRKLASLGHDARLMPAKYVRPYSKGQKNDFNDAEAIAEAVQRPTMKFVATKTAEQLDLQALHRVRERLVSQRTGIINQIRAFMLERGIAVRQGIGFLRTELPTILATRTDALSPRMLRVIEELAGDWRRLDQRIDGLSGEIEALARQDQACSRLMTVPGIGPIISSAMVAAIGIGDVFSKGREFGGWLGLVPKQISTGDRTILGKISRRGNRYLRVLFVQAAWVVLVRIKNWERYGLKSWIEAAKRRLHPNVLAIALANKLARIAWAVLAKGRAFELTRTNDADVRPA

SEQ ID NO: 96948 - protein, 426 aa, unidentified
MKDTNIDTDPEPPYAAHIGIDWADKRHAIALQVAGNGKIEESWLDSDPESVHAWARSLGERFGGAKIAIGVELSKGALIEELRGYGSIDIYPLNPATTCRYRGAFTPSGAKDDMPDARLHLELVRQHRDKLRLMRPKAGADRRVELLNSGRRKLVEMRTDLCNTLRSTLKGYYPLALEVGGELGTPISCKFLLKWPAFGELKRARRSTLRAFYYANGSRRADTIDGRLEKIAAAEPVSEDPDLIGPMAAFATALARQIQTLAAEIGKLERQLKAAYAAHPDHEIWSSFPGAGPFLAPRLAAAWGSDREAYGTAGDMQLYSGIAPVTERSGNSTWVHRRYSRPHFIHQTFWEYAKQSCLHCGWAQLYVDAQIARGKKHSTAVRSLAFKWIRIMAACWKQGEPYDDAQYLRALQRKNSPLAANLPAAA

SEQ ID NO: 96949 - protein, 343 aa, unidentified
MSGAYEGKQIVGMDLHRRRSVVVRMTDTGERLETVRISNDPDYLRAVMARAGDAPEVVLEATYGWYWAADTLAELGANVHLAHPLGVKMLGLRRVKNDERDAADLADLLRMGRLPESWIAPPATRELRGWVRHRAKLVGLRSSVKNQIYAVLAAAGVAVSMSDLFGVAGRQLLATTLLAVESRSRVDSLLRIIEALDFEIDLYARLIAGRLRTDPGYHAIQTIPGVGPLLGAVFVAEIGDISRFQRPEQLASWAGLTPKHHESDTTVHRGRITKQGSRLVRWAAVEAVQRVPAHTRLGQTRDRVGQRRGRNIGAVAAARELMTLVFYGLRDHHIRCLTSTPAA

SEQ ID NO: 96950 - protein, 319 aa, unidentified
MRRVIGIDIHRTFGEVVIWENGLTRHEGRVEMTRTALEGFGRQLKKTDEVVIEATGNCMAVSRVLSPHVKRVVIANPLQVKAIAHAHVKTDKVDAATLASLHAAGYLPEIWTPDAATERMRRLVARRYQVVRHRTRIKNEVHAILHAHLIPKCPHADLFNKRGRDWLTRQPVPEDERAAIARHVRELDRLGEDLAVLDRDIAQDAIDDEAIQRLLTITGVNLTVAAGLMAAIGSIDRFNSPQKLVSYFGLNPRVRQSGLGPAHHGRISKAGRCWSRRPEQRRKHPDHCGLSSSASERAADIRSPQSLSHESSRPCAGTC

SEQ ID NO: 96951 - protein, 461 aa, unidentified
MFPHETLYIGVDVGKFGHVAGFLSRTLLQRHERFEGCPTLSFEQSREGFCALVDRIREFVPLEQATVLLEHTGHYHKNLEQYLLDSDITVYRIHVQERSKGMMKTDKRDALSLANRLYTQLELGAQVADKMQLVRQIVPPTPAAAQLRGFIQHRYELSRQDTQLRNKLTALCDEIFPEFTQIFHDPNREVALAFREKFPTPHELATASLSALREARARYFPSEANLLRLQQLARETIGIHNVDRLRGLKLEQELLIKELRLIQEHVERLDTEITDIVKNCREGQILLSIPTIGEGAAATIIATVGNIANFEKASELKCYFGWAPRQEQTGVSFDRTKLATRGVGPMKKMLYLMAARAVTLECEWTRIYQRLLPRMGTYDERTKEYRGKKRIFGRIAGQMASMIYALLKTDQETLSKVPPGQEPPAPILYDPEVHRKHQEGHYRSLKLGTQPRKILQLPKKM

SEQ ID NO: 96952 - protein, 356 aa, unidentified
MARFSLTDLKSFITNDPTHPFWMGIDVHKKSYAIALLRNDGEYFTWSASASPEKLLQQIIDLKIQLGGVCYESGPTGFTLARTLSKSGIMVIVGAASKVPRSVTPGSKTDRLDCMKLAHFVSKGLIKPIAIPTEEEEYKRSVLRRRNQVVDNIRRCKQRIKSFFLYHGFEAPESIRLWRSDSFQVLDSISLPKELKFTLDSHVRELKSLQEELSTLKKQLYDITHSSQNQKTMRVLTSVPGVGEVVAATFLLEIFDPKRFNREEEIASYLGLAPSVHHSGEKTPRGHLMPVGQTRLRSLLVEAAWVWQARDDYAKKMYNKLLSRSGVPQKAITAVARKLAIILWRLSIEQRVYRSV

SEQ ID NO: 96953 - protein, 315 aa, unidentified
MVDVPCFIGIDVAKAQLDIALRPAGERWAVPNDASGIASLGDRLQALHPTLIVLEATGGLERAATAALAAAGLPVVVVNPRQARDFARATGQLAKTDALDARALAHFADVIRPTPRPLPDAQTQELRALLGRRQQLIGMRTAEQNRLVGTNARLAKDIEAHIAWLNAGIATLDDDLETMLRASPLWRENDDLLQSAKGIGPVCAHTLLLELPELGTLTRQQIAALVGVAPLNCDSGTMRGRRTIWGGRAHVRTVLYMGTLVATRDNPQIKVFYERLLAAGKVKKVALTACMHKLLTILNAMLKHRTPWQPQEVQN

SEQ ID NO: 96954 - protein, 356 aa, unidentified
MTIVARAHPFVIGVNAHARNHAVAVLACPTGEVVDEAQFPATVAGLQRAVSWVARRTGGDLDVLWVIEGVGTYGARLARVANDTGYAVAEAGRMNARANRGVGKSDPLDARRIAQSVLAVDEGMLRRPRADDGVRAAVRVLIASRDHLSAERTSAVNALTALIRVADLRIDARRPLTAAQITAMAAWRGRDEDLATAVARREAVRLAKRVIAADREIAANTKQLTDLLNASPARVLLDQPGIGPVTAAVTLAAWSHPGRVRSEAAFASLAGVNPIPASSGNTVRHRINRGGDRRLNRALHMATVTRIRMDPRTRAYVEKRTAEGRSLREIRRCLKRYLARQIYRQLNAAETALNPT

SEQ ID NO: 96955 - protein, 430 aa, unidentified
MHNKNYISVGIDVGSAFSFMTILAPDETVILKPFKITHNNKDSLERAVSEIKKAEELYSLESRTFLESTGIYHFPLFCYLVDCGFNASIINPIITHSTKNGNIRKVKNDKIDSKGIAKLGLSKDIPVSQFPAKLVLELRSLTRKYYDLTDERSAHINKLKGDLHTVFPQYLDVFCDVTGKTSTMILRQYGTPDKILCGHKKTMIEKISKASRKGLAKASERYEKLCAAANAAKTFGCQIDSIYFNIFLTLDLVEKLDSALDSILNRIRQLITFNKNEKFIQQIKLLNTIPGVGFLTAVTIMCEIGDFSAFRNPKQLFAYFGLDPEVNESGKFVGTQLHMSKRGSRIARRAIFAVALASIRTKRNGEGINPYLRKYYELKSGQKPKMVAIGAVMHKVCNIVFAVLRDEKAFELRSPEEHCKQYQRPALAAA

SEQ ID NO: 96956 - protein, 408 aa, unidentified
MEIVGIDWGRKKHYCYLLHQGKKLVLKNKEEDFAKLLKIKEAVYVIEDGNNRIVDYLLRNNRQVYILPSRRSSEARSFFVIEGKSDFIDSKVIAMTYEHNPEWCLQVKREGIAFELDVLVEENAVINVSMMQDIGRLDAYLERYWPEVKEVFSGTSARKLAFISICPTAKDFLTMSDKEILQKLKEMGFLINSNLKSKLKELRKIALERYVPASIRTLIVAFSRYAMEKKVMKEEIGKQMKEIIEESEFSVLLTLPGVGAIIASQLIVAYLTHKFSSYRDLQRYAGTTPTYYGSGNKNTTKMRSNCNHYLRGTLHIASLAATNSSKWMKRFYDNKKSEGKSSAHALRALANTILKIAFAMLRDLTPYSEEKFFKRNPLSDYTPSKKEGKQKPEYSLKVSSVATCRSTA

SEQ ID NO: 96957 - protein, 338 aa, unidentified
MQTYAAIDLHSNNGVLTIIDETDRVLKQRRISNKLEEFIKELEPFRATLQGVAVESTFNWYWLVDGLQAKKFPVTLVNTSAIQQYEGLKRSDDDYDAWWLAHMMRLGILPKGYIYPRKNRAVRDLLRKRAMLVRQRTANILSVQNLEARNRGTKISSNEAKRLTDTRVTELYGNGDLALALTTTIAVIDALTEQTRLIESAVLKKARLRPEWELLTSVWGIGKILGLTIMYEAGEMSRFSSPGDFASYCRCVNAQRFSNGKKKGENNAKNGNRYLAWAFVEAAHFAVRFYPEAKRFHDRKAAKTNGVVAIKALAHKLARATFHVLRDQQAFDPKRVFV

SEQ ID NO: 96958 - protein, 359 aa, unidentified
MDIGIDPHKLSHTASAVDSATNTSVASLRVDASLAGYRELMRWAGQFEDRRWAIENARGLGRHLAQWLLARDETVVDVPCTATARVRELSRGGRRKNDVIDASAAACVAAAQGDASPVLADDHTVICAMLEERRSNVSGQRVRVANQLHAVLPELVAGGAPRQISAGSASALLRSVRPANAVEQCRKQLARHLVKDLKALDSSLVDIEKRMAEAVTEIGSRLCEIDGVAAVTAARLIGRTGPASRFRNEHAFAAYVGTAPIEIASGDQSHHRLSRSGDRRLNSTIHMIAVTQIRMRNSIGRAYYDKKIAEGKTHNRAMRCLKRRLANHIWRIMITDERSQRVSTTESPWVLRWLVSFER

SEQ ID NO: 96959 - protein, 316 aa, unidentified
MARKTTPVHIGIDTSKRELVVASRPAGTAFTVSNTLAGIADLVDRLARLKPVRIAIEPSGGYEHAMVQALRQAGLPVRLVNPRKLRQFAEAVRGLGKTDRLDADALAHYAETWDPPPPVATSPAQQELRDRHRWRGFLVELRSRVTTRRHQLRHAAARDRAAAILELLTSLIDTEALEMDALLSQDQTLHDQAALLRSAPGVGPVVARGLLAELPELGRCDRKALAAITGIAPYPRDSGAWHGKRHIRGGRRAPRNLLYLAALSATRSSSDLAACYTRLRARGKAPKLALLAVARKLLTRLNAMLRDHKPWATPAS

SEQ ID NO: 96960 - protein, 482 aa, unidentified
MKKKSIYTNQSQELLTMFEEAGNGSKIMCVPIDYAKKDHVVMFCNGYGDILRKPFSVKNSPEGFKYLSEQVTQSCLHLSIDPKHVFFGGEDAASYADNFVNTLRSKGWLVAGVNAHDAKKQRANIQASTDCLDLLGIATMMLNRRANCSPAQSGIYLNLRNLVRHRGSLVVMSTKVRNQIHKLVDKLFPGFLDEKKSGITPFSKSSLYLMETRFSAPQMRRRRRQKLIEILHRYGTPEAERAAAMLQGYANQVLITPNEYVATLQLSLAQHVKHFKCLHENIEQLEKEIASWLAQTQGAFLTTVRGIAIVLAAGVTAEIGDPNKQKSVNNLVSYAGIIPRVKKTGGPDGKTYTGKVARRCNHILKNYVVQSGLHLGQHGPDDLMTDYKRRDAAGQHADFGMARRYLRMAMCLMRTSQIYMPSRLRNEKVSPQERANYYLMSWPKIREKWNKFDALEAAFAKERPLGMWRNMVQELYGITLKL

SEQ ID NO: 96961 - protein, 350 aa, unidentified
MIIGVDYHPSFQQIAFFVEETGECGEQRLNHSEGEAERFYRDLKQRGVRVRVGMEATGYSRWFERLLAELGYEVWIGDPAEIKAKRVRKPKTDREDAKLLLKLMLEDRFPRIWVPSPENRDLRQLLWHRHRLVQMLTRIMNQLQALAMNENKCWKGKLWSETGRAALEKLPLAYWASRRRQELLELLDRMNPAIEELTTAVEKEARKRPEALRLMTHPGVGALTALAYVLIIGTPERFACGKQISNYVGLIPSEDSSGGKQRLGHITKQGSSLLRFLLVEAAQAAARCNPHWRRRYRHLAIRRRRNIAKVAMGRRLGVRLYWMWRNGCEYSPSFEFGSHAGKLEIGNGVH

SEQ ID NO: 96962 - protein, 312 aa, unidentified
MQNDTIGVDVSKDHLDVHRLYDGASRRFANDKRGHKALIKWLAETPVSRVVFEPTGPYHRAFERALGAAGVPFVKVNPRQARRFAEATGKLAKTDRLDAAMLARMGAMLELEARPARNETLLELKELYMAREALMKDRTAAKNRGKVLMLSLLKRQNAQRLEQIERQIMTIEAAIFQIVEADVGLADRLAILTSIPGVSNITAFALLIEMPELGVLEAGQAASLVGLAPIARQSGRWTGRAFIRGGRASARRALYMPALVATRFNPDLKAKYRQLVEAGKPAKVALIAIMRKLIVLANALLKANRKWAPKSA

SEQ ID NO: 96963 - protein, 255 aa, unidentified
MIAGTTLIGIDVSRDWLDGFCLSDQQRFRHANTAEGHRALVAMIRRTPFPVKVGFEATGGHEWVLWRELAAAGIVAVQLSPAQIKAFALSRGTRAKTDRIDAELIARFMAFRPEAGRELPEENLRILRTLTTRRGQLVDMRKRFSAQIRARKKQGVSAGIETMDDDLENVLNTQIDAIERRIETVITQVDRLAAMAKLLRSIPGIGPVCAAMVIAELPELGRMTSGEVASMTGLAPISHDSGAMVSVRPDRPAAW

SEQ ID NO: 96964 - protein, 345 aa, unidentified
MEIRTIGIDLGKTVFHLVGINARGEVVVRKKCSRTQLLRFTSNLPACLIGMEACGGSHFLGRALKEQGHDARLMPAQYVKPYVKTNKNDYIDAEACAEAVTRPRMRFVPIKSDDQLDLQSLHRVRERWMVRRTAVINQIRGMLLERGITIAKGRRHIEESLPGILEDADNKLSGALRVLLSELRREMQYLHGQIEECSKLIERIAGELEQCKHLLTVPGIGPVTATATVAAIGNGAAFKRGRGFAAWVGAVPGEHSTGGKQKLTGISRRGNKYLRKLFVQGAHTVLLQRSKQEPGLSMWLAKLVSRKRPQVATVALANKMARIAWAVLSKGEAYRPPLAAQTVAA

SEQ ID NO: 96965 - protein, 413 aa, unidentified
MYIVGIDIAKKSHQAAIMKPDGTLVGRSFRFTNTKQGFEFLMDKLAAVDSSLENFEFGMEATGHYWLNLYTWLADNHATVHVINPLQSDALRNLYIRKTKTDSVDAKIIAQVIRIGQYSETKLADDRMLMMRDLCRQRFFLVDMVANLKRKIIVMMDRIFPEYQGFFSDTFGKSSTAILKHCTTPEEITLFGEDNLAQLLQVASNGKFGLKKAQELISLARNSFAARLSSKTLSLLVKQMMDQMELLQNQIGILEKHISSHFKSFGTKITQIPGIGPVLGASILSEIGDISRFANPKKLCAYAGIDPSVKQSGQFLGNENHMSKRGSGYLRRCLWMASFVSVNHCREITIVYKSQVSKGKTHFQSMGFVCHKLLNIIYTVLKNDIDYSPMLCKTPAITARTSRRIARVALKAR

SEQ ID NO: 96966 - protein, 420 aa, unidentified
MSLNVVGGSSCYVGIDWAAATHAICVLDPAGKRVAAFTVEHTAAGMAALTQRLARLGAPETMPIGIERPDGRLVDALLEAGHPIVPVKPNAIKAWRDGEVLSGAKSDAGDAEVIAEYLRLRQHRLSLVTPYSVETKALRTVVRTRSDLVDMRVAATNQLAALLDAHWPGAKAVFADVESPIALEFLTRYPTARHAAHLGAKRLTAFCAKHGYSGRRTGEQLLTRLRAAPTGVTDETLCEAIRDAVLALVAVLRAVVAALKDLGRSVVATLGEHPDAEIFTSLPRSGQINAAQMLAEWGDVRQAYDGPDSVAALAGVTPVTKESGKHRAVHFRWACNKRFRVAVTTFADNSRHESPWAAMVYADARARGHDHPHAIRVLARAWIRIIWRCWIDRTPYNPSRHGNAVRLNQSGQTELVAARG

SEQ ID NO: 96967 - protein, 351 aa, unidentified
MNILAMDLAKSNTVVCFYDSDKGKGAYRKIKTLPQQIHDTIVEYGPDRVVFEICSIAGWVYDIAFVLVNEVEVADVNGQAWRWKNVKSKTDRKDALKLAQLSSMGQLNCVHIPKKEIRQKRSLITFRQSLVGRRTQIKNSIHSILDKEGLGHVLPKGKKGWTKHSIKMLSNISKKLEDCSEESTWRGQLHIELAELERVSEKIAETETKLDKLAEDDKHIRVLRTIKGVGPRLSEAVAAFLDEPNRFSSCKQVGSYAGLTPKQYQSGSMDRQGRISGQGNKLLRSLLVEVSWLGLRNNEWMRETYHRVLRGSASRKKIAITAVARKLLVRCWAMMRDGTEWREVKQTKDAA

SEQ ID NO: 96968 - protein, 488 aa, unidentified
MSRASKQSGKKDPTLKARAPKRKARGSHSPQGKGNRRGSKLTITNPDAAGIDIGSQIHYVAVPEGRAEVSVRSFGAYTAQLDELAQWLKDWRIKTVAMESTGVYWIPLYQKLEEAGFEVLLVDARQAKHVPGRKSDVQDCQWLQQLHSYGLLRAAFRPEDSVCRLRTLQRHRKNLVESGAMWVQHMQKALNEMNLHLHHVLSDISGLSGLRILDAILAGERDPAKLASLAHHRVQKSQAQIEAALTGDYRPEQLFVLSQTLQNYRQVQQQITQCDLGIEKQLAKMTDCQNPSQAAKPMPQSLDLGAEKPRKRKPPVALEISLAGHLKRILGVDLTTIPGLNVLTILTLVSEIGTDMTKWRNEKAFVSWLGLSPNNKISGQRVLSSRTRKVVNRAATILRLAAMILGKTNTPLGSFYRRKRAQLGGPKAVTATARKLAGLVYRLIKNGQGYNEPDLHTYELKYKDQILNSLRKRAITLGFDLVELPKAA

SEQ ID NO: 96969 - protein, 361 aa, unidentified
MASIALVRSDVIVGVDTHKDQHVAVALDGLGGRLGELFVPATAGGYATLLAWARDHGRVIAFGVEGTGSYGAGLASFLRRHAHKVIEVNRPARQADRRLAGKSDTIDAEHAAREVLAGNATNVPKTADGAIEAIRLIKIARDGAVKARSKAMITLKASLVTGEDELRAELEALTDHKLVLACAEFPDTLDDSADPAAAMRYLLGTLARRWLSLHDEIKVHFKLLERATAAAAPELVEAFGIGPDVAAEMLVTAGDNTDRVRSEAAFAKLCGACPIPAGSGNTNGRHRLYRGGNRQANAALYRTVIVRMRWHEPTIAYVERRTAEGLSKKEIIRCLKRFVAREVFALLPEPAKHEIFQEITA

SEQ ID NO: 96970 - protein, 338 aa, unidentified
MTMYAGLDVSDKLTHICVVDAEGVVLRRDVVASDPDMLARWLKRHCPGVVRVVLETGPLSTFLYHGLIERGCPVTCICARHAKRALSARVHKSDVNDAESLAQLARTGWFKAVHMKAGATHIDRAALKIREQLVTARNAMANQLRGMLKLFGLRMGNVTTPGKRRERLDALFTQRPDLRCVFASLIESIEALDGQIARSGKLLAARAEADPVCQRLMSVPGVGPITALTFKSSIEDPGRFARSSDAGVYAGLVPRRSQSGERDYKGHISKAGDAMLRSALYEAANSVMVRLKRRCALQDWGRKLAETKGPKRAKVAVARKLAALLHRLWQSDTDFCWN

SEQ ID NO: 96971 - protein, 350 aa, unidentified
MTISHYIGFDVHKKSISYCVKTKDGTIVEEGKLRATHDVLRQWAGKRREAWHGAMEATLFSAWIYDTLKPFAAELQIGHPALMKAIGASKKKNDKLDARKISDLVRVDLLPACYVGPAEMRELRRMLRYRNLVVGQAVQMKNRMSGMLMEVGAEYSKQRLHGKEYFSELLDRLEEVPESVKDLLRLSRGALEMFETVQRQLLGRLQKEPLLRQRVALLRSIRGVGEVTALSWALEICDPQRFASIGDAVSYCGLTSALVESADKQQRGPISKQRNAHLQTVLIEAAKLAPRWNPQLAALHERALQHGHRNRATLEVARKLVAYLLAVDKSGQPFEVRTAPATETEAQQVA

SEQ ID NO: 96972 - protein, 336 aa, unidentified
MSLYSAIDLHSDNNFIVIIDNNDSILFQRRLPNDLGTVLSVLEPYKGGLQGVAVESTFNWYWLVDGLIEAGYTTRLVNTAKVKQYSGLKHTEDRYDAYWLAHLMRLGILPTGYIYPREQRAVRDLLRKRGQLVRHRTIHVLSIQNQYWRNTGIKLKVDYIKRNNDYLEEFENENIHLALVSNYHVMQALEEQIRKIEKQVKRQIKLRPEYELLLGVDGIGYILALTVMLETGEISRFKEVGNYASYCRCVESRHTSNSKKKGEGNGKNGNRYLAWAFIEAANCAKRFSEKARRFHQKKMAKTNNVVATKALAHKLARACYYIIRDRVPFDENKLFG

SEQ ID NO: 96973 - protein, 398 aa, unidentified
MTESSDCESVQVFIGVDVGKDTHHAVAINRSGKRLFDKALPNDENKLRSLISDLKQHGQILLVVDQPATIGALPVAVARSEGVLVGYLPGLAMRRIADLHAGEAKTDARDAAIIAEAARTLPHALRTLKLADEQIAELSMLCGFDDDLAAQTTQASNRIRGLLTQIHPALERVLGPRLEHPAVLDLLQRYPSPEKLASLGEKKLAAQLCKLAPRLGKRLAADIAQALAEQTVVVPGTNAAAVVLPRLALQLITLRKQRDEVALEVEQRVLAHSLYPVLTSMPGVGVRTAARLLTEVACRAFASAAHLAAYAGLAPVTRRSGSSIRGEHPSRRGNKALKRALFLSAFAALRDPLSRAYYTRKMSQGKRHNQALIALARRRCDVLFAMMRDGTFYTPQGS

SEQ ID NO: 96974 - protein, 484 aa, unidentified
MAKRKMSTFERLRIGQMNRVQRRKLGQRVAASDPGLTIVHPNAGGIDVGNESHFVAVPPDRDANPVREFGCWTAALNEMAEWLKSCRIDTVAMQATGVYWIALYDVLEQHGIRVVLVNAQHTKNVPGRKTDVQECQWLMKLHTYGLMRDSFRLQQDMEQVRTIWRVRDRHVKVAGRAVQHMQKALTKMNIQLANVISDISGDSGQAIITAILRGERDPYKLAALANYRIRASREEVARSLEGNWRADVLFELQQAVDSYHFAHRQMQECDEKLTLYLASLPTRMLDIPVQSEGAPETRAQKRKKAKKPRDNEPRMDMKAELQRICGVDLTSIDGINVMTAFTVISEVGTDMSRFQDEGHFTSWMGLAPSKDISSGKIVRRGKKKVKNRVAVVLRTAATTLLESDTHLGARYRHLRRQLPTFQVAVKAMARYLAVLIYRLLTHGEAWVDRGAAQFERRRIERELASLHSKARARGFTLVPIAEAC

SEQ ID NO: 96975 - protein, 345 aa, unidentified
MQPMYYIGLDVHKRTISYCVKDVSGTVHSEGTVPAIRFHLDRWMKTLPQPWTAAMEATVFTGWIYDHLRPHAAGLKVAHPLMLRVIAAAKKKNDRIDASKICDCLRCDFLPECYMAPTALRDRRRTLRYRNLLVRQMVQMKNKIAVLLMEAGVSYNKQRLHKAGYFRELLATNPDINEGLCSLLRVCRETVVRLQRTESALVRSLERDSLLKERVERLMTIPAVGPITALTWVLEVGDVERFSSIKKAISYCGLCGAEKSSANTVQRTPISKQRNKHLQTTLIEAAKMAPRYSPQLALLYDQEKRKGNANRATLAVARKLVAYLMAVDRGQHNFQVTEARHCAAA

SEQ ID NO: 96976 - protein, 389 aa, unidentified
MAKVVIGVDPHKRLNAVVVINVKGKVLARRQFPNSAEGFRELRAFGRQWRPRTWAVEGCNGVGKHLAQRLVAAGERVVDVSTRRAALVRVFAGGNGRKNDDVDAHSVALVGLHTRDLPEVRKDDRSVSLRLLANRRKELVDLRTQCVNRLHRDLVGLISGGAPQALTAVKAKALLASVRPRDEMGRLRRRLAADQLADLVALDKKLAAVEAEIRSTVKRTPTGLPDIYGIGPVITATVIGEVGDVARFRDRHHFASYNGTAPDDKGSAGRPVHCVNLKGNRRLNHAIHMAAITQIRNRRSPGRAYYDRKLAEAKTNKEALRCLKRRISDVVYRQLVADAERQAKAGPGGQTGTTLQSSVTGPTPTAGSSDKPQPGPANEATPTPLRAAG

SEQ ID NO: 96977 - protein, 352 aa, unidentified
MATTAQSAIAVIGIDIGKNSFHVVGLDGRGAIVLRQKWSRGQVEARFANMSPCLIGMEACVGAHHLSRKLKALGHDARLMPARYVRPYSKGQKNDFRDAEAIAEAVQRPTMKFVVTKTADQLDLQALHRVRERLVSQRTGIINQIRAFLLERGIAVRQGQRFLRVELPRILATPPDVLSPRMVRVIEGLASDWHRLDERIEGLSSEIEELAKRDAGCERLMSVPGIGPIISSAMVAAIGTGDSFSKGRDFAAWLGLVPRQISTGDRTILGKISKRGNRYLRVLFVQAAWVVLVKVKPTRWQGHGLRPWIEAAKKRLHHNVLAIALANKLARIAWSVLAHGRAFETNKLQAAA

SEQ ID NO: 96978 - protein, 365 aa, unidentified
MDTEPIVFAGIDWASTEHQVCLINTGGPQQRTFPHNADGIGAMVDWLCRQAERPEQIAVSIETPHGPIVEALMDRGIAVFAINPKQLDRFRDRFSPAGAKDDRRDALVLASSLRTDRHCFRRVEAMEPIVVELREWSRMADELKQERNRLTNRVRQQLWRYFPQFLDLTDDPGADWVLAVWAKAPTPLQATRLTEKKIASILAAHRIRRITAAGALAILKRPALIVAPGTAEAAQAHIASVAERLRLVNRQIKMVTRHIDALVIQLAGPESQPGQAAEQHDVTILRSLPGVGLIVVATLLAEAPQAIQTRDYHALRSLTGVAPVTKRSGKSCHVEMRQACSHRLRTAIYHWARVATQHDAGSRSR

SEQ ID NO: 96979 - protein, 337 aa, unidentified
MKYSGIDLHSNNSVVTVTDETDRVVAEKRIPNDLSRIIQFLLPWREELAGVVVESTYNWYWLVDGLQEAGFVVKLANTGAIKKYDGLKHSGDEADARHLAQLLRLNILPTGFILPPEQRALRDLARKRMQLVRSRTSHILAIENIAARQRGMKINSNQVKRLTADEVDQMEFTGDVGLAIKSNLAVVITLNAQIDLLEKRLQEKMNERAEFALLSSVPGIGRILATIILLEIGFIGRFADVGNFASYARCVDSQHMSNGKKKGEGNTKNGNKYLAWAFVEAANFALRFNAEAKRFYERKKAKTNTVVAIKALAHKLARACYHILKEGKPFDVTRCFA

SEQ ID NO: 96980 - protein, 392 aa, unidentified
MYIVGIDIGKNHHEASIVSPEGKQIGHSLRFATTHKGADSLMSFIFNNIGNSSCIFGMEATGHYWYPIYSFLKARGYTIYVINPIQSDSLRKMYIRQTKNDSIDSFLIAEVIRFGQFTTTSMADENILAIRQLCRYRDSIISSRTEIKLRIGTIMEQIFPEYEKQFSSLWVSTSMGILEKYLTPENIENAPIDELFEIIKDKSHNRLTRAKAISIKEAAADTFGIKIAQDAFSFQLKQLIDRMNFLDKQIEALDCQILEYYEKFDCYLHTIPGIGMIAAATILAEIGDINRFKSSSALVAFAGIDPTVRQSGEFSSTHNHMSKRGSPYLRHAIFLAATTCSFHNSPLNAYYKKKREQGKHHLTATGAVARKLTTVIYAVLRDGKPYEPKSFC

SEQ ID NO: 96981 - protein, 347 aa, unidentified
MAHFAGLDVSLEETTICVVDETGRLIKELRTASEPPALITALTGLGLPLERIGLEACSLTAWLHDELRAAGLPAVCIETRLANAAMKTMPNKTDRNDARALAQIMRTGWYRQVHVKSRQSRLWRSLLVARRTVLNEMRAIENVVRAILREGGIKLGTPARAAFAGRVREMAGDDPLILPLVTPLLAILATMLEQLDRLTRQVLAIVRGEAVCRRLMSVPGVGPITALAFRATIDQPERFRQSRNVGAHLGLTPSRYQSGETDIQGKVSRCGDELARTALYEAAHSLLTRSRKWSSLRAWGMQVAKHRGMARARVAVARKLAVILHRMWSDGTEFRFGKEPAAAVAAA

SEQ ID NO: 96982 - protein, 367 aa, unidentified
MSYNYHIGVDYHKAYSHIVVQDTTGRTLRGGRVRNDRQSVCGFLSPYLENAHAVMEATRNWTVMFDWLDDLCGEVVLAHPLKVKAIADAKIKTDKIDATILSHLLRADLIPAAHAPGIRAREARAALRERMFYVRLRTMVKNRIVTLFDRYPEERAKLKPLSDLFGRAGREQLGALAVSPLDRIQINRSLVLIEDLNRRIKETEATIKEQSKGNANVKRLKTLPGIGEFFARLIDAEIDEIGRFRTAAKLAAYAGLVPSTYSSGGKTYQGKIVKQGNKWLRWAFVEAVAPAVSSDPDLKEYYERLKATKGPNRAKVATARRLLTIAFQLLRDGRSYERRGARPDGRSRQSRLSSLLLSEPGKAGLRS

SEQ ID NO: 96983 - protein, 339 aa, unidentified
MKEVTIIGVDLAKNVFQLHGAAADGSVVFRKKLTRVQFHKFMSGHPACLVAMEACGSSHYWAREVAQMGHDPRLIAPRYVKPFVKRHKNDTADAEAIVEAALRPTMRFVDPKTPDQQGGAVLFRTRAQFIRQRTEAINALRAHLYEFGYIAPVGVQNVKQLVEIVDADNSDLPALVRFSCRELIEQISRLTERLAVLDKEISRLSGEVARRLRTMPGVGPITALAVETFAPVMESFRCGRDFAAWLGLVPLQRSTGGKQILGKTSKMGQCDIRRLLIVGAMAVVGSSVRRGAPKGSWLEKMLARKPRMLVAIALANKMARGLWAMLTKNEEYRGPVMVG

SEQ ID NO: 96984 - protein, 407 aa, unidentified
MQVTFGIDVSKSTSTVCELIGESKNELTITNDRPGFIQLLHELAAFSKHPQIIFEATGVYSRRLQAFLEDYGYEYVVLNPLKAKKEMNMGLRYNKTDKTDAYHLALIQRLYHHPINQLQSQTYKQLNALSRFYDQLTSDLVIAKNRLHQALQSTFPEIENLFSSAKGKNYWQIVVRYPHCDLVRREDKKQLINWLMSLKGIAFKHALRTADKLIELAYQAYPVVSCSSIEVEQVQYYAHRLLNLSDQRENLIARMVKLAKSLPNHDLENLESIPGFAQTTAVRVLAELGDLRRFSNPNKINAFIGIDPGRYQSGEMDASLSITKHGNAVARKILYRAIGQIDQAAKTQHCHIADYYENKKLSSQTKGFKKIAIASIHKLIRTMYALISNNQLYDYDVAKHNQKRLLS

SEQ ID NO: 96985 - protein, 427 aa, unidentified
MAKGKIDPEPEFAAFVGIDWADRKHVWCLQAADSAKRETGELEHKVEAVEAWVAELCQRFGHRPIAVAVEQVKGALVFLLNKYECLHIFPVPSTMTAKMREALYPSGAKDDPRDADLLLDILWQHRDKLRRLSPDNEATRRVQNLVEERRKLTAEKTAQGNRLTSYLKIYFPQMVEWFEKLDMPLVCDLLERWPTLEELQKVSTEELRTFFRQHHCHRGLRERRILAISGAIPAKGDRAVIEAKSAVVKVIVQLIRSLLQGIAELDGKIEEVAAEHPDFFIFESLPGAGAVMAPRLLAAFGSQRDRYSCADELQTYSGIAPVTERSGKGKWVHFRWACPKFLRQSFHEWAGHSIVQSAWARAYYQQQRDRGSDHHAAVRALAFKWIRIVFRCWKDRVAYDESKYLPALAKRGSPLDKLVVVGIGTSL

SEQ ID NO: 96986 - protein, 440 aa, unidentified
MSYKIAGIDVHKKVLMVVVIDASTPEEKPDRRRFATMPSDLQRLSTWLRAQGVEEAVMESTAQYWRSVWLELEPYMRLQLAQAFSNRAPRGRKHDFKDAERLVRRLIANELILSFVPDGEQRTWRSMTRMKVQLARDRVRLQSQMECLLEEMRIKLSIVVSDLLGASGLRILHALAEGETDPKQLALLGDDRLKCSEEQLVDALTGRAQPMHRQMLALQLERLQLIDGQIAKLNGLIAQAMKPHQDALVRLAEVPGLGVDSAQQVIAEVGVKASTFPSAGDFASWVGTCPGKDESAEENHSSRSAKGNKYLRRVLNQAAHAAVKKNGSHFQAVFRRLLPRLGSTTSSCFPATGPATASTSSTTAVYREPRIFGLCRSREIANPSRSCPARRTRSAPNPSFLRTGDGWRTGRMNPDRAKPMSLPSRAVPANGRSRRTGNTA

SEQ ID NO: 96987 - protein, 367 aa, unidentified
MAKRIKKERSSKTMAEGVAAVGLDLSDRRARFHAIDDEGETVETGTVAMEAPHLQRWASNIPPTVMAIEAGTHSPWVSRLLTACGHEVIVANPVKVALITRNIRKSDAVDAEYLARLARLDRKLLHPIQHRGEQAQLDLQVIRTREIMVQSRTKLIGHVRGAVKSFGARLPKCATEAFVNKTRKVIPEQLRTALDPVYVQIEHLSTTIAGYDRQIETTARERYPEVERVAQIKGVGTLTGLTFVLVLEDASRFRRSRSVGAFLGLTSKREQSGEEDPQRRITKAGDRLMRRLLLQSAHYILGAFGEECDLRRHGMRIAERGGKRAKKRAAVAVARKLSVLMHRLWISGETYDPLRNGGKLAELPSAA

SEQ ID NO: 96988 - protein, 459 aa, unidentified
MAKVSKTKKTKSKTKREWDEGLSALNRNAAGIDVGSAEHYVAVPGGRDPEPVQTFGSFTADLHRMAQWLKACGIETVVMQATGVYWIALFQILESYGLQVNVVNARHTKTLPGRKTDVLECQWLQKLHTFGLLNNSFRPTEEIQILRTYLRQRENLVAAGSTCIQHMQKTLTQMNVQLANVISDISGVTGMAILRAIVAGERDPDRLSTLKHGRVRASRREIARRLEGNWREELLFVLEQSLELYDLYVRKIAVCDQRIELHLKTMTSKIEPGQSSDPAALPLTRQEPRFSLKDHLCRITGVDLTKVAGLQVQTVQTIISEVGVDMSRWKTEKQFASWLGLCPDNRISGGKILKSGTRQVVNRAATALRLAAWSLIRSQSALGANFRRLRSKLGAPKAITAMAHKLARLIYRMMKFGTEYVDKGMAAYESRYRQHQMKWLSRQAASLNLQLIPVPEVAG

SEQ ID NO: 96989 - protein, 433 aa, unidentified
MNAPHPYDVVIGLDRSDAKADLHLINLHTGQHRSQTVDTSPEALCQWLLELRQQHPQARVALCLEQPAVHLVPFLEAYAWLTLYPINPLTLQKYREAFVTSRAKDDSKDAYYLAELLLSHHEQLKPWAPEDSLTRALQQLVVHRRAVVDERTALTNRLQALLKQYFPQALNLCGEDLWRPLATSFLLRWPSLQAVQKVRHATLQQFYYLHGSRSATLLEKRLELVQKAVPVTDETALIQSFVLRVQLIARQLQMVQQTIADYDQRLAEAFAQHPDHDLFASLPGAGPVLAPRLLASLGSQRQRFESATHLQQYSGVAPVTKRSGGTCHIHRRYLCAKFQRQSFHEYAKESILWSRWAAAYYLQQRTKSSSHHTAVRALAFKWQRIIWRCWQNHAPYQEKIYEAALRRSRSPLVALLPKIEVRKSPFKNPVNKK

SEQ ID NO: 96990 - protein, 437 aa, unidentified
MPKPSKPTAVAMPEGPCDTLPPGECAALLGIDWGDKEHSIALLDCGSNKVEKTTIKHSAESLHTWLDALIERFGGHPIAVAVEASRGAIVAALLERPNLLIYPIHPSSSRRFSMAFSPSGAKDDGPDAATLLEIIRFHRHKLRLIAPNDEGSQRLSLLVEARRTMVDRRTLLCNQLKSLLKNYYPQALELSGEKLYAPISLDFLERWPELRSLERTKPQTLRDFYHKHQVRRPDKVEKRLALAASARSLTSNRALCEVSIIELEVLTAEIRLVQKHIAKTEKAIEQAFATHPDAYLFENLPGAGAAMAPRLCVLFGTDRNRWRNAQELQTYYGIAPVTEKSGSKKWVHWRWNAPVFARQSLVEWAGLSVKASVWAKAYYKQQEDCQKPHAVIIRSLAFKWLRILWRCWKDRKQYDEAAYLSSLEQRNPKLFNAIQST

SEQ ID NO: 96991 - protein, 342 aa, unidentified
MLIIGCDYHPGMQQIAWFDEESGECGEQRLEHGTGEAERFYRELKRLGVRGRVGIEASGHTRWFERLLAELAMELWIGNPAKIAAQRVRKQKTDREDARLLLQLLREDRFPKLWVPNPENRDLRQLLWHRHRLVQMRTRVKNQLHAIALNEGVQRKSRLWSKAGRAQLESFALAPWTAPRRHDLLALLDQLTPQIAELSQAVEQEAERRPEVQRLMTHPGVGPITALAFVLVLGTPDRFRCGKQVGSYLGLIPCEDSSAGQQRLGHLSKQGNTLLRFLLVEAAQAAVRCDPEWRRRFVHLAMRRQRNIAIAATARKLAVSLYWLWRKAGDPSAAPQSGSHVG

SEQ ID NO: 96992 - protein, 362 aa, unidentified
MVVNVGVDLHKTQFTVSVRDTKNQFAEYQTDEDGYKKFLGRVKAWQKKGALVRVGVESTGNTRFFKNQMEQAGIEVVVINTLKFKVVNESVKKTDRHDAATIAEFLEKDMLPEAKLCSEQSEQLRRLIKVRTTLVRTIVTVKNQIHALLTGLGMQDSKASLQSKRGRQKILDTLARTGNGLVVQPLFDTIERLDENVKMIEQELAKLTESDETVRLLLTIPGCGPITAWTIRAFTDDINRFSSAKKYSAYAGLVPWVQNSNETVRHGRITKRGPEELRTALVQLVLGMRRCKQTLSWRLMERYCVMKSNKGSGKSIIATARKVSKIVWCMLAAGEEFNESLMVDKKLKAKADAMRTVGQKSA

SEQ ID NO: 96993 - protein, 371 aa, unidentified
MADYREAFVGIDVAKLRNAIAVADAGREGEVRFFGEVDASEESMRRVIWRIATKFDRVYFCYEAGPTGYGLYRLIRSLGHECTVVAPSLIPRKPGDRVKTNRRDALALARLLRAGELTAVWVPDEGHEAMRDLVRARAAAVETLRVHRQHVSAFMLKHGRIYPRKKGWTMRYLRWLQEQPFDHSAHQIALQEMVEAVRVSKERVDRLEGVIEEFVPAWSLAPIVRALQTLRGVDLIVAVTFATEVGDVQRFESPRQLMGYLGLVPGERSTGESVRRGGITKAGNGRVRHMLVESAWTYRHPPRVGAKKLYRLEQAPPKVREIAWKAQTRLTARYRMLSGRGKRTTVVCTAIARELAGFMWAVAREVQAIRS

SEQ ID NO: 96994 - protein, 347 aa, unidentified
MVTFGGDSHKRTHTLVAVDENGRQLGERTVAATPSGHMDALGWAGQWPQRRWALENCRHLSRVLERDLLSAGESVVQVSPKLMGSARRSGRELGKSDPIDALAVARAALREPHLPVAQLEGKSREVKLLVDHREDLVGERTRIQNRLLWHLHELEPGYQVVAGGLLRVVVLAEVSRRLESHTGVVAEIAQELVARLAELTQSVKRLQRRIETLLRELAPHLLSLPGCAALSAAKLVAETADVSRFRSSAAFAMHNGTAPIPVWSGNQERHRLNRGGNRQLNVALHRIAITQMRLGGAAATYVARRLAMGNTKTESIRALRRQISDEVYRRLRQDHIERSTAPIAVAA

SEQ ID NO: 96995 - protein, 359 aa, unidentified
MTATMTYVGLDVHARSTHAAALDVTSGELRRARFGGGSEEVLAWLRALPQPLRGCYEAGPTGFALYRAAEAAGLRLDVVAPSKTPRAPGDRIKSDRKDAELLARLLLAGQLKPITVPSSSLEAARHLCRAREQVRGDLMRCRHRVSKLLLLHGRLYERSAWTKLHRRWLEQQRFDEAASELAYLDALAAVDGLVARKAALDERLSRLACEGEWWPTLARLRCFRGIDTLSAFVLCLEIGDWTRFSRPAKLASWLGLVPSLDQSGESRRQGAITKSGSGYARRLLVEAAWHYQRQPRIGVTLQNRQQGQPAHVLQIAWRAQHRLFRLYGRLRARRKPENVITVAVARELACFLWAAAVAV

SEQ ID NO: 96996 - protein, 430 aa, unidentified
MISHSHSSPPHAEPEPAAKPAREFAAFVGIDWADEQHAVCVLAGEQLRREVLPHTPAAIAAWAGGLARDFGGRPVAVMVEQSRGALLQALTQYPQLVLFPINPKQAARYREALVHSGKKDDPTDAECLARFVREHHRELRAWKPADPLTRQLAQLVELRRKAVDSRKQTTQQAEARLKQYFPLALELGDTALAVAVLERWSTHQALARANPATLRKFFAQHGRRNTDQVNALIARIRAAQPLTTDRAIIDPNALAVKFLVKELRLHEAAVDEFDAAIAQCFAAHPDAELFRSPPGAGAALAPRLLVAFGPDRDRFASADEVQAYSGIAPVTKRSGKSCHVTKRFFCNKFLRQTFHEFADHARKWSTWSKAFYEHLRARGHRHHAAVRSLAFKWIRILFRCWKNRQPYDENRYLQQLQSSGVAYLSNLPSP

SEQ ID NO: 96997 - protein, 339 aa, unidentified
MAKHNLIAVDLAKNVFQVCGMTRQQQITFNKSIRRKELADFVANQPPVEVVMEACYSSHYWARRFQEMGHTVKLLPAQHVSPFVRGNKSDHNDAVAIAEAARRPNILPVPIKTTDQQDIQCLHRMRERYVAHRTGLINQTRGLLSEYGIIAPQGHKAFCQLLRDVCQPECDSISPLLKAQLNQIVDEYYGQTDRIEEITQTLTEIANKHPLCRLILTIPGIGAINATAIYSAIGNGSQFSNGREFAVWLGLTPRQASSGNSFKTGGITKRGNRYLRKQLVHGARSALSRCRNRQDQLSRWGNQLVARRGIQKACVAMAGRMARLVWVLLQKQEAYRSLP

SEQ ID NO: 96998 - protein, 345 aa, unidentified
MSTAEVSTFAGIDVSGHELSVALRRGHGDDKPAMAKFPNQPSGHKALIACLLRGSGRVRVCLEASGNYSLDLALTLQAHRQVEISVINPRRARRFAESLGERSKTDPVDARVLCEYAARMRWVPWQPPSSVALHLRALTRAIADLGTIHTQQNNRAHAAAASQALPVLVVKEMQRHQKYLEQRMTRLRREALRLIVRDPELDRRFRLMLTTTGIGETSALQILGELAVLPDMLDARQWVAFSGLDPRLFKSGKSVEKRPRISRAGSRHLRRALYMPALVALRRDPYLRAFYQNLLARGKARLQAVVAVMRKLLHALFAMFRTNQPYDGSKLCAVALAVNAIANCA

SEQ ID NO: 96999 - protein, 344 aa, unidentified
MTTEAVPTLFAGLDLHKCNVFCAIKDSEGKPVYRQRLPTELPTILQALDPYRPHLKAVAVESTFNWYWLVDGLQAAGYPVRLANPAGMDAYSGLKQTDDQSDALWIAEMLRLGILPEGYIYPKAERPVRDMLRRRMLIVHQATQTLLSLQSMVTRQTGQAVSAAKLQKWTRQEVSESFADNYSQETAVAMLELLREQRRIQHSLEKKVLTVVKLHGPFQRLLTLPGVGNILGITITLETGPIARFGSAGRYASYCRAVNSRCESNGKKKGENNRKNGNKYLAWAFVEAANFAQRYSPRAQKWFASKTARAGRVVAVKALACKLAKAAYYVLRDDVDFDEKKMFG

SEQ ID NO: 97000 - protein, 419 aa, unidentified
MFEEGKRTHQSGEVSFSHRKNRAFGQVDVRGHRDFDRRALRGLNEHRRRRYVLHIINLKSSDDIVASIPKVSRERTMQDVATVGLDIAKQVFQANGADASGETLFNTKIKRENVLEFFSKLKPCLIGMESCATSYHWARQLLEFGHDVRLIHTSYVKPFVKRGKTDANDAEAINVALTQKTMRFVPVKTLNQQAAITIFRTRSLFVSQRTQLVNALRGHLAEAGLIAAKGIQNYSKLVKLMESAADTVLPTVMKKALTDICDQIHRLNDLVTKLDKEIERRVQHDENACRLLTIPGVGPKTAMCVIATIPDIHRFPSGRHFSSWLGLTPRTHSSGGRSVLSRITKMGNSELRTMLYLGGTVIMMRDKKTPIGRWASRLRARRPYKVAVIAVANRIARIIWALLTNGGVYDPTYGREASA

SEQ ID NO: 97001 - protein, 309 aa, unidentified
MKEHLVYLGVDIAKSYLDGAIENEKRRFSNDAIGHRQLIEWIKQMPAKVQVICEPSGGYERRLVQALARAQIKVSLVQANRVRQFARAAGILAKTDRIDAEVLCEFGKVMQPQTVTAATLEQEHLRELESQRRHLTRLLVMEQNRGARVSDASVVKLNRSLINQIKKQIEKLDLLIKEHIEQSPRLSAKAEKLTSIKGVGLRTAALLLAQMPELGQLNRREVAALVGVAPFNRDSGKMRGKRALYGGRRPVRHGLYMAALVAARHNPILRQFYLRLRAAGKPAKVALTATMRKLLIVLNSSLKPDPLYA

SEQ ID NO: 97002 - protein, 367 aa, unidentified
MKNTIVHHEGAASLEAVASKVKPKGAQIKIGLDMHARVYVAVAQYDHLLLKAARRLSPNEFVPWVEALLGQGHSVHVVYEACGFGFSLYRQLMAAGAQCYVIAPRKLDEECSRVKTDPRDATTLCQRLSRYLEGNTRELAVIRVPTEEQEQARHVSRQRTQLVCHRQKLEAQGRSLLISHALPAPAHWWKEQTWRRLGQHLPAWMRARLEMARPALLSLQAQINALTSELEAFSSFPLPRGLGKLTSVVLTREICDWHRFNNRRAISSYTGLCPGERSSGSKRVPGSVTKRGNPRVRAALVECAWRMVRFQSHYPPVQKRLAILAKGSRTLGAVRKKAIVAVARRLAVDLWRLHTGRCTAEQLGLKL

SEQ ID NO: 97003 - protein, 322 aa, unidentified
MSLPGPLCVGIDVSKATLDIAASSAIEPFSVTNDTDGFDSIIAELRKYSVALVLMEATGGLEAAVACALQAEGFELAVVNPRQARDFARAMGYLAKTDRIDARVLAQMAEVINRHPERSRFIRALPDAERQVLNAMVVRRRQLIAMLVAERNRLYLAPPQSRKSINTIIKALEDELARIDDDMNNHIRSHFKELSERLSSIKGVGAMTVAALLAEVPELGRLSRREISALVGVAPVNRDSGTMRGRRTIFGGRAGVRTALYMAALVATRYNPVIKVFYTRLVAAGKPKKVALVACMRKLLTILNAMLRKNEEWNESYHHVAP

SEQ ID NO: 97004 - protein, 433 aa, unidentified
MREVEEEPLFAERAAGIDIAKAGVEVTIRVPSETRAGRRQQETRSFATTRRDLLALADWLRSWRVTRVGMEATGDYWKPVYFVLESQGLDCELYHAAAVKALPGRPKTDRADSVWLARITERGSLPSSFVPPAPIRALRTHTRYRRHLTQARTAEKQRVEKLLEDGHLKLSSVISDIHGVSGRAMLEAIIAGQRNPTALAQLARGTMRGKIARLEEALDCCFLTEAHVAILAMMLAAIDSFTAQIDELTARIEVLAEPYLHQITQLDAVHGTGTISAQDVIAEIGADMTVFPTAAHLVSWAKWCPQVAQSGGKRKGANAAGRGNPYLSAALGEIAISAGRTQSFLGAKYRRLVKRMPKKKALVATGNSVLVIFHALLSDPDASYRDLGPDYHQQRTSIRRQARNHLRSLERLGYHVTIQAINPDTGELLTTTA

SEQ ID NO: 97005 - protein, 341 aa, unidentified
MYSIGLDISKATISIHVSLNSLDLEIENSAKGLKSFYSKLKKLYKKELEKVVFVYEPTGSYSALITKFCANKNIKAFIINPKQSSNFAKALGYRSKSDKIDAKMLSLSISIAKQSEIKVPVINATAEDIKELMSYYIFTVKQRVAVQNHHEALNVKDGNSYALKDLKKRIKEMKQKEDEIIQKIDDIIKEDDKLLNDYENIKTIPGIGTITAIVLLHLFIKYPQANQKQIVSLVGLDPVIKESGTSLNSKPRISKSGSRLYRGVLFMATMVSIKYNDQMRTFYDRLKTNGKHSTVAQIAVMRKLVVIAHSLYKNNSKYDVQVYQLACGSTQTKSENKEVFA

SEQ ID NO: 97006 - protein, 503 aa, unidentified
MKTQPSPRRATRQAARQAQRQAQRPWRKKRTMLKAPPRHAAVLEGLERIHRYAAGVDVGATQNFVCVPAHSVQQGQPTVRAFGVFNAELDATVEWLKACRIRTVAMEATGIYWMALYEKLEAAGLEVVLVEPSSVKQVPGRKSDVLDCQWLQQLHTYGLLRGSFRPTAPMRRLRVLTRQRAELVQSAATSQQWMEKALVPMNLQLHLVVSDVVGATGLRILEAILAGERDPRALVRLRDVRCSKSTEAQMEAALTGHYTEEGLFVLRQSLQAWKFYQKQLAVCDKQIERVLVELPTACARPQRPVPAKPVPVAAEAVAKKKKPAGGNNALSIDLKKLGEQLMRICGVDLTAVCGLNLLSVLMLVAEIGVEMSRWPSAKAFCSWLGLCPGTRISGGKVLSRRTRRVVNRASVILRVAALAVGRTETWLGRFYRRKKAQLGAPKANTATARKLACVIYHMLKYGEDYVALDVEAYERQAREHRLRYLRREAKKMGMELIEKKQEA

SEQ ID NO: 97007 - protein, 322 aa, unidentified
MKYIGIDVSKATFVVAYSSDKGGEIRIFNNTTTGIKQFIGALPKDSSIHCVMEATGNYSAMLLYLLNVAGIAVSMENPLKIKNFARAMLSTVKTDKIDARLIALYGEKMNPQPFKIQGEAILRLRQKRTVIRQLTKQITAMSNLRGSLACLPVPDKGATHTVDETIEFLEKRRDRLQSELTDLVEVEFSRQLALLTTIKGIGITLATALIITTGGFTYFQNAKQVSRYLGICPTYEQSGTSVNIRGHINRNGDAYTRGLLYVAAWTASRFNTKCGETYTRLRQNGKPGKLAMIAVANKLVRQAFAVVTHDKEYVDGFVSNRP

SEQ ID NO: 97008 - protein, 344 aa, unidentified
MDATTVGVDLAKNLFEIALADERGHIFERQRLNRARFDRFFVNRVPCRIVMEACGSAHHHARRLRAQGHEVCLLPAQYARAYVRRNKTDAADAAALIEAARCPDIRPVPIKSVDQQALQQLHRLRSQWMGARNSRISFLRGCLREFGISIPLGPKRAIDAVRATLADPASPVPSLLHPSLIELLEEIDSLEQRCKNLDRELKRLHVHDPVIERLLKIPGVGDLTATALRASVVDIQRFPTGRHFASYLGLTSREHSSGERRRLGRISKQGDPYLRTLLIHGARSVLLAARSAQRRELTLDRLRTWALDLQERRGHNKATVALANKLARIVWATWRHERDFTSVS

SEQ ID NO: 97009 - protein, 361 aa, unidentified
MSLFHLGIDVAKAKLDCALRLPNAKFRTKVIANSDDGFTQLVDWLASHQATPVHVCMEATGIYWEELAQFLVTAGITVSVVNPAQIKAYGASRLTRSKTDAIDARLIADFCAERQPAPWLPPSPEEIALRALVLRLEALQTMRTQESHRLGVARDAVQNDIQQHLDWLDNAIQQLVKTINEHIDKYPDLKQKRELLDSIPGIGERTSAIILAFYADTGRFANSRQAAAFAGLDPRQYESGSSVKGKPRLSKIGHAFLRKALYMPAMVTLYKTAWGKRFKDRLTGAGKPPKLIIGAMMRKLVHVAFGVLKSGNTFDPALHGASLRLSTLRYLTALALSGEGLWHPAAFLAAEFIDGFRIASA

SEQ ID NO: 97010 - protein, 367 aa, unidentified
MTKFIISGMDVHDKSIKLMWAADNGTPAVLDLRNNEDGRWALIERLKTEAQRNGSTAQVVVCYEASCLGFGLYDELTEAGIICHVLAPNRIRKSRKDVKRKTDLADAKMLFETLRGHVLAGNDLPTVWVPPKELRDHRDLVRMRLSVGAKLTEIKNQIGMLLRKNQVRRPQGSSKSWTAGHRAWLLGLTREQSVLSPITRIVLASLLRQLDQMEAEESKLDREILRLAETPRYRASCLAMNRKIKGVGIFTAMVFLTELGDLNRFRNRRELASFLGLTPSSDESGEVSNRKGHICRSGPSRVRWVLCQASWCHITHSVDARATYDRIRKHSDKLKKVGLVAVMRKLAILMWHTGKDSAVGLATPAAA

SEQ ID NO: 97011 - protein, 360 aa, unidentified
MHATTVAVDLAKSVFQIAVADEHWHIVETQRLTRTQFERWFANRAVGLVVMEACGSAPHWARWLNSLGIEVRLLPAQYVRAYVRRNKTDATDAAALLEAARASDLRPVRVKSAEQQALQGLHRIRSLWMGTRTSRINALRGFCREFGIAIPQGARTGIEALGRVLADPQSAVPELIRHTAGQLLEEIRLLEARIAQVERQLSLAARQSPACTLLLSVPGVGLLTATAMVAATSGDVTHFTDARHFASWFGLTPREYSSGSSRYLGRISKKGDRYLRMLLTHGARSVLRAAQVAQSAGKQVQGVRCWALQVQGRSNHNKATCALANKLARICYATLRDHKPFDEAAHLSRKESRQSFVMPA

SEQ ID NO: 97012 - protein, 355 aa, unidentified
MPILADCVDAVVGVDTHRDTHETELAHPSGAPIGTQAISNDTGGYAELVAWIVEHAPGPRVVVAIEGTRSYGAGLARALTEAGLTVVECEQPTRTARRGKGKSDAIDAHLAVLSALQLDADRLPTPRADGDREALRMLLNARDELTTTGTGQTNRLKALLLGGDDTDRRLGRGKFTDSDLATLARRRPPREASREQAVRHAELRRLAVALRDGRRELKTNRTQLERIVDDMAPGLTDRRGIGPVCAAQAIVSFSHPGRCRNDAAFAALGGLSPLQASSGRTVRYRLNRSGDRALNKAIHTIATTRMRCCPTTRAYVERRIAEGKTTKEVRRCLKRYIARQLHRFLTAAMTPIVAS

SEQ ID NO: 97013 - protein, 327 aa, unidentified
MSKHSMVCAGIDTAKHKLDVALEGCPETLQVDNTADGHVTLSGWLRQRRVERVGIEASGGYEQEVVAHLRRDGFVVVVFQPAQVRAYARFLLQRAKNDKIDAGLIAACTAATKKIHAPPDPRLAPFAEHLTLIEQITDDIARLKNRRESCRDSRIQGLWKAEIARCNKLLRIELKALAAAIRQHRDLAERLELILSVDGVGLRTAVAILVRMPEIGRITREQVASLAGLAPFNDDSAEHEGVRHIAGGRERLRGSLYAAALPAAMRWNPQLMALYQRLIAKGKPHKVALVACARKLLIFVNTVVERGTPWVAEPPHGSNPAEATPRP

SEQ ID NO: 97014 - protein, 409 aa, unidentified
MRYYLGVDWADQEHAVWTLDEGGRKISARTVAHTATGLSEWGRELDEWRAQGIELWAAIERPEGRVVDFLLDHGVVVYPLNPKALDRARDRFRQSGAKSDPFDARVAAEFLRTDHGHLTALQPSSAAAQELKYLTEDCQRLIRQQTRLLNQLTATLKAYYPRALEVAELSTALAGAFLTAYPTPDALSRLTERQWQRWARAQHLSASRTAELWSTLLAPQLPVPAHVVRAKARLMQTLLAALDPVLAGVAGYRQTIDDFFAGMPAAPTARTLPVGERGLLVPTLWARLGDAPDRWRSFRHLQAQAGTVPVTERSGKQRSIHFRYACDKTLRYVVDHLAFRSLQRSDWARAYYDQQRTRGHGHRQALRALGAKWLKIIFVMWRDGVAYREEHHLANIARQQLRCSARKTA

SEQ ID NO: 97015 - protein, 404 aa, unidentified
MDSPTRYAGVDWASRIHAICIVDEHGIALERFEVEHTEAGLRTLARRLIKAKVTGVAIERPDGPVIDALLAAGLEVFVIASRHVKALRTRYGTAGNKDDRADAYLLADVLRTDLPRLRPLQPDSPQTVTLRSTVRARKDLVQARLRLVQQLRAHLDLVYPGAVGLFADLDSPIALRFLLRFPSAAKAAWLSPKRMDAWLRGQGYCGRTSPDELYRRLGAAPAGLTGQEAEARSAVTLAFVRLLVSVREQIADLEHRIAEQLELHPDGAIFRSLPRAGQVRAATLLAEIGDVRERFPTPESLACLAGAAPSTRQSGQHLSVTFRYACDKKLRDALIDFADDSRFANPWAADVYRRAIERKKTHPHAGRILARAWTYVIWRCWQDRVPYDPARHRALQHVVLAQVA

SEQ ID NO: 97016 - protein, 345 aa, unidentified
MEQISRIGMDTSKHIFQLHGVNTAEEPVLRKKLRRKEMVAFFEKLRPMVIAIEACGGSHHWARLLQSFGHDVKLIAPQYVKPYVKRGKNDAADAEALCEAMSRPAMRFVPVKTAEQQAALMLVGLRDRLIRNHVQLANAIRGYAAEFGLTAAKGMCKIEPLLDRAAADETLPALARELFAFHAGEYAQLQEQLEKVEAKLMVWHRADECSRRLAQIPGIGPIGASMLVMKTPTPEAFRSARHFAAWLGLTPKDHSTAGKVRPGVITRAGEALRSVLVVGATAVIRQIRYGRGALSPWLVDLLKRKAPKLAAVALANKIARIAWKLMVSGQTYRANGRSPAMAWAA

SEQ ID NO: 97017 - protein, 380 aa, unidentified
MQYVTKFVGLDVSKEKISVAVADAGRELPRYFGTIAHTPAALRKLIKQLGPANSLAFCYEAGPTGYETHRWIESMGASCTVIAPSLIPKRSGDHVKTDRRDAEQLARLFRAGELTAVHVPSRDDESLRDLVRCREAAKEDTHRARQRLLKFLLRHQIHPPETIKRNWTKKHRYWLASLTFEHEAMQVVFTEMLHALEEIEHRMSRLDNALMQQATTGAKASVIQLLQSLRGVARLTAITIAAEIGTFARFRSPAQLMAYLGLVPREYSSGQSTRRGSMTKAGNSHLRRTLVESAWSYRHRPAVKGELAIRLEGLPADVQLISWKAQERLHMKYRRLVFGKSKPKNVAIGAVARELVGFIWAVARIAEQSEGFRSTNQQIR

SEQ ID NO: 97018 - protein, 419 aa, unidentified
MTDPPIQGASRYIAIDIHKHYLMIGGIDAHKRIVLQPRKVELHRWRAWAQANLHPTDAVVTHATTNAWEIYDLLVSLVGRAVVAHPAKVKLIADARVKTDKVDVLTLAQLLRADMLPEVWVPPLHVRELRALLSHRRRLVSLQTTAKNRLQSVLHGLNLRPPEGDLFAQKQRDWWNTVELSASERLRVDQDIATLEHIAPQIAAVDAELRRLSTSELWADQVPYLVQLPGIALLSAMTILGAIGDITRFACAKKLVGYAGLGAGVHDSGKTHRDKGITKQGRRDLRYVLIEAARVAVQTHPYWKREFARLAKRLGEHKAVVAIARKLLSVVWHVLMAKSADRRADAEQVAFKLMVWSWKLNDEQRGGLTSRQFIRAQLIRLGLGDELTHITRGGTRRPLATIEEVLALRPELRGPPNTT

SEQ ID NO: 97019 - protein, 358 aa, unidentified
MLSKGTTIDFNGQGVYAGIDIHLKSWKVTIMLGDREHKTFSQDPNAETLWNYLRKNFPGAVYHSAYEAGFCGFSAHRELEGFGILNLVVNPADIPTTDKEKRQKEDKRDSRKIAKSLRNGELVGIYIPSKGMEELRGLVRYRKTLVKEISRHKCRVKSFLYFNGIQIPLELGGNSTHWSGRFTHWLREVKLSTAHGKMVLDDTLDTAELLRKKLLKVNRHLRQVVGNGEYLEKLRLLQSIPGIGLISAITLLTEMEDILRFRNLDQLCSFVGLVPSTNSSGEKENVGRITRRNNRFLRSIIVEAAWMASRKDPSLLYSYGLLCKRMEPTEAIIRIAKKLLNRIRYVMKNETEYVHSVI

SEQ ID NO: 97020 - protein, 346 aa, unidentified
MSQHHYHVGLDISVRTTAICIVDAQGRVVHRAVVESDPVPIRDHLVGLGLSLSRIGLEAGTLSAWIYAGLVEAGLPAICVETRHMHAVLSARINKTDRNDALGIAQMMRVGLFKPVHVKTLASQQRRLLLTSRKLLQRKVYDIENDLRGQLRNFGLKVGIVGAAGFESRVRDLIAPLPFVEAVLVPLLQARSSLRTQLAKLHKMLLDEVRSDPICRRLMTAPGVGPIVALTNRACVDNPARFSRSNCVGAHYGLTPKLYQSGETARHGRVSKCGDALIRSSLYEAALVLLTGARGRWNPLKAWGVAVAKRRGMQKAIVAVARKLAIVLHRMWRDGVDFRWSAAQSA

SEQ ID NO: 97021 - protein, 353 aa, unidentified
MDRYVGLDAHAETCTLAVMSPTGRRLTSRVVETNGRALVEAIGGISGQLHLCLEEGTLSAWLHEILEPHVAEIAVTMPGEKDGPKDDLRDAWARADEIRRGAIETRVYKAPKHLTGLRSAASAYRMATQDVVRAKNRLKAVLLSRGILADSSVYGTAARKKWLKRLPPGHRQLAEWLGRELDAIEPLRDEAEEWLLKEAKAHPITRKLSTAPGFGPIRTAQLVAIVGTPHRFRTQSQFRGYCGLGIVTRSSSDWVRDGKRGKWVRAEIRQTRGLTRKRNPVLKAIFKGAATTVINQLVDSPLHADYQKLLETGTKPNLAKLTLSRRIAAIVLSMWKHEEVYDPKRHKVVTDKT

SEQ ID NO: 97022 - protein, 418 aa, unidentified
MSKIDKTHQKINFEKMIVAIDISKGTNWAVFRRPEGIDSKPIGFTNSRAGYNHFYSQIIWHMNKYNCRQYVVGMESTGVYGEPLLHYLESRNAQLVLVNPVHTKRIKEIRDNSPNKTDKKDPRVIADLIQLNCVLSVLIPKGYAAELRQLTHARERAIALRNGFISQLHAIVCKIFPEFFHVIKSLKGKTAQYLLRNYPDPTVITELSVDSLHSEVKRISRGRISQPKLVKYQELANETIGVKEGKRAILQEIKHLVDQLCNQTQFIQEIEKEISDILQKVPVSQRIMSIQGIGTITTATILGETGNFQNMQNSKEVEKLAGLNLFEISSGKHQGNKRISKRGRSLLRKILYFGALNVIKNDGVFKEKYQSYLKMGKPKPKALVAIARKLLRVIFAIVRDETRFDINYNQEQTFKKAA

SEQ ID NO: 97023 - protein, 422 aa, unidentified
MSNEAGSQKKQAGNCTAYHINSYPIGMENKLIVGVDIGKSTHYATILDCAGHKVGGVIKFANSLKGGQLLLERVLSVKSQDQRLIFGLEATGHYWLPLYSFLTEKGFSVYVINPYQSDAWRKMLLSSTKTDKEDSFVIADIIRFGHHEETKLADERMIALKNLCRFRINLQQQVTDSKRRVITILDQIFPEFAPLFSNVFGKTAQAILDTASTPQEIESISAYKLTNLVKKVSRGRFGKEKALELKSCAANSFGIKMALDTFQLQLELLLEQVSFLESQLNRIEQKISTLVKEINSVLTTLPGVGQVIAATIIAEIGDIKRFRNSSQLVSYAGINPTVRQSGSFMGNKNQMSKKGSPYLRLALWQASVTSIRFNPILKSYYEKKIKEGKNHMTVIGAVSRKLTGIIFSMLKNNKPFSFDRAL

SEQ ID NO: 97024 - protein, 428 aa, unidentified
MSAREAVEQEPEFVAFVGIDWADQKHVWCLQAAGSTQREMGELEHKPEVVEAWVSELCRRFGQGAIAVAVEQVKGALVFMLCKYECLHLYPVPSTMSSSMREALYPSGAKDDPRDADLLLDLLLQHRDKLRRLTPDNEATRRVQNLVEERRKLVEEKTAQLNRLSGYLKVYFPQMLEWFAKLDTKLACEFLEHWPSLEELQSSSPAEVRKFFRRRRGRHGELTEWRVQGIGQAMPAIRDRAVIEAKRLVVQVIARLLRTLLEGIATLDSKIAEAAEAHPDFFIFRSFPGAGAALAPRLLAALGSQRDRYASAEEVQKYSGIAPVTERSGKKKWVHFRWACPKFLRQSFHEWAGHSIAQSVWARAYYQQQRQRGKDHHAAVRALAFKWIRIVFRCWQERAAYDENRYLAALAKRGSPLTSVVAAAAISM

SEQ ID NO: 97025 - protein, 347 aa, unidentified
MTIVEAPPGITGGVDTHLDKHVAAALDPLGRLVGTESFDADAAGYKALLVWLEDFGEVTKVGVEGTGSYGVGLTRFLRRKGIEVVEVNRPNRQSRRNQGKTDSLDAVEAARAAISGRASGVGKTKDGPVEAIRVLVVAKRSARQARVKAIVQMRHLGFTAPDQLHSRLKGLSVTALVAEGAKLRATKSADTVTAATKASLSSLAHRIQGLDLEIAELDEKIESLLLATAPDLMARFGVGPDTAASLLVAAGDNPERLHSEAAWAHLCGVSPVPADSGKNAGHLRRHTGGDRQANSALWRIAMVRIAHDPETTQYFERRVKEGRTKRDVIRILQRYIAREVYRYLPRG

SEQ ID NO: 97026 - protein, 358 aa, unidentified
MKFYCGIDLHARRSSLVVIDEKGEKVGQATVKNELAKVLAFLAQFEGEVTCVVESTYNWYWLVDGLQDHGYETKLAHAYGLHLITGSKYKSDLRDAHRLARLLRLEEIPLAYIYPADRRPLRDLMRRRIRLVKERGRLRSCVKNTLSRYNVKVDDANSERAIAGGVDLLPLPDEVKMDLSMTVEQIALLTSQIERMEARLTKITVADPRFRELMKIPGVGYVLALTIYYETGEVSRFPSGRNYASYCRLVASTSKSADKEKRGKGGKQGNPYLKWAFCQAAMGAARHDAHLAAFRDRHASRRGGKNANLLANCILAHKLCLAAYKILKDGCEFKKEMIGLEAGRGYVGHLTEENSVVL

SEQ ID NO: 97027 - protein, 421 aa, unidentified
MFVLYQRCAAVDIGKDVIAVAVRLPGDGPDHRQTIKRTFKTFYGVLKHAARWLTEQQVTHVAMEATGIYSMPVYHALIEHGGFEQVLVCNAGHVRNVPGRKTDLSDAEWLVHLLECGLLRGSFIPPAQIKAARDVIRYRTKLTESRTSELQRLGNILQDAAIKVDSVASTITARSVRAMVEALIDGERRPLVLAELAKGRMRAKIPDLQRALEGRFDSHHALMCRLHLDHLDYLDEMIVRLDTQIQDMMQPFRAQRDLLTTIPGIGPFVAAAVISEAGADIAETFPSADQFASWIGVCPGNHESAGKRHSGKPRKGNQHLQHVLVECAWAASRTPGYLQSHYRWHVRKFGGSRNATAKNKAIVAVAHKLAIIIWHVLATGKPYADLGADYFDRRIDPAAETRRLIARLQALGHTVTIEPAA

SEQ ID NO: 97028 - protein, 372 aa, unidentified
MKYTTVYVGMDVHKESFSLACYTNEKEEAEYVQRTEAHYCKVLSYLEAMRFHYGDDVTFVCGYEAGCLGYTLYHQLTSHHVKCVILAPTSMPTQKGKKKVKTDKRDAQRIARCLAHHDYSAVHIPTAKDEETKEYIRMRDDHKLALKKIKQQILAFCLRHNCSFPGNSHWTQAHLRWLREIKLGDVYQEILEEYLLTYSNLVDKLERLDKRIEELAGDEDYAENVHKLSCFLGIKTQSALSVLTETGDFKRFGTAQQYASYLGLTPGEDSSGEGQDRLGITKAGNRHLRMLLVEAAQSYGRGKPGYKSRELKKRQEGNPPEVIAYADKANERLRRKYYRLVLSYNKRSNVAKVAVARELACFIWGMMTENVA

SEQ ID NO: 97029 - protein, 391 aa, unidentified
MIYVGIDVAKDKHDCFITNSDGEVLFKPFTITNNLDGFNELYQKIESVTEDATKVKVGLEATGHYSYNLLGYLIDKGLAAYVINPLHTNLYRKSLSLRQTKTDKVDARTIASMLMSDVNLKSYSDISYHNEELKSLTRYRFDKVKERAKLKSSVSRLVCILFPELEKLVPTLHMASVYSMLSEFPGAKHVASAHLTRLTNLLSEASKGRYSKDTAITFREAARASIGSNMPAKSLELKHTIKLIQELDSEIDEIENEIKVIMDEINSPILSIPGINYRMGAMIIAEIGDFSRFDSPDKILAYAGFSPSTYQSGQLDGAYAHMEKRSSRYLRYALYNAAKYVCHWDPTFAGYLAKKRAEGKHYNVAISHAVKKLVRVIYHLEKTKQQYIKVA

SEQ ID NO: 97030 - protein, 328 aa, unidentified
MQHEPLNDAARPLPLPVAGVDVSKGQLDVFIDTVGLRLRIDNDDAGVARLLATLPEHRVRLVVVEATGRYHRRLAAALLQAGVDVAVVNPQQVRAFARAAGKLEKTDRIDAEVLARFGRALGPRAAVKTPENQAVLSDLVSRRRGLVQMRVAEANRSHDQLPKLAREQSRKLLRLVEQQIEDLDREIAKLIEADDESGNKAAVIDSVPGIGPGTANQLVAELPELGKLNRQEIAKLAGLAPLNCDSGRFRGQRKIRGGRHDVRTCLYMAAFNARQKCRRFKDYFDGLMARGKLYQVAMTACMRKLLVTLNQMVKNNTHWDQNLHGALA

SEQ ID NO: 97031 - protein, 385 aa, unidentified
MLSKGGEKTQNRQGRGRSNTLEASKPGGEQDRRATTKPAESPNSRWGHKVEPELRKAGSGPKSKWVKVMSQYAELYVGIDVAKRTLEVALSSGELLSVVNDDAGIAELVQDLVKRAPALVVLEATGGYERKVWLALLEAGIPTARVNPRDTHHFAQAHRQLAKTDRLDARGLMLFAAQMRPRPDVAPAAADERLQELVGRRQQLTTMLAAEHNRHQQAISPANRRSIQTVIRFLERQRKALDQAIKKKLSKNAQARELNELLQTAKGVGRVVSATLIARLPELGTLTRRQIAALVGVAPYDRKSGDWDGRSHIFGGRADVRCALYMATLSAVRRDPHLRAFYRRLREQGKAKKVALTACLRKLAITLNAMVKNRTPWSPSCPTLA

SEQ ID NO: 97032 - protein, 429 aa, unidentified
MNISTSIAETDSKYAWSVGIDWADEKHDISQRCWADDRYQTFQIGADPVSVRTWLEELKELAGPQGRIVVGFEQNRGSLFEMLREQKDWLDLCPLNPLTLSRYRQSFYTSGAKDDPLDSQLIEELLRKHLDRLRLYEPPEPVLRQLDLLCQLRRKAVDSAVGLENQLRSHLKVYYPLAVELHEDLSSTLTLHFLKRWPTLQSLKRAKAQTLRSFYYQHHSRSQSLIEERLQKIARAEAVTEDCTLIDPLVLSVQGLVNQLLAHKASEAAFDKAVQKLALKHPDYEIFNSLPGAGPQMTPRLMVAFGSNRSALTDPSQMQKKSGIAPVLDRSSQSQRIHRRWCRPKFLCQTFHEFAAYSIPHCTWAKAYYEQLMARGKSHHTAVRALAFKWIRIIFRLWQDHTTYDEERYLRDLQKRHSPLSQKIQLQPL

SEQ ID NO: 97033 - protein, 319 aa, unidentified
MQDILEICCGLDVHKETVVACLLKGGPDSKPNACTRNFSTLNPCLEELRAWLEEENCRHVAMESTGIYWQPVYNVLESAFDGTIVLIVANARHMKNVPGKKTDIKDAEWIATLLRAGLLQGSFIPSQPIRRLRDLTRYRKSIVEEISSQKNSIEKHLQSCGFKLSSFLTDIFGASGRAIMNQLAQAGEITPEEVDTFVKKKARVKLNEIQIAVNGSMDPLQREFLTLLLKRLDDSYEHLQSIEQRIDEELLKYQRQLEQLDGIPGINKTAAAAVLAEIGIDMAQFKTAQHICSWAGLSPGNNESAGKKSPLEHSMGIPS

SEQ ID NO: 97034 - protein, 410 aa, unidentified
MEVLHPRCCGLDVHKETVVACVRLVIDGKTVKEVRTFSTTTASLIALSEWLAEAKCTHVAMEATGVYWKPVWHILSDESFELVLANAAHIKNVPGRKTDVKDADWISDLLAHGLIRPSFVPDPQTQEMRTFLRTRKQFVREKSSHILRIQKTLEDANIKLDSVITDIMGLSGRKMIEALIAGEKDPAKLAQLADRRVKASQQTLREALCGRVTNSHRFLLRLHLGHIDALDAAIAELDREVEAAIVPFRTAVEQVTTAPGINSLAARTILSEIGTDMSRFPTSGHLISWACICPRNDESAGKRRSTRIRKGSPWLKTTLVQCAWAAARTKDSYFNAQFHRIRARRGPKKAIVAVAASILTAIYHMLKDGTMYQDLGPNHFSARDKQRQKNRLIKRLADLGYVVELVPQAS

SEQ ID NO: 97035 - protein, 315 aa, unidentified
MTIQSKSKTRVNVGVDVGKHQLDVYLYEKALYFQVANDPAGVRKLLGRLGRYDVERLVMEATGRYQLLLAEHAFQKGLPVCIVKPLAVRRYAGAINRLAKTDRIDAEVIAEFGAKVQPRISTHKTKNLIAIKDLLSRRRQVMEMRTKELNRLQIMGASMEASCRRLIRVLDQEVARLEKKLDGYVSKEANWAEKRALLKTAPGIGDTMVYTILADLPEIGTMTNKQAAALVGVAPLNRDSGKLRGRRRIKGGRYSVRTTLYMATLSATLCNPVIKEFYQRLVNQGKHKKVALVACMRKFIVMLNAMVRDNCEWQY

SEQ ID NO: 97036 - protein, 318 aa, unidentified
MKSNMNQNINVGVDTGKFQLDIYIRPLDIYFTVTNDDKGIKEAVNIIKKHKPERIVIEATGRLEMAFILACAKAGLPFTIANPVHVKRFAGAIGQRAKTDKLDAQLIAHYSEAIKPKLSQLKPETMQAMSDLVTRRNQLLTMQTMEKNRLQIMPKALAMTIKPILTLFKNQIIKIEEKIAKLIESCPEYKAKNEILQSMTGIGKIAAASIISNLPELGYINSKQASALIGVAPINRESGRFKGHRKIQGGRPQVRTVLYMAMMSAMQSNPVFKATYQRLLAAGKPKKVAIIACIRKMIVILNSMLRDGVSWVAPKAIN

SEQ ID NO: 97037 - protein, 384 aa, unidentified
MYKHNILFIGLDTHKVSTEVAHVEDHRGVKPVHCGKIKTTKAAITKLARQYQSKYPQATLHFVYEAGPCGYWIYRLLTSLGHCCYVVAPSLIPKKPGERVKTDKRDALKLAKLIKDEELTPIYVPESEDEAIRDLSRARETAMKDLKDAKYQLKALFLRNNITCKVNDNWSLQHLRWLTELILPHPSQQIVLQEMIQIITERIQREKRLANELFHQVKSWRYYPVVKALQAIRGVRLLIATGLVAELGDLRRFDHPRKLMAYLGLVSKEHSSGDKRRLGSITKCGNSRARRLLVQGAHTYKHNAKISTELQKRQEGLPKEITDIAWQAQLRLCRRYNRLLSRGKHRNVVVIAIAREIAAYIWAIAREVVISPVNSRLRVSRVPA

SEQ ID NO: 97038 - protein, 732 aa, unidentified
MCRVLAVSVSGYYAWRQRPPSARARADAELSSRISAIHQYSRATYGAPRIHEELLAAGIHVGRKRVARLMKAADLCGVSRRKWVTTTVRAPDARPAPDLVERNFVAAAPNRLWVADITYIPTWAGFLYLAVVLDTFSRRIVGWAMATHLRTELVLQALNLALWQRRPAAVIHHSDQGSQYTSLAFGQRCREAGVRPSMGSVGDCFDNAMCESFFATLECELLDRRRFKTQTEARMAVFEFIEGLCEVHGENVAKLIDSSGGGSPYRGLRMMPRVTRWAPSSGVRRLARYPGPRLGFPARTSKSTSIGSEAFGNKRKRRERMKRFAGIDIGSERHVVAVVDEHRGVLVKATPFGEEAAGYQRLVELLGSPQDCLVAMEATGHYWRNLFAYLVSAGFSVALLNPIRTRRFAEEELERTKTDAVDALGIARFAAQKDPPASQLAEEGLDELREVVRLRERLLQDCGDHLRQLHRAVDLSFPEFTRYVRSLNSELATALLARYPSAAALGKVSVKRLASLRYDGRHRVGETLAQELLDAAKISVGRHQSEPYQLRIRYACEDIVRLRQRLYELDADIARRLERHQVGKLLTTIEGIGPQTAACIIAELGDPARFGSVKALASYVGVIPRLRQSGKRRLSGRRMLPLGNARLRRALWMPTLSAIRVNPWLRAFYQRLRAAGKRPKVALIAVMHKLLAAIFSVARRRQPFVALQLFPPDGEAAAGGAVAGTGVALTAK

SEQ ID NO: 97039 - protein, 441 aa, unidentified
MGKPQVFDDQEQERVFERVAAVDVAKASGVVCLRLPHPAQPAGRRSQVWEVPATMHAVTELAGRLAAEGVQKVTLESTSDYWRIWFYVLEEAGLAVQLVNASQARNLPGRPKTDKLDAMRLARLTEMGLLCPSFVPPAEIRVLRGYARARTRLTRDRTRCWARMEKLLEDALIKVSAVASKLTTRSVQDMIRAMIAGQRDPQVLAGLARTRMKAGHDALAEALAGLFTDHHAELAQLLLDQIAFLDTQIARLTMLTGEQLASIPAAWGIDADGPSPGAIPLPVIARLDEVPGVGAELAASIISETGLDMTRFPSPGHLASWAGLCGRTIQSGARTRTGKGHGNAWLRGYLGRAAIAAARTSTFLGERYRRLARRRGAARAQVAVARSILIIIWHLLNDPTARYHDLGPGHYQARTDKSRKARNHIRQLEALGYTVTITQAA

SEQ ID NO: 97040 - protein, 386 aa, unidentified
MKNINLNVACAGMDVHYKFSNVTFRDKAGRVVRRERLKHPQRAELREHLNHWSKGVPVVLEASFGWGWLSDLLIEAGLEPQLSNCYKLEQMRKARGWVKTNKKDADMLSLLPFEATDWWQVWRAPVEVRNRREQMRFRGDLVGLQTMVKNRIHAIFHRQGIFHEFSDLFGGKGRKFLSGLCLSNPANLSCEALMALRGQLMLLDHLRRQLAQVARILHKQLANTPLIKRLKTIDGIGLILAHVLAAEIGRIERFRNHKALASYSLLAPRSHDTGQADPGRSPLGRHLGTHGNRMLKWAFIEAAHGAVRSGGRWRAMFDRVTDGGKKDRNRGYIKVARELVKVVYVVWKKDVDYQPVAPARPGCRRKKKSRSGTGQLSHPMVHALTA

SEQ ID NO: 97041 - protein, 341 aa, unidentified
MDITTVGLDLAKNVFQVHGINAAGDVIVRRRLRRGRVCGFFAGLAPCLIGMEACGTAHFWARELVALGHEVKIIPPSYVKAYVRRGKNDAADAAAICEAVARPNMRFVPVKTEDQQAALMLHKARELLIRQQTMVVNALRAHMAELGMIAPQGRGKVENIIAVIVDDEDESIPALAKAALRPLVAQLRANEDATAALDAEIKTWHKGNAASQRLVTIPGIGFLTASAIAATVPDPSFFRSGREFSAWLGLVPRQNSSAGKDRLGRISKQGNPYIRRLLVIGATSMLRYARAKTAPGADWVNGLLERRPPRLVTVAMANKTARIAWALLSKGETYRAPITAV

SEQ ID NO: 97042 - protein, 353 aa, unidentified
MTVTLPFDHVTVGIDLGDKYSHYCELDMTGAILEEGRLPTTPASFRRRFSRHPGAQIAIEAGTHSAWVERVLRDCGHVVIVANPRKLRLIYENDKKTDRVDAHQLARVARVDPQLLHPIEHRPLSAQQDLAGLRARQALVRARTQLVNHVRTAAKAFGARLPQCSTACFAKRCRTALPEELAPAVTSVLHVLEVLNSAIRDLDTHVERLASEVYPETQRLTQVPGVGSLTALTYRLTIDDPHRFTRSRTLGSYLGLRPRQRASGGQDPQLRITKAGDSDLRRLLVGCAHYILGPFGSDSDLRRWGLSIAARGGKNAKKRAIVAVARKLAILLHRLWVTGSAYQPLRQRAATAA

SEQ ID NO: 97043 - protein, 387 aa, unidentified
MKRNDLSRSLVAFEQDSTLVAVIELSLKTWVVAGLAPGVERNLLKRQSADADALLALLRRWQAESIKAGREVRRIVVAFEAGRDGFWLARWLRERGIESYVIHPTSIAVSREHRRAKTDRLDTQLLMRALLGWLRGEVKHCSMAAIPTLAEEDARRSNREHEMLVGERSRIINRMKATMIRLGIRDFNVKLRKAAEKLSGLCTAEGVPLPPNTLDELRRDMARMQLIRDQIKAIEQSRVTRLKAAPQAGTHPMMLMLAKVFSISLETADMLVHEVLSRNLRDEKALGRYAGLTGSPDESGSKRREKGLARAGNARVRRGMIQLAWRWLMFQKDSELAQWYRQRTASARGDIRKTMIVALARKLLIALWRYVTAGEVPAGARLRPAAI

SEQ ID NO: 97044 - protein, 413 aa, unidentified
MALKNRKETAMKNVKNVYESVAGGGMDVHYKFSSVTMRDAQGSVVRRERLDHRDKAALRQRLARWPKDVPMVMEASFGWGWLADLMKELGLQPELSNCYKVEQMRKARGWVKTNKKDADLLSLMPFEKDFWWKVWMAPPEVRDIRERMRHRTSLVVVQTETKNRIWALFHRHGIFQDSSDLFGVAGWKFLEALCREGRTADEVLLPGALCMLRGLVELLEDVRKQLAKIARELRGHLQRSDLARRLDGIPGIALILAHTLMAEIGRIERFASHRHLASYALLAPRSDDTGEDDGRPPLGRHLGHRGNRTLKWAFIEAARGAVRRGGKWRRIFDRATDGGERNRNRGYIKVARELAKVVYVMWKNGSSYMDNPPARPGSPRERMKNFFSSARPGTGQPSRPMAAVLEAGPQASL

SEQ ID NO: 97045 - protein, 355 aa, unidentified
MKDQAIQYLALDVHQATIVACVQDEGGAVTMRATVPTEARAVVALVRGLGARVHVAFEEGTQAQWLHDMLQPHAERVVVCNVRGKSEVANKSDRIDAEQLSRMLRLGALKGVYHAGTSVLTLKELVRNYDNLVEDTTRVMLRIKALFRARAIPTVGRSVYRPAERKGWLERLNTPGARVRAASLFAQLDLLLKLRPKAKAAMIAEARRQAGWKPLRSIPFLGPVRVSQLLAIIVTPHRFRTKRNLWPYAGLAVVTRSSGDDEFRGGELRRRRRAAHTRGLNRNHNPILKSVFKGAATAATVKEGPLQTLYNACVARGTKPELAKVTLARKIAAIALRLWKKGELWNPDKLTMQAT

SEQ ID NO: 97046 - protein, 393 aa, unidentified
MESQRVVIGMDPHKRSVTIEVMAGDETVLGGGRFTTDPAGFEELGQYVRAWPDRVWAIEGCNGIGRHVALRLLDQGQDVVDVPPKLSARARVFATGQGRKTDATDAHSIALVGTRMAGLRPVVDDEQLAVLRTLVDRRRSLGEEHTRMVSQLHHLLLELVPGGAKTFLSAAQAKAILAGIRPRDAAGKVRRRVAAELVSDLERIYKRKKAADKELRELVRATGTSLLDLNGIGPSGAARLLVEVGDITRFPNRAHFGSWTGTAPIDASSGDHVRHRLSRAGNRQINRVLHIMATVQLRNPGIGRDYYDRKKADGKTSMEAMRCLKRRLSDLVYRTMLDDTAAHATGSRTGPGGHRGASLTSSAAGSHPHTDTSDQPLPGPVSNEPTTALPAAS

SEQ ID NO: 97047 - protein, 419 aa, unidentified
MKRLQPGKPVLVKGRAVVGIDVGKRKHAATALTPNGERIAQLAFFLNTRAGIDLLEKEILRKAGGPGKTLVAMEATGHYWMCLYHELKRRGYESVVLNPVQTNAHVRAKIRKNRNDRIDSEGIARLVLAGEARATRVPDEKTAELRLWVRHRQRLLRAAGNMERFTHTLVDRVFPEYADILSKPFLPSAQKLIRQLGLAPADLAANGREVREVLQIASRNKIAPETIDNLLEAAKQSIGTRQAEDAANRQLVLVFDYLATLRQQIAAIEGELDLRVQEIDSPLFSLGLTANVVAAIHAESDPISDFGSADQYVAYAGLDPSSYRSGDTIDRRGKISKRGSPTLRRALYLAAFVVCRKHVYFRRIYQKHRRHGKNHCNALVVVARNLARVVWRMLTDGREFSKRPPQNAVTTRQSGCKAS

SEQ ID NO: 97048 - protein, 396 aa, unidentified
MLYYVGVDIGKKNHSACVINESGKSVLAPFKFAVNASGYGRFLAAIRKVCTHKKSITIAFEATGPYWLSLLERLKSSRFSHVVVFNPIQVAAFRNKSIRGTKTDAVDCFLIADILRFGDYVNYQVPGKDMLNLKRLSRFRWDMSHRVNRLKVKVLSILDQVFPEYEDLFSNVFGTTSKALLASASTPKEIVNLDLDKLKALLKKASWNHLADERAVLVKKTAACSVGTKLSLDSLSLQLKFMIENIQFLQDQLKAVEDKMAALFNKQKTQLTSIPGIAEVTGATILSEIGNIRNFTEDGAKKLVAFAGLDAKVKESGAFKGKRKMSKRGSRYLRRAIMQSSLVAATRDPFFKSIYEKHISRGKPRIVALSHVANKMTHVIYSVLKNNEPFFRPEVV

SEQ ID NO: 97049 - protein, 320 aa, unidentified
MTYVGIDVSKLTFVVAYSSAKTSKTKTFKNTAKGIREFIKTISVNEHHCVMEATGNYSTLLVYMLSEFGFTVSLENPLKIKNFSRVMLSVIKSDEIDARLIALYGEKMQPSPYRMRSDSILILKQKRTVLRQLKKQLVATSNLKGSMEVLPIYDSKCKKTIEKTIAFLGKQIKYMEEELASLANDEFKKQMDLLTSIKGIGVTLAAALIVATGGFTYFDNAKQLTRYLGLSPTYQQSGTSVNFKGHINRNGDPILRSQLYVAALSSLRCNTECKACFDRLRSKGKPGKVAVVAVANKLVRQAFAVVLLHKISHMLMDLYQ

SEQ ID NO: 97050 - protein, 345 aa, unidentified
MKHYAGLDLSIKETSICIVDETGKVCREAKVVSHPEDLIQELKDPAWRLERVGLEAGPLSQWVFSGLAEAGLPVICIETRHAKAFLKAQVNKSDRNDARGIAQMMRVNLFRPVHVKTLTSQKRRALLTARKLLQEKAIAIENDVRGLLRNFGLKVGVVGSTKFEERILELVEGMPELAEIMASLLDARRTLREQVGKLHQKLLSIIREDNVCRRLMTIPGVGPIVSLAFTATIDIPARFKNSRAVGPALGLTPILNQSGESNRIGRISQCGDGMMRTLLYEAAQVMLTRTIKWSWLKAWAMNVAKRRGKQKAIVALARRLAVVMHRMWSDGTEFRWTKENAPAAG

SEQ ID NO: 97051 - protein, 355 aa, unidentified
MDDLKYIGMDVHSATTTIAVQDSRGRLVMEATVATQAAALSDFLRGLRGRLWLTFEEGNWAAWLTQVLTPQVEKLIVCNPRRNASLKQGNKSDPLDARELAHLLQANLLKPVYHEADGAPTLQELARAYTTCVSDTTRVMNRIKARYRARGIPCSGSRVYRPRFRQPWFEQLTDPGARQRVELLYLQLDLLQELRKKARRALLTEARRYPACSLLRTVPGVGPVRAALLLALISTPFRFRTKRQLWMYAGLGLITRDSGQYQTVRGQIIRRDRPACVRGLNPEHNRELKEIFKGAALTATRSSSPLHAFYQQRLDQGMRPHLARLTLARKIATLTWILWKKGERFNAHDLTSQAK

SEQ ID NO: 97052 - protein, 416 aa, unidentified
MHVVYSRCCGLDVHKKTITACLLVSGDGGKGQQEVRRFGTMTRDLLELADWLQCQQVTHVAMESTGVYWKPVWNILEGQFEVVLVNAQHIKAVPGRKTDIKDCQWIAELLQHGLLRGSFVPPTPIRQLRDLTRMRASLRQDHTTIANRMQKILEDANTKLASVASDWLGVSGRAILTQLLAGEEDARKLAELSRGRLRSKLPAMQLALEGRMTEHHRWMLRVLQEQLEFLEAQITKLETKIQEQLHDYQEAIALCTTIPGIEEVAAANLVAEIGVNMAQFPSAQHLASWAGICPGNHESAGKRLSGKPRKGSAWLRRSLCQAAWAASHTKDTYLAARFRRLAARKGKKRAIVAVAHTILVSVYHMLKTKQAYRELGAEYLDRRNAEHLKRYLLKRLERLGVAVTVEPIESTAALPS

SEQ ID NO: 97053 - protein, 378 aa, unidentified
MNRIIKIGMDVHTSNYTLCIFEPSFEHDGTVHCITQVKPEVKNIIHVIETFKKKHENEELNIVCGYEAGCLGYSLYHELKEKGIECVILAPTTMKTEKGGRKLKNDYRDAKMIAECLAYGGYSAVHIPTELDNSVKEFIRMRDDIKENLKSIKQQIIAFLTRNGKQFEGKSFWTRKHIDWINTISFSEPLLQDTLKEYMIEYNHLCDRVETLDKQIEEVSLKEEYVEKVQQLQCLIGIKTHTALSLIVETSDFNRFKKGNMYSAYLGLIPGDDSSGGHENKLGITKAGNSHLRRLLVEAAQGYTRGRVGFKSKDLKSRQEKCSSEVVAYADRANERLRRKYYRMTLRGKKFNVAKTAIARELACFVWGIMTDHIDLCN

SEQ ID NO: 97054 - protein, 348 aa, unidentified
MDVHQASISIAVGDAAGKVLMECILETKAATVLEFIQGLRGSLWITFEEGTSAAWLYDLLKPHVAKVVVCDPRKNALLKAGNKNDRVDARKLSDLLRAGLLTPVYHGESGVRTLRELSRSYLAASKDLTRVMNRLKAIYRSWAIPCAGQQVYSPRHRAAWLEKLREAGVRRRAEQTYQQLDFLMGIRKETRKELLAESRKHPARQFLQQVPRLGPIRVALLIALIQTPHRFRTKRQLWNYCGLGLRTRSSGEYRYTGGQLQHARKPPALRGLNVNHNHDLKNLFKSAATQAGACKDDPLGEFYQNLLAKGMQPPMARLTLARKIAAIALKIWKKGERFDPAKLKQQAA

SEQ ID NO: 97055 - protein, 342 aa, unidentified
MSIVGAFDVHRRQLTFDYLDTGTGELERGRVLPADREHLRQWLARFAGHDDVQFALEGCTGWRYVVEELLAAGITPHLAEPADTAALRGKKQHAKTDKSDARHLRVHLAAGDLPESWIPPEHVLEARAIVRLYKDLVDERGAWHQRIAATLFHQGVPADIGSMSTAEGRHAVAGVDLSGAGRQAVDTGLRQIDRLTGELEPLRRQLDMLSRRQPGCKALRAAHYGVGPITAVAIWAELGDVRRFGNSDDVVRHTGLDITVHSSDTKRAAGHLSRQGPQLLRWALYEAAKCAAKSTSPDHGYYTAARHRRNAGLATLSVARKLARRCYHTLRDLGPDALAPAA

SEQ ID NO: 97056 - protein, 338 aa, unidentified
MKLYGAIDLHANNNVLTLLDEEDHVVYERRLKNDLGMIVTQLSKYQSEIEAIAVESTFNWYWLVDGLMEAGYEMRLVNTAAVKQYEGLKHTDDSSDARWLAHLLRLGILPEGYIYPKHLRAVRDLSRKRSQLVHQKTTHLLSIQNLFTRNTGKPLSANRIKTLKLEEAEKLFSDAHLVLAVMSNFRMFRYLEQEIKVLEKSILREVRLSKGFELLLSVNGIGKILALTIMLETGDIGRFAKAGDYASYCRCVNSNKMSNGKRKGRGNQKNGNKYLSWAFVETANFAIRFNPLIKRYYQRKKTRTKNVIAIKAVAHKLARACYHILRDEIPFDVSKAFA

SEQ ID NO: 97057 - protein, 339 aa, unidentified
MNNSVIGLDIAKNIFHLFTLLADGKTLKKKLKRSELLAFFANYPASIIGMEACGSSHHWARELTKLGHEVILLNARFVKNYVVGNKTDFNDAEAIHEAVTRPNKRVVAIKTVAQQDIQLVHAIRKELVDQRTALVNQTRGLLSERGIVINQGITQVREQLPLIVEDAENGLTDLSRELFAEQYEKLKVLDDEIKAQDQRINRLCNANGLSKRFLDVPGVGPLTATMVAADIGDSGKGYNSSRDYAASLGVVPKQHSSADKQHYLGISKRGNRYIRTLLIHGARSVVKNCMNKTDKLSLWLQALVERRGFNKTAVALANKNARILWAMASNGKDYEVLAA

SEQ ID NO: 97058 - protein, 352 aa, unidentified
MAGPGSRVIGGVDTHKDTHVVAALSDHGALLGTASFPASSAGYGQLLHWLQTFGAITGVGIEGTGSYGAGLCRFLQAVGVLVCEVSRPKRQWRRRYGKSDPRDAEAAARSMLAGEALGIPQQRDGMVEAIRMLRMARRSAIKARTQTTNQVRAVLDTAPAELREPLCALSPRVLAAKVRCWRPGAPTSPLAAARVTLKLLTARWTALSAELIQLDAQLEPLIATVAPKLLATHGVGPDTAAALLVASGDNPERLGSEASFAALCGVSPVDASSGRQHRHRLNRGGNREANRALWVIVLVRMATDPRTRQYVTRRTGQGLSKKEIIRCLKRHVAREMYRLLRLGANPTSPAVT

SEQ ID NO: 97059 - protein, 346 aa, unidentified
MENIALDVHKKYTWARVENAQGERLYESRLVHAHGTIKNFVKRWSAGSLVAVETVGNWYWVVDEIEAGGGKPQLVNARLAKMMMGNVNKSDKLDAKGMNHLQRSGTLPTVWIPPSSVRDARELPRTRMVLSRQRTQLKNRVHATLGKYGYGVEGVSDAFGKRGRKIMSELLYKLPTHTHQALERVLNQLDHVEENLQGIEQQMQGVFGPCAQSGWLKTLPGVGDILAAVIWTEIGTIERFGRGEQLASYSGLVAREHSSGGKVRFGAVRRDVNVYLKWAFVEAANSAILNCERCGYNHISRLYQRIKARRGHNKAKVAVARHLAEASFWVLKKGEPYREPMSSTQR

SEQ ID NO: 97060 - protein, 408 aa, unidentified
MRLFVGDDWAEDHHDVEVMDEAGQVLARKRLPEGVAGIAQLHGLVGRLLGEDPGQAQVAVGIETDRGPWVRALVAAGYLVFAVNPLQAARFRERHGVSGAKSDAGDAHALADMVRTDSHQLRPAAGDSPEAESIKVLARTHKTMIWERTRAVQRLRHQLREYFPGALEAFEDLDAPDTLELLAKAPEPARAAKLTRAQVSAALKRARRRKIPEKTTAILAALRAGQLGQPPALTAAYAAAARSLIAVIITLNEQVKILQEQVEQDFGRHPDAKIYRSQPGMGPVLGARVLAEFGDDPHRYADGKARRNYAATSPLTRASGKKKTVTARYVHNDRLVDALNAQAFAALSASPGARAFYDQQRAKGHGHNDALRRLANRLVGILHGCLKTRTLYDEDTAWGHRQQTQQAA

SEQ ID NO: 97061 - protein, 459 aa, unidentified
MSQTKKTKKSGTSRNLSPVHSAAAAIDIGATMHVAAVGPDRDEEPVRTFRTFTGDLQRLADWFAGCGIRTIVMESTGVYWLPVFEILEQRGFEVMVVNARDAKHVPGRKTDVSDAQWLQRLHEYGLLRASFRPQAEIAGLRAYLRQRERLLDYAAAHIQHMQKALMQMNLQLHHVVTDITGVTGMAIIRAIVAGERDPNVLATHRDRRCHATVETVCQALVGNYREEHIFALTQALELYDVYQSKVRACDVQIEVILKRLKKNAAPPRSKLLPAKQRIRQPNAPAFDARGALHAILGVDLTQIDGVGPSLALKLVGECGTTLQAWPTAKHFTSWLALAPHNKISGGRVLSSKTRRTSNRVASLLRLAAGALGRTDTALGAFYRRLSARVGKAKAITATARKIAVLFYNTLRHGMAYADPGATYYEDRYRQRVMHNLQRRAKSLGFVLQPLEPSVKASVS

SEQ ID NO: 97062 - protein, 343 aa, unidentified
MDHFAGLDVSVKETSICIVDDAGKIVREVKVASEAEALLAVLKNLAYHFKRIGLEAGPLSQWLFSALAEAGLPVICVETRHMRAMLKAQINKTDRNDARGLAQMMRVGLYRPVHVKTLRSQKLRVLLTHRKLLQSKAIAIENDLRATLRNFGLKVGTIGPVKYEMRIRELVENLPDLAVLVEPLLIVRRVIREQLGILHRRLLVIVRDDDVCRRLMTIPGVGPVVALTYRVTVDVPARFRNSKAVGAVFGLTPSKYQSGQNDRTGAISRCGDEMMRMMLYEAAQSMLVRSTKWSWLKAWAMKVDRHRGMKKAIVALARRLAVIMHRVWVDGTEFRWTREVAAA

SEQ ID NO: 97063 - protein, 465 aa, unidentified
MRNGMEAINLPSCGLDIHKDIIEACIIDEDGNRHLKTFDTMRRTLYDLKAWIISLKCFHVLMESTGVYWLPIYEILEDIKGMNVGVGNARHMRNVPGRPKTDREDSKWIARLCMVGLILKSFVVGKRFRELREYTRYYKKLKQDRARHKNRIEKLLQLNGFKLSSVISDIYGVSGLKLLNTLRAYGNITLSQVKSSLHKRIKKSPEEIERAINGRMKYTSQLLLGKMLARLDTCNREMDEIYGMMTEMFCDFEPQLRIIESIPGMGRLSGMYIIAEIGTDLSSFRSSGHLAAWAGLAPKDHESAGKLKFSKTKKANIYVKSIMIECAWAAIKVRNTRISNWYWRNVKRLGEKKAITAVARKLMVYIYAMLKNGELYDGSLDVADTEILKAEKLASARKTVERQLCDQTKKKQRSNETQKESTNALLPAQANLRPPNIADTLKPSQKKGRHRKNSDTENLAHSHHT

SEQ ID NO: 97064 - protein, 386 aa, unidentified
MQAPTVSTPITERISTIFVAIELSQKTWLVTVHSPDRDKISRHKVQGGDHAELLALIGRVRDRAARTLGAVPAVASCYEAGYDGFWLHRLLMAAGIMNYVFDPSSIAVDQRARRVKTDRIDGETMLRTLMAYLRGEPRVVRIVRVPTPEQEDARRGTRERHRLIKEQTAHTNRIKALLRLHGFAVGNPRRRDWLTWLAAQRDWQGQAVPPRILTEIEHEHARLMLVRKQLEALAQAPAAADLTPAAVEMTRRGELLLRLKSLGPSFATTLTQEVFYKDFRNRREVASYFGLASSPWRSGGINRDQGISKAGNPRARCSAIELSWLWLRHQPDSELSQWFRQRTLNASGRIKRIAIVALARKLMVALWRYLTTGLVPAGAVLKSAEA

SEQ ID NO: 97065 - protein, 347 aa, unidentified
MTIMVDTQRALTGGVDTHADVHVAAVIDPDGGLLGVESFATDLAGYKDLSGWMGTFGTIGLVGVEGTGSYGAGLARHLHREGLIVVEVDRPNRQERARQGKTDSLDAIEAARAALSGRAFGVAKSRDGNVEAIRALMVARRSAGESRTKAINQIRQLVYTAPDELRERFVDVPSWRIAEGVAILRVHADADPVRMATKSALGTLGRRAVALGEEGKRLDVLIARLVDKVAPELVELVGFGPHTVALLLIAAGDNPSRLRSEATWAKLCGVAPLEASSGKVTRHRLNRGGDRQANHALWRIVITRMACHEPTKVYVARRTAEGKSKREIMRILKRYVAREVYHYLPRD

SEQ ID NO: 97066 - protein, 393 aa, unidentified
MPAAPRGRRGGGTKTLRTFGTMTAELLTLLDWLVEAGCTHVAMESTGSYWRPVFNLLEGSVAQVLVVNAHHVKGLPGRKKDTLDAEWLAELLQHGLLRGSFIPPAPLRELREATRYRKQLIRTRADEANRIQKLLEGANVKLGSVATDILGVSGRAMLAALVRGETDAAALAGLAKGRLRKKQPQLVAALTGRITPDQRALLGHQLTHVEFLDQAIATLDTHIARLMAPYQEAAERLRTVTGIEQRTAEAVIAELGVDMGVFPTAHHCASWAALCPGHHESAGRRRSGKTRKGNKWLRTALLEAAWAASRTQTYLGAQYRRLAARRGKKRAAVAVAHSILVRAYHILKDGTTYRELGHDFLDKLQGEKLQRRLIARLEALGLKVTVEPLPQAA

SEQ ID NO: 97067 - protein, 399 aa, unidentified
MLTIGIDIGKSFHVAAIQNNEGRFVLSSLKFPNTKEGFESLLHKLTEVVGNDPRADCRIALEATGHYWMNLYVFLREQGYANLIVLNPLQSKALRNLTIRGTKTDTVDAQVIARVVQLDAHGVQHPLHEHIYALRQLARLRVELTQQMADEKRKVIRLLDLVFPEFQAIFSDVFGATARVFLECYPTPEAMAALSRKRIETIIERCARGKLDPNTTMDRIKDAARDSIGIRFAQDALVLEMQLHLKQIAFLEEQIREAKNAMKPYAEKLPSFQLLTTIPGISFNLAATILGEIGDINRFSKADAVVAYAGMDTKVVQSGNFVGTKTKLSKRGSPYLRWAFSCAATVARVHDPALRHIFEKKQNQGKAYGVALTAVVHKMLHITYAILKQQKPYEVHLQN

SEQ ID NO: 97068 - protein, 362 aa, unidentified
MTKSTTIIAFDQHAATTVAAVLLPGQRTPALHTLTSDRATILRFVERLRRRGPIQCCYEAGPCGFDLQRALTARAIPCDVIAPALIPRRAGDRIKTDRRDASQLAVLYRAGALTAIHVPTEQEEAARDLLRCREDVRADLLRARHRLSKFLLRHGRRFTGTKKAWSKRHDAWLRTQTWPLSALDQTHAAYLRTVDEAVARLRSVEADLRGLLTLEPLRPRVERLRCFRGIDDLTALTIAAELGDPRRFPSAPRAMAFVGLVPSEHSSGTKRARGAITKTGNAHLRRVLVEAAWHYRHRPFVGAALRRRQRGAPATSVAQAWTAQQRLYRRYHRLAGRGKVKPLVNTAVARELTGFVWAALIQ

SEQ ID NO: 97069 - protein, 387 aa, unidentified
MIFIGIDIAKNSHFASAVNSDGEVLVKPFSFENSRDGFNLFLNRFKAFSVNDCLVGLESTGHYGDNLICFLFPKGFKIGMINAIQTNSLRNSNIRKTKNDKIDTFLISKCLILGDYTLIQEKDINAIRLRTLCRFRFDVIQSQTRLKTQLTTCLDLIFPELHNFFKGNLHLKTSYALLEKYSSPLEISKARIDTLTKLLASASRGKYSYDEAVILKNIAKLSIGVDNPAISIQIKCLIKQLDLLKEQISSIDKNIKEIMDELNSPILSIPGIGYTLGAIILSEIGDIKRFSNPTKLLAYAGLDPSVRQSGNFNAKTTRISKRGSKHLRYAIHRASFVIVYNNDVFYEYYTTKRSKGKSHNNALGHVCNKLIRVIFKLLTENIPFNLS

SEQ ID NO: 97070 - protein, 341 aa, unidentified
MEKVSIVDLDLAKSIIQVHGASVDGSVLFRRKISSKKLLDFLSKIDPCIVAMEACAGSHHWGREIAKLGHQVKLIAPIYVKPFVKRQKNDAADAEAICEAAMRPTMRFVAVKSQEKQASATVFKVRDLLVRQKTQVINALRGLMAEFGITVPQGPAHVGILISQVEGDCSSLTEAARAPCLALIATLRALMDKVRELDQEIGRRARRDDVAKRLMSIPGIGPVIATALEALAPPAETFTRGRDFSAWMGLTPRQHSSGGKARLGKTSKMGQRDLRRLLIIGAAAVVRWASRRGAIEGSWLSRMIGKKPPMLITVALANRMGRIAWALMTNGGRYEEKRLAA

SEQ ID NO: 97071 - protein, 359 aa, unidentified
MQVQSNKKLFEGQNIFAGIDVHKKNWTVSIFSQQSEYKKFSQPPTADALKTYLQRNFPGAVYYSAYEAGFCGFHVHSCLLKAGINNFVVNAADVPTTHKEKNNKNDKRDSHKLARWLRSGDLTAIHIPARKTQEDRSLLRLRFAITKDLTRIKLRTKSLLSFFGIEHPQQFSSPNKHWSRRYMEWLKTVEMEEESGRATFQTLIKEVEELRKVLLEVTRKIRGLSQTKSYEKDFALMLSIPSVGLITGMSFLTEIEDINRFPSTDNFASYVGLVPSCHDTGDDVRNGEISPRAKIILRNLIVECAWSAARKDPALQLVFSQLCKKMEPNKAIIRIARKLLNRIYNILKTKTEYVCGVVK

SEQ ID NO: 97072 - protein, 426 aa, unidentified
MRAIGLDVHLEFCEVAIAEGGKVRSAGRIETKPAELELFARSLGADDRVALEVTGNAWEIKRLIEPHVDRVLVVSPNDTGIRQARAKTDRLDARTLARLLAAGELDGVWMPDRATWVMRRRLQRRSQLVRARSRAKNQIHATLMRCLVGRAPFAEPFGPKGRRWLQALELPEEEREAVDSALRQIEFLDSEIEAVERPIATEALKSAEIRRLMTVPGVNVICAATFLATIGEIDRFESPRKLVGYLGLDPRVSQSGTSPATHGRISKQGSVAARHALVEASWSAVRQPGPLHAFYQRIRSRRGHQIAVVAAARKLACLFWCLLTREQDYAYQQPSLTAKKLRLLEIRAGAKTHKGIHTGVFATRQRMRAAERGLAQQAEAAYRRTVADWQRTQAKRKGAGATPGRASSGPSSGQAARQVQAPGPAL

SEQ ID NO: 97073 - protein, 316 aa, unidentified
MSAGPCFVGIDVAKAQLDIAVRPSDARWQVPNDPEGYAALVERLSRLAPALIVLEATGGFEAPAVAALAAAGLPVVVVNPRQVRDFGKARGQLAKTDAISAAILAHFADAMRPPVRPLPDATTQELHQWLARRRQLVEMMTAENNRLPGAARAVRPSIQAHLGQLRRQLKGIERRLKALIERSPVWRDREQLLSSTPGVGPVLATTLLADVPELGRLNRKEIAALVGVAPLHRDSGTLQGKRTVWGGRASVRAVLYMAALVASRKNPRIRAFYERLCAAGKPPKVALTACMRKLLTILNAMVKHGTAWKEPAALGA

SEQ ID NO: 97074 - protein, 351 aa, unidentified
MRRPEKVIAGIDLHGNNLIIGLMNQDGKRLTHQTLECELTQVDKFLRPYKARLQSMAVESTFNWYWLVDGLREHGYSIDLANPAKIEQYSGIKHADDKNDAFHLAELQRLNILPKAYIYDAELRPVRDLLRRRTNLVQERTALMLSFKSLYQRTTGQVMPLSQLKGLAPKDAPKLYQHPANQLIAQIQVEHITALNQSLARIEKAVLKCARQLPLYGKLLTIPGIGKILAMTITMEVGDIARFQSDGDFASYCRTVDSRRLSNGKQKGANNAKCGNRYLSWAFVEAAQFARRYDQNCRQWYDRKQARTSTVIATKALACKLAKAAWHVMAKQFDYDPQRMFPELAAKRPQP

SEQ ID NO: 97075 - protein, 460 aa, unidentified
MAKRKESAEKVPVLDVLEQINLHAAGLDIGSEEIWVCVPPDRDELSMRVFPTFTVDLHALADWLEACHIETVAMESTGVYWIPVYEILEARGFEVYLVNARHVKNVPGRKTDILDCQWIQQLHTYGLLRASFRPPEEICALRALARHRDNLIRYRSAHIQHMQKALQMMNIKLTQVVSDITGVTGLNIIRAIVAGERDPHQLARFRKSGCKKSEEEIAKALQGNYKLEHLFVLKQALAQYDFYLQQIQECDAKMESMYATLPPTNPEDRVSPPPKPKGGKRRKNQAHFDLATSLYHTVGIDLTAVDGLDALTVQSIITEIGIEVSAWPTVKHFTSWLCLAPYNDISGGKVLRSRTKKTQNRANLAFRLAAQSLSRSQTALGAFYRRMKAKHGPAKATTATAHKLARIVYFMLKNRTAYIDPGATYYEQQYRDRTIRNLKRRAAALGMELVPLATESATVS

SEQ ID NO: 97076 - protein, 356 aa, unidentified
MSRDIKYIGLDVHKEAIVIAVLNGSGKLIMESVIETKASSIVQFIHGLRGELHVTWEEGTWAAWLYDLLQPQGLQVLVCNPRRNALLKEGSKSDKVDARKLAELLRTGMLRPVYHGENGLRTLRELGRSYQTISKDLTRVMNRLKALYRGWGISCAGTQVYAPRNREEWLSKIPQAGLRRRAELLYQQLDGLQTLRRNLRPEFLAESGKHKAAKLLRQIPCIGPIRAARLIALIQTPHRFRSKRQLWTYSGLGIETHDSAQYRYVRGQLQRSKKPQQLRGLNQNHNHEMKEIFKSTATRASCGTGPFHDFYAALLAKGMKPEMARLTLARKIAAITLTLWKRGERFDAEQLKTQAA

SEQ ID NO: 97077 - protein, 357 aa, unidentified
MTEGKDIILVADYHAENIEFRWFNQATGEERTGRYATTQAGILQQIDQAAKELEPGGNLVWVMESTTGWARVKDLIGQRARFVLANVLQMPMPPKARRRKTDKIDTGRIMREYLHGSLPQSFQPELWWRRVRRLVDLRQDLVGRQTAIKNWIGSLLHHETWQNRKNLWSDCGLRRLRAMRLPAEERVLVDLKLAQLDHLVEQIGQVEAQMRQIYDAWPEAQWVDEVRGIGMVTAVSLLAHIGPIARFPTAEDLISYAGLAPGMWQSDGTCHHGRIGGGGTDSHLRYLLIEATTWLCQIPRYRPTYERVVKKRGKKIARIVVARLLLRGIYKMLTDKVRFNPMSRQTAKETAKAGCSK

SEQ ID NO: 97078 - protein, 315 aa, unidentified
MDEQRTVFVGIDVSKDRLDVHLRPSGEAFFVPREGKGMDDLVIRLQGLSVALVVLEATGGFEATVAAALAGVGLPLCVVNPRQIRDFARAMGRLAKTDTLDAEVIALFAERVRPQARPLREPERVHLAELVGRRRPIIEMIGMETNRGRQAIDKPLARRLARHVAYLQKELDAIDHDIGDAIKHSPAWREAEALLKSVPCIGDVTARTLLAELPELGTVSRHQVAALVGVAPINRDSGLMRGRRAIAGGRTSVRAVLYMAALTAIRRRSPFRAFYDQLTARGRPKKVALVAVMRKLLTILNAILRDHTPWRPLNA

SEQ ID NO: 97079 - protein, 355 aa, unidentified
MSQEKYIGMDVHQATISVAVMNSSGKLTMECLLETKAATILEFIQGLQGTLSVTFEEGSSAAWLHDLLQPHVHRLVVCDPRKNALLKDGSKSDRIDARKLAELLRGNQLHPVYHGEHGVRTLKELGRSYLTLTQDVTRVMNRIKALYRSWAIPCSGTTIYAPRHRAEWLSKLVEPGVHRRGERLYQQLDLLQSVRQQARHDLLVESRQHHAVKRLRQIPSIGPIRAALLVAWLQTPHRFRTKRQLWAYSGFAVETHDSGEFRYVRGKLQRNRERITVRGLSDNYNKDLKNLFKGAAISASTRPGPLHDFYVALIAKGMRPTMARLTLARKIVTITLTIWKKGVDFDAKQLDRQAA

SEQ ID NO: 97080 - protein, 352 aa, unidentified
MRVIGMDVHRAFAQVAILEDGKVVSEQRPKLVQDKVLAFGRSLRPDDEVVLEATGNTAAIERLLRPFVARVVIANPRMVRAIAYARVKTDKIDAIILARLQASGFLPEVWAADEDTVRRRRQAAERMGLLEETVRLKSRIHAILHANLVPKYKGALFGTAGQRWLAKTVLPDHERLILNRLIDELRHTSEQLAILDRELASLALADERAVRLMTIPGVGPIVAAMVLSSIGDISRFDSPQKLASYFGLTPKVRQSGEGPPRHGRISKQGNANVRKMLVEAAWSAQTAPGPLRAFFTRISAKRGAATAIVATARKLAVLIWHILAKRGGICLRASGLPCDEAAKSRPEGRRSP

SEQ ID NO: 97081 - protein, 348 aa, unidentified
MNYVGIDFHKNYSFITEMNEMGAIQRQLKLSNNRHTLKGYIDKLPVQSKIAIEATCNWYYFYELVEEHDLDVFLAHPLKTKAIASARLMNDKVSSETLAHLLRADLLPTAYIPDRTTRDIREVLRMHAFLIAQRTRLKNRVHAILMKNGLSCPYADVFGSISLRWLNELALRACYQDAITSYTRLAELFNEEIKLLQETIKTLAFDHPYARILDTHPGISYYSGLLIAVEIGDIQRFPNHGKLCSYAGLVPTMHASGGKVRMGSITKQGSKWLRWILVECSSHAIEKSFHYHALYTRVAQKNGSGTARIAVARSMLRAIYAMLKFNRPYQERQLRSAPWGHNQKGSEI

SEQ ID NO: 97082 - protein, 324 aa, unidentified
MLPTLGIDISKDSFHLELSINEKLRHRKFANRKEGFGELCAWLAKHKAIYVHACLEATGPYSEALAIYLHEQGHIVSVVNPVQIKAFGQSELLRNKDDRPDAGLIRRFCEKQRPAPWTPPPPHLRELQALTRHLENLIETRQQQINRLEATNTKNVAKSLRKLVAHLDTEIKRTEQQIDDHVDRHPDLKQQSELLDSIPGVGKRTAAKLLAEIPDIAQYKSARQFAAHAGLTPRNNRSGTIRGKTRLSKTGNARVRKALFFPAIVAKRHNPIVRAFCERLARNGKNKMQVVGAAMRKLIHIAFGVLKSGRMFDPNHELLLNPVS

SEQ ID NO: 97083 - protein, 405 aa, unidentified
MGEVFVGHDWAEMHHDVFVEDADGQRLARARLPEGIEGVARFHALIAAHVDGPEQVVVATETDRGLFVGALVATGYTVVAVNPMSVARYRERHSTSGAKSDPGDAKVLADLARTDRHNHRPVAGDSDLAEAVKVLARAHQSLIWSRQRQLNQLRSTLREFYPAALEAFPDLGSAEALAVLAMAPTPALGRRLSLSKIAAGLRRAGRQRRVEERTEEIQRALRAEQLQAPDVVADAMGTSSSALVAVIVELSAQISRLEAELADRFEQHPDAKIIRSLPGLGMTLGARVLGEFGDDPNRYADTKSRKNYAGTSPITKASGRSHVVLARFARNTRLADACQQWAFCALNASPGARAFYDQRRRNGDTHQRALRALANRLVGLLHGCLRHRTLYDEHTAWGHRQEQAA

SEQ ID NO: 97084 - protein, 572 aa, unidentified
MASKQPKLTNDHYTRFDLDRSTPSLWRVTFNNPPINLIDAAMMIAHRDRARQASGRRALRQRGPRLHYDIAGDPSELEGIETTAGEAPFTDLHIRLSKSPAVLDFWRSDYNGVRSRSALADRMPEEFQAQHIAVAASRSNDPNLTQMLWGMRRGKCTGRRSVKTSVASIGAQAKPTMEPPMRKPKRRKPFNDLSRSPTALNVNETLIAVVELSQKTWLIAGIIPGIERQPLKKLEPDENAVLNLLDRWRREAEKAGHKIKRIAVAFEAGRDGFWLARWLRARGIEAHVIHASSVAVPREHRRAKTDRLDTELLKRAFLGWLRGEREHCKMAAIPTIAEDDARRPSRERESLVGEQTRIVNRMKAALARLGIRDFNPKLGKAADRLEDLRTPEGEPIPPNTLSELRRDIDRRRLIMHQIRQVEAARLERLKQATRSGSHAMVRLLARVKSISVETADMLVHEALSRNLRDRRAVARYAGLTGSPEESGNKRREKGLARSGNIRVRRGMIQLAWRFLRFQKDSALARWYRARTDNVPGSRKKMIVALARKLLIALWQFVREGVVPEGVVFRPAQ

SEQ ID NO: 97085 - protein, 403 aa, unidentified
MIYEKLFIGIDVSKLKHDIAIMNQHKKLVRKTFVIQEDYAGYQYLLRILNQLQDQYETNKFHIGLEATSDYWKNIYYFLKRQSEAFVLTVLNPIRTKAFAKTELRRASTDSVAAKDIALFMVEKQPAPSIDREPMFDCIKDLDGQIYAVKKQQTMISNKLRLELTKVAPEIEKAVSCIKGQQLLALLENFPTAEAITNAAVDQLATVRYGKKQWALPIKFIQKMKHLATDSIAYKTGPAAGYVVQSLVRRIIEAQQETDRLKQQMVEQYKLVNEQESVLTSIPGISQHVAIVLEAYIGDVNRFPDAKKMVAYFGMNPTIDHSGSSKKRKGHLQKKGSGMVRHKLYMAILSVIRSENGPIYDYYARLVKAGKPKLVAIAAAMRKLLVIIYHMLKNQQPFDPNKM

SEQ ID NO: 97086 - protein, 347 aa, unidentified
MSIVEVARPVVGGVDTHLDVHVAAAVDELGGLLGVRSFPTTPAGYHALSSWLASFGVLERVGVEGTGTYGAGLARHLAASGISVIEVDRPNRQERRRNGKSDELDAIEAARAVRSGRARGVAKGGIGNVEALRALLVAKRSARSIRIKTTVQLRHLAITAPDELRTQLAGLTTKMLVNRAAALRPRASTDITAYATKTAIVALARRAQMINDEITRLDRHLETLVRTTAPQLLEIYGVGVDTAAILLTAAGDNRYRIRSEAAWAHLCGVAPIPAGSGKTNKRRRLNPGGNRHANHALWRIVLTRLGQHDPRSVEYMQRRLAEGRTKPEIIRSLKRYVAREIYQQLYA

SEQ ID NO: 97087 - protein, 345 aa, unidentified
MVMIGIDPHKRTHTAVAIDRGESVLGERLVHATGTQVPELLEWAKRLDGGERVWAIESAGGLGYLLAQQLLAAGEQVVDIPATLASRVRLLGTGRSEKNDPNDARSVAIAALRATELVPVRVEDHATVLRLLSRRHAELGWAYSKTACRFHALVADLVPGGIGRELVVSQARSLLDGHQPVGVVAFERHALAVEMLDELERLNTARKTMRRRIGVAVAASGTTLTDIFGIGDVGAAVILGQVGDVARFPTADRFAAYNGTAPIEWSSGNPKHPIRRLSRRGNRTLNHVIHIAAVTQLRHRHSPGREFYDRKRAEGMTSRSAVRALKRRISNVIYRHLIADAARQS

SEQ ID NO: 97088 - protein, 321 aa, unidentified
MSKNVEFEPFAERCCGLDVHKKEIVATVEGEGIARETKTFESTTRSLTELKEWLLELGVTHVAMESTGVYWKPVMNVLEPGGFSIMVVNARHIKYVPGHKTDKKDSAWICKLLRAGLLKGSFIPSREQRDLRDLTRYRRKLVQQQAAEHNRMIRIFEDANLKLSSVFSNIRGKTCTAVIDAVIAGETDPRRLAEMCTHWRLKSTQEEIALAVEGNFTEHHMFMIRMIRRSIAGIEAEITDLDAEIDRRMAPIDGIIERLCGIPSMDRTSVKELIAEIGVDMEVFPTADHLTSWAGMSPGNNESAGKKKARTRTTGTRRRKR

SEQ ID NO: 97089 - protein, 342 aa, unidentified
MQVTTIGLDIAKNVFQVHGIDANEKVVVRKQLRRGKLMAFFEVLSPCLIGIEACATAHHWARELTKLGHEVRLMPAKDVKAYVKRNKNDAADAAAICEAVRRPTMRFVRIKSPEQQGQLMQHRTRDLLMRQRTQVINALRAHLAELGIVAAKGDSGVKELLAIVADEEDTRLPIDARASVIVLAAQLGALQTLIGSIEKRIKMQHRANEASRRLETIPGIGVIGATAIAATVADPTVFRSGRDFAAWIGLVPRQDSTGGKQKLGPISKQGDRYMRRILIVGAHSVLRRALENPEKYPWLTQLLARRPFKVVAVALANKMARTAWALLAHGGTYRAPELAEAA

SEQ ID NO: 97090 - protein, 389 aa, unidentified
MKPDSQMTLDRYFRQCVGIDVSKDKFTACLQMYDRANDVGCHTMSIDFDNTKSGFNQFVKWSRKEAVKGFPLTYLMEPTGVYYEPLAYHLHKIGQTVYVVLPNKARSFCEAEGIKTKTDAMDARCLALMGCTSRKLKPWSPPAPIYRELRQMTRFHADLSQIMTSVMNRMESLNHVEEADKTVHKNCQKLIDEIDTLMENNDKAIMQKVAEDKELEARVKRIAKTKGLGVTTVVCIVAETEGFHLIENRKQLTSYAGLDVRAKQSGKEDPKHAISKRGNAHIRAALYMPALVAVRYNPQIKAAYGRICQKRPKEKKIGVTAAMRRLLLLIYTLWKNGEEYDPMRDKTHTPKKRMKEEDTELEYGPKDCIGPKHEPVDWNATDEHGNPPF

SEQ ID NO: 97091 - protein, 418 aa, unidentified
MTEHIAVGIDVSKGKSTVVIMRKYGEIVKEPFDVKHTGTELKDLIRDLKGLDGEVKAVMECTGRYYEPIARALSEAGIFVSAVNPKIIKNYGTQNLRASRNKTDKIDSIKIADFAHYEWLNLREYSAMDDLRQQLKILNTQYDLYDRQATACKNNLKSLVDSTYPGCYAILSDTNPARLNGHKKWVDFVRTFYHAECVSKLSRSKFEERYRKFCKDNRYNFSNDVCQELYHTAKEAVPVLPKDALTKSIVVSAADQLISVSAVLRSVGSKMNEIASQLPEYNVVMAMDGVGEALGPQLMAEIGDVSRFTRREQLTAFAGVDPGTDESGTHSSKSNSTTKYGSPRLRKALFNVMDNKLKRAPEGDPVFEHLDKLRSKGKEYKVYMTAGSNKFLRIYYGRVKEYLKSIDQSTSEADSSEE

SEQ ID NO: 97092 - protein, 341 aa, unidentified
MEHFAGLDVSVKDTSVCIVDDTGKIIREVKVASEPEALSAVLKSPAYHFKRIGLEAGPLSQWLLSALAEAGLPAICVETRHMQAVLKAQINKTDRNDARGIAQMMRAGLYRPVHVKTLRSQKLRMLLTHRQLLQSKAIAVENDLRGTLRNFGLKVGMVGKVKFEARIRELVENQPDLAVLVEPMLIVRRVLREQIVILHRRLLAIVRDDEVCRRLMTTPGVGPVVSLTYRATVDVPARFHKSKSVGAVFGLTCSKYQSGEIDRSGRISRCGDEMMRVMLYEAAQSMLRSKKWSWLKAWAMQIARRRMKKAIVALARRLAVIMHRIWVDGTEFRWTRQAATA

SEQ ID NO: 97093 - protein, 343 aa, unidentified
MKTIATIGLDIAKSVFQVHGIDAEGKVAVRKQLKRARVLPFFQKLAPCVVGIEACASSHYWSRELQALGHTVKLMPPAYVKPYVKRQKNDAADAEAICEAVQRPNMRFVPTKTAEQQSCLMLHRARHLFIRQQTAVINSIRAYLAELGIVAPVGRKGVEELLCAVADPKDERIPDITRECIEALGALLFKLKAQILEFDRRINAWHRSNETSRRLDEIPGVGPALATALVATVADPKAFRSGRDFSAWIGLVPKQNSSGGKERLGNITKQGERYLRSLFCAGALSVIRIAKIRGTKHRPWLAKLLSTKPTKVAAIALANKLARMAWALMAKGTNYKEPIAMAR

SEQ ID NO: 97094 - protein, 415 aa, unidentified
MERVYERCAGLDVHKAQVTVCVHVPDQAGVRSELRAEFATMTGDLLGLRDWLKGLGVTHVAMEATGVYWKPVYYLLEDDFELLLVNAQHVKNVPGRKTDVQDAQWLCQLLEHGLLKSSFVPPQPIRELRDLTRYRKSLVWERGREANRLQKVLEDANIKLASVASRPLGVSGKAMLKALCDGESDPEALADLAKGKLRAKLPALRAALEGRFRGHHALLVSHLLAHIEYLDETISSLSAEIEQRVRPFERQVELLCTIPGVGERTAEVIIAELGPDVERFPSHRHAASWAAVCPGHDESAGKRRSGKTRKGDSWLRVALIEAANSAAGRTKDTYLRAQYLRIRRRRGHKKAIVAVAHSILVSAYHVLQDGVSYQELGGDYFLTREDRKRITQRLVRQLERLGQTVTLEPTTVEAG

SEQ ID NO: 97095 - protein, 311 aa, unidentified
MIIIGVDFHPEFQQIAWVDTDTGEFQERRLGHPEEAEKFYRALAGQKVCVGMEASGHARWFERLVAELQFELRIGDAAEIRTRRVRKQKTDRQDAQLILRLLLEDRFPQIWVPSWENRDLRQLLWHRHRMVQARTRIMNQLQAVALNEGLRCKKRLWRERGREQLESFRLAPWASRRRCNLLELLDRLNPTIAELSQAIEQEVEKCPEARRLMTHPGVGPLTALGFVLIIGQAERFQCGKQVASYLGLVPLEESSGNRRRLGHITKQGSSMMRFLLVEAAQVTVRSLPEWRSTYLHLMMRRGRKTAKVAMA

SEQ ID NO: 97096 - protein, 333 aa, unidentified
MDTIMGIDVSKRNLDICILDGGKREQFQIANNISSIKGLIKRWGERQERLLVVMEATGVYHLRLATQAYERGLKVGVINPFVMKRYAEVKMVRAKTDRVDAKVIANYGREHREDISLFKPLSCHRQRMIKLLKAIDDLMGTEHNYSNRLEAEGQEPHTFPLVKKVYKEMIKRAQALRERLEQELKKLVETHYPEEYEKLTRIQAVGSKTASIMIAFFGHFESFESSKQVISYIGTNPSPKQSGTSLKGRGKISKKGNSYIRKYLFMTTLTAMKHNKACSQLYQRLIQKGKENKVARIAVLNKLVRQIFAIVKYNRDYDPDYELKFKSPLLSVG

SEQ ID NO: 97097 - protein, 362 aa, unidentified
MFRPHTLYIRIRIVRKVSEPAFAMKDQDVTDVIRRKQQTAMKYIGIDVSKATFVVAYSSDKGGEIRTFNNTTTGIKQFIGALPKDGSIHCVMEATGNYSALLLYMLNVAGITVSMENPLKIKNFARAMLSTVKTDKIDARLIALYGEKMNPQPFKIQGEAILRLRQKRTVIRQLTKQITAMSNLRGSLAYLPVPDKGATHTVDETVKFLKKKRDRLQAELTDLVKVEFSRQLALLTTIKGIGITLATALIITTGGFTYFQNAKQVSRYLGICPTYEQSGTSVNIRGHINRNGDAYTRGLLYVAAWTASRFNAKCGETYTRLRQNGKPGKLAMIAVANKLIRQAFAVVTHDKEYVDGFVSNRP

SEQ ID NO: 97098 - protein, 417 aa, unidentified
MNAAGIDVSSRKSTVAVLRPFGEIVCLPFDIAHNTEGLASLAAQLKSLDGGETRVVMEHTGRYYEPVAKALHEAGLYVSAVNPLLIKEYGANSLRRVKTDKADAIKIARYALDNWADLRDYTPMDTIRYDLKTLNRQFQLASKQRTACSNNLIALLEQSFPGIRKCFDSPVRSDGTQKWVDFAHNFWHVDCIRKQSLNAFSERYRKWCKRHGYFFKQSNAEEAYALAKNAVVLVPKTEVTKVLIQEAANQLTSISRSVETYRTEMERLASMLPEYPVVMEMYGVGKSFGPQLMAEIGDVRRFERKQALVAFAGIDPMPNQSGEKNVRSNKSSKRGSPYLRKTLFNVMGIYLKCAPKDEPVFQFLDRKRSEGKPFYVYMTAASNKFLRRYYAKVRDYLATLEDLPPVNMDSTGLQESN

SEQ ID NO: 97099 - protein, 355 aa, unidentified
MIRIGIDAGKNKCVATLKRDSKEILERVTFQNKTEGIMELVGHAKSYGEEVVAVIESTGNYWIRIHDMLEANGINTLLANPVQTKAIAKARIKDDKIDSNILADLLRADLIPESFVPDKEHRELRQLVRTRIDLVHNRTAFKEKVHAILAKYEFESPVTDLFCIKGIEWLRRIELSWIDRMAMDAYIDTLNTFDAQIERFTAKIASISREDDRVKMLMTIPGIDYFTALTIMSEIVDVKRFSTPWKLVAYSGLAPSRRDSGNSKRRGGITRLGSRWLRFAMVEAANTTVRYDERLGAFYNRIANRRGKQKARVATAKEMLVIIWYMLTNNEPYRTMNRDMVEKKYKRMEWESRSA

SEQ ID NO: 97100 - protein, 426 aa, unidentified
MRVLHDRVAAIDVHKDMVKVAIRVPGAKRGTRKTDVLEFRTFYGVLQELARELCRRGVTHVVMEASGVYTDPVYYALRELDFEEVMVINPAHAKALKGHKTDAKDAVRLLDLHECGLLSGSYIPAPDLREVRDLGRYRMKTVQARTSEIQRLQKTLETAGIKLSSVVSDVTGTSATAMIEALISGERRGTVMADLAHSRLRTAGKMTDLSMALTGRFTDHHALMCRLHLDRIKIFGDAVDDLDAKIAPLVARYAREAELLKTLPGFGDVVVAGWLGAIGPAPHQHFATASRLASWATLCPGNYMSANKSKGGRTGDGGAYIKPLLTQAAWAAVRVPGRLQARFRRLVRKFGGPKNKGAQKRAIIAIAHTLLKIAYAVLKTGTPYDDLGADFYTRRESPDARQDYLMRQLRKLNPGCVITITPAEAA

SEQ ID NO: 97101 - protein, 423 aa, unidentified
MEVMHCRVAGLDVHKETVVACVRVMAGRRPTRECRTFTTTTQGLLELLGWLTASRVTHVAMEATGVYWTPVWKILSEGDFTLIVANAAHIKQVPGRKTDMNDAMWIADLLACGLLKASFVPPEEIQELRSLMRTRKQLVREQTRHVQRIEKTLEEANIKLGTVLSDLMGASGRRMIEAMIAGERDPHRLAALAERSVKASPKALHDALHGRLREQHRFLLQLHLRQWDALDAAIRQIDEQVAGHIARVDQQAADGQPPFGELIARLCAIPGVSFLSATAILAEIGRDMSRFATAGHLIAWAGLCPGQNESAGKRKSSRLRKGAPWLKTMLVQCAWAAKRAKHSYYSAQFHRLCGRRGPQKAICAVAASILTAIYHMVRSGASHRDLGADYFDRRTPQARAKRLVAQLAKLGFAAQLQPLAEAA

SEQ ID NO: 97102 - protein, 407 aa, unidentified
MEVLYPRCAGLDVHAGQVTACVRIADGPQVLYHRRTVATTTRELLTLADWLTAHACTHVAMEATGVYWKPVWHILEDQFTLILANAMHIRQVPGRKSDVNDATWIADLLAHGLIRASFVPPTPIQDLRDLTRTRRQLVAEIARHTLRIQKTMEDANLKLTRVISDVLGLSGRAMLKAIVAGETDPERLVDLTSGRLKASRAQLVQALQGRITPHHRFLIGLHLTQVEALEAAVAHVEGHLGDTLGPFRSAVTLLTTMPGLGETAARVLVAEIGVDMTRFPSAGHLMSWAGLCPRLNESAGKRHSTRVRHGAPWLKTTLVQAAWAATRAKNSYLQAQFHRIKGRRGPKKAIIAVAASMLTAAYFMLRDGVEYRDLGGRYFENRNKQQVTDRLLRRLRDLGVSVEVKAA

SEQ ID NO: 97103 - protein, 343 aa, unidentified
MVTIGIDPHKRSLTAAALDPHSRLLGQLRVPASSLAATHLLAWAAAWPQRRWAVEGASGLGRGIAQLLVAAGEPVLDVPAKLAARARLLGSSSARKSDLADACSVAAAALHHRQLRPVVLEDQTMVLRLLSDRRDDLVVERTRTLSRLHVLLADLQPGGANRELTATRAAALLRQIHPITAVDVERKRIARQLLADVRRLDRQVKTASQAIRQAVREHGTTLTQVFGVGPVLAAKLLGHAGDLTRFPSRDHFASYSGTAPIEASSGDVRRHRLNRGGNRQLNTALHLIAVCQIRDPSPGQAYYRRKLAQAKTPAEARRSLKRHLSNVVYSHLVTDHRHRTRGC

SEQ ID NO: 97104 - protein, 342 aa, unidentified
MSAAFIGLDLAKSVFQVHGVDAQGKVVVTKRLRRDAVLAFFANLPVCVVGMEACAGSHFWAREIACLGHTVRLMAPQYVKPYVKRQKNDRADAEAICEAVQRPSMRFVAVKSEEQQSTLAIHRVRETLVAQKTQLINALRAHLAEFGIVAPQGAGKVEQLTAVVADLEDTRVPALARSVLQSLIDQLRDTERRVEDLDARLAEQAKADEVCQRLMTVPGIGPITATALTATVGDARVFESGRHLAAWLGLVPRQNSSGGKERLGGISKAGDGYLRRLLVHGARAVMRWQGTKSPWLAGLLKRRPFNVAAVALANKLARIAWAVMARGEDYRKPAVSAEPATA

SEQ ID NO: 97105 - protein, 342 aa, unidentified
MKIIGCDFHPSFQQIAMVDTETGEETERRVTAAETVEFYSQLPMPVLVGMEACGNTLWFERLLARLGHQLWLGDASKIRAMDTRKQKTDRRDAGLLLQLLVENRFPRIWVPSLEQRDLRQLLLHRYKLIGMRRGVKNQLQHLALNQGLQRKYKLWTSAGRKLLEELALTGYTAQRRDELLLLLDDLQSRVAQLDQAVQEAAQQDRVARLLQTHPGVGPITALAYSLTLGEISRFAHSRQVVSYLGLNPAEHSSGGRQRLGGISKQGNPMLRSLLVEAGQSAARLVPELKRAYQRLKHRKHSAVAKVMVARKLAVRLYWMWRTEQPYSATRMQGSPGHFVAVV

SEQ ID NO: 97106 - protein, 397 aa, unidentified
MIAVGIDISKAKSTVAVIDSDGTVLASPFTMAHTQPEMEAFVTYLKGLGEPTTILMEYTGHYHYPVLKKLQDEGFPVCIVNPYQMKKYGDVEIHKAKTDKKDALRIAAYALEKSYKLVPYSSMEQKYEDLKFLSRQYSQRITYVAKLKVQLIALLDQTMPGITRILPLNSRNPEKCALLLFIKRFKSFDEIQRIGKARFLASYDVLAKKASERSASSKGLSIYELAVDSITTRGEDPYIWLSQNQCVDLLSATQNAADEIISQMRNIAETIPEYKVLRAMHGVGDRLGPIILAEIGDVHRFHSGKALNSYVGNDAPPYQSGQFESRNRHISKRGSSALRKACYEVMQALKLTKPQDDPVYLFMLKKEQEGKPFNVAKMAGVNKFLRIYYARAMELYK

SEQ ID NO: 97107 - protein, 320 aa, unidentified
MPRKKSKSFIGIDVSKRHLEVAAHESDYQFRCPNKVSAFGALIAELITLRPALIVLEATGGLEIAVVSALHAAGLPVVVVNPRQVRDFAKALGQLAKTDRLDARVLAHFAAAIKPPLRPIKLKEERELDALTRRRGQLIEMLTDEKNRRGSAASDSVRDKIKEHIDWLEESIAELDEQLKALLQSSTCWQVKDKILQSVPGIGAVTSFSMMADLPELGTLNRQKISKLVGVAPLNRDSGQQRGSRHIYGGRARLRSVLYMAALTATRHNPVIKEFYERLCANQKPFKVAITACMRKLLSIINVMVRDSTCWKIKAEPVSA

SEQ ID NO: 97108 - protein, 411 aa, unidentified
MKFTGIDWKDKGYTTRIVNEEGNDLSGSFEVKKDREGFSEFIHKVRKYCGDDNDIIFGIERERDPIVEYLIALGYKVYLVCPNMMKSLRKRYSSTGKYNDDFDSYIIADTVRTDRNRLTRIKPRNDKIRKIEFLLRHRDKAVDDKRRLTNRLTCYLKEYFPAFLDCFSDITRSTALSFLKAYTTYDSAKELNKEDIRAFLKKNNYHKERGVLRIWKAIKKGQVKIDPIVIQERSKSIIHLIKRIEILDEEIEKYENDLKETTKGDKEKEVFKSLPGSGDTLAPGLMVIFGKDRSRYKNAQEINSLSGIVPFTKQSGNWESHLFRFGCNHFYRDIITKLAYCSLTKSEWARNYYNTKRAEGKSHYHALRCLGRIWINIAFSLWKKGEKYNEDKHMAAVQRHSIKNRLSRKSA

SEQ ID NO: 97109 - protein, 391 aa, unidentified
MEVMVETCCGIDVHQKSIVCCILDGPLDTNKPKKQHRTFGTTTKKLREALTWVQSQNVTHVFFESTGQYWIPIFNIFYDSNLTLILANPQHIKNLPGRKTDMNDAEWIAQLGRCGLIQPSYIPCEEVQQLRLLTRRRKAYTERITQCKNEIHNILQRANIKLTSYLSNIYGVTGMHLLEMFINGEVITEETLLPKIHGKIKATVADLVEAMDGKLSGEDRFLLDQSLDYYRHLVKQLEEITVVIKQYVLARFEREYSLLIELPGVSSIVAFVILSEIGPNVEAFQSQGNLASWAGVCPGSYESAGIKKSSHTTQGNKYLKSGLFQAGGTAGRSKDEAFHSLYARISGRSSKMKAIIACANKMIRIIYKILSTGEHYDTKKALGLRQQARAN

SEQ ID NO: 97110 - protein, 355 aa, unidentified
MSQEKYIGMDVHAATISAAVKNAEGKLLMECILETKAATILEFIQGLRGTLALTFEEGTMATWLHDLLKPHVSRLVVCDARKNAVMRDGNQNDRVDARNLAELLRTNQVHGVYHGKPGTRALRELGRSYMTLTQDSTRVMNRIKSVYRSWAIPCAGTSVYSRRHRAQWLAQLVEPGVRIRAEHLYEQLDSLQPVRQAARRELLRESGKHAAVKLLRQIPAIGPIRSALLVAILQTPHRFRTKRQLWAYSGFAVQTYDSGEYRYVRGKLQRNRERITVRGLNRHHNHDLKNLLKGAAITAIERPGPLQDFYAALVEKGMRPSMARLTLARKIAAITLTIWKKGVSFDPKQLQRPAA

SEQ ID NO: 97111 - protein, 430 aa, unidentified
MKSNTQNTKIEAITETTLVLGIDVGSETHYARAFDYRGIEYSKKPLKFSNDEAGFVTFKTWILDIKEKHGKDKVVPGMEPTGHYWFNLGKFLQDNEMKPVLVNPHHVKKSKELDDNNPTKNDRKDPKVIAGLVREGRYMIPYLPEGVYADLRTASNMRFQLQAELTRIQNRISRWFNIYFPEYKTVYGQPDAKSGMLILKVAPLPEDILTLGIDGVNQIWRDAKVRAVGKARAKTLIEAAEHSVGSKEGEISARMEIRMLLEDYESRNTRLQEVVALIEELVKKIPMAEKLLEIKGVGIKTVSGFLAEVGDISRFNNPKELQKLAGLALVENSSGKHKGETTISRRGRKRLRYLLFEVAMSLVSKNPEFRELHLYYTTRKLKPLKKMQSLMAVAAKLLRVFFAMLTKGVDYDPQKLVGDIKRPAVYLQVA

SEQ ID NO: 97112 - protein, 326 aa, unidentified
MEKFDVNFIDLNGKEKNLQVKNKLASISKFLERLSYDDVLVAEHTGAYGDMLVFLSNQFKINIALVPGYTIKHSMGFVKGKSDPIDAKRIREYGERFFDKLRFRVCDDDTVVELKALYSLRAQLVKSRKGLRTGEHARSQEPFQSIAVNVYIKSVLAALDKEIESVNYEIEQLIMANEATKENYELAVSVKGIGPVIATDLIIKTGNFQNIDTARKAASYSGVCPFPNASGKMVGKAKTSPFADKKLKSLLYMGAKTAVKHNMEYRLYYQKKKLEGKPHYLIMNNVCNKILRTIYSVVQNKKPYTQDYICIDPRERNLNSSNEKVA

SEQ ID NO: 97113 - protein, 431 aa, unidentified
MPHLFNLAYGRYVMSEKDVSTYTVYVGLDWADSKHDVCIQTPESDKRDFAVVPHSPEALDDWVNSLKSRYGGPIAVGVELSKGPIVSVLQKYDFVVIFPINPSTLAKYREAFQPSRAKDDPTDAEIAVDLLIRHGHRFTPLKPQSAEIRALTTLVEQRRQLVGEKIRITNRLRSTLKQYYPQILAWFDHIDTPLFCAFLRRWPSLTQARRARASTLKKFFHEQHMYREVVIERRIGAIKNSVSLTDDDAIINPYRLTAEVLVEQLESILEAVNRFDEEIEAVASRHPDYALFKSFPGAGASLAPRLLVAFGEQRNRFGSAADIQMYSGVAPVTERSGKKHWVHWRWQCPTFLRQTFVEWAAQTINKSYWAGQYYYQQRAKGQTYQAACRSLAFKWIRIAYRCWQAGVDYDESKYLKALAKRGSPLVGPGVS

SEQ ID NO: 97114 - protein, 375 aa, unidentified
MKDHSEAFVAFDSSKLRNAVAIAEGGRGGEVRFIGEIENNGAATAKLVRKLAGKYDKLTFCYEAGPTGYGLYRQVRRLGQECIVVAPSLIPRRPGDRVKTNRRDAVSLAKLLRAGELTAVWVPDPGHEAMRDLTRARDTAVMDLRSKRQQLSAFLLRQGLHYSQGKTTWTKAHMHWLASQKFERVEQRIVFEEMMLAMRQAQERLERLQQAIRAAVPDWSLAAVVVALMAMRGLDLISATTLLAEIGDLSRFQSPRELMAYLGLVPSEQSTGETIKRGPITKAGNRRARRMLVECAWSYQHPPRVGHDKQEKVAAAPRAVREIAWKAQCRLHRRYRALIRRGKLKTVAVTAIAREFAGFIWAVAREATMVPAAVK

SEQ ID NO: 97115 - protein, 338 aa, unidentified
MAIVYVGIDLAKNVFAVHGVNEHGKPELVRPTVARARLHELIASLPPCTIAMEACSGGHHWARLFAAHGHTVRLIAPKFVAPYRMSGARGKNDAADSAAICEAVQRPAMRFVPVKTIDQQARLMVHRARQGFVEARTACINRLRGLLSELGIVLPLKAATVRREAGACLEDLPGWANTVVGDLLSELHRLDERIAQYDAHIQTIAREDERARQLMRLSGVGPTTATAILAMIGNGHEFRCGRQFAAWLGLTPGQYSSGGKTRLGRITKAGDAYLRTMLILGARAVLAAAKNKTDAVSRWAVALEQRRGYWKAIVAIAAKNARMSWAMLSRGEQFRLPA

SEQ ID NO: 97116 - protein, 430 aa, unidentified
MNHTRNDRINQVNHDTLIIGIDIAKRKHFACAVDDRGLELGKAFPITQSREGFILFHQQVFKLMKQHQKQKVLIGFEPTGHYWKNLAAFFNHCDLPFVTVNPLHVKRLKEVDDNLQTKSDQKDARVIAKLMTHGNFSKPRTLEGIDAELRQGSTFRDHLKKEKARLINQIKRWTDLYFPEVFTVYKDIGMNLLAQLKHCPIPSELAQADVEALRLTFKQEEGIRSPSRKGLNQLKEVATSSIGLTEGTELAKRQIRWIIAQYQQVSKELDQINQELETLAKQLPDYEFLVSIPGVSSDTVSALLAETGSLSLYHHPRQLIKLAGLMLTENSSGQHKGRKKLSKRGRRRLRALLFRAILPLIRNNVAFSEVYQYYISRNQNPLKKKEALVILCSKLLKIFWGLTHRKVYFDGKQMRMDFHPLSTDCEPLAS

SEQ ID NO: 97117 - protein, 366 aa, unidentified
MSVVASRPHPPEKEVRVITIGIDPHTRTHSAAALDEGGRVLAEITVGSDPPELDRLVRWVEGIGPERIVAVEGARGFGLALCRRLLAAGETVLDVAPALTASERRSGRKAGKDDRGDAVAVARIAMREPGLPRVSAHVIGSELKLLVDARDQLVAEATRTRNRLHALLLAIAPGYHQHVRDLTSSSALLIARRLAARARADDRVRSTLACAAITRLRSLAGEIDALEREITAALDQAAPANLLSICGVGPLMAAKILGEVRDVGRFSSVSAFASYSGTAPIPASSGTVIRHRLHRGGNRQLNRALHTVALTQARRDDRAKVFLTRKRTEGKTPREARRALKRHLASAVYRALLLDAEEARSAAILT

SEQ ID NO: 97118 - protein, 383 aa, unidentified
MAQVNDLSRSLTAFDPISTLVVVVEMSKASWLVSGVVPGVERQPLKKLEPDATALLRLIERWRSAGWPISRIALAYEAGRDGFWLARWLIARGVEAHVIHSASVAVSRDRKRAKTDRLDAAMLMRVFLGWLRGERGHCGMVVIPTMEEEAARRPSRERESLVNERSRITNRMKSALARLGIRGFKPHLRKAPERLAGLRTAEGAGLPVNIIEEFRRDMARLALVREQISSIEKTRAERLERAPDTGPHAMVRLLARVIGIGIETADMLVREILSRKLRDRRAVARYAGLTGSPDESGLKRREKGLAKAGNARVRRGLIQLAWRFLMFQKDSALARWYRTRTEGPSGARKTTMIVALARKLLIALWRLVTTGEVPDGVELRPAA

SEQ ID NO: 97119 - protein, 413 aa, unidentified
MIVGIDVGSEKHYFRAFNWRGIELTRKPIAFSNSMEGFNSFYNTIVELMQKSELEEALVGIEPTGHYWFDLGQFMGEKDIKFVMVNPHHVHKTKELDDNSPSKNDRKDPRVIAGLVRDGRYFYSYMPTGVYAELRNASNRRFVLVEEQTRAKNRLQKWIAVYFPEYKGIYTHIDAKGGMLVLKKAPTPEEIVRLGVEGIIKIWKDAKLRGNGHKKAMLILAAAMRSIGLKAGLTEARMEIQDLIEDYELQTKRLERVNDLIKGLCQQVRYADKLLEIKGIGITTVAGFIAEVGDITRFDSTKELQKLAGLELVADSSGKHNGKTKISKRGRKRLRYLLFEAAISVVGKNEEFKEIHRYYTTREKNPLKKMQSLIAVACKLIRVFHAILTKGIRYDASKMLKDIRHPGEQLKAA

SEQ ID NO: 97120 - protein, 398 aa, unidentified
MLSIGIDVSKGKSTVCGMKPGGEIVYTPFEVQHTREGMSELVSLLRGSGEEVRVVLESTGSYHCPVVAALLENGIFVSVVNSLRMKRFCSQSIRRVKTDQIDAMQIALYGLAYWQELQPTRLPENTYRELQLLARQYYQMTSLLIKAKVDFNALCDQVLPGMQELMSDHAGRHKLSDFVLRYHHTAHILKMGETRFRKDYCKWAEKKGYRNRERMAVLIFATAQNGIPVLPDAPSTQIVITEAIRVLHTVEASRDAILTQMQALAKTLPEYSLVREMPCIGDTLAPRLIAEIGDVRRFHSKRALIAYAGIDAPPYQSGKFSANNRHISKRGNRYLRKTGYEVMQSYVMHKPANDPIFTFIEKKRGEGKSGKLAMVAGLNKFLRVYYGKVTELYRSLPQ

SEQ ID NO: 97121 - protein, 346 aa, unidentified
MLYAGLDLSRKRIDFHALRDDGTLVESGAVPADLDGLARLVHRLSAHDRDVSAVIESMNGARFVHDQLELAGFEVELADAQRVKGLAPLACKTDKIDAWVLAELARRDLVPAIWLPDPAVRAERERARFRLHLVRQRTRLKNRIHATLIAHGHPCPVSDLFGQRGRALLERMSIPEPWRETLEASLVLVDALDQEISGCERELRRLGARHRYVSLLQTCPGIAWVLGYTIAAELGDIRRFASPVKLTGYTGLCPRVDQSGERDLRGPLRKNGPRYLRWALIEAAQHAARSPHYRQLAERKRAQYPGARGTKIAKICVARKLAEAIWHMLTRDQPFAPAGATPPLAA

SEQ ID NO: 97122 - protein, 335 aa, unidentified
MQIKHFIGIDVSKDTLDLNVVVDGKNLEHYCINNSVKEIKLTINKIMKQLKATGEDTIFCMEHTGLYNLPLVKWLHSQQYNMWLESGVHIRKTLGMVRGKSDKVDSARIAMFAYMNRHQIKLWKPPRSVVEKIAALLSQRARMVKAKKQLNTANQEQRKFLDKEIMNSLNKYTNKAVIVIVKQIEAIEKEILAIVKADEKLNRLYEIITSVNGIGLITASYILVTTNEFININNAKKYACYSGVVPFEHTSGTSVRGKNRVSHMANKNIKTLLHMAALVSIKTKGDMQDYYDRKVSEGKNKMSILNAIRNKLILRIFACVNQNREYEKIYHYKFG

SEQ ID NO: 97123 - protein, 356 aa, unidentified
MHNKFNKIPDFSGHNIYVGLDVHKASWAVNIRVDDMEHRHFTQPPSPLVLFKYLTENFPGAHYFSAYECGFSGYHHHRELLNLGIQNIVFNPADLPITNKEKINKRDPVDSRRISHALQNNQLKCIHVFNPEHEQFRSLFRMRWKAAKENRRVKNRIRSFLHYYGIFPPESLNPDNWSVAFLSWLKQLKLPTDAGTLALEYLLIAYQSTRSQLLEVTRHLRKEVKLHYQNIYIRLLTIPGIGPINALCLIAEIGDISRFRSCKHLASFVGLVPRSHQSGIRDPQGSLTYRSNKYLRAALIESAWMALRYDPALLKYYKDRIISHKSQVVISKIAHKLLNRIRFVWMMGDNYQVGVA

SEQ ID NO: 97124 - protein, 426 aa, unidentified
MNAPTHYEATIGLDWADQKHDLWIHPADGSKAEHLRLEQTAEAVHEWVAKLRKRFNTGQVAIGIETSRGPVISAFLAYDFIVIFPVNPKALKDYRAAFSVSGAKDDRTDAQLIEEFIRLHSQKLKALKPDTELTRKLAALVEDRRRLVDDRTRVVNQVHGRLKTYYPLAEALLGGEMTSPMAADFLLRWPELKSLAAATPHQLRQFFYKHNSRSAKKMEERLLMVQKAKPLTADRAIIEPARLRILALAGMLNCLHNSLAQSDQAIQEAMDEHPEAPIFRSFPGAGPALAPRLLVAFGTQRDRFESAEEVAQFYGLAPVVIQSGNSKMTRMRHRCPKFGRQTFHENASCVAKSEPWGRCYYTRQRKRHEDKHHQACRALAYKLIRIYFACWKNKTEYRSETYLQALKRQGSQLHHELTKPLTPSGE

SEQ ID NO: 97125 - protein, 314 aa, unidentified
MAATAIGIDVSKEKLDVHVLPQGESFFVSRNAKGIEELIVRLGGFEPGVIAVEATGGFESIVAAGLAAAQLPVVVINPAQVRAFARSLGQRAKTDPIDALVIARFVEATKPQVRPLPDEETRLLSDLVTRRAQIIQMIVAEKQREKRITNKHLRRSIARLVKALEKEINAVDEEIDGMMRGSALWRETEDLLKSVPGVGRVTIHTMLAELPELGTLDRRRITSLVGLAPFTRQSGQWRGKSFIAGGRSQVRSVLFMAAMAARRCNPVLKSFYERLVAAGKPKMVAMIAVTRKLLTILNAIIRDKKPWQPQGMPA

SEQ ID NO: 97126 - protein, 326 aa, unidentified
MGLDSTGKVVIRKKCSRRQLLAFTANLQVQVIGMESCSGAHFLGRALREQRHAVRLMPAPYVKPYVQTNKNDFLDAEAIAEAVQRPRMRFVPIKTEEQLDLQSLHRVRERWVMRRTAVVNQIRSLLLERGLTLPKGRRYVDAQLPRILEDAELKLSGSFRVLLAQLKIELEQLTARIEEMDRVIQKTAKENEGCQRLTEIPGVGPVTATALIAAVGNASAFRKGRNLAAWMGIVPGEYSTGGKQKLLGISKRGNKYLRTLFVQGARSVFQQRHKQAPGLSSWLAQLLARAHQNVVIVALANKLVRMAWAVLCKNQRYRAPVLAVAI

SEQ ID NO: 97127 - protein, 335 aa, unidentified
MQIYGIDLAKEKFDVSFFDLTSKKVSNQPSHKVVTNNLKGIGKFFKGLPSDAVLVAEHTGVYGDTLLKCCMDSNVKIAFVGGYVIHRYRATPDRAKTDVLDSALLRDFGERYPDKLKYKTFPEEALYELRQLARHREMLVEQRKQLITADKNEDCRPIRSLAVKRSMDRIKEMLDTEIAETEKEMLKVINGHESIHHNYELVKSVDGVGLITAVELLVKTENFTKIITARQYAAYAGTAPYEKSSGKMDKGAHISKIGNRRSKTLLYICAESARLHNKEIKLYYERRTLIDKKPRHYVLNAIANKLLRIIFTLVEKGEYYDANFIRQDPRVVKHN

SEQ ID NO: 97128 - protein, 404 aa, unidentified
MHSPTTFAGIDWASRSHVICVIDAGGSVIERYEVEHTDTGLRQLVRRLSARQVDEVAIERPDGPVIDALLEAGLTVVIIASRHVKALRSRYGLAGNKDDRADAYVLADVLRTDGHRLRPLLPDTEATVALRALVRAHKDLVRNRVRLVQQLHAHLELAFPGAVDLFGDLASPIAQAFLLRFPSVERAAWLSPKRMATWLRAQGYSGRRSGAELHARLTAAPRGRIGEGAEAMAAITLSLVRAIGGIGRETDALSGRIAEQLALHPDGHIFTSLPRSGTVRAAALLAEIGDCRERFPTVEALACLAGAAPSTRQSGQHRVVTFRYACDKKLRDALIDFAADSRKANPWAADIYRRARAGGKRHPHAVRILARAWLGVIWRCWQDGTAYDPSRHHALQRVLLAPAA

SEQ ID NO: 97129 - protein, 428 aa, unidentified
MDDDVMISVDPHKASNTAAVMDPVTKVVIASQRFANTPDGYRQLRDFSGRWEQRRWAVEGCHGAGRSLSQRLVADGELVLDVPAKLAARVRVYSQGHGRKTDVDDAISIGLAALNSSGVSVVRTDDNLVSLRLLSDRRDELGALRTQAVCRFHRLLAELTPGGTHRGLKASRAQQLLEKLRPVDAVGRVRLQLAEQHLEDIRALDAKMKTVRGQISELVDGSGTRLTDLYGTGPVIADRILAEVETIDRFPSKDHFASYNGTAPIDASSGDQVGHRLSRAGNRRINHALHMMAVTQIRQPDSPGRGYYERKRLEGKTPKEALRCLKRRLSDVVFRQLLADQQSRITSCASPTTATPTRPTSSSPATSSTPAATPSSRQPPKAPTRPPSSIGKTVASSESRSSTPANDSIQTSSTKPRTSRATSSRLRP

SEQ ID NO: 97130 - protein, 342 aa, unidentified
MEKVSIIGLDLAKRSFQAHGALADGGVGFRKKLSREKVLAFFAEQPRCIVAMEACGSAHHWGRAIRDLGHEVRLIPPAYVKPFVKRQKNDAADAEAIAEAASRPTMRFVAIKTEEQQARAMLFRTRDLLIRQRTQLINALRGHLSEHGVVAAQGTANVKVLEAAVEDQTTPFPLLVVELARAFLDQIEGLSKKISDLEKVTVHEAAYGETTRRLQTMPGVGPITALAIETFAPPMDVFNRGRDFAAWLGLVPRQHSTGGKQVLGKISKMDQRDIRRLLIIGAMAVVRSALRKGAPEGSWLQRMLSRKPKMLVAIALANNMARSVWAMLAKGEDFRVPAVAVS

SEQ ID NO: 97131 - protein, 343 aa, unidentified
MNQYIGLDVSLKDTAISIREDGKRIWRGKCPSDPKLLAQMIRRKAPRARRVVFETGPLSTWFYHTLTSEGLPAVCIEARHAQKVLNETLNKTDANDADGLAQLAEAGFYKAVRVKSFDAMMARTLVAAREQLLNISTQLGNQIRGLMKTFGLIIPRAKGRVFDGEVRKLLNGNSELAKIILPLLEAWHDVRKRAADLGRQLLIVARGSEATKLLMTIPGIGAVTAVSYVTAIENPENFRTSRSVGAWLGLTTRRYQSGEVDYNGHISRRGDNRLRGLLYEAATALLTRTIARTESSLKSWGLKLRERLGFKRAAVAVARKLAVIMHSMLKTGEVFNASAGATV

SEQ ID NO: 97132 - protein, 344 aa, unidentified
MHYIGMDSHISTLDFAVVNEAGRLVKAIRVATSVNGFMEFVKTVPPPRTIYMEEGTLAAWALETCVRFREKLVITDAKENHWIGSSGQKNDSIDALKLAQLARGGYIKEIHHPVGQRRRFRELMIAYHDAVRSTTRIKNKIKARFRQNGIQCTGTTVYSETHREEWKGKLPQEATLLLILDGLWRQLGQSEQTEKELLAAARAQAKNYPEIKHFVAIPGIGFISAATISAILETPYRFADKRKVWMYAGLGLMKRSSGGKTYSEKLSTDYNRLLKYSIKQAAEAAIQAKDNPFRRKYLDMTLLHGIAPHRAKLTIARDMLATMWAMWRKGEKYSPEIREKAACK

SEQ ID NO: 97133 - protein, 408 aa, unidentified
MEVLYPRCAGLDVHAASVVACVRIAAGGTVTYEHRTVSTTTRGLLELADWLTAQGVTHVAMEATGVYWKPVWHVLEDHCTLILANAMHIRNIPGRKSDKNDATWIADLLALGLIRSSFVPPAPIQDLRDLTRTRKQLVREMARHTQRIQKTLEDANVKLTEVLSDILGTSGRAILKALVAGETDAECLADLTRGRLKATRAQLVAALQGRVTAHHRFMLNLHLTQIAALETAVAEVEARIREALGPFRAALTHLTTMPGVSETAASVILAEIGDDMTTFPSAGHLLSWAGLCPRLDESAGKRRSTRTRQGAPWLKTTLVQIAWAAARKKNSYFHAQSLRLKSRRGPKKAIVAVAASMLTAVYYMLRDGVEFRDLGDQYFVQRDKKRLTDRLLRRLRDLGVEVEVKPAA

SEQ ID NO: 97134 - protein, 343 aa, unidentified
MDHFAGLDVSVKETSICIVDDTGRIVREVKVASEPEALLQVLGNPIYRFKRIGLEAGPLSQWLFSALAEAGLPVICVETRHMRAVLQAQINKTDRNDARGMAQMMRAGLYRPVHVKTLRSQKLRMLLTHRKLLQSKAIAIDNDLRGTLRNFGLKVGMVGTAKFEARIKELVENLPDLAVLVEPLLMVRRVLREQFSILHRRLLAIVRDDEVCRRLMTVPGVGPVVALTYRATVDVPARFRNSKAVGAVFGLTPSKYQSGEINRTGAISKCGDEMMRVMLYEAAQILLVRLAKWSWLKAWAMKIARHRGMKKAIVALARRLAVIMHRIWVDGTEFRWTREAAVA

SEQ ID NO: 97135 - protein, 385 aa, unidentified
MLKYSLGLDISCEKIDACISAIDTNQNVVVKSTTHISNSLSGFKHLDDWIHKHHKDKSIPIVICMEATGIYYENCALYLFDKGYAVSVILPNKAKKYIQALGLKSKNDKIDAKGLSRMGAEQCLSVWQPLGKYFYELRLLTRQHQNLNEQMTITRNRLHAIEHAMYRNKIVEKQLRKEIDFLEKQVKETTKIIEKHIHGNTEIKQKVENICTIKGVAILTVAILLAETNGFALFENARQLVSYAGLDVVENQSGFHKGKTRISKKCNSRIRRALYMPAFVVITCKQIHFLNLYERTLDKHNVKMKSYVAVQKKLLTTIYALWKKNEKFNPDHNILKQEQELASRHPRENESKKNSHVQDVTTQGKHPVNDHSLLPLGKTKLKKYP

SEQ ID NO: 97136 - protein, 422 aa, unidentified
MLHDSEDTEEIIGRVAALDIGKAELVACIRVPKPGAPARRVQEITTYSTMTPSLLGLAERLRELGVTRVVMEATSDYWKPVFYLLEARGLEPWLVNAKDVKHLPGRPKTDRLDAVWLAKIAERQMIRPSFVPPPPIRLLRDLTRYRVDLIKVRTAEKQRVEKLLEDAQIKLSVVASDIFGVSGRAMLAALLAGERDPRTLAQLAKGSMRGKIPVLEQAFVGQFTDHHAFLLSTMLARIDETSADITAVEARIEELVAPFAPAVARLDEITGVGATAAHVVIAEIGLDMTRFPTAAHLCSWARFAPGVKESAGKNKGRGSTGHGNPYLARVLGEAAVAAARTDTFLGERYRRIARRRGKKKAIVAVGRSILVIIWHVLSDPETRYHDLGSGFYDQRINPERQKRTHIRRLEALGYKVTLEPAA

SEQ ID NO: 97137 - protein, 314 aa, unidentified
MSPSIFIGIDVSQTRFDIAIRPGSSFTIAHDEPAIATLVEQLRTLSPTLIVLEATGGLEVPLTSALATAGLPVVVVTPRQVRDFAKASGHLAKTDALDAQTLAQFAEVMRPTPRPLPDAEARALAAVLTRRRQLVEMLTAEKNRLLTAPPATRKSLRTHIAWLERELGHIETDLAATIRQSPVWREKEELLRSVPGVGPVLTSTLLANLPELGTLTHKQIATLVGVAPLNRDSGTLRGRRTVWGGRAQVRAVLYMNAVVAVRFNPMIRTFYERLCGAGKPKKVALTACMRKLLTMLNAMLKHHTPWRQETAQHA

SEQ ID NO: 97138 - protein, 339 aa, unidentified
MKITTFGIDLAKGVFQVHGVDADGRVVVQRALKRSQVLAFFARHPAALIGMEACGSAHYWARELIKLGHTVKLMPPAYVKPYVRRNKNDARDAEACCEAVGRPTMRFVAIKSVEQQCGRSIHRARDLLIRQKTQVINALRGLLYEVGLIAAGGQGGRKALVERVEAGDPAIPAALLPSLSALTRQWRALDEEVARLDERIAEAVKQSLPARRLMTIPGVGPISAHAVICAIGDASQFASARDFAAWVGLTRKNHDTGGKARLTGHISRMGDQGLRRLLVLGASAWVRQVRVRPDKGSAWVNGVLSRRPVKVAVVAQAAKTARIIWAILRSGQDYRAPAA

SEQ ID NO: 97139 - protein, 402 aa, unidentified
MRRSETALEGEVYMSYCLVAGIDVSKQFSDMCILSPDNKIFAQEKIYHDETSINRANALLQKAERLFFSKPVIVTESTSHYHLILFQFFSEHGYDVIVVNPLQSNSMKDFSIRKRKTDRVDAFKLAMMYRTKTLRPSQIPQTATRALRQLCRHRAELLNDVSSYKNRLTALLDQTFPGYDKVFSDVGGVTSCAVLVRFPTPTILLVEEESELVEVIAAASKSGYSFAKKKAGLLISAAQKAQTLGIHSCADETLIVCTIQMLRTLSESVLQIETAIDNLLAQIKEMRNNVSLLQSIPGIGSHSAALLLGEIGDISLFKKPKQLAAYFGLDPTERQSGSFRGTKNKLSKRGSPYARAALHMGVVNSICKRGKDSAANPVLLSYYEKTNRQRLLKQRQCTNWSL

SEQ ID NO: 97140 - protein, 342 aa, unidentified
MNTAVRLGLDLSKQYFQLHGVDEAEKPILRRRLRRAQMSSFFSTLPPTVIGVEAGGSAHYWSRTLTELGHDVRIMPAQFVRPYVKRGKNDAADAEALCEAVSRPTMRFVQQKSTEQQAALMLVSLRDRLIRSRTQLTNSLRGHAAEFGIIAARGLDKVEPLLARIASEDAIPDMARRLFAELAAELAQLQSRLRKIETELVTWHRTNERSQRLAQIPGVGPVGATLLALKAPDPRHFASARHFAAWIGLTPKDHSSGGVVKLGSITRAGDGLLRSVLVRGATALIRQVRLRRGPFWPWLQRLLERKPPKLVAVALANKIARIAWKLMMSDQGYNPSYAMRAT

SEQ ID NO: 97141 - protein, 480 aa, unidentified
MNVKARRTKKQVNVENQAIMLLSKEELDRKIEVIKKELRSYTWRDLETNGKFAKNDKLSFITDDMLIAGCDIGSETHYIRAIDVRGRELSSGAFEFSNTSEGFANAKAWVLALAAKNDKKQIVLGLEPTGHYWFALAAWMISNGISVVQVNPYAVKQSKEIEDNSQLKDDRKDPKLIANLVKDGNYGMPYLPEKVYADMRRLSMFRNQLTEDRIRNINRLHRELKIYFPEYMDAFGKIDGAFTLEVLKISAIPSDITALGAEGIKNIWHNVKLRGRGYSRANEIVSYAEKSVGLTDGTDAGREAMKWYAEQILRLDEQLAEIESVLHEKCREIPYAENILAINGVGENILAGILAEMGDISRFDDVKEIQKLSGMGLVACSSGKHKGQTKISHRGRKRLRYWLFQAAKSAVSHADEFKQLHEYYTTRSNNPLKKMQSLVVIACKILRVIYTILKTGTTYDPQKLLKDIKHPAASQAPMAA

SEQ ID NO: 97142 - protein, 345 aa, unidentified
MATYYIGADVHSNNTELAVENRHKIMARYSVPTTIPAISTVLNSLQGKKILAMEEGPMAGWLYRNLCESVDELVVCEPRRNKLITCDGDKDDKIDAGKLAVLLRGKFLKTVHHTNDNKRAYLKHWVNLYHDRVRDAVRYINKIRACCRMHGVATPRKVIHNNANLNDWLSSINNSVLQAQLQMLWIGYEATKEQVVMAREQLNSLARKYPTIKHWCRLPGIGLIRAATIFAYLGTPWRFKKKSKLRKYCGVGLERTASGTDKKGRIKPARLRLPRMVNRRLKDAVLGAATSAINRHKHNGFKKYYERMLSNGVTPANARHSVARKMISVMSGMWKTDSKYDPKML

SEQ ID NO: 97143 - protein, 418 aa, unidentified
MISAVIERCAGIDVGKKFLAVCVMTGPAQENPSAELQKFGTIRAELERLREWLKSEGCTHVVMESTGCYWKPVLNILEDDPEYRLEVVLANAQQVKAVTGHKTDPHDARWLAHLLRHGMIRPSFIPPRAQRELRDLTRRRKQMVRAAAEERNRVQKVLEDANVKIGDVLSDVFGLSGQLMLEALVAGRSSAGEVAQLARGHARKKITDLTAALEGHQMREAHRFLITRAMRHMAFLADEIEALDQEIARSIGSPELSHPNQLLQTIPGIRTQAAAAMLAEGGPNMKQFPEASHFSSWSGIAPGNNESAGKRKRAPTLRGNPHMKTALVESAWSASRTNGSEFQDRYHRLQPRVGHKRAIVAVAHVLALRIYEVLESGLPYHHSHLAHRHSSLQRLIRHHSRRLKHLHRWLKDGDPNQA

SEQ ID NO: 97144 - protein, 432 aa, unidentified
MEKIRTNAAGIDIGAKKVFVAIEEQEVRYFFTFTEDFEKLRDYLFEHKIETVAMEATGVYWNILYEILEESGIDVWLVDGRQTKQVPGRKTDVKDCQWIQQLHSYGLLNRCFVAEADIKELRAYQRLREDHICSASMHINHMQKALTEMNIRLTEVLSQIHGVSGIAIIEAILKGERNKETLLKMCDRKIIKHKKEDVLKSLNGRYTKHGLFALQQAFDSYMFYQNQIEQCDKMLSEVIERIGKGKPDQYLQSPRKPIRHNKPDINNLGLSLLKIFDGKDATALSGITDYSWMQLMSETGTNLSRWPSEKEYTSWLGLAPGQHTSGKMKRTKRKNGHPKAGQIFRQIAQSLITSKHIALGAFGRRLRARKGSQIAIKAVARKLAILYWRIMVKGMAFVEEGIKKYEEQLLVQKHKSFERLAKDLDIQIAYNV

SEQ ID NO: 97145 - protein, 421 aa, unidentified
MTHAAPEAFVAFVGIDWADAQHDVCLQTADSTKREYFQLEHTPEAIDAWVTILRTRFNGQPVAICLELNKGPLVSALRKYDFLVLFPINPLMLARYREAFTPSRAKDDPTDAALQLELLLTHRDKLQPLWPQSPAMRALAQLVEHRRRVVGDKVRITNRLTSTLKNYFPHVLHWFQEKATTIFCDFLRRWPTLKAAQLARRATLETFFREHHVRYPEVIAQRIQAIKAATPLTTDDGVIAPNALLVQALIAQLRATLQAIADFDTAIAQRAQSHPDFSLFQALPGAGPVFAPRLLVAFGEQRERYASAAELQKYAGIAPVTERSGKKSRVHWRLQCPKFLRQTFVEWAAESIRHSFWAHVYSQQQRDKGKAHQAAVRALAFTWIRILSRCWQERTPYDESVSLQALHPRGSSLIQNLAKAS

SEQ ID NO: 97146 - protein, 343 aa, unidentified
MRELYYIGLDVHKKSISYCIKTQDGAIIAEGQVEATRTALTAWAAAIEHPWVGALEATLFTGWIYDHLKAFALELQVAHPAMLKAIACGKKKNDRLDARKICDLLRCNLLPRCYMAPPEMRELRRVLRYRHLLVSEAVRMKNKISGLLLEVGEPYDARRLHGKSYFYAHLDSLRDTPESVIELLAITRGSLEMFESLQAELLRGLRSHPLPRARVELLQSIRAVGEVTALTWALEIVEPERFGALSRVVSYSGLCAAQRESAGKTQRGPLSKQRNKHLQRVLIEAAKLAPRWNPQLREVYERACERGPRNRATLAVARKLVAYLWAVDTSGRPFVPRVEAEAA

SEQ ID NO: 97147 - protein, 457 aa, unidentified
MEQYFLGGDVSKGYSDFVILDSRKQRVEENFQLDDTIAGHNFLYDRLLTFFEEHPDAELCAAVESTGGYENNWHNGLRKFQSSLNIKTARLNPAGVCNNTKAGLKRVITDKISAQGVAEYLITHPEKVMYQQQDYWASLRKQWSFIKMLTKQSTQLLNQLESLLYSANPEILKYCQEGMPAWVLALLKQYPTAAKLGRARAASVARIPYISASRAKELIGNAKTSIASATDSITGQLIGATVGQIQHLQKTIKEQTKIMSEECALPEIELLKTFTGIGDYSAIGLMLEIQAVTRFSTAKKLASFFGLHPVFKTSGDGVSAVRMSKKGRKEPRRILFMVAMSAIVSNSLIRDLYQKHVAKGMERMAAIGLCMHKILRIIYGMLKNNTPFNPEIDLKNRERNSDKPQKERKDKSRRYQDFDTNAPISKRQRKKREERKLSQNAVSVECGISAPVPEPSS

SEQ ID NO: 97148 - protein, 355 aa, unidentified
MKPVKLTKYIGMDVHKAMTVIVVLDDAGKVSAEAIIETKGSTILDFFKSQRGTLHVALEEGTQATWLYDLILPHVAKVIVCNPKKIIRHGNKADKIDARLLAELLRTDALKPTYRGEQSIRGVKELALSYMAVVRDGARVKNRLKAMFRGRGFECNGTGVYNPDERKDWLAKLDSPALCSRADRQWQELDLLERLSEEAEKELVTEARKYTATRILRSVPGIGPIRAAMILGVAGTPHRFRSKKQFWGYCGLGVVTATSSEYQVVDGRVCRSNKRPLLRGLNNNYNRAMKEVFKGAAKTVAAGVWKSRFEDMIAKGTPASLARLTLARKIASITLAVWKKGERYDHRKLKTMHAA

SEQ ID NO: 97149 - protein, 348 aa, unidentified
MVAELEYVVGVDTHRDEHVLAVVEAPSGALLAGRAVAADARGYAQALRFARRHAPVGRGWALEGAGHYGAGLARYLSKRGETVLEVGRSPRRQRRLQGKDDELDALRAARAALADEPLASPRVGERREALRLLLVARRSAVDVRKEALVQLRSVIVTAPDRLRDELRRLPPRRLLDRCSRLRPASGAASDEAACRLVLRSLARRAEAATLEAAELEREILGHVRVLAPRLLAEPGVGPIVAAQLLVAWSHRGRVRSEAAFARLAGVAPIPASSGQTSRQRLSRGGDRQLNRALHTVVLHRRQHDPATRDYIARRVAEGKSRREATRLLKRYVARSLYRLLQAQEPLMA

SEQ ID NO: 97150 - protein, 307 aa, unidentified
MPEIIIGCDLSRACLDLHILPDGLVTRIDNSTEAIEEWVASLPPGCRVVFEATSGCDTDLIAGLCAGGVAYSRVNPRQAREFARALGVLAKTDQVDARILAEMGLRLDLAITVTPDPSRIKLADYLRRRRQLVDMRKAEKVRRHSAGQRDILKDIDTLIRILDRRIEAMDIKIRTLIEEDEVLSDDARLLAAVPGIGPTVLATLLGELPELGRLDRRKIASLAGLAPHARESGTWRGQRRIWGGRRKVREALYIAALSASRRIPALIAMRQRMKEKGKAPKTILIAVGRQLIVILNAMIRNRTPIAL

SEQ ID NO: 97151 - protein, 498 aa, unidentified
MISFPKRERAQHAAACVGVDAGKFSHTLVVRPQHQPDSKRFSFSTTRSGFDSAVAFIRQQTGGVAAETILVGIEFAGNYGFTFAHYLAQLGFPIVSVLPAHTKRWKDVAHNQPLKTDAKDAATITDLLAQGHFVTFPFLSPAYADLRYLVTARERLSLLRRGAITQLRTLIQVVFPEFEALFPLIAKKTPFTLLRTFPTPHDLLDATRTKVRRVLKTASRGHLGAETYEQLVTARERLSLLRRGAITQVRTLIQVVFPEFEALFPLITKKTPFTLLRTFPTPQDLLDATRTKVLRVLKTASRGHLGAETYDKLVAAARATLGLPGAQARLRQEILLTLERIALFERQIKALETELVEALQAVPETPYLLSIPKIAPVTAAIFLGSIGDPRAYEAAEQILRVAGLSLIERSSGVLRGTKRISKRGRPLLRQAAYMFAVRSITKGSLFRAEYEALCQRNGGVKMKVVVAVMRSGLRLLYSIARDRRLFTAEPPARRRAAA

SEQ ID NO: 97152 - protein, 456 aa, unidentified
MSHCTANKKAASAFVRRNSIPTTGAVAKALFNSAIGIDVHHDILVCAYQHCNRESDEITTEVCSFGTTASELAKFTDWCRNHHPEQILMESTGVLWFSPYEALESVGFTNRQLSLINARDFKAIVGRKSDKQDAERLALYARIGNVRSSFVPAKCFREMRAVSRLLSKTTDEQSRARSRYLKTLNFIGCRASSVFSDVRGKAATAILEVLAEGTREQLIDAIKIHGRRLRKSAAEILDALDFAVSPAMAMQLRIQKQHMAALSQTCEELYALLKVMQANYQPWINRLMTVPGIKERAARVIFAEVTNDLSSFPDAAHLASWVGVCPGTMESAGKRYSGRAAKGNRYLRRILVECSQAIGLMRKGALYSLFQAFKERKGTRRAVVAMAHHLVKIIYCLFTKGGNFEAQSTDALTKVRKQKYLSAVANIKKQNFEILTSGSLVDKATGAITTVDPMTV

SEQ ID NO: 97153 - protein, 362 aa, unidentified
MSQSSWLVAGIVPGVERHPLKKLAPDEGALLRLLERWRDEATKAGRTITRITVAFEAGRDGFWLARWLQARGIEAFVIHPNSVAVSREHRRAKTDRLDTALLQRAFLGWLRGERDHCGMAAIPTLEEEDAKPPSRERENLVDERTRIGNRIKATLARLGIRGFKPTLRTAPDQLDRLRTPEGAPLPPNTRAELRREMARRRRLAEQIREIEAARCERPQQHPDEGTHPMVRLLAQIVGVGIETADMLVQEVRSRNLRDRRAVARYGGLTGTPDESGARRREKGLAPAGNARVRRGMLQLAWRFLMFQKDSALAQWYRARTADARGATRKTLIVALARKLLIALWRLVTTGEVPEGVVLRPAR

SEQ ID NO: 97154 - protein, 391 aa, unidentified
MIFVGIDVAKDKHDCFILNSEGTVLADVFTIANNRIGFETLLSRIQSCSQGESKIKVGLEATGHYSYNLLGFLLDSGLATYVINPLHTNLYRKSLSLRRTKTDRIDARTIAMMLMSDVDLKSYSNTAYHNEELKSLTRYRFDKVKERAKLKSSVARLVNILFPELEKLVSSLHIAVVYALLSNYPGASYIANANTEELAETLCTASKGRYTKSKTAEIQVAAGVSIGSKMPAKSMELKHTIALIRELDKEISEVESAIDKITSQMDSPIFTIPGIGRHMGAMILAEVGDFSNFASADKLLAYAGLSPSTYQSGQLQNCYAHMEKRGSRYLRYALFNAAKYVCLWCPTFSAYLEKKRSERKHYNVAISHAAKKLVRLIFAMQRSGKAFLADY

SEQ ID NO: 97155 - protein, 388 aa, unidentified
MSQSFDASRSLTAFEQDSTLVAVIEMSQSKWLVAAVVPGIARQPLKKLDADAGALLKLLQRWREEARKAGREVKRIVCAYEAGRDGFWLARWLQAQAIETYVIHAASIAVSREHRRAKTDRIDTELLMRSFLGWLRGEKRHCSMVAIPTMAEEDARRPSRERESLVGEQTRIVNRIKAVLALFGIGGFNPKLRKAAQKLETLRTADGTPLPENAHAELRRDLERLRLARDQIHIIESERLRRLALAPAAGPHAMVRLIARVFGVGIETADMLVNEALARNLRDRRAVARYAGLTGAPDESGKRRREKGLARAGNGRVRRGMIQLAWRSLIFQKESRLVRWFRARTADGRSTTRKTMIVALARKLLIALWRLVTTGEMTEGLKLRPAGT

SEQ ID NO: 97156 - protein, 389 aa, unidentified
MKKNTSCSSVRRCPMIAGKPREQDNRSSPSATIAETSSSRYRAVVGLDVGDRHTHYCVLDLDGVMVAEGVVATTDPALRVQFEGKERLRIALEVGTHSPWISRLLSAWGHDVLVANPRKLRLITDSDSKRDRTDARLLARLAHVGPALLSPIHPRSARTQIDLALVRAREVAVQTRTKMVNAVRGIVKSTGHRVPRSSTVTFPRRAKSACPEALQPALWPLLRLIDALTDEIQAYDRLVAEKATREYPETGAIQSIHGVGALTALAFVLVLDNDRRRFRRSRDVGCYVGLRPKQRESGQQAPQLGITKAGDPLLRRLATQSAQYILGPFGRDSALRRWGLALATRGGKNAKKRAVVAVARKLVILMHRLWITQESYDPMRGLIGQQPAA

SEQ ID NO: 97157 - protein, 363 aa, unidentified
MREVRQTDRLLVTRRPWRSECRRTFLNEPEQLSGQLSPHLQERDKRGKGAQLAKLYVGVDVSKVSLDMAIQGSKEFRSFPNDALGISRAVEVLHKTEPQMVVLEATGGIEMAFVGSLVAAGIPVVVVNPRQIRDFAKATGRLAKTDKLDAGILADFGAKVNPSVRPLPDVELQKLRTLIARRRQLQEMITAERNRLSSVAGVVRERVKAHIIWMQGELKQTDDDLSDSLKQSAIWKQKDELLRSVPGVGPVLSATLIADLPELGRLNRKEIAALVGVAPFNHDSGTLHHKRRVWGGRTSVRPSLYMAALVASRHNLVIEAFYKRLCAKGKPKKVALTACMRKLLTILNAMFKSNRPWEYEMAA

SEQ ID NO: 97158 - protein, 370 aa, unidentified
MTSIIYVGMDVHTTNYTLCCYSVTTDKIFATATLDPDYRNIIKYLDQIGRNLGGDCNFQCGYEAGYLGYSLHNQLTAHGIDNVILAPTTMATTKKKGIKTDKRDASNIAKCLAYNTYRAVYVPTAEDVAVKEYIRMRDDEKDTLKRIKQQLLSFCTRHGRRFTEGKNYWTLKHMAWLGKLDFGDAVLNETFQEYLALFHQAMDKVERFDKRIVELAHTERYDDKVKKLSCFIGVKAHTALATIVETGDFARFPSAQHYASYLGLVPGEDSSGDSIRRTGITKAGNSHIRSLLVEAAQSYSRGAVGAKGKALKDRQAGNEPKIIAYADRANERLKRKCYRIMFHSKRNIAVTAVARELACFIWGMMTDNVA

SEQ ID NO: 97159 - protein, 339 aa, unidentified
MKHTTVGVDIAKNVMQLHYIDAETGEIVNKPVKRAAFLEHFANLTPRLIGMEACGGSQHWARKLIAMGHQVKLMPGKFVKAFAMGNKNDATDARAIWLAVQHAGKAVAVKTETQQAVLGLHRMREQLVKFRTMQVNSLRGLLTEYGEVMAKGRAALDKAIPSVLERLVDRLPSILIDTLREQWSGLSELDRQIAEIERRLQAWQREGKACKAIVAIPGVGLLTATAAVATMGDAKTFRSGREFAAWIGLVPRQTGTGGKVQLLGISKRGDTYLRKLLIHGARSVLCLAKEPGLWAEGIKKRRPLNVAVVAQANRMARTIWAILAHDRQYDKDYVSVKPV

SEQ ID NO: 97160 - protein, 341 aa, unidentified
MDDVTLVGIDLGKHTFHLHGQDAKGKAVFRKKMSRKQLIEFFATFHACTVVMEACAGSHHMARKLAAIGHTVKLISPRFVRPFVKSNKNDFVDAEAICEAASRPAMRFVTPKTESQQTLSVLHRVRESMVRERTRTVNQMHGFLLEFGISLPVGKTAVTRLPAVLAMQELPLRLVVILERLHEHFKYLEEQIGEIDQELARQLADDEVGQRLMSIPGIGPVTASALAAKMGDAKQYGCSRDFAASVGLVPRQYSTGGKANLLGISRRGDKNVRRLLVLCARAYMRGLEKRTGRLAEWVRAMLAQRHSNVVACALANKLARTAWAIVARQTTFDAGFTTRPA

SEQ ID NO: 97161 - protein, 350 aa, unidentified
MLHAGLDLSRNRIDVCLLSGQGELVAEFAAPSDADGVCALARRVLERGEPVRGVIESMTGARFVHDKLEQFGWDVLIADAQKVKGLAPLACKTDKIDARVLAVLSERDLVPEIWLPDPRVRREREEARFRMHLVHHKSSLKNRIHSTMITFGHPCPVTDLFGVAGRELLDRLEVPQPWRGSIDASLELIDYLERQIAQINKQLRSGGANHPYVPLLLTVPGIGWVLAFTIAAEIGDIARFPSAKKLCGYTGLCPRVLQSGERDRRGPLTKQGPKYLRWAMLEATMHALRHPIYAERYQRNKKRLGKQRGAKVAQIDIARKLTEAIWHMLTRNQPFAPTPAPGGAAFRLAA

SEQ ID NO: 97162 - protein, 404 aa, unidentified
MIFAGVDWAEAHHDVCVMSRDGRVLEQRRVSHSVTGIGELHALIGAHADEGELVAVGIETDRGLVVTALVAAGYQVYAVNPLAASRYRERHATSGAKSDPGDAKVLADLVRTDRHNHRQVAGDSDLAEAVKVLARAHQSAVWSRQRQVNALRSALREYYPAALAAFGTDLADRDATAILAIASAPDQGRALSRSKIAAALRRAGRQRNIEARAGEIQAALRADYLHAPPAVARAYSAAARSAIRLISAYTAEIAELEQALSEHFDQHPDTTIVRSLPGLGTILGARVLGEFGDDRTRFASPQCRKNYAGTSPITKASGRSHVVLARHARNRRLADALEQWAFCSLTPSPGARAYYDQLRARGKTHRQALRQLANRWVGILHICLERGCTYDETAAWHHLQANAA

SEQ ID NO: 97163 - protein, 399 aa, unidentified
MLNSQTLQLRVGVDVGSQRHSVAVGLTDGSLLEEFEIPHTATGFGDFFARINEHAKRHPYPIAVAMEGYNGHVRPLDSLVKARGWRLFNVNNLKLARFKEIFPAAAKSDRIDSAKTLELFQLHDHLPMAGDVLQEVMATPEENDILKRLSRRRRRLVNERGRVMNSLQADLQAVAPGLLHITRDVANLWFLNFLTCRKGLLELARVRRASLLKVPGIGTTYADAIQAWQSRAFFGHDASLVGDMIQQDAARILELKRQIKALEERMADVAESSSIASQLASIPGYGSICSAELAGEIGTIERFRSEASLALYLGMATLDNNSGKYRGSKAPKHVNARAKAAMMVAVDHHRKRVPQSQRYYEKKRTDGKRHNQAIRALGRHLCRVIFKMLSQDRPYRIDP

SEQ ID NO: 97164 - protein, 262 aa, unidentified
MEASYYVGTDIGKYRLDWHVNEAGNTELSTGQAANTPKGIHKMIAQWKRGKICLDELIVCFEHTGPYGLLLATILEQSGGCYVMVSAAQVQLSLGICRGKSDPIDARRLAEYLWRFRDRLAPSRLPSKALLELRSWLIWREKLVKMRTALANGIKANVLTSQVMDLVEINDQMQAQHDQLTTLLKQVDRTINSLLRTCNTTEGQYDLLACIPGIGPIIAGWLLVYTEGFTRFPNARQQACFAGSAPFPKQSRQHSSPDRVSQ

SEQ ID NO: 97165 - protein, 428 aa, unidentified
MHCTQNEKIAQVSNESIVVGIDISSEKHCARAFTSRGIELTRKAFTFANTGEGFEEFERWLEDQMDNSRLTKAIIGFEPTGHYWFNLADYLDEQNVQYVLVAPQHVKHTKELDDNTQRKDDWKDPRVIAKLVIDGRYFFAYRPQGKYAELREAFTRRCEIMEQLIETKNRLNRWFDINFPEYKTVYRKVDASTGMMILRKAPLPKDIVTLGVDGVNQIWRNAKQKGTGIKRAQTLVKAAQSSIGAKETSQATRISLWQLLDVYEIAEKQLHEIDELISSILAEMPDAQKMLGIKGIGQFTVAGFLSEVGDIRRFTDPRQIQKYAGLAIVADNDSGKHEGRTKLSQRGRKRLRWVLFRAALSLVKSNPQFYQLHQYFTGRQENPLKKIQSIVAVSTKLIRVVFGMIKNDRPYDPEKMMSDIHRPMKIVA

SEQ ID NO: 97166 - protein, 318 aa, unidentified
MSEPVVVGLDVAKATVDVAVRPSGECWSVPNTDAGAAELVARLRPLTPALVVCEATGGFERATIAALATAGFPVVVANPRQVRDFARATGQLAKTDRLDAGILALFAERVRPTPRPLPDGAAQLLDAVLTRRRQLLEMLTAEKNRLGFAPKPLHRGIQAHIRWLERQLDDVTKELAGLIEASPIWRAKDDLLQSVPGVGPIVSSTLLGELPELGTLSHKQAAALAGVAPLARDSGTLRGKRMVWGGRASVRTALFMAVLCGRRWNPVLKVFYERLIAAGKPKKVALIACARKLLTILNARVRNNTRWMNPHATIQYSC

SEQ ID NO: 97167 - protein, 354 aa, unidentified
MKHLQLKDGDRLRRQCIGIDVSKKKFTFCLCQSTEQDLHFYTKPKEFENSEPGFRHLLAWSGNEVDSSVPYSFLMETTGCYHESLALFLARKGMTVIIVHANKAKNFARLNGQRTKTDPVDSKMLATMGCDTPGLKPWPIPDEKYLQLRDMSRLSEQLEKTRTQVLGRMESVTYSGYVTKSVLKAHKTLLKSIEKVQAANEQDMAELVNGDPVIKAGVDNMESIKCIGKKTAILVTAETLGFHQMTSAKQVASYAGLDVKKEQSGDTDKKGHMTKRGNAHLRAGLYFPAMVASWSNPQLMEDYNRICASHPQSKNIALVALERKLLCLMYSLWKSGKQWNPEYGQDKKQEEAMS

SEQ ID NO: 97168 - protein, 361 aa, unidentified
MASVKYVGIDVHKKMCQVAILDGNGKLLDETRFTNTSEGIEEFALKLTGFNDEVRAVVESTDNLWVQVHDRLEDYGYDVALSSPANSRLISESRVKTDRTDARALARLHRAGVLSTCYVPREEERSRRELLRHRLRLVKNRTAVRNRVHSLLDKHGLRVPYPSKFSKKAVTQMRGLSLGFMDDAILRSDLALLGALDEQIVHVEEKLVALAVDDTRVRLLMTMTGVDYFAAMLILAEMVTIDRFTGEKGFCSWMGLALRVWQSGEKAWIWGVGGLGNRRMRWLMVQCAHTASRHDPRLRRLYERHTRRKGGKSAVATVAHEMARIIFFMLKRGEPYRGVSRGLWERKLKRMERNALSGLRN

SEQ ID NO: 97169 - protein, 463 aa, unidentified
MRTDKKLWRNRKARKELARRLQSENPGLEVVHPHAAGIDVGNSAHYVAVRPDRDSQPVRRFECFTADLHRLADWLQNCGVKTVALQSTGVYWIPLYDILEERGFEVYLVNAQHTKNLPGRKSDVQESQWLLKLHTYGLLNNSFQPPSKIRTLRTYWRQRLQHVTGAATCVQRMQKALTQMNIQLANVISDLSGVTGQLIIRAIISGERDPWRLAELSHPRIQASRAEIAKSLEGTWRSELIFVLQQELEMYDTYQRRIAECDQQLQKHLAAFTDTVTPPAKEELPPKKKKKQNKNNPHFHLADELQRISGVDLTRIDGVDVFVAQTVVSEVGLDMGRWKTEAHFASWLGLCPDNRISGDKVLARGTRHVLNRAATALRLGASTLLKSQTYLGAQYRRLRSKLGAPKAITAMAHRLARLVYRMLKYGQQYVDKGAEYYERRNRQQQVEFLRKKAARLGLQIIPA

SEQ ID NO: 97170 - protein, 454 aa, unidentified
MCLTDRPTVEASAAGVDIGAREIYVAVPPERDPNPVRVFATFTEDLHRLADWLIQCGVRTAAMESTGVYWIPLYEILEQRGLKPCLINARHMKNVPGRRTDWHDCQWIQYLHSVGLLRSAFRPGEEVCAVRAVMRHRGELVVMAAQHIQHMQKSLTQMNVQIHHVINDITGLTGLAIIDAILSGERDPATLAEWRHYRIKADRETIRKSLEGNWRREHLFTLRQSREAYGHYQKQIEQCDAEIADLLKEIEPHTDPAEKPLPPDGKKRRSRNRRNGKASGDSFDMRTELYRRFGVDVLQIPGLEQSGLALLTELGPDLSRFPTVGDFISWLSLCPDNDKSGRRWWRAARGVDNRSGQIFRQCAYSLHRSQSPLGVYLRRMKARLGPQGATMATARKAATIFYVMVKKQVEYDASIWASLDANREARYEARLKRQAERRGFILVPKASIATPQAG

SEQ ID NO: 97171 - protein, 363 aa, unidentified
MLQHTSATHVGLDVSKASISVALLRPDGHLDEERIPNTPEAVRSLVRRWPDPATVRACYEAGPTGYDLYRRLSALGVETTVIAPSLTPRRPGDRIKTDRRDARKLAGLFRAGELTEVRVPTPTEEAVRDLLRARQDEREDVLRARHRLSKFLLRHGRVFGEGRAWTQRHAAWLARQRFTEPAAQRTFEHYRAELDMRLASLKLLDDELRAIAHRPPFARTVARLCALRGIAELSALTIAVEVGDFRRFESAPAFMAFVGLVPSERSSGERRAQGSITKAGNAHLRRVLVEAAWHARRRPNVGPALATRLEDQPPDVLAIATKAQRRLHDRYWRLVGRRRPSTVAVVAVARELAGFCWALGRAA

SEQ ID NO: 97172 - protein, 355 aa, unidentified
MNDAKYIGLDVHQATISVAVRDCTGKLVMEAILETKAETILQFFRGLRGSLHVNLEEGTWAAWLYDLLQPHVTRVVVSDPRKNALLKHGNKNDRIDARKLAELLYLNKFNAVYHGQHGLRTLKELARSYLTLTRDLTRVMARIKAIYRGWGIPCAGQHVYALSHRAEWLGKLSEAGVRRRAEFYYQQFDALALLRQEARRELLVESRKHGAVKLLRQIPSIGPIRAALLVALLQTPYRFRTKRQLWAYSDLALTTHTSGEYRFERGQLQRSKKVLAIRGLNRNHNHDLKNIFKGAATWAAANSGPFKDFYEACVARGTKPHMARLTLARKIAAITLLVWKKGVCFDAEYLKPQAA

SEQ ID NO: 97173 - protein, 448 aa, unidentified
MAQRSQLKRMEIANPNAAGIDVGSASHFVSVPPDRDDEPVREFRSFTEDLEHLADWLVSCGIDTVAMESTGVYWITLFELLESRGLNVFLVNARHVKNVSGRKSDVLDCQWLQQLMSYGLLSGAFRPKDEICALRSVMRQRAMLLSYQSRHVQHMQKALTLMNVQLANVISDVVGEPGQKILRAIIAGERDPLKLADLKNGRIEASKEEIAKSLQGNWREEHLFALTQAVELFDAYSKALQRCAVQLESMLMALSRSEAEPGPSRRRVGKAKNAPKFDARTYLFRICGVDLTAIDGIDITTALKVIAEIGPDLSRFRNAKHFASWLGLSPGTKISGGKRLSGATKGNANRAAQALKLAAAALRPSQSALGAYYRRMCGRLDKGKAVTAVAHKLAHLVYAMLTKGTAYVDQGQAYYEERYQQRVIYHLRRKAAAMGLELVPIQAQGQSA

SEQ ID NO: 97174 - protein, 334 aa, unidentified
MKKYIGLDAHSSTCTFCVMNEKGVELDNTTIRTNGRLLVNYLKSIKGDTTLTFEECELSSWLYEILVKEVDAVLVCNPVYNKEYKTRKTDRLDARKLAKLLRGDFLTPVFHDGSSREKFRDLMSAYTDLVEEATRIKLRYKSLFRKSGNKVSGEKLYTDESFLKDLKRKDYNFIGKSLYHLLQEMEETRERYKKEIIKTSKRFEEIRKLKSLPGIGAIRAAHISAQVINPRRFASKYQSYNYCGLVRHKQISGGREYGSRKIWGNRVLKCVYKMASHDAIRGNNKLSKYYESLRKKGVNDKSARNAVSRKIAAISLSIWRNNSDYNESKVTIAI

SEQ ID NO: 97175 - protein, 285 aa, unidentified
MKQQTKSSNITVGLDLGDRRHRFCALDERGEVVEQDSICNDRVSLRKLAGRYHGALGVMEAGAHSPWISRFLEALGWRVVVSNPRKVRAIYQHERKSDQRDALMLARIGRMDLALLYPVRHGTAEAQQDLLRIKLRDSLVRARVAVINSVRFTLKSLGYTVRNPSSARFHKVVMEEVPESVREMITPSVQALAELTARIKMLELEINTLAQMKYPQSAQLQQIPGVGLITALYFVLKIEDPNRFAHVRNVGAYAGLCPRRDSKRRERPAAAYLQARRRLPAPAPR

SEQ ID NO: 97176 - protein, 449 aa, unidentified
MSRPQVIDDEEHERIHDRVAAVDVAKDSGMVCTRTPHPSRPGARRSTVWTVKARMGTIRALGRQLRKDGIEIVTLESTSDYWRIWFFVLEACGLAVQLVNAAQAKNLPGRPKTDKLDAQWLARLTELGLLRASFVPPKAIRDLRDYTRARTRLIQERTRCWQRLEKLLEGALVKVSSVASKLTTVSAQDMIKAMIAGERDPQVLAGLARTRMRAKHDDLVAALDGMFDDHHGELAALLLDQIAFLGTRIAQLGARAAGLTAAMPEAWGINPDGTTGPDAGATPEAPVLSAVARLAEIPGVSEDLARAIIAEVGLDMSRFPDAAHLVSWAGLCPSARQSGPRSRAGKKGQGNSYLRGSLGQAAIGASRTATFLGERYGRIARRRGNIKAQVAVARSILVIIWHLLANPEARFTDLGYGYYQARTDTDRKIRNHIRQIQALGFEVTLTKAV

SEQ ID NO: 97177 - protein, 407 aa, unidentified
MKHLERTVYGGVDTHQDVHVAAVIDHVGTLLDTKSFPTTPLGLKSLERWLSKHGMVVKVGVEGTGTYGLGLQRVLQAAGHEVVEVNRPNRQLRRAKGKSDTIDAESAARAVLAGHATATPKAHDGIIEAIRVLLVAHTSTMRALQKAGARIRSLTITAPEALRIELANLTTPARAARAARMRPGDDPSDVATATRTALRLLGRQYLSLVEDHKMLEAQLEDLTTRANPGLRQVPGVGPLVAATLLVAAGDNPDRMTSEAAFAALCGASPVPASSGKTTAMRLNRGGNRQANSALFRIAVVRLSHHHQPTVDYLNRRTAEGKTKRSILRCLKRFIAREIYSHLVNPKPAIQTDDLRARRTSIGHPMRIVAVAVGASLVEISRLERGINHDPNLALRYRDWITQQEAAS

SEQ ID NO: 97178 - protein, 412 aa, unidentified
MKLFIGIDVSSKDLQVAITDSENYQKPLLNQSFSNDLIGANEVKKIILQLAKQNSYDKVIIDMEATSIYSFHPAYFFANDEDLQKINLETDVINPKNTKRFHDVYEENKNDPTDAYYIAEYLRFGKYHVTIARQEEYLALQRLTRARYEITSSLTRAKQHFIETLYYRVNKLVTVDKDNIKTSIFGATMLSIVTDSKTIDEIAEMPIEDLIDYLQTKGRGRFSDPETLAKAIRKAVRGSYRLGKVMKDSIDAVLSVYYAEIKTNQKLIKNLDKAITDIVQTLPEERILQSIPGIGSVYSAGIIAEIGSIDRFDTEAQLAKYAGLAWRQKQSSNFDSEHKPMTKNGNHYLRYYLVEAANLIRQRDPVFRKYYQKKYDEAFYSPHKRACVLCARKLTRTIFTLLKNGQIYQTPR

SEQ ID NO: 97179 - protein, 355 aa, unidentified
MNSEKYIGLDVHQATIVVAVTDSTGKLVMESILETEAATILQFFAGLRGNLAVTFEEGTWSAWLYDLLNPHVEKLVVCNPRKNALLKDGNKSDHIDARKLAELLRGNQLKPVYHGENGVRMLRELSRSYLAIVKDLSRVMNRLKAVYRSWAIPCAGRDVYYRRHRAQWLDKIREAGVRRRAERLYEQLDMLQHLRQQARRELLAESRKHAITARLRQIPYLGPIRSALAVALMQTPHRFRSKRQLWAYSGLALETRISAEYRMVEGQVRRSKKLLSIRGLNKDHNHDLKGLFKGAATMSSVRPGPFQDFYQAALAKGIKPTMARLTLARKIAAITLTLWKKGESFDAEKLKSQAA

SEQ ID NO: 97180 - protein, 356 aa, unidentified
MQGTLGVSKPTRKRKETPVEHQRQYVGIDLHRRRSVIVRINDDGEVLETVRVVNDPLELALAIADAGEAPEVALEATYGWYWAADLLEAEGAHVHLVHPLGLHWDSRRVKNDVLDATELAKRLSRGDLPEAWIAPPELRELRELVRYRAKLVALRISAKAQVHAVMAKLGILPTLDDMFGPGGQKLLDEMPFTGTYAIRIASLRDLLEIYERELVDIERTVARRLRGHTGYRAIQAINGVGPVMAAIFVAEIGDVSRFESAGHLCSWAGLTPTHRESDTKVRRGHITKQGSNLVRWAAIEAVVRYHGGAPIAPTYARIAVRRGAMIARVAAARKLLCLVYYGLRDGEIRCLAEAAA

SEQ ID NO: 97181 - protein, 405 aa, unidentified
MWFAGIDWADDHHDAVVLTDQGQLLGALRVPHTAEGLDHLTRFLRGGASTSGAAEPVICLVETQHGLLITALLEAGFTVCPVNPLAVGRLRPPSGVKTDALDARLLARLGRNDWPALRVLPPDGPLLQELKTLTRDLEGLLREQTRLVNQLTACLKAYYPAALRCCDGLTRQVTLAFLQAFPTPEAAAAASLDQLTQVLAQGHYPHPRQKAEQLAALLQAPQLHALPGVARAKARLMAALRAQLAVLTTQVAAFDQAIQQLFAQHADSAVFASLPRAGRRLAPRLVAEWGEDRTRYASAASVRALAGTAPVLFQSGAFRGVRRRRACVNAWRQALSHFAWESVLCEPWATASSQRKRAQGKTSAMALRAVANQWVRSIYAMWQARQPYQRAIFLAAQHAHGGMVA

SEQ ID NO: 97182 - protein, 523 aa, unidentified
MASTRSSKRSRAAAEFLQKPRGIIHPRVQQVGPDHFGIVSVDCAKARCKWMLTDFYGTILVPPTEVANNRVELDAAVARCRAAMIQHALGDAIVAIERTGRYHHPVKNAFARAGFETRIVHPYATKQFRQPANPDNKTDDTDLAAIARAAVNGFALVENPLPEAWRQLQLCIRHRRDLVRKTSALACQIREHLDAAMPGYAACFADKLWDSNVAFCLVRQFGSATVLLQQRSTGLCHYLRQQKVRFQQRTLDTVLAWAQSAAAPDPAAELHRQIALAYHDDRQRKTEEILVLERNIAHRLAQTPYILLLSFPGINVVSAADYAGEMGPIENYANPRSITGRAGLFPSRYQSDRVDHADGPLVRRANRALRAVIMGIADNLILCNQRFRMLAAAWKAAGKDPRLSHVKVACRFCRMSFHMVAGRQVFRHPSLRERGYILDKLLAFHLEHQTPYQQSLRDLNLAFTQIPAKEHAAEAQPLIDRQRTARRGRARGPQPIGEILAIVLARLGVGALPSTPSGDQDLP

SEQ ID NO: 97183 - protein, 354 aa, unidentified
MSQKSNCAIAVIGIDIGKNSFHIVGHDQRGAIVLRQKWSRGQVEARLANLPPCLIGMEACVGAHHLSRKLQMLGHDARLMPAKYVRPYSKGQKNDFRDAEAIAEAVQRPTMKFVATKTADQLDLQALHRVRERLVGQRTGVINQIRAFMLERGIAVRQGLRSLRSELPGILATRTDVLAPRMLRIIEDLAGDWRRLDARIEDLSSEIEALARQDKGCERLMTVPGIGPIISSAMVAAIGTGDVFSKGRDFGAWLGLVPKQISTGDRTILGKISRRGNRYLRVLFVQAAWVVLVKVKCWERYGLKSWIEAAKKRLHHNVLAIALANKLARIAWAVLNKGRAFECVKTDEMASRPA

SEQ ID NO: 97184 - protein, 371 aa, unidentified
MEQSSKTLYVGLDVHKESIAVAYAPEDREAEVVSLGPIGTRQCDIDKLIRRLESKGAALVFTYEAGPCGYGLYRYLTGKGLACHVVAPSLIPRKAGDRVKTDRRDAMTLARLMRSGDLSAIYVPGIEDEALRDLSRGRDDAMQDLKRSKRRLKSFLLRQDIRYEGRATWNAAHLRWLSEVVCPTPPQQIVFQEYLRAVSEQHERRQRMEHELHEAVQGWRLYPVVEAIQALRGVELTGAVILMTELGDLTRFENPRQLMRYLGLTPSEYSSGARRHQGGITKAGNSHARRALVEGAWAYRYPAKVSRHLQLRLERLPAEVQAISWKAQVRLCKRYRQLTARGKHVNQVVVAIAREMAAFAWAIARIVPLAS

SEQ ID NO: 97185 - protein, 363 aa, unidentified
MLYLGIDQHRKQLTINLRNEEGDVILRHQVSTQWDKVKAFFAELQKQSEPQGGYMAILEVCGFNDWLLKLLAAYGCRETVVVQMESRSKQKTDRRDANALCELLWTNRHRLLAGQRVNRLRRVEPASPADAEARQVTSMRQHLVQQRTRTRNRIQHILLKHNLQQHCPTKSINTKRARRWLEKLELEFIDRLELDGLLKQWELWDQQIERIEERIRQRQAKHDTAAIVASLPGTSAYSSLAIGSRIGDIGRFPRPESLANFWGLAPGCGNSGDKTQRIGAITKQGSRQVRFLLGQMVLHVLRVDKQIKNWYREVRKRRGSKIARVAVMRRIATLIWHMVKHRQAYQPGGPPRIRHPQLANQTV

SEQ ID NO: 97186 - protein, 355 aa, unidentified
MKQEKYIGMDVHQATISVAVMDSSGKLIMECILETKAATILEFIAGLRGTLSVTFEEGTSAAWLHDLLKPHVSHLVVCDPRRNALLKDGSKSDRIDARKLAELLHGNKLHAVYHGEHGLRALKELGRSYLTITKDLTRVMSRIKALYRSWAIPCSGATVYAPRHRAEWLAKILEPGVRLRAERLYQQLDLLQPVRQEARRDLLVESHKHHAVKLLRQIPSIGPIRAALLVALLQTPHRFRTKRQLWAYSGFAVETHDSGEYRFVRGKLQRNRERITVRGLNHNHNHDLKNLFKGAALSASTRPGPLCDFYVALVEKGMRPTMARLTLARKMAAITLIIWKKGVEFDAKPLNRQAA

SEQ ID NO: 97187 - protein, 370 aa, unidentified
METLTTYVGLDVHKETISVAVAESGDRGQARYFGKIANSAQALSKLAAKLSRKGRTLRFCYEAGPCGYGVHRHLTGLGHDCAVVAPSLIPRRPGDRVKTDRRDCLGLSKLDRAGELTAVWVPDAEHEAMRDLVRARGAAVRALRRARQQLSGFLLRHGRVRKGKNWTLAHRRWLATLGFEQPAQQIVLEDYIQAVEDAQARRDRLTAQIEALVPSWSMAAVAQALQAMRGVALITAVTVLAEVGDLTRFDSPRQLMAHLGLVPWEDSSADKIRRGGLTKAGNAEARRVMVEAAWCYRLPARVSRCLLDRLAGLPKDVRDIAWKGQVRLCARYRHLRAQGKDAPLVTAAIAREMLGFIWAIAQVVAPRKAV

SEQ ID NO: 97188 - protein, 341 aa, unidentified
MHPTTIGLDLAKHIFQVHGVDAAGKVIIRKKLRRSELRAFFEKLPPCLVGMEACGTAHYWGRELAALGHDVRLMPAAYVKPYVKRGKNDEVDAEAICEAVTRPTMRFVPVKGAEQQSILMLHRTRDLFVRQRTMLVNSLRGQLAEFGLIAPQGIWRIPELHALAQNTDNSVLPEPARACAELIMMQIEDLQAKITAIERTLMARHRANEMSLRLASIPGIGVITATAMVATVVDASAFKSGRHFAAWIGLVPQQNGTGGKVHLGRISKKGEPYLRRLLVLGATAVVRYARNKPEFAGWVNALLARRPARVVTVAVANKLARIVWAIMRRGGSFRQRPLGIA

SEQ ID NO: 97189 - protein, 465 aa, unidentified
MKSKTHKRDRRRRAVLNEAGLQQVHLNAAGIDIGAEQHWVAVPQGRDEQHVRSFSSFTSGLTELAEWLERCNVDTVAMESTGVYWIPLYELLQSRGFTVLLVNARHVKNVPGRKDDCLDCQWLQKLHTFGLLRGSFRPDAEITALRCCLRQRENIVIEAATWVQRMQKALTQMNLQLHHVLSDISGTTGLAILRDIVAGEHNPVHLARHRDPRCRASTQMIIASLTGSYRDEHLFALRQALQAYDFFQHQLQDCDMHVEQLLHSLTAKLPTPTNPLPQPRTAAKAPRSNDFRFEARPALFTLTAGIDITQLPGISPHNGLRLLSEIGTDMKRFKTEKHFVSWLTLSPHVKASGGRVLSSRTLPSANRAAKLLRLTAVTLRRSNTALGAFYRRLAARIGKPKAVTATARKLAILLYRALTGQLRPQVLDAQHYEEQQRDRAVRSLHRRAKSLGFQLIETKPAEALS

SEQ ID NO: 97190 - protein, 408 aa, unidentified
MTVVGIDVSKGKSMVAAMKPGGELVAAPYEVRHSDIELSHLALDVLCMEPDTRVVMEATGRYHEPVAALLHSEGIFVSILNPLLIKQSGAGSLRKVKSDPKDALKIAKYGLDNWSTLREYTPMEAIRQQLKLCARQCDLYNKNIVMLTNNLISLSDKTFPRVNELFSSPEKADGHLKWVDFYRSFWHCDCINRMSPDAFEERYKKWCKRKGYHFSTDAADALYAASCGSYTTLPRDNNAKLLVTVAADQLIALRENQSKLEAEMLNLCKQLPEYETVMAMYGVGKSTGPHLMAELGDVRRFPHRSSIVAFAGVDPGVVGSGKMQLSSVATSKRGSPQLRKALFQVVSTYVKCKPESEVVYQFYVKKRDEGKPFYVCTTAAANKFLRIYYARVKECLNAAESATQVEEG

SEQ ID NO: 97191 - protein, 409 aa, unidentified
MRYYLGVDWADQTHAVWVVEERGTKVTMHTVPHTAEGLSEWGRELDEWRAQGIELWAAIERPEGRVVDVLLDHGVVVYPVNPKALDRARDRFRQSEAKSDPFDARVLADFLRTDHLHLRALQPSSEAAQELKLLTDDYQRQIRQQTRLVNQLTTTLKAYYPRGLEVAELTTALAREFLQAYPTPAALTALTERQWQRWARAHRLSAARTRELWAGLQRPQLPVPAHVVRAKVRLMQSLVAQLTLVVEVVGAYREAIEDFFARIPAAQWIRSLPIGDHGITAPTLWARLGDAAGRWESFRHLQAQAGTVPVTIRSGKQQVVRFRFACDKSLRYVIDHVAFLSLRWSEWARAYYAGQRARGHSYHQALRALSAKWLKIIFVMWQRQVPYDEQYHLATMTRQQLRQHQKKIA

SEQ ID NO: 97192 - protein, 356 aa, unidentified
MGDRRHRFCALDERGEVVEQDSICNDRVSLRKLAGRYHGALGVMEAGAHSPWISRFLEALGWRVVVSNPRKVRAIYQHERKSDQRDALMLARIGRMDLALLYPVRHGTAEAQQDLLRIKLRDSLVRARVAVINSVRFTLKSLGYTVRNPSSARFHKVVMEEVPESVREMITPSVQALAELTARIKMLELEINTLAQMKYPQSAQLQQIPGVGPITALYFVLKIEDPNRFAHVRDVGAYAGLCPRRDQSGQSDPQLRISKRGDAYLRRLLVSAAHYILGPFGPQSALRAYGLMLAADGTARAKKRATVAVARKLAVLLLSLWKSQQPYQPFPGACLNGEQEDRRSGTIALHRMEATD

SEQ ID NO: 97193 - protein, 482 aa, unidentified
MKAKQKEPTEKSSGQSSQLHWRQMNRKQRRDLERKIQSADLTLQIVHPDAAGIDIGNESHYVAVPPDRDSQPVQHFGCTTAELRAMADWLKQCRIRTVAMQSTSVYWIAVYDVLEQAGLEVYLVNARETKNLPGRKSDVQESQWLMKLHTYGLLRNSFRPPQEIRTMRTYWRQRNDLVRSAARHIQRIQKTLTQMNMQLANVLSDVSGVTGQAIIKAILAGERDPQKLAAFRDPRVKASENDIARSLEGNWQEDLLFVLKQEQAAFEFCRKQMAECDRQLEQYLQKMEDRSQGATLPEEKRKDRLQKKKGNQPQFDLQQQLFRMTGTDLTQIDGIDVMTATTILSEAGWDMIKWKDEHHFVSWLRLAPDNRISGDRIIGKGRLPTSNRVTVALKLAASNLRTSQSYLGAQFRRLRARLDTPVAIKAMAAKLARLIYRMLRYGTKYVDNGSRYYELQQRTREIKRLKLKAATLGFHLVQSTAA

SEQ ID NO: 97194 - protein, 429 aa, unidentified
MPYRIAGIDVHKKMLAVVVSNVEVESEFQFERRMFGSNPEQLRSLAAWLLEQEVEEVVMESTAQYWKPVWETLERYWKPIREKREDARRRSGTLHLAQALSNRGRRGRKKDFLDAERLVKRLVARELTLSFVPDVEQRLWRTVTRRKYQLTRDRARLQNQVESLLEEAHIKLSSLVSDLLGASARRMLKALADGETNPAALAALADKQLRATPEQLCDALGACTELNPVYRRLLKMALEQLQFLEQQIGDLDQETASLLRQHQDAVERLAEVPGLGVDSATQIIAEVGPTAATFPSGKHLSSWVGACPGDEESAGVNYSHRSPQGNRHMRRLLNQAANAAVKVKGSIFEIVYRRSVPRLGHNQVIGAIAHRQCRLIWLILHQGVRYEEHGPAVTKQSRQARTARMIRQLRKLGYQVELPNSQPANSAGR

SEQ ID NO: 97195 - protein, 279 aa, unidentified
MGLYMINNFLGIDISKDRFDVFLSFISKKGKRETRKRNFKNEDSGFQGLQDFLQKHNVEEVKACMEATGCYGEALAEFLHNAGYFVSVVNPYCIKSYARSKLVRQKNDQTDAEIIADYCQRQEPTRWTPPSPELKKLKHLYRCSAALKDEFTLVNNHLEKKERLPKEVANAWEDLAMNIEQKIETIKNSIRELLKQHKELLENFQLLLTISGIGEESAIAILAEVPDIKAFRDARQLAAYAGVIPRNITSGSSVYAKPRLSKSGSRTLRKAMYFPLPLS

SEQ ID NO: 97196 - protein, 316 aa, unidentified
MDVLYQSCAGIDIHQANIVVCILHGPLTSTRPKREMATFDTTTKGLRACHDFLSQFHVEAVGMESTGVYWRPVWHALCDDFELILAQPAHMKAIPGQKTDKKDAHWIAKLTRIGLLPRSFVPDETIQELRELTRQRKHYVESRNRETNRIHKILQSGGIKLTTYIEDIMGLSGRNLLQLLVDGTPITPRLVHQSVYTSLKKKVPQLMEALDGYFSDHHRFMLKQSLEIYDFYQKQIELLEERINIYLSQYEKHVEILDSIPGIDVITASVIISEVGVDMSQFPTAGHLASWAGLCPGNNESAGKNEVPRFDTEILI

SEQ ID NO: 97197 - protein, 331 aa, unidentified
MNYAGIDVGHKTLDVVVRKKGKSLKCKSINNTVAGHAELIRYLRKHSVARVGLEATGYYHLDIAMELDNASDIDIMIINPRSSKHFANALMSKIKNDAIDAEILAKFVERMDFVTWRSPDHEVFALRACGRRLVSLTKERTKAKNQLHAFSLTKRTPTFIIEDIALTIEQLDRQIDTMVSYALEIIKQSDQLAKRYRRLISIKGVADKTAIKLLGELGVLESNMSAKQWVSHAGLFPREFQSGTSVNKRTSIGKVGNKYIREALYMGALSAAKHDPNIRGFYQHLIHDNGLIKIQATCAVMRKLLVAMHTMLKTDKPFNGQLFYTLENSPV

SEQ ID NO: 97198 - protein, 310 aa, unidentified
MTIICGVDVSKAWLDAWIEQAGHRRFANNAEGVAELGAHCRKHDAALVVMEASGGIEQPAYLALWQEGQPCAIANPCSVRKFAEAMGYLEKTDRIDAMMIARFADAKRMVAVPPPSADQQQLTALATRLRQVTTDLGIQKQRLHSARDPFARQSIQDAIAFFTAQADTVAAKITSLIDVDPLWVALDRAFRTIKGVANRTVAYVLAELPEIGTLSNRAVTKLVGLAPLPDDSGQRRGRRSIRGGRAGLRSILFLVADVARRYDPSLTDFRERLLAKGLSKMEVRIALARKLLVRLNAKARDIRAELAHAL

SEQ ID NO: 97199 - protein, 370 aa, unidentified
MTHVTSIGLDVHARSVSACAFDPFTGEVVQRSFGTDAGEIAAWIKGFEEPRAVYESGPTGFALCRQLRALGVDCAVGAVSRMQKPAAEKRRKNDRRDAAFLARLLATRNVVEVWVPPAEAEAARDLSRALDDAREDLQRARQRLSKFLLRRGHVFDETDALGRRRGAWTRAFWRWAEGLRPDEPAAASAFDHYATCVRCAESDKRALEKLVLAEARSERWAGVVGALSCIKGVDAVTAFCLATEAGCFSRFATAGAYASWLGLTPSEHSSGEKEATGGITKTGNSASRRALVEAAWHYASCSPKPKAAPAGYDVPPRIRGRAADATRRLRARHEALRAAGKRPCVANVAVARELACWVWEIGRSAEGTLG

SEQ ID NO: 97200 - protein, 346 aa, unidentified
MNEITLIGIDLAKNIFRINCLNENGKRVINRSLHRESLIQFLAPLKECTVAMEACASSHYWGRTIESLGHNVKLIHPCYVTPYRLGDKNDTNDAAAICAAAQRPDMRFVRLRTQHQSDIQSLHRVRSGLVQEQTATINRIRALLGENGIVIKQGPSAVFSLLPSILDTEGNELSVIMKRILRSQYEHLLHLRGQIQEQELMLKTMIAKNDDCQRLMQVPGIGPLTATMLASEIGNGAAFKNSRSFAAYVGLVPKQYSSGGKNVLLGISKHGNKYLRTLLIHCARSTLQTIISGKTPFGGSIERWLLQLIERRGKYRTIVALAAKLARIALSMLSRGTDFQKTVCAC

SEQ ID NO: 97201 - protein, 359 aa, unidentified
MQTQRKELNFEGQNIFVGIDVHLKSWNVSIFTENLHHKTFSQPPRAEVLLEYLKCNFPNATYLSAYEAGFCGLWVHYKLKELGVNNIVVNPADVPTKQKEKMRKSDPIDSNKLGRSLRSNELDEIYIPQPETLEDRSLVRVRSTIVKDLVRIKQRIKSMLNFYGIEYPVEFQNSNSHWSKKFLNWLKGIELHYSTGTSALGIYINEAELQRKLLLEATTKMKILSKTEHYAKSMELITSVPGIGLITGMQFLTEIEDINRFENSDKLAGLIGIVPDCSKSGEKEKNGDITSRGHSFMRKGLIESSWVAVRIDPALSLAYYNYCKRMEPNKAIVRIARKLLNRIYSVLKHQKRYVTGIVK

SEQ ID NO: 97202 - protein, 378 aa, unidentified
MKAARFTADEIERVSYLTSKGYLPVAVDVASRVFQVCYYDLGAKHIRNYQLSRVKFFEFIDDTQMPRKLIGIEACGSCNYLCRYIEEHNHKCHILPAQKVKAFLHLDKTDRIDALGILKALITPSMQHIPARTQENQYLLNLITVREQLNKQFVQTVNAAHAILYESGVVAGTVSVASATKVTEALKALCNTETEKEHSEDDCSYSHLNCISESLLSNIESLQTKIKKINTHLLSYASNNEICSNLQTVPGIGKLSAVALYAAIGDPERFSSSRAFAAFIGVAPVTTGTGGKTTVLGIRKSGIQSIKKMLYMCAMVYLSQAMKNGTESSWLKLKLNQNRSKKIIICAIMNRLARIAYAIAKSGQPFDENKCNMIKKLR

SEQ ID NO: 97203 - protein, 331 aa, unidentified
MARYYLGLDVHKVRTQYCLVDGGGAVVREGSVPTEEVLTLVDRPDLAAVLEAGGDWCAPYDTLRASGVAVTLAHPARVKAIAAARIKTDKIDARILAHLLRTDLIPEAWAAPQETRELRDLVRLRWGFVSVRTQAKNRIHSLLRREGLRCPHSDLFGRAGQAWLHTADVRPHTRALVAQQLEHQEQTTAHVAALTRTLQGRLATEPAVALLQTIPGVGFLTAATLVAELGDWRRFAGPKQVAAYFGLVPSVRASAQHARYGHLTKSGSGHARRALVEAAHVAIRLPGPARDRYLAVLPRRGKKVALVAAARTLLCVAWTLLVRGERYHPAA

SEQ ID NO: 97204 - protein, 409 aa, unidentified
MRYYVGVDWADQTHAVWVVDESGTKITARTVPHTAAGFSEWGRELDEWRAQGIERWAAIERPDGRVVDFLLDHGVVVYPVNPKALDRARDRFRQSGAKSDPFDARVLADFLRTDHPHLQALQPSSDAAQELKLLTEDCQRHIRQQTRLVNQLTTTLKAYYPRALEVAELTTALAREFLHAYPTPEALTRLTARQWQRWARGRRVSEARIGALWAVLQPPQLPVPAHVVRAKARLMQSLVEQLTPVVVAVAQYRKTIDDFFARMPAAQWARTLPIGKHGITAPTLWARLGDAPGRWESFRHLQAQAGAVPVTKRSGKQRVVHFRFACDKALRHVVDQVAFLSLLSSDWARVYYDQQRARGHGHRQALRALGAKWLKIIFVMWRRQVPYDEQYHLATMTRQQLRQRQTKIA

SEQ ID NO: 97205 - protein, 402 aa, unidentified
MRYFVGVDWAKLSHAVCVIDEAGQVVMRRAVDHTADGLAQLMTALRRFGDPAELGIAIERPSGLLVDALVEAGFVVYPIHPNVVKASRPRYSAALGKTDPGDAYLLADLLRTDGHRFRALCSLSDETRALRALVRARSDLVGARVGLANQLRALLESFWAGAVAIFGEIDSPIALAFLLEYPTPASAARLGPKQMAAFLSAQGYSGRRSPDELLQRLRAAPAIPLGPAEMAAKGSLVCTYATLLDTTVRQIRELASAIERAVMAHSDAAVFTSFPRVGKINAAQILAELGAHDRFLTEEQLAGEAGVAPVTRMSGKHRAVVFRWACNHRLRAALTWWADNSRRASPWAHAVYLSARQRGCDHPHAIRILTRAWLRVLWRCWKDATPYDLTRHHAAAALKQPA

SEQ ID NO: 97206 - protein, 362 aa, unidentified
MRIIGCDLHACQQTLAMLDTTTGEILEVTLLHEGDNVREFYSALPLPVRVGIEATGSMQWFLNLLEELGIECLVGHPAQIRAAESRKQKHDRRDADLILKLLAENRFPAIWLPSKELQDLRSLLRHRHQWVRMRTRIQNALQSIALANGLRRGPALWSHDGQSRIASLSLAPHTAYRRSELQAMYKQFEAEIEKLNQRVEQQASQRPGARLLMTHPGVGPITALATEVFLGNPARFADSKALASYVGMIPREYSSGGRQRLGGLSKQGNPLLRFLWGEAGAHAARQDPELQRFYRRKLVQKGLGKASVAVARKLGIRLWIMLRDQIEYHEFCRRGQKQQKSSGACAGMPETPYGAKSHRPVD

SEQ ID NO: 97207 - protein, 408 aa, unidentified
MKTLHRRCAGLDVHSDTVVACARLTARTKASHEVRRFSTATRDLLELADWLAGHGVTHVAMEATGVYWKPVWHILEGRFELTLANAAHVRNVPGRKSDVNDAVWISDLLAHGLIRASFVPPAPVQDLRDLTRTRTQLTREVTQHVQRLQKTLEDANIKLVTVVSDIMGVSGRRILKAMVAGETNAAKLAGLGSSRLKAPRSDLAAALDGRMTAHHRFLISHHLGLIEELERRISAFDARISEALAPFRDAMERLITAPGIGRLAAEVIMAEIGPDMSPFPTAGHLVSWAGLAPRLDESAGKRRSTRVRHGAPWLKPVLVQCAWSAARAKGTYLQAQFFRLKARRGPKKAAIAVAASILTAVYHMLKHGTFYEDLGADHLIKRDAATTVAKLARRIKDLGYDVQYQAAA

SEQ ID NO: 97208 - protein, 366 aa, unidentified
MKKISTVAINGKKIFKEPKLTIGLDLGDRTSHYCILDEAGEVILEHSLPTTPKGVLQVFRRIPRSRIALETGTHSPWISRQLTAMSHEVIVAHARNVQLIGESSRKDDRFDARTLARLARIDPGLLGPVRHRSAEAQIHLTVIRARATLVSARTALVNAARGLTKSYGQRLRKCGTGQMNCEIAKELSQELRDALEPLLKGIESLNDRIAEYDQRIEQIAKEVHPEVALLKQVKGVGTLIALTYVLTLDDPQRFRRSRDAGCFLGLRPGRRNSGRSEPQLHISKEGDSYLRTLMVQGAQYILGPFGQDSDLRRWGLKLAERGGKNAKKRAVVAVARKLAVLLHKLWVSGEVYEPLRNTPKAMSAVA

SEQ ID NO: 97209 - protein, 523 aa, unidentified
MVTKSKSRSRRSRRYLTIVKPSGSLHPRVQKVGPEHFGIVAVDCAKARSKWMLADFYGRILVPPTVVEHNKQGFDSMFAEIRRASESHGLGDMLAAIERTGIYHLPVKRAFVSKKFDTRIVHPLTTKQYRLPADPGNKTDDTDLCAIHRATTNGFGLIELPLDEIHGPLRLLARYRRSLVRKNASLRNQIITLLDVISPGYTGLFKDVFDNQAAVAIARSVKSASEVRALGSEGLAQVLKKLDVRSQRRTLKKILDWANGVESTTEYAEMSHTILVYLDDERCARLQQIAKLEQEMAGLLVRTAYVVLLSIPGVSIVTAAEFAGEMGPISNYANDQAITGRAGIYPSRYQSDKVDRSDGPLVRRANRKLRGVIMMIADNLLSCNRFFKALKVRWVAAGMEEQAMCVRVAKRFCRIAYQMVAGGQVFRHPSCRKRDYILRKLSIFHAEHGSSMAQVITDLQAATDHIPKSEHAPEAKSLYEELQPSNRRQQSGPRRLGEILPVVLAKLGVNAVDLSLKGENDLT

SEQ ID NO: 97210 - protein, 399 aa, unidentified
MISVGIDVSKGKSTVCLIKPYGEIISEPFEIEHTDISLNELKKMLLRLNDEVKVVMETTSIYHLPILYYLLEAGLFVSVVNPLVMKKYRSRDIRNVKTDKRDAMNIADYGIDNWYKLSKYETQEAVYSELMLLGRQYRSYMEMRIKAILNLTHLLDYAMPGIKSLLSSLQPSGKDKLADFAYEFWHFDNIKRFSEHKFTEKYINWARKKGYQPSVKKAETIYFLASNSIPTIASTTPSTKMLVREAVRVLKEINNTLGLILSQMQELAKTLPEYETVRAMGGVGDVLAPKIIAEIGDVRRFHSKKALIAYAGIDVPPYESGTFVGTRRKITKRGSSHLRKVGYEVMKCLKTIPEPEDNAVRNFILKKEAEGKAKKVAKIAGLNKFLKIYYARVMEVYQS

SEQ ID NO: 97211 - protein, 322 aa, unidentified
MTSSKLATRVIGIDVSKDKLDISDSEGKIKKEVKNSTASIVKCIVKKIAEPGEAFVVCEATGGYERTLVKAMQAAGVAVCIANPFQVRQFAAGIGVLEKSDPIDAGMLRQFGEMVDLQPTAPKSAERERHEALVRRREQLLTLISMEQNRRAQSYDPTVTGMIDKVLKVLKTQQKSLETEIEAMLKKEAETNPAVAVMQSVPGIGPVTTSTLICDLPELGKLNRTEIAKLAGVAPIVNQSGKRDKQRSVFGGRSHVRRVLYMAALVATRHNPVIKAFYKGLIARGKEKKVALVACMRKLLTILNCMVSNNETWRTEKVVTGT

SEQ ID NO: 97212 - protein, 346 aa, unidentified
MMIIGCDFHPSWQQVNWLDTGTGEAGEQKLVHAGGGAKRFYQQLAVPALIGMEATGNSQWFVELVEDLGHEIWIGDAAQIRASYVRKQKTDKRDAAHILKLVMEGRFPRLWTPDREQRDLRQLVLHRHKLVEIRSRVKNELQHLSLNKGMQRKGKLWSQAGQKLLRELPLKPWAACRRADLLGLLAMLNQQVGQLDAAVQHAAEQNPQARLLMTQPGVGPNTALAYVLTLGDVSRFARGKQVASYLGLIPREHSSGGRQKLGVITKQGNRMLRSLLVEAAQIAVRFDPGMKKQYLHRCHQKPKGVAKVATARKLAVRLYWMLRTQVAYPEIVRIESSSRVPLVGAS

SEQ ID NO: 97213 - protein, 316 aa, unidentified
MNSNQIESFVGIDVAKNTLDLRLEPVGESLHVAYDDVGMAEIRQRLIALAPTLIVMEATGGLETRLACELAACGLPVAVINPRQARDFAKATGQLAKTDQVDAAVLCAFARAIRPAVRALKDADTRDLDDLVTRRRQLIAMRVQETLRLGSAESKVLQKNLKKHITWLDKQIADLDGDLTKRLRASDVWRAKDDLLQSIPGVGKVTTVTLLAKCPELGQLNRREIAKLSGVAPLANDSGKHRGKRFVWGGRADVRAVLYMAAVSAIRCNPAIKAFADRLKQAGKPVKVVIVACMRKLLTIMNAMVKNNAPWTAKTA

SEQ ID NO: 97214 - protein, 464 aa, unidentified
MKKQPRRGGTEGAGDQGAKLPAIQPSVAGIDIGSREMYVCGPPQEDGRREIEVFATTTQQIQACVRWLQQRNVRSVAMESTGVYWIPVLEILESNGLETFLVDTRPLSRVPGRKTDVEDCQWIQTLHSHGLLQSSYRPHEAISELRTVVRQKAVLVREQADWVRRMHKCLDQMNVRVHHAVKDTQGTTGMLILRAIVNGERDPHKLAQHRDPRCHKSKAQIAEYLTGHWRSDHLFNLREGLKMYDTISERIEAYEQEIQRRMEELTPAGRQSAEAPPLKNPEKRKAMKRRDQEGKRQALYRMVGADLTTIDGVGVETAEVIISEYGTDISKFPTEAEFVSHLQLAPHRPVSGGKVLHHKPRQKPKGTRTAAALRHAAIAVRNSSSALGAYFRRMARRKDSSIAVFSTARKIATFVYRMLRWGQAYVDIGQQAYEQQYQAVRLRSLISTAAQMGYKVIKEATPSC

SEQ ID NO: 97215 - protein, 325 aa, unidentified
MQGKLMSTDSAEAVYAGIDVSKDWLDVYLHPAGVQLRLRNELSGLRRLRQKLQGLAVERVVLEATGKYHRMAHRTLSTWGYPVAVVNPWRARRFAEAWGVPDKTDRLDARLLALLGHSLSPPPTAPARPELEELQELVNARSAAMAEAVAVGNRLEAAQSGFLRAELARRRKSLAAHLERLSARIARCIAADPGLAARQAILCSIPGIGPVVAAALLAGLSELGQGSGKAAARLAGLAPVADDSGNRQGQRHIHGGRMAPRNALYMAALSAARYEPGLKACYDRLIARGKAKKLALTAVMRKLVVLANTLIAANRTYSKTPPSNP

SEQ ID NO: 97216 - protein, 411 aa, unidentified
MEVIVERQCGLDVHKALVTACVRVPGAGGERVEQVAQFRTTVRGLLVLRDWLTGHAVTHVVMEATGVYWKPVWHVLEDEFELMLVNARHVKQVPGRKTDVCDAAWLCQLAEAGLLRASFVPPKPIRALRQLTRYRRAQIGERQREANRLHKALEDTGIKLDCVATNILGVSGRAMLDALCHGTTDPELLAELARGKLRKKIPALREALEGRFDSMHALLIGSILGHLDFLDEQIDQLSQAIEQHLAPFAAAVSVLRSIPGVETRTAQTIIAEIGVDMTAFPSAAHLASWAGQCPGNDQSAGKRRSGRTRKGSKWLDAALKDAAIAAIRTNDSYLQALYRHKRSRIGHGRALGAVKHSILCACWHMLTTGELYADLGSDYYPRHDPQRHTRRLVAQLERLGHTVTLTEATAA

SEQ ID NO: 97217 - protein, 315 aa, unidentified
MTIVAHAHPFVIGVDTHARTHTLAVLVAATGEPVATEEFPTTAAGMNRAVAWAARHTDGEMATLWVIEGIATYGAHLASAVKRAGFEVVEAAAMNARAHRGTGKSDAFDARRIAASVLSLGPEQLRRPRSDDGIRAALRVLVTARAHMTTERTATINALTALLRIAALGIDARKPLTASQIGEVARWRTRAEDIVTSTARAEAARMAKRVVDLNEQLAANQGQMIDLLHASKAAILLDKTGIGPVTAAVVYTAWSHAGRVRSEAAFAALAGVNPIPASSGNTIRHRLNRGGDRRLNRALHMAVITRMTHDPETRA

SEQ ID NO: 97218 - protein, 338 aa, unidentified
MRVTTVGIDLAKNVFHLCGMNSRGRVIWRRRESRGSLLRFLRSLEPCQVFMESCGGSHYWAREIRAIGHEPKLISGQFVKPFVKSNKNDVADAEAICEAGNRPTMRFVPIKTPEQQDIQAMHRIREQLVKFRTGLINQGRGLLMEHGVTVAKGRHGFQRQIPLILENGNLTDLFRELLRGLYEHVQSLNEKIAAVETKLKGVCKDSEAAQRLLEIPGVGPLSATALIAAVGNGSDFKNGRHMAAWLGMVPRQSTTGGKPRLLGISKRGDHYIRKLLIHGARSVLISPNDLGRRQSWARELKARTCANKAAVALANKNARIMWALLNREERYRHMAESA

SEQ ID NO: 97219 - protein, 365 aa, unidentified
MQNISTMRTNRKNIFKGQLTLGLDLGDRSSCYCVLDEAGKVILEQKLPTTPEGLKQTFARIPRSRMALETGTHSPWVSRLLTQLGHEVIVAHAQKVDLITKSTRKDDRHDAKTLARLARIDPELLGPVRHRSAKAQIHLTVIRARAELVRARTALVNATRGSVKSYGERLPKCGTQQISREFGAELSKELREALEPLFREIESLNERIKEYDRRIEKIAKETYPETELLKQVKGVGDVIALTYVLTIEDPYRFRKSREVGCFLGLRPGRRNSGESEPQMHISKQGDEYLRTLLVQGAHYILGPFGEDSDLRRWGGKLAERGGKNAKKRAVVAVARKLAVLLHRLWVSGEVYEPLRNSQKVMRTAA

SEQ ID NO: 97220 - protein, 369 aa, unidentified
MEHCSEIFVGIDVAKARNAITVADGVRGGEVRFIGEVDASAESMRRVVKRLTANGELAHFCYEAGPTGYGLHRLITSLGHSCTVVAPSLIPRKPGDRVKTNRRDAVGLARLLRANELTAVWVPDEGHEAMRDLVRARAAAVETQRVHRQQVSSFMLKHGRVFTRPKAWTMRYLRWLQEQKFDHPVHQIALQEMVEAVRISKERVQRLEAAIEEFVPQWSLAPVVQALQALRGVDLIVAVTFATEIGDLSRFESPRQLMAYLGLVPSERSTGETVRRGSITKAGNGRVRHMLVESAWTYRHPPKVGTKKLYKLEHVSPAVREIAWKAQIRLTSRYRALAAKGKKTTIVCTAIARELIGFMWSIGQQVRSA

SEQ ID NO: 97221 - protein, 408 aa, unidentified
MNSVGIDVSKGKSMVAAMRPYGEVSITPREVPHTLSALEMLGYDIIGLGEDTRVVMEATGRYHEPVAAALHELGIYVCVLNPIVIKQSGAGSVRKVKSDRKDALKIAKYGLDNWTQLRQHTPMDAVRQQLKLFSRQYNLYMKTSVALQNNLISLLDKTFPAANKLFDSPTRDDGHQKWVDFVADFWHSNCIERMSKKAFIERYQKWCKRKGYHFSKTKAEDVFISSLGHITTLPKNDNTKLLITSATTELTATRKVLMTIKAEVIRLAKLLPEYGIVVAMYGVGEITGAQLMAELGDVRRFDNRGSIVAFAGIDPEVNESGSYAKSSNPSSKRGSPHLRKTLFQVVETYLLRSPIDEPVYQFLDKKRTEGKPYYVYMTAAANKFLRIYYARVKEYLNEHCPEQESLPL

SEQ ID NO: 97222 - protein, 338 aa, unidentified
MALELLAIDLGKRSFHLYGIDTNGEILSRKVSRTKLAEVVNNLAPKAIAMEACASAHYWARCWLAAGREVRLINPRFVKPFVKGSKNDAVDAEAIFEAAMRPTMRFVPVKSRDQQDLQSLHRARDRLICQRTALINHTRGLLAEYGVVLPQGPWRFTAQAPAAVAGAELSDLARSIFGELMDQLDELDRRVKKLDATMVVLCRTNETCRRLAKLPGVGPVIATAIVAAVNDGRQFRSGREMAAWIGLVPRQYTTGGKPRLGGIGRRANHYLRRQLIHGARAVVSRLPRHDARHDARRSTWLKALVARRGFNRTIVALANKTARIAWALLNRKEDYAIA

SEQ ID NO: 97223 - protein, 348 aa, unidentified
MTVVFLGIDLAKNVFALHGVDAAGKPCLVRPQVRRDQLTELIAKLPPCTIAMEACSGAHHWARTFSAFGHTVKLIAPRFVIPFRMGGKRGKNDQADAAAICEAMQRPAMRFVPVKSVDAQSMLALHATRQGFVQARTATINRLRGLLSEFGIVLPLKAQTIRKRAAEALEGLPGWARFACTDLLSEVGRLDERIDTYDTHIRLSAQHDATCRRLMQMPGIGPTIASALRASVGGGHDFDNGGQLASWLGLVPGQYSSGGKNRLGRITKAGDSYLRMLLILGARAVLAAAAGKKDRISRWAVSLAERRGYWKAVVAIAAKNARMAWAMLSKGEDFKPVEDVLPADVAPA

SEQ ID NO: 97224 - protein, 348 aa, unidentified
MIIIGVDFHPEFQQIASVDSETGEFQERRLAHPAEAEKFYRALVGQKVRVGMEASGHARWFERLVAELQFELRIGDAAEIRTKRVRKQKTDRQDAQLILRLLLEDRFPQIWVPSWENRDLRQLLWHRHRLVQARTRIMNQLQAVALNEGLRCKKRLWREHGRQQLESFRLAPWATRRRRDLLDLLDRLTPTIAELSQAIEQEVEKCPAAQRLRTHPGVGSLTALAFVLIIGEVNRFRSGKQVASYLGLVPLEESSGNRRRLGHITKQGSSMMRFLLVEAAQVTVRSLPEWRSKYLHLVLRRGRKIAKVAMARRLAVHLFWMMRKEWNYQQLKKFGSHAGEPGNRHGVQ

SEQ ID NO: 97225 - protein, 307 aa, unidentified
MFIGIDVAKDRLDVHVRPVGESFVVARDGEGIEELARRLSAVTPTLVVLEATGGFETVVAAGLAAAGLPVAVINPRQIRDFARATARLAKTDTLDAAVIAHFAEAVNPPVRLLADPQQRLLGELMARRRQLIEMMVAEGNRRRLLTARRALKSVDRVLAVLKAQLEEIDHDIDIAVRGTPAWREAEDLLISVPGIGHKIARTLIAEMPELGRLDRRQIAALTGVAPFNRDSGKLRGRRTITGGRAVVRSALYMSVLVSIRRKLPLAETYHRLRASGKPAKVAIVACMRKLVTTLNAILRDKKPWATA

SEQ ID NO: 97226 - protein, 312 aa, unidentified
MFVGIDVSKATLDIAIRPSGERESVSNNESGIKALITRLAEVHPALIVLEATGGVEHQLTRALVSAELPVVVVNPRQVRDFAKATGQLAKTDAIDAMVLARFAEAVRPAVRPLPDETLLELRALIVRRRQLTEMIVAEKNRLGTASKTVTKRIAAHIRWLQAELGRADKDLDQSIRRSPIWQENQDLLRSVPGIGPVVSRTLLAELPELGQLNRKQIAALAGVAPLNRDSGTLRGRRVIWGGRATVRATLYMAALVASTRNPVIAAFYKRLRAAGKTPKLALVACMRKLLTILNSMIKHRTRWSENTALQTT

SEQ ID NO: 97227 - protein, 361 aa, unidentified
MKIIGCDFHPSFQQIAMADTETGEQIECRLSHTDEEAKKFYEALTGPVLVGVESSGNMRWFERLLAKLGHELRIGDATAIRASSPRKQKTDKRDAQHLLDLLLAQRFPAIWVPSMQELDLRQLLKHRHMLVQTRTRVKNQLQHIAMNEGVVQKKSKLWTQAGLALLKSLELDPWTKRRRDDLLVLLDQLDGHIGQLNQAAEMEAEKWPQAKLLMTHPGVGPILGLATVWTLGDVTRFENGKHVASYVGLIPSEDSSGQRRRLGAITKQGNRFMRFLLVQAGIMAARGDAGLGRFYQRLAHKKHHGVAKVAVARKLLVRLYWMLRTNTGYPEMVVRMQGSSSHPVAEAKAELLSGRPASRSK

SEQ ID NO: 97228 - protein, 409 aa, unidentified
MQVLYACCCGLDVHKKSITACVLWAEGKGRRKEKRTFGTFTQDLLSLLDWLKQCGVTHVAMESTGVYWKPVWNILEGQLEQVLLVNAQHIKAVPGRKTDQKDSEWIADLLQHGLLRGSFVPPRPTRELRDLTRYRVSMAEECNRISNRIQKVLEDANVKLASVATDALGASGRAMLEAMVAGEEDSEKLAEMSKGLLRNKRELLKQALTGRVTEHHRFMFRQLLEDLRHAESKMAKIEAEIDRRMGPFVEAVTRLKTIPGVDRVTAWGLLAEIGFDLKQFPSSAHLASWAGLCPGNHESAGKRLSGKTRKGSHTLRRCLCQAAWAITRLKKHYLAAFYHRLAARRGRKRAIIAVAHALLVMAYHMLQRNIDYRELGPDYFDRLNQRHITTVLVKRLERLGHQVILQPAT

SEQ ID NO: 97229 - protein, 434 aa, unidentified
MSQRLQVGIDFSQKRADFCLLLPDGRFIEPHHGFDNSAPGYSLAKQLLLQTLDQHHFDGLDVSGEATGYYWLPFFLQLAADPDLEPYDLKLFALNPRWVHWFKKCFAQDDKSDQKDPFYIAERTRTRPPQAAWSPQLGILALRFYTRLRFHLVQDLAREKCYFSAFLFLKASAYRRLQPFSDLFGVTSRLVLTQPPSLEQLATLPVESIATQLYELSGHHLRAPENNAYKLKQVAQESFALSPTLALPVERILNLTLEHIRFLEGQVKQVETWIASEVESRPTVATLTTIPGIGPVFSAGIAAEVGDTHRYLQGSKWDKKRKQERPRNLRDAEDAVAKIAGLWWPRSASGDFEAEDRRMAKTGNRYLRYYFIQAADRMRQSIPEYAAFYSRKYQEAAKHPHKRALVLTARKGIGLVIGLLHRNEPYRPGGASKP

SEQ ID NO: 97230 - protein, 418 aa, unidentified
MADVMIGIDPHKGSHTAVAIGAGEEPLGELRVDACPSQAEQLRAWAVAWPQRAWAIEGAAGLGNLLAQQLVAAGERVLDVPPKLAARVRLLQAGDTNKNDPNDAYSVAVAALRSKLARPVLADGHAVVLKVWAKRHRDLARLRNQACCRLHAVLCDLVPGGVRREISAGRAARLLEQVRPADAVTTARCELAGEFLADIRRLDAQLRECHNKLAAAVRASGTSLTGLFGVGPVIAGTVIGDVRHVFRFPRRDHFASWNGTAPVEVSSGDRRKVYRLSLRGNRRVNHAIHMAAISQIRHKHSDGRAFYEKKLAEGKTHKEALRALKRRISDAIYAALAADARRAASACSKSPGGQPGDHSASRAAGSHPAHRHFGQATPGPAPTIRPGANSSRAPTQPNRARRRAAHSPASSKKPPATT

SEQ ID NO: 97231 - protein, 388 aa, unidentified
MKSVTSATAVATSVRANDITLFASLELSKSKWVVTINSPGSEKFSRHVVEGGDGAGLLDLLSRSRAKAEQRYGVPIKAIVIQEAGLDGFWIHRLLLADGIESHVVDAASIAVNRRHRRAKTDAIDGETLLRTLMAWARGERRVCSMVRAPSPEEEDRRRLTRERGTLLKERIQHTNRVKGLLSGQGVRDYNPLRRDRFERLEALRTGDGRELPPLLKAEIRRELDRIAVVETQLAAVERARDALVRTEAAEEPNTPAAQLLKLKGIGPEFASLLWLESLFRSFGNRRQVAAYGGLAPSPWQSGSIERDQGISKSGNRRLRKTMIELAWFWLRHQPDSALSRWFQARVGAGKGRIRRIAIVALARKLLVALWRYVTQGVVPEGAVLKAA

SEQ ID NO: 97232 - protein, 415 aa, unidentified
MSDPFRFFVGIDLGSASHQVCVVDASGQTLGERGVAHSGADMAALFQWLATLTQGADPQSIAAASEMPHGAMVEAFLERGYAVFAINPKQLDRFRDRFSVAGAKDDRRDAFVAAHALRTDRYAFRPLALGDPRLLRLRELGRAEESLQQDLRRAANQLWQLLQRYFPGLLTLVPAADEAWLWDLLENAPLPEKAARLRPSTLQRILKKHRIRRVSAQQLAELLAQPALPLAPGANAAIAEQVLLLLPRLRLLRKQHTQLGRNIETLLEQLAGDESFKQHRDVQILRSVPGVGRIFTATVLAEAAEPLAQRDYRVFRTVSGVAPVTQQSGKTKLVSIRRACHPRLRHAVYHSAARYAQDDPRGQQHYARLRARGCSHARAVRGVADRFLALIFALLTHNQLYDPRRRALLDPAPTC

SEQ ID NO: 97233 - protein, 356 aa, unidentified
MKNSQLDFTGQTLYIGIDVHKKSWQVTILLNGMKVKVFSMNPNPKELNNYLTNHYPNANYHSVYEAGFSGFWANRQLQALGIKNIVVNPADVPTKSKERRKKTDKIDSSKLARELSVGNLDGVYIPSTKAEALRTLIRLRRQIVNDQTRQKNRIKSLLLFLGYSVPEDVETKHWSQRYIKALRNLDIEHEESKATLNELLNNLNFIRSQLVQILEQIKGFIAKDQQADKTVRLLKTIPGIGPILAVILYSEIIDIYRFKKLDELANYVGLSPAIYSSADKEINLGLTKQKNKYIRNYLIESAWIAIRKDPALQMAYGLLCKKMSSNKAIIRISKNLLNRIRTVWINQQEYVIATVA

SEQ ID NO: 97234 - protein, 338 aa, unidentified
MNKTTTIGLDLAKDVFHVVCCDARGKMVRKRMLKRSQVLTFFSNLERCLVGMEACASAHYWGRELEALGHEVKLIPAQYVKAFVRGNKNDYNDALAIAEAVVRPEMRFVTIKTPEQQDIQALHRLRKGCVGMRTALCNQIRGLVGEYGLVAPKGVAALRRRIPEWLEAGDNGLSDLFRRLLSESYVRLQELDTHIVFYTEEVERQSKQDEACQRLQTIPGFGPIVSSVFHSQIGNGEAYRRGRDASAALGLVPRQHSSGGKDTLLGISKRGDSYLRSLLVHGARAVVSRAEHKDDRLSLWINKIREKRGFNKAVVALANKMARMGWAVLANKTVYQAA

SEQ ID NO: 97235 - protein, 340 aa, unidentified
MEHIAAVDLHSDNGYYGIIEPDGKRVYQKRLPNDLSIVLHELEPYRETIRCIVIESTYNWYWLGDGLREQGYRVKLANPAKFEKYNDLKYTDDKTDTFFLTEMERLNILPTGHIYPREERGIRDLLRRRMLLVQQKTSHILSFQSLISRQTGGSITSNDIKKLETEDVEKLLEGQERHVVFAGQSNLSVIGFLQERIRLLEKMVLASARLRTEYEKLQSMPGIGKILALVIMYETGAIGRFKAAGNYVSYCRCVKSNHLSNGKKKGSGNRKNGNKYLSWAYVEAANYSRRYCEEAKKYYQRKLAKGNSAIATKALAAKLCRAAYFIMRDQVEFDVTRMFG

SEQ ID NO: 97236 - protein, 375 aa, unidentified
MLQYSKYVGLDVHKDSIVIGVAERSGEPPQFHGRIANTPETVKRLVKKLSPHGEVVAFCYEAGPCGYGIYRQIVALGHECAVVAPSLIPKKAGDRVKTDRRDSLSLARLHRVGELTAVWVPDEEQEAIRDLTRAREDMKALERQSRQRLGGFLLRHDRIYQGKSKWTQAHFRWLETVKFGAPVQQIVFQEYVDMVKQCQKRVADLERQMQIAVEGWSLGPVVQALMALRGVKLVTALTVVAELGDISRFDSPPQLMAYLGLVPSENSTGLRPRRGRITKTGNGHVRRVLIEASWSYRFPARKTAHLERHAQKCSQAVQAIAWEAQKRLCQRYRHLVLDRKKLTVVATTAVARELAGFIWAIACEVMGRTTRTEST

SEQ ID NO: 97237 - protein, 363 aa, unidentified
MTVYIGVDFHPYEQSVAFADDRDGEIGYRRFLHSDKQSIKAFYRKWGEDAVIGVEATGCLWWFEKLLASNGQKLQIGDPRMIRRAALSRHKNDFRDAETILDLLMRGQFPAIVPRCEESREVLDLLHYRQSLVKKRTSIANQLQAFARNKGLAKFRMTAVKARKQLLDTAGTEVETLLVSSRLLLFDELTAQIKALEVRLEKLAAADERVLLLMTHPGVGLINALALVHTLGEVRRFRRKEEVVAFVGLDPLEKSSGQKKRIGQISKHGSRLARHLLGQAAQACRDPRIRSFYAQVSRRRGRPKAKVAAARKLLINCYLMLREGISYEEFRRRGEVGLCEGSGELRGNTSVSAGLRARPAISG

SEQ ID NO: 97238 - protein, 339 aa, unidentified
MSKHNMLSVDLAKNLFQIARFNSRNQVVMNKSLKREKFMEFLCKESPTLIVMEACYSSHYWGRVAESYGHQVMLLPAQHVTPFVRGNKSDRNDTVAIGEAANRPHIRPVPLKSVGQQDIQCLHRMRERYVRTRTGLINQTRGLLSEYGVIAPQGHKAFCALLREICQPVNKEISPLLKEQLNQVADEYYHLSDRLADINGALKKVVKDNVLCRILMTIPGIGVINATAIFSAIGNGSQFRNARELAVWLGLTPRQSSSGEKFTSGGITKRGNRYLRKQLIHGARALLSRCKRKTDRLSQWANQLVARRGFNKASVALASRLARLCWVLLQREESYKAMP

SEQ ID NO: 97239 - protein, 350 aa, unidentified
MERYIGLDVHTQSCTMAVVGSSGRRLRSMVLETNAKVLVESLRSIGGSCRLCMEEGMHCEWLYEVLEPHVEELVVIQPQPRQGTKNDAIDAWHLAEQLRTRSWTRRVIKSPSRFSMLREAVRAYDVATREVSRAKNRLRALLRSRGIDVDESIYDPKARQASLKQLKRPQLLRAECLAAQMDALVPAKERAEAWLKEEAAKVPEVHRVMTVPGIGPVRAATIVAVVVTPERFRTKQQFWSYCGLGIVTRSSADWEQDDKTRSWRRRKRAQTRGLNRNRHPLLKNVFKGAAMHVMKMSEHPLFIAYEKMLENGTKPNLARLTIARRIASAVLAIWKHKEEYDPAKHGQRAA

SEQ ID NO: 97240 - protein, 309 aa, unidentified
MGKSIRYVGLDLHADTIAVAICEGRGEARSLGTIPNRPESVRKLIKRLEPVSTLRVCYEAGPTGYAVYWQLTGLGVKCEVVAPTLVPVKAGDRVKTDRRDAEKLARSYRSGDLTPVWVPDAAHEALRDVVRAREAAKKDQLRAKHRLSKFLLRHGRRPPDKTNAWTDRYWTWLSTVRFEHAAQEATLLDYRTEVERAADRIERLEKAIDEAVKGAPAQMKAVIDALQALRGVAKITATTLVTEVGNFSRFAKPNQLMGYGGLVPTEHSSGNSKRQGGITKTGNAPFCGGVYGVNAYIDQVYLNASADSF

SEQ ID NO: 97241 - protein, 366 aa, unidentified
MKKNNTKQNDKEANSGKSWRGMQGLTIGIDLGDKRSCYCVLDAAGKILEEAALTNTAASLAKHFGGQPRARIALETGAQSGWISRELESLGHEVLVANARELRAIWGSGRKSDRRDAEKLARYARVDPSILRPVRVRGAQAQLDLGRIRARDALVRARVLLVNAARGLAKSHGQRLARGVTASFGERSQALLTAELAAVLEPLLEQIDALGEQIKRCDREIAQLLERYPKAAALDAVPGVGPLTALSFVLTLEDPQRFGRSREVGPYLGLCPRRGQSGDSDPQLGISKEGDEYLRRLLVQCAHWIVGPFGTDSALRQWGLRLAQHGGDNGAKRAIVAVARKLAVLLHRLWVTQQRYQPFPQGVATG

SEQ ID NO: 97242 - protein, 358 aa, unidentified
MQKYNISFKGQKIFIGIDVHKKNWDVAVAPEVGFVKRHSQKASAKVLIDFLKKHYPDGDYMAVYESGFSGFSTYYTLKEVGIDCIVIHAADVPTTQYEEVMKTDRLDSIKLVKSLKAGLLRGIYIREKENLDDRSVIRIRKSIQKELSRYKVMVKHILHNNGVTLPDCFEKPTTHWSGAFMTWLKRDVTLLSSTRNSLDLLIRQVETIRSNMLNATRMLRSLSRIERYKHRCELLMTIPGIGVVVAMSILTEIYNVNRFHNEREFAAYLGLIPTSHSSGEKIIHGEKTFRGNKQLGPMIIEAAWSSIAKDPGLGSLYLRYRERMKPQEAIIRIARKLSNIILAVLKSEKEYVPYHMGN

SEQ ID NO: 97243 - protein, 465 aa, unidentified
MKSKTPTSKNRKKKISVDQGWETINFHAAGIDIGSKEHFACVPVGAASKNVRSFGTFTSDLKALADWFQQCGITSVAMEATGVYWIPVFQILEARGFEVILVNARQTKNVAGRKSDVQDCQWIQRLHTYGLLQGSFRPEDPYCILRTYLRYRDELISARSTQCQHMQKALQQMNVQLTQVLSDVTGVSGRAIIQAILAGQREPAKLAALVDCRVRATALQIQKALEGDYRPEHLFVLQQAFSLYGTYDEKINACDEEIVRETARLSDKVDRPRQPLPPRKEGRPANKDKMQGQDMREVLYRKFGADLTAIEGIGITTALVVLTEIGPNVDGFKTEKHFCSWLGLCPDNRISGGKVLSSHTRRVINRASDALRMAAVTLERSQSALGGFYRRMKGRLGAAQAITATAHKLARIIYRLIKHGEPYVRQGMEDYEKKYHERKLHSLKKTALSMGFNLVAQAQVASPVS

SEQ ID NO: 97244 - protein, 342 aa, unidentified
MGGSRVYVGVDVHKNFSFVCVMKESGEVILEKKVRTEELEKLLEDIENKTIILEPTTTAIKLARKLRKNNEILLSHPYKTKLIAESKKKTDKVDARVLADLARTNFLPTAYLPPDEIMELREIIRERIRLKKLSTSIKNRIHSILAKNGIKYDRNLFTSEGREFLYSLNNEWINRYLRILSSIENEIKEIDREIRQKCLENEETMLLTTIPGIGFFSALLIYAEIGDVKRFPNSKKLCSYAGLVPSVRQSGNKVITGKITKEGNKLLRWVLVQCAFVAIRNDEKFRNFYERIKQRKGPQKAIVATARKLLTVVYAVLRDKKPYISYTPTTYGEEFTPVTNWA

SEQ ID NO: 97245 - protein, 349 aa, unidentified
MRYFAGLDVSLEETAICVVDENGILVKEVRAGSEPEAIIAALQKVGLPLERIGLEACSLTAWLHDGLRQAGLPAICIETRQANAAMKTMPNKTDRNDARALAQIMRTGWYREVHIKTRQCRLWRSLLVARRTVINEMRSIENVVRAILREAGIKLGTPSRTAFADRVRERAGDDALVMPLIEPLLTILATMLREFARLTKQVLDIVRPEPICRRLMSVPGVGPITALAFRATIDSPDRFRHSRNVGAHLGLTPGRYQSGETDIQGKVSRCGDELARTALYEAAHTLLVRSHKWSSLRAWGMQIAKRRGMARARVAVARKLAVILHRMWRDQTEFRFGKEPSATASRAAA

SEQ ID NO: 97246 - protein, 320 aa, unidentified
MMAQNDLHVVGIDVAKDKVDACVRSPAQRQTFPTGAEGRRKLMAWLRRHKVGKAVMEASGGYERDWAKALRTAGIEVRIVDPKRVRNFARSAGRLAKNDAIDAEMIAWFAETFGDAPNQVYDAERERLAQIVNARQGLLDVQTELQNRNEHSVPELVQNVHARLLKKIAAEVAKLEAAIAAMIKATRHFAELAAIIESVPGLGEGTSAGLIATMPELGHVSNKVAAALLGVAPYDDDSGKRRGERQIKGGRRKVRNLFYMACLGAATRHNPALNAFYRRLIAKGKEKKVALVACMRKLIVILNTMIARGQKWDANLHLAS

SEQ ID NO: 97247 - protein, 373 aa, unidentified
MSFTSDTILVALELSNSLWLVGTREAGARISQMHRVSAGNTSTLLRLLDGLQTRGREQGTPSPIAVCFEAGRDGFWLHRLLTARSIPTYVVEPTSILVNRKAKRAKTDRLDAEGMLRVLAAYIAGDSQICSMVHVPTPEEEDGKRVHREREHLVQERTRIENRISALLVTQGIRSRPSLRSWERDMALLETGDGRKLPQHLASELNRLRRRLVLVRELISELDTERDEHLTATSGDAITTKVTALSEIYGIGDNFAAVLTREVFYRHFGNRKQLASYVGLAPMPHQSGNVDKDRRIGRAGNARARKTLVQAAWLWLRYQPKSELAAWFYQRVGDLKGRARRIAIVAMARKLLIALWRYTENGEIPAGAVLRAA

SEQ ID NO: 97248 - protein, 340 aa, unidentified
MKRLSSLTGLNLNSIEAIGLDVAKEKIDICLFSSQQSLFYRIANNSQAISQFSTDLTKNGLLKTVPFVLESTWIYHLQCALQLADDWWDVKEINPIITHQQIGYTIRWTKTDTTDSLLLAELWVTKWKKLHSFKRNRKIIELRKKVGLLAWVEKTMQAIKAQYDSYVKSARILWINTNDVDFVRKSLEDLNKCKKELEKSIIFESVDEGWTRRIEIIDSITWISPLIAKICYTTFASNDFESKKQMLAYVWLDPKLRQSWTKSWSYKMSKRWNAFTRKKLFQAAFCWIQHYKQYNYIYNREIEKWKHHFEAVLTVVKKMIYTIRSLIKKNEMFDPNYCAM

SEQ ID NO: 97249 - protein, 338 aa, unidentified
MRIHTVGIDIAKTVFHLVAVDEKGSVVVKKKFSRSQLLVFTANLKAEVIGMEACSGAHFLTRTLVAQGHNVRLMPAEYVRPYVKSNKNDFIDAEAIAEAVLRPNMRFVPLKTEEQLDLQALHRVRERWIGRKVALTNQVRGFLLERGLPIRVGSEHLRKALPSILEDAENGLTPRARTILSTLREEWMELETKIERVTDEIGRISRSNEACKRLMGVPGIGPIISTALVAAVGNATAFKKGRDMASWLGLVPRQHSSGGKTKLLGISKRGNFYIRKLMVEGARAAFARLNRSQHSFGPWMDNLQAGKHSNVAVVALANKMARIAWAVLTTGQQYRAAT

SEQ ID NO: 97250 - protein, 345 aa, unidentified
MTEAYDGRQVVGMDLHRRRSVLVRMTEDGRKLETVRIGNSPAALRAVIARAGNNPRVVVEATYGWYWAVDVLEAAGAEVHLAHPLGVKAFSYRRVKNDERDCADLADLLQLGRLPEAWIAPEPVRALREVTRYRHKLAGQRTSCKDQVHAVLAKAGIPVTRSDIFGRGGGIWLDGLPLPQPYAGKIASLRALIGVLDGEIARLEEQAAAMLAGERGYAAIRQLPGIGPVLGAVIAAEIGDITRFRNPGQLASWAGLTPRHYESDTRVIRGRVSKQGSRMLRWALVEAIQRQPAGTRPRQVKDAIIARRGPDVRGIAKTAAARVMLTQVFYGMRDGHIRRATRQAA

SEQ ID NO: 97251 - protein, 380 aa, unidentified
MNELSTYVGLDVHKKDIAIAYADGTGGEPVWVGKIPNQPDKLARMLRQLQKRHSQMMVAYEAGPCGYAIYRQLEEMGIRCVVAAPSLIPVKAGDRVKTDRRDALKLARLLRSGDLSPAWVPDEQHEGLRDVSRAREDAVEDLNRARQRLSKLLLRHDLRPPTGVNAWTKRYREWLEQVRIGNPAQDVVLEEYRLAISQAEDRVGRLETAMREAAAQSPHAPVIAALQGMRGVQAVTAITLVAELGDLTRFRSARQVMSYAGLVPCEDSSGGRERRGGITKTGNAHARRVTVEGVWHYRHAPHVGKGLKRRQQGVPESVVRIAYQAQVRLHRRYERLLKSGKPVQKVAVALAREWLGFVWAIGQEMARLKAAEASREQVAA

SEQ ID NO: 97252 - protein, 337 aa, unidentified
MTLYCGIDLHSNNSVVAVLDEQDRAVYEKRLPNDLETITEVLCIYQSELAACVVESTYNWYWLVDGLMAADFPVRLAHTSALPEYSGLKYSNDFSDARQLAHLLRLGLLPTGYIYPKEERALRDLLRRRLLLVRQRSLHHVSLQSLIARHSGQRLNTLQIKQLRKAQLADYLQGHALLGGEITHQARCWLEAAVKKIEQELQRHIKPREDYQLLQTIPGVGSVLGTTIALETGTIERFASPGNYASYARCVKSEKISNKKYKGQGNKKNGNKYLAWAFMEAGHYGAIWNPGIKRFYQRKKAKAHILVAKKAVANKLARACYHMLKRREVFDVTRAFS

SEQ ID NO: 97253 - protein, 397 aa, unidentified
MYIVGIDIAKRKHEAAVIDGEGTVIIKPFSFTNNCSGYNRLLAMLTKAKLPLDEVSFAMEATGHYWLALFTRLQKEGFRVQVINPVQTNSIRSFYIRQAKTDPRDALLIAEVIRFGHFSESTLHPENIYELRELCRGRHAIVSMQADVKRKVVALLDQVFPEYETAFTNLFSDTSMAILQNCPTPKELSEMPLEELCHLIEVSSHKRFRMAKAQELQALARNSFGFAMAGDVFSTMIRLYAKHLVFLKQQVQEMDRKIAEIMDTLDTPITTITGIGPTLGAYILSEIGDISRFSSAAKLAAYAGIDPTMRQSGEYNGVRNRMSKRGSPYLRHAIWLAASSAVLHDPALKLYFQKKRDEGKPYMASVGHACRKMVSIIYAVMRDNKAYTPCIPNEISA

SEQ ID NO: 97254 - protein, 424 aa, unidentified
MNNEINNDANLKQRVIGFDSHPDTFTAALLQGPTPAAALTEKVFNKIPMAQLQSWAKKNTTAQDLFVLEASGNSFHVVRSLAAIERKALVLESCQMGKLKEAHANNDKLSAVRIAKAYLAGTAKIVWVPDLQTQERRDWFHAHRKAVKRTTQMRNRILSYLSDQGVRLPKATSLIAPQETEQRLRQAKDWTLRQWQVLEGMLMELRHADEQRKHWRSLIAQEVVGDPLLLSIVRLCGVRDLVAFALGCLIGDIKRFADPRKLVKYVGLNPAFDDSGASQWEGGIGGHGRKDLRALLIEAAHAILRSHHPLAQWGKKLLARKSSVNLAVAALARKLTVAVWYLMMGRWTPLEEMDDRLALKVGKIITQVGAGGLKKLGKTRSALRKEIYQSLKTGRTYVLDPNKKFTSKPQVPRRGTLAQEYGLR

SEQ ID NO: 97255 - protein, 356 aa, unidentified
MAMPSIALTRHDVIIGVDTHKDQHVAVAIDGLGGQIGDSRQVAANPDGYAELLTWACSLGNLHAFGVEGCGSYGLGLARFLRRHEYVVREVARPPRKGQRRLAGKSDPIDAEHAARTVLSGTGTATPKLACGQIEAMRLIKIARDSAVKARTTTIISLRAVLVTASDELRLELEPLSEHKLVVACAALEVGDNLANPRVAMRHTLSYLAGRWLALHEEIKVHTTHLKTLTKAAAPQMLERPGVGFDSTAEMLIAAGDNTDRIRSEAAFAKLCGVCPIPTGSGKTSGRHRLNRGGNRRANAALYRVVLVRMRWHAPTIAYVERRTLEGLSKKDIIRCLKRFVAREFYQLLPTVSENP

SEQ ID NO: 97256 - protein, 434 aa, unidentified
MEEVTDEPLYRDRVCGIDIGKAGMVATIRVPSDKDPSRRARETRSFGTTKREVLALADWLRSWQVPAVVMEATSDWKGPFYRLEAEGFDCVLADAKQVKNLPGRPKRDPSDSRWLAACFERGAVTPCFVATPEFRIIRLHTRYRRELTEERTREKRRAEKLLESAAIKLSSVVSDLHGVTGRDIMDHLIAGQRDPKTLAQLARARARRKIAELEEALEGAEFFTAEHAALLKVMLERIDRVAEEIARLTSVIEQLLAPYEEQLEQAESMPGWGRRAAQDTVAETGVDMTRFRTGGHLSSWAGKTPLDNQSGNRTGRAKSKKGNRYLAAITGETAAAVSKTQTREGARYRRLARRRGKAKALVATGNTQLKVYHKLLSNPGMRYQDLGADYYERQRDIRRQISHHVGKLGALGFEVTLCRLPEPDPDETGTTQAA

SEQ ID NO: 97257 - protein, 472 aa, unidentified
MSKGSGNGTTRGDRKRNARRERLRALLPRDGAVVGIDLAEDKQALAVIDHDVRVLARKTVRVKAFRLGEVLDWAVAQARAKGFTAVTVACEPTGPRWMQVQRLCAERGLPLVCIQPLVSHIAREQQDYTTHKTDESDCVMIARLAVELHCYVPEELDETWGYLRQLGRRRAQLITAETASMHRIGDFLPVAWPTVLGTCVQPLKSVTWLAALQLVTSRCGGQPGGLAVMGEEAFTATVRGAVAGWGGKKAWGTISRRIFAALTDTEGVVAWSRRGLLRRVADELADLQRIRAQLRAAEADMAGALDELGLSRLSEIPALSAVGAAAILAETGDLHRYDGSSSVVKHAGLSPSGNASGGFLGDAHISRRGRPGLRLAVWRAVWPMLQFNPVMAAKYQAMTQAADAAAEQAGGTRSASAAAAARARRARARVACAAALLRWIYFMVVHGTSWDAAAAAGQTAGRRAARHPAEAA

SEQ ID NO: 97258 - protein, 434 aa, unidentified
MRPDAAGIDIGATEIFVAVPPDRVDENVRSFPTFTQDLYALADWLKQCGVTTVAMESTGVYWIPLFQILEDRGFQVCLVNARHVKNVPGRRTDVSDCQWLQFLHSVGLLRASYRPEQEVCAVRALLRHRESLVQMAATHVHHMQKALDQMNLQVHHVISDITGQTGLAIVDAILAGKRDPWELAKLRHERIKASEEVIAKSLVGDYRPEHVFTLRQSLIAYRSYQTLIDDCDREIRRCLEEFKTPRQPDASVGAPQKPSKTPAPDGLLRSELKRVFGIDLTKIPGIRVGIAQMLFGEIGPDFKKFRSASAFASWMGLCPDNDISGGKVLWVGTRKVNCRAATALRMAAQSLHHSKSALGDFYRRMRAKLGAPKAITAAAHKLARIIFHLVTTGQEFDDSRFAADQLRHQKRQEAKLRAKAKAMGFELIPLQQAG

SEQ ID NO: 97259 - protein, 404 aa, unidentified
MKGPIVSIDVSKGKSDYQAFKEMNVKYTGSRSIKHTKEGFDEIVSLVREMEKKLETEVCVVYEATGVYHRVLKKVLEDNNIKQFIINPLLSAKTRKNDSLRSPKTDKLDPKSIAKTYYSHSLHNSHKPETIYHELRELSRYYEDILVHLRKDKVAFRAQLDVVFPGYDTLYDDLYGPVALAVIEKYPHPEMLQKKKINTVSKVIQSKTCHRQAMSDTMADKAIEYSKTIYSGCDKDDIEVLILQRFIKKLKEDMAEAERTISEMIKLAQELPDFSIIKSIPGIGDNLAARIIAELGDMTRFKKKNELVAFAGLDPRISESGQNDGDHMHITKKGNKRLRCLLYLAVTCSIRLKRDDNSIKDFYIKKKQQSNPMCSKAAKTACASKLVRIIYSMCKTGELYQYNK

SEQ ID NO: 97260 - protein, 430 aa, unidentified
MKSNTQNAKIEAITEKTLVLGIDVGSETHYARAFDYRGIEYSKKPFKFSNTEVGFATFKEWILDLKERHEKDKVVPGMEPTGHYWFNLGKFLQDNEMKPVLVNPHHVKKTKELDDNNPTKNDRKDPKVIAGLVREGRYMIPYLPDGVYADLRTASNIRFQLQAELTRIQNRISRWFNIYFPEYKTVYGKPDAKSGMLILKAAPLPEDILTLGIDGVNQIWRDAKLRAVGKARAKTLIKAAEHSIGSKEGTMSARMEIRMLLEDYESRNTRLQEVMVLIEELVKEIPMAEKLLEIKGVGIRTVSGFLAEVGDISRFNNPKELQKLAGLALVENSSGKHKGKTTISRRGRKRLRYLLFEVAMSLVAKNPEFRELHNYYTTRRLNPLKKMQSLMAIAAKLIRVFYAMLTKGVDYDPKKMISDIKRPTVYLQAA

SEQ ID NO: 97261 - protein, 409 aa, unidentified
MEAIVERGAGLDVGQATVVVTVLLGPAHARPRKETRTFHTLTRDLIALRDWLLSLGVTHVGMESTGIYWKPIYAILEGHVGEVIVGNAQHIKNVPGRKTDVKDSEWLAELVRHGLIAKSFVPPQPIRELRELTRYRRKLVESRTAERNRLLKLLETANIKLSSIASDVFGVSGMLMLRALVAGAAPPPEIAQLAKGRLRLKLQELAWALEGRLEVHHRFILNLQIRRLDLLDDDLTALEQEIDRRLEPYRAEYNLLRQIPGVDGVIAAVILAELGTDMTVFRGPAAAAAWSGVCPGNNQSGRRRRAQRVRRGNIHIQTALFEAAMAASRTKGSYLKDKYHRLRSRRGAKRAGMAIAHKILIAAYHMLLERCAFKDLGDHYLDSLEPKRTTKHLVRRLERQGYRVMLTAA

SEQ ID NO: 97262 - protein, 381 aa, unidentified
MKQDNKAKQNRGNEVSVEAPQGTLDLGRRRWKVQREGLTVGLDVGDKISHYCVLNEEAEVVERGKLKTTPAALQPWIEALPAGTRVVLETGTHSSWISRQIEQAGQEVLVAQPRKMPQIYACKRKNDRRDAEKLARTGRLDPNSMGPIRHRSAEQQADLAVIQARDALVQVRTQLINTVRGLVKGTGERLRGCSAPSFARQAEAQIPQRLRGALLPLVSQIRSLSEQIERYDAEVEKLAQKKYPETELLRQVSGVGPVTSLAFVLTVGDRWRFRHSRDVGPFLGLVPAQDESGESSPQLGISKAGNPYLRRLLVGSANYILGPFGPDCELRRWGKKLSERGDKNARKRAKVAVARRLAVLLHKLWVSGEVYEPLPEKRVAA

SEQ ID NO: 97263 - protein, 379 aa, unidentified
MQTITLYIGLDVHKDSITIAIAEPGSKGEIRLFGTITNDMHALEKALIRIRKAHPNAQLEVAYEAGPCGFGIARRLKQLKVPCLVAAPSLIPKQPGSPFKTDKRDSRNLARLLRSGELTAVYVPEPTDEAIRDLCRARTDAVDDLRRCRLRLKSFLLRHDYRYQGKANWSQPHMRYLRELVLPHPAMKAILEEYLQGIDAAHQRVQRIEASMLTLLETWRLKPAVKALMAFRGFQLVAAMITVSELGDIHRFAHPRQLMTYLGLVSVEHSSGPKQHLGSISRCGNGHQRWLLTECAEHYLLPPKVSKELSCRQEGQPPEVRALSWKAQNRLHLRFTRLLGRRLQRNKAKVAIARELCGFIWALLRTQSCYAQPSATAAR

SEQ ID NO: 97264 - protein, 423 aa, unidentified
MSKDNVEIAAFVGLDWADQKHAVTLQESGSDQRHRFILDHTPEALQNWIQSLRDRFGGRPVAIAVEQKRGALIYALMHVEFLHLYPVNPVTAAKMREAFYPSGAKDDPNDADLLLDILISHRRHLRVWTPDDALTRSIQLLTEDRRRVVDERTALTNQLTAVLKTYFPQALDWFGDLHTARACAFLQRWPSLQQLKQASPSSIRKFHKAQGYRGDDKREQLVADIKKAQPLTQDSAVLLSGSMKVEMLVQQISLLTEAIERYDQKIAALFDQHDDSTLFGSFPGAGPALAPRLLAAFGSNRDRFEFASEMQELSGAAPVTEKSGEGIWIHWRLGCPKFLRQTFHEFAGYSIFKSDWARACYDQLRKRGKSHHAALRALAFKWIRIMFRCWKNRTPYDEALYCNSLKFRRSPLADALPAKKWLT

SEQ ID NO: 97265 - protein, 341 aa, unidentified
MTQYKRVGIDTSKSVFTLHGIDHEDRPILRINLRRAQVVSFFRKLAPTVIAQEACGGSHYWARELKELGHTVLLVPPQYVKPYVKRGKNDRNDAEAICEAAGRPGMHFVPVKTIDQQAQGMIVKIRETFAGQRTALINTARGHATEFGIVAAKGAKKVADLFVAIERENDMPPEAKEMFAHLRHQLDELDARIEQIEARLSAAHKANEVSQRLATIPGVGPITALTLAVEIDPEAFRSGRHLAAWAGLTPKECSTGGKQRMAGISRAGHERLRTLLVSGATSIINAALKPGSRHMTDWLRALLLRKPRKLVAVALANKMARVAWAIMKRGGAWRRPSVAAA

SEQ ID NO: 97266 - protein, 353 aa, unidentified
MRTEYFIALDTHCSFSEMAVVTTSGKLLSRQTCETTIPALVAAVESVRRPRRLTFEEGPLADWLARNLTAHVDELVVCDPRRNHLIAKDSDKDDALDAEKLAHLFRGGYLKQVHQPQSLDRSLLKQHVNFYHDLVRNRVRQGHQLTAQLRRHGVFVAIAELEDPDQQRRIFNRLPRRQVLRRSVEMLWEAYEQTLGHEHEARLELMRLARREEPVRRFEELPGFGWIRALTFYVYIDTPWRFPGKSALWRYCGLGLERRHSGAGPMNVRLSKQANRRLKNVLLGAAKSAIAQGDNPFADKYRYWILEGLHPSTARRNVARCQATTLWSLWRTGNSYDPLLVRGGGRQTLAQGT

SEQ ID NO: 97267 - protein, 348 aa, unidentified
MAYYVGIDASLETVNICIVDEDGDVAFERKIEAEPSAIVAWLKRFGRPVARVGLEAGPTASWLFAELRAAGLPAICMECRHVKAGLGAMRNKTDRNDARGIAQLVRLGWFRHVFVKSDEAQRIRMLLVARTHLVSKSQDLENCIRGSLKVFGLRIGTVTRQGFEARVLDLIDGSAGLALIVEPLLRARRAMIEEFERLDRLCRELARRDPVCRRLMSVPGVGVIVALTYRTDVDVPERFKRSRDVGAHFGLTPRRYSSGQTDYDGRISRCGDEMVRTALYQAAHVLLHHGRWSSLRAWAMRIAKRRSLKAAKVALARKLAVVMHRMWVDGTDFRWSDTTPACATTAAT

SEQ ID NO: 97268 - protein, 351 aa, unidentified
MPSKTDAVVARTIGIDTGKNTLHLIGLDEKGAIVLREKVSRGRIAARLANTPRCLIGIEAGMATHYVARALIALGHEVKQVPPAYAKPFRQGHKNDFRDAHAVAEAVQRPSTRCVPVKTDDQLDLQALHRVRSRLIGERTAVTNQIRSFLLERGIPVRQGLRFLRQQLPDILAKRIDVLSPRMIRIIEDLIGEWRLLDERIDHVTTEIEVLARSDEGCQQLTTVPGIGPIIASAMVAAIGNGAAFATGRDFAAWLGLVPKQMSTGDRTILGRITKRGNRYLRTLFMQGARVILLRPANWAKHSFGPWLTAAAKRLHHNVLATALANKLARIALTVLVQGRGYETRVTSEAT

SEQ ID NO: 97269 - protein, 342 aa, unidentified
MCIVYVGLDLGSSSFHQVAISNDGAVIVNRSFSTSELNLRKAFSDLRGELQVHLEAGELAPWVSSVIAPLVERVVCSHPVANAWIAKDADKCDRIDAFKLAELLRLNRFKEVHYPQQQSRRDFKTLVQHYDELTAQQSRLKTKLKARLRMQGVIVTGERLFSSAGRKPVLAQVRSRDVRTAIGQLYEVLDQSVAAQGQAKLLMLRAAQAFPEIKLFRTVPGVGPIGACRFSAYIHTPQRFSSKRKLWKYCRLSVSQRSSNGKPLRRPRLDRSGCGRLKDVSRKAFEAAVRARQDNGFKRAYQQALETTHDAVHARLTVQRKIVATLRALWLTHSPYREQLSH

SEQ ID NO: 97270 - protein, 455 aa, unidentified
MQTFYLGIDASKGYADFIILDSQKKVAVESFQLDDTFDGHCLLYELLMNFSTDHPDSIICAALESTGGYENNWYNALLEFQGTLNLQTARLNPLGVHHNSKADLKRNVTDKISARNVAEYMIAHPEKVSYQSQDHLASLRKQWGFVRMLTKQCTQLLNQLESLLYSANPEILTYCKDGMPAWVLKLLVKYPTAANLARAKVCSVSRIPFVSTAKAEALVLNAKKSVASAVDDVTQQLVAATVKQILHLKESIRIQTAIMARACAVPEVELLKTFIGISDASAIGLMLNIQSVKRFKTVKKLAAFFGLHPKLKISGDGVSVVRMSKQGRAEPRQILYMVAMSAITHNPLIREIYEERVGQGMERMAAIGLCMHKILRIIYGMLKSNRAFDPEIDRRNRQKSISHRNQGQNKVRRYQDYDTKAPISRRQKAKRMEQRQSQSDNGVECGILAPVPFPT

SEQ ID NO: 97271 - protein, 483 aa, unidentified
MKHKPQEKNKRASNGTMQHHWHERNRKQRRETMRQIQSEDLSLEVIHPDASGIDIGNEAHYVAVPPSRDSQPVRRFGCTTAELKAMAAWLKQCRIRTVAMQSTGVYWISVYDILEQAGLEVYLVNARDTKNLPGRKSDVQESQWLMKLHTYGLLRNSFRPVQEIRTMRTYWRQRNDLVQSAGRHIQRIQKVLTQMNLQLANVLSDLSGMTGQTIIKAILRGEREPHKLAEFRDPRVKASEEQIARSLEGNWQEDQLFVLQQEQDSYEFCQKQMAECDRQLDQYLQHSEDRSHGAPLPEEKRKERLKKRKNANKPQFDLREGLFRMTGTDLTRIDGIDVMTATTVISEAGWDMSKWETENHFVSWLRLCPDNRISGEKIIGKGRLRTNNRATIALKMAASTLRLTNTYLGAQFRRLRTKLGAPIAIKAMAAKLARLVYRILRYGMKYVDRGAEFYDAEHRQRQIKHLKWKAAKLGYQIVQAPTA

SEQ ID NO: 97272 - protein, 405 aa, unidentified
MKHVITFDVSMGKSYMVIYNPLKQCIFEGEIQHDKPSFIKVKNKIDQITQGYGECPDIVFESTGVYSKPLERFMAENDYSYCLLNPLEAKIQCDTLRIHKTDKSDAHKLALTHFNTERKIKHSSNKVFNQLKSLSRFYSELDDELTVIRGRLHKVLQETFPELETIFNSKSELFLNIVQLFPHPDLLLNHSKTVIRYKIIANTNKNISRNRAEEKAIELLEAAEKSYPAVSSDDVLCEQVKVYAARYQELMNQKEACIKNMIAIAEKRLEYQILLSIPGIGPNTAIRLMAEIGDIVRFNNNKQLNAYAGIDIRRYQSGKTFYKDRINKRGNKHLRKLLFIIIQNMIKLRRIGNNHIVDYYDKLKTQPYNKCHKVASIACVNKLLKNIFFLVTHNLNYDYRLATKS

SEQ ID NO: 97273 - protein, 445 aa, unidentified
MSDLLQSVNSEPEWAAFAAIDWGDQKNFWRLLPADPRKPEHGELENKPEAVEAWAAALYERFGGRPIALCLEQSRGALVYMLSKYSHLVLFPVHPTTAARYRETFCSSGAKDDPSDTESLLDLLMRHRERLRPLQPDTTPTRLLQFLVEERRTAVDEKTRQGNRLTACLKLYFPQLLHWVDDVAGPLVGALLTRWPSLEELQRSHPGTLRKFFHQQNCRGEEKIEARITAIYQAMPATQDEAVREGAAAIARGLVEVLATLRKNIAEFDRRIAALVATHPEAPLFDSLPGAGKALVPRLIVAFGTRRERFADAEEMQNYSGIAPVKVASGKTVQVHFRRACPKFLRQTFHEFALHSIGQSEWASAYYPHLRDDEKKDHHAAVRSLAYKWIRIIFRCWKDGKPYDEQIYLQSLRRRGSLLGAVAAAATPAGWTPVAGFQKLSENNA

SEQ ID NO: 97274 - protein, 345 aa, unidentified
MALIATIGLDIAKTVFQVHGVDAAGQVVVRRRLTRGRVLAFFEKLAPCLVGIEACSTWHYWARELTARGHEVRLMPAQYVKPYVKRGKNDAADAEAICEAVTRPTMRFVPVKTPEQQSVMMLHRVRLMLTRQRTQLSNSIRAHLSEFGIVAPIGRRGIDQLLAAVADAGDTRVPAEARLCLQMLAAQLGVVKVQILETDRRIRASARETELGRRLMEVPGVGPLLASAFIATVADPAAFKTGRDLAAWIGLVPKQNSSGGKERLGSITKAGNRYLRQMLVVGAMAVIRYAARCGTRLPWLVQLMQRRPAKVAAVALANKLARTIWALMTSGERYRAPAAAGALPA

SEQ ID NO: 97275 - protein, 343 aa, unidentified
MYYIGLDVHKRTISYCVKDAAGHVHQEGKIGSTRRELDAWIKTLPQPRTIAMEATIFTGWIYDHLLPHAEKVKVAHPLMLRAIAAAKKKNDKIDAGKIADCLRCDFLPECHMTSTEIRDRRRRLRYRNLVLKQMVQMKNRVSGLLMETGVSYNKQRLHKLGYFTELISSNDEVSEAIRPLLKLSRETIVRSQKLDYALVSSLERDPLLAERLKRLRTIPGVGPITALTWALEIGDVSRFQSIKQAISYCGLCSAEKSSADKLVRMPISKQRNKHIQQVLVEAAKLAPRYSHELALVYEREQQRGNKNRATLAVARKMVAYMLAVERRKQDFVLTGKFSGTAAA

SEQ ID NO: 97276 - protein, 364 aa, unidentified
MHSINNTELSSLEETRCQFNGGPGAIKLGIDVHQDFYVVVEQVEGSNPKPPQRFAKEAFLHWAARLKQKSSAEVYAVYEACGFGFSLQRKLSALSINCYVVCPQKLDERNKRVKTDGLDAKALCLKLDRFVQGNRDALAIVRVPTEQEERSRAIHRQREQLVGARKRLEAQGRSLMVNHGVEPVQNWWKPRTFAPLPVPQWMRELLENSQPILLALQEKIAALTLQLQSAASSDQPRGLGKMTSVVIDREIGDWRRFNNRRQIASYTGLCPGEYSSGNTRLQSCVTKHGNPRLRAALVELAWRLVRFQPNYKPVVKWRATLAKGALATGAARKKAIVAVARQLAVDLWRIKTGRLSAEELGLIN

SEQ ID NO: 97277 - protein, 374 aa, unidentified
MSPRGRRWDATKFIDINLIKEHLAMKTILAIDLGKRNSVFCKVNTSSLKPEYSTVKTDPQKFHDIFADLDPENSTVLFEVGTQAGWLSDMLRAMRLEFKVANVNHSAWKWTNNQNKSDKTDANRLAMMYHHGFFPEVYIPEKCIRQKRSLVYYRQKIVNRMTQVKNGIRALMCTVAIGLPAGKSCWTKKHLKQIELLALPFDSIDNPHDLWRGQLYMELKQYDALQTSLDKTSGKLDQLGEKESKVKLLQTIPGIGPRTSEAIVAVIDDPHRFKSCRQVSNYVGFTPRRYQSGTMDRTGRISKRGNPLLRALLVQASWAALRYDWAREIYKRVCRGSAKRRKIAIVAVARHLLMRCWAMLRDNKPWQYKTQTAA

SEQ ID NO: 97278 - protein, 433 aa, unidentified
MKVLYERVAGIDVHKDMIKVAIRSPGEKPWTRKTEILEYRTFYGVLQAMARELRRRGVTHVVMEASGVYTEPVYYALCEQDFTEVAVINPAHAKALKGHKTDAKDCARLAELFECGLLRGSYIPPTELKEVRDLTRYRMKTVQARTSEIQRLGKALESAGIKLGSVASSITGASATAMIEALIDGERRGSALADLARGRMREAGKLADLSMALTGRFTEHHALLCRLHQDRIAGFDAAVAGLDERIAGKATRWQREAGLLTSVPGFGDVVTQAWLGEIGPAPHRHFATHEKLASWVTLCPGNNISARKRKHGQTGDAGTYIKPMLVQAAWNAIRMRGRLQARYNRLVRRFGGDKNPGAKKKAIIAIAHTLLKIAYQVLKSGTPYQDLGADFYTHRESPEQKQAWLERQLQKLHPGRTITITISPPEAALAPGA

SEQ ID NO: 97279 - protein, 342 aa, unidentified
MSEKRYIGVDLHRKVFTCCVRLESGRQFLKEWRLEQLPQFVKKLRATDEVAVEVTSNTRLFYDAVAPHVARVVVVDPHQFRVISQSVKKTDPNDARNLALYLAKGLLPEVRMKEKQQAQVASLTQTRDRLVKLRTALKNKVNNLLSARGIELEKEELSGEKGLTRVLAMDVEELTRFELRVLVEQIRSLNHSIAELEKVIDQEGKKLKGHGNLTSIKGIGSLGASILLSVIGDVRDFPDEGKLASYFGIVPRIHNSNETERSGQITKRGSKLGRTALVQCALIAKRYSPYLANYYERIRGRRGTGRAIIAVARKLLGIVYHTLKNNWVFADFPNFVLREATA

SEQ ID NO: 97280 - protein, 449 aa, unidentified
MKKSDSRTKGLPIINTRAAGIDIGSRFHVVAVPADLAQDPTQTFNAFTADLERMANWLVSLGISTVAMESTGVYWIPVYEILETHGLHVVLANARDARAVPGRKTDVNDAQWIQRLHSCGLLRASFRPDREISALRSYLRLRERHLDYAAAHIQHMQKALTHMNLQLHHVVADITGVTGMRIIRAIVAGERSPSALAAMSDTRCKAGVDVIEAALVGNYQPEHTFALSQALTMYDAYQAQLLICDQQIAQVLIKLSQQKVHPSEPLPKPRHKTRQPNALNFDVRTLLYQLVGVDLTQIHGIGPYLALRLVAECGTDLGRWRTCHHFTSWLTLAPGCRVSGGKVLSAHTRKTKNRVTAHLRLAAVTVGRTNTALGAFYRRLAVRIGKAKAVTATARKIAILFYNAMRFGMNYQDPGADRYEQKYRERVVKGLYRRAAEFGFTLQPASGVS

SEQ ID NO: 97281 - protein, 388 aa, unidentified
MNRIIKIGMDVHSTNYTLCAMEPTIGAEDRVYGEVQVAPDYKEVICFIESLKMKLSLDNEYSIECGYEAGCLGYTLYHQLVNAGIKCVILAPTTMLSPQGQRIKTDKRDAYLIAQCLCYGGYHPVYIPTGEDDAVKEYLRMRDDHKLAQKKLKQQINAFILRHGYQYVGTKWTNRHVIWLKNLQLEPMYRETLDEYMASYYEQTAKIERMDKRIEEIAAEARYQENAKKLGCLLGIRTHTALSLLVETGDFKRFAKGNIYAAFLGLAPGEHSSSQNINRLSISKAGNAHLRRLLVEATKGICKGAIGHKSKELRSRQNGQSAEVIAYADKANRRLRSKYYKMVRHGKKKNVAVAAVARELACFIWGMMTENIGIASGAGISAPAVSQG

SEQ ID NO: 97282 - protein, 385 aa, unidentified
MRSEATRAGETIVGGQVLYMALELSERTWKVLFASPAGRRRERSVAARDVAALVGEIAAAKRRLGLPAQARVVSCYEAGRDGFWLDRALRANGIDNLVVDSSSIEVARRARRAKTDRVDLVKLMGLLLRWVAGERKVWSVVRVPDTQAEDIRQLSRSIERLKGEHGRHVTRIKALLATQGLKLARIGGAGWGKRVGELRCWDGSALGPWLQRDLVLEGERLAVVAEQLAALKAERDRLVKEGREAAAVKARELARLGAIASESSFVFATELFGWRTFSNRRQLAGSVGLTGTPYNSGQSAREQGISKAGNKRMRTMLVEIAWCWLRYQPASALSRWWRERFANTGGRARRIAIVALARKLLVALWRYLERGVVPQGAHLKTRAAA

SEQ ID NO: 97283 - protein, 374 aa, unidentified
MVDDTALYVGLDVSKEKIVVDLAEAGRNGEVRYYGEIANRADAVRKFVDKLAGRHERLCFCYEAGPTGYGLYRQLSGLGHECLVVAPSLIPTRPGLQIKTDRRDALALAALLRAGELSSIWVPDETHEAMRDLCRARETAVSDMRRARQHLLSFLLRHGRIFEGRSHWTKAHRNWLATQRFDHRAQQIAMEEYIRAIEQIEERRERLTQQMLALLPDWSLNPVVEAIQALRGVAQISAVTLVSEIGDFRRFRNPRQFMAWLGLVPREHSTGASVVRGSITKAGNTRARRMLVEGAWTYRLPARVGQEILKRSEGLPEEIRAIAWKAQVRLCQRYRRMQAGGRPTNIVIVAIARELAAFVWAIATTVPTTPTKAA

SEQ ID NO: 97284 - protein, 396 aa, unidentified
MYPEALADWIAGLRARFGGRPVGICLEQARGGLIYALLPHEFLVLYPINPLTAKRYRQAFAPSGAKDDPVDARLLWELLAQHRDHLRPWKPDDPQTRKLALLCEHRRKLVNGRTALVQRLGAALKAYFPQALDWAGDDLASPMACAFLLRWPTLAALQKAKPQTVRAFYYGHRCRRPDCIEQRLTQIQAAQPLTTDEALIEAHALLVQTLARQLRALHPSLAAYDARIAALFAAHPDAALFDSFPGAGPALAPRLLVAFGTDRARFPAASGIQQFSGIAPVTVKSGTSKHVHRRYACARFLLQTFHEFARCSRRDCAWAAAFYQDQRTAGKGHHAALRALAFRWQRILWCCWRERTPYDEAKYVASLRRRRSPLAARLGKPTSSSSPCEQTQKHPC

SEQ ID NO: 97285 - protein, 347 aa, unidentified
MDYFAGIDASLETANVCIVDGDGAVVLEQKVGAEPNDIATLLKHFGKPLKRVGLEAGPTSSWLFRELRAAGYPALCLECRHVKAGLSAMRNKTDRNDARGIAQLVRLGWFRLVHVKSTEAQQVRMLLVNRNLLLGKLQDIENSVRGSLKVFGLKLGHVTKHSFEARVFELIEGHSALATITEPMLRVRRVLMDEFVGLDRMARKLARKDPVCRRLMTVPGVGVIVALTYRTGVDTPERFMRSRDVGAHFGLTPRRYSSGQVDYDGHISRCGDEMVRTALYQAAHVLMHHGRWSGLRGWAMRIAKRSGVKLAKVALARKLAVVLHRMWVDGTEFRWTTREQTRGALAA

SEQ ID NO: 97286 - protein, 369 aa, unidentified
MGAALHGVRWPPDPVRGARRPFPLRQQPLVSLGTACCSVTHDRTVARLSIAWTRQVTVTDLICGVDVCSAALDVRLGRDGAMRRFTNDGAGITELIAFCKEHQVGLVALEATGGYERLAFAMLWSAGLATAIVNPRAVRRFAEAMGFLEKTDRIDSGIIAWFAEVKRIAPRQPDGAAQRQLAALVTRLRQLTELRTAQDNQRRLVTEPAALASFAELLSLIARQIKAIGEQIGKLIATDPLWHKLDLAWREIKGVADRTVARLMAELPEIGTLSSKAVSKLAGLAPIARDSGKLSGNRPVRGGRSGIRSILFVVAELVRRHNPDFAAFHRRLTLAGKPKKVIRIALAHKLLVRLNAKARDVRAQLPYSA

SEQ ID NO: 97287 - protein, 328 aa, unidentified
MYFIGNDVSKKTLDLAYFDQQPKRWSKPCKVDNNPRGWDTLIQWAEKQTQASREDICIVMEATGVYHLKVAAHLSREGLNVIIANPQLASQYAKSQNQQNKSDKLDARSLQEYGAQLKKYHLFTPDSPEISQLKALLSRMRQLDKDLQRERNRLEKCDFQEGSSWARTSVKRLIGHITSEQKLTQQQIDQLINQNHELKQNQKLLHSIKGIGKLTSQWLLPLLSTQRFNNAREVAAFLGLVPCHKSSGTSLKTRGRLSGRGDADLRARLYMPAVCAITHDPAMKAFYQQLVAKGKPSRVALTAVMRKLVHVCYGVIKHQTPYIENYAA

SEQ ID NO: 97288 - protein, 339 aa, unidentified
MQLYAGLDLHSRNTYIGIMDKEFKRVFGKRVLNKLPLILKTLEPFQDQLKGIVVESTYNWYWLIDGLMDAGYQCVHLANPSAMKQYEGIKHTDDQHDAFFLAQMLILGILPQGYIYPKEDRPVRDLARKRLFLVRHKTAHILSLQSLIARCCGQRVSANDIRKFTAEDLQQLLNQEHIVLSAQANLDTIVFLKQQIKLLEKAIQKKVKLNTAFQQLMTVPGIGLILAMTIMLEVGDIGRFAQVGNFASYCRCVSSQRLSDGKSKGDGNRKNGNRYLSWAFTEAAHLSRRYNEHFRSYYNRKVAQANTSLATKALSNKLARICYYIMRDQVPFRQELLSH

SEQ ID NO: 97289 - protein, 372 aa, unidentified
MTSIIYVGMDVHTTNYTLCCYSMEDDRFFAEVQVEPDAKNILKYLARIEKQQSRGCRIVCGYEAGCLGYSLYHQLHAHGIDCVILAPTTMMTKPGKRIKTDRRDARLISKCLAFHTYSPVYIPTEVDDAVKEYIRMRDDANSALARVKQQIIAFCIRHGKIHGGKSYWTNKHLEWLSSLNLGNKILSEVLQEYLIRYYQLREQVDMYDMRINELAQAEPYQQKVEKLGCFRGIAAHTALSFCVEIGDFRRSATAQQFASYLGLVPGECSSGDKQQYTGITKAGNSHLRKLLVETAQVFGRSATKSGKSVALKERQAKCDSLTVAYADKANARLKKKYFKIAMRSKVNIAKTAVAREMACFIWGMMTDNISCA

SEQ ID NO: 97290 - protein, 412 aa, unidentified
MEVVYGRCAGLDVHKATVVGCVRVPDERPGERREETQTFATTTRGLLGLADWLTAHRVTHAAMESTGVYWRPVYAVLEGTMELLLVNARHVKMVPGRKTDLRDCAWLAQLLECGLLRGSFVPPPAVRDLRDLTRGRKALIRERGRQINRVAKTLELAQIKLACVVTDLMGKTGRAILDALIAGGEDPDALAALAQGSLQKKRGALREAVVGRLTPHYAFLLQQHLALLETLGAQIEQFDARIEAAMGPLAEAYTCIQTMPGVGARAGQAILAETGVDMTRFPTPAHFASWARVCPGTHESAGTRKPTPTGHGPTWRRATLQEAAWAAVRTKKSYYRALYHRLKARRGSQKAIVAVQHAMLVALWHMLRDRVPHQDLGAEHFDRRQTARIRRHHVRRLQQLGYQVLLVEEPAA

SEQ ID NO: 97291 - protein, 421 aa, unidentified
MRGIRGKKITMVKEGTLIATVDIGMTTNTGYCTTTDGGDIKVFKFGNTKEGFEKFWHMVVAAKNRFKCTEVIVGYESTGPYAEPLVQYLMDKPVSIVQVNPMHTKRLKEVNDNSPGKTDDKDPRVIADIIRLGRSLSVVVPEGDAAYLRRLNNARERHIGERTALLNQMQQLVFLIFPEFKTVIQQLMGKTVRFILKNYTTPEKIGALDKNVFGEEMRKRSMGKLGIKDAELLINAAQQTVGIKEGVAGIVLDLQHIIAQLDVVDSFKTEIEAEMAVTLGRLPCSARLLSIKGLGVVSVAGLIGEVGDFSKFTTQSEIMKLAGLDLYEISSGKRKGEKRISKRGRSLIRKILYFAAIQTIRKNGIMHEYYESLIGRGMLKLRALVAVMRKLLGVIHAIVRDDRDYVGEYHAPKRRVIQKAA

SEQ ID NO: 97292 - protein, 341 aa, unidentified
MSSYAGLDISVKTTAVCVVDGNGQVLLETVVDSSPDAIADRLRELDQPLERIGLEAGPLSQWIYAGLIDIGFAPICVETRHMHAALSARINKTDRNDARGIAQMMRVGLFKAVHVKTPASQRRRLLLTSRKLLQRKIYDIENDLRGSLRNFGLKVGVIGAVKFEDRIRELVADHPLVAAIIEPLLEARAVLRTQFAKLHRMLLELVRTDPICRRLMSAPGVGPIVALTFRTCVDNPARFSRSKCVGAHYGLTPRLYQSGEVARTGRISRCGDVMLRSSLYEAALVVLTGPGRWNPLKAWGIAVARRRGMQKAIVAVARKLAIVLHRMWRDNTDFRWTAPSV

SEQ ID NO: 97293 - protein, 357 aa, unidentified
MEKASSHVGKINTQVERFTMTQFSFFVGVDIASASFMACVGTAPWKLTVKPTKFDNNEDGFVSFLGWLKEHNLKPEQTVVCMEATGVYSEGLAYFLHASGYVVAVEPPLNIQRKFPVNASKTDELDCQYIGEYACRYEDKLSFWKPRAEILEQVKVLLTTRQHFSVQVTGHKNALHAVNRKKVSSELAKQVHQNMIEQIAKHIKAIDQEIRRLIDSDPTFKQTLLLLLSVPGIGLQLAAHLLIAMQETLDPKVLAAFIGICPIKHESGTSVFSAPTSRHYGPSVLRKLLYLAACSVRTHKKQFQQYFFRKAAEGKHNKLILNNIQNKILKIACAVVRSKQPYISNYVSVNPLVLKNA

SEQ ID NO: 97294 - protein, 346 aa, unidentified
MTILEDTRVITGGVDTHADMHVAAALDPLGGLLGVREFPATAAGYADLLGWLSGFGDLALVGVEGTGSYGAGLARYLAAARIRVVEVDRADRQDRHRQGKSDPLDAVSAARAAQSGRAAGTPKGRDGAVEAIRALMVAKRSARNERTQAINQARSLLVTGPDDLRARFAGLTAAGLAEGIAALRPRPGDAAQYAVRIALRELGRRVEFLDGQLERLDDLIVPLVTARAPGLLSLYGVGPDTAALLLVAAGDHPERLRSEAAWAHLCGVAPVPASSGKVRRHRLNRGGNREANHALWRIVITRMSAHPATRAYIERRTKEGLSKKEIIRCLKRYVAREVYHHLRAGG

SEQ ID NO: 97295 - protein, 377 aa, unidentified
MHSENIAAYIGLDVHKETLAVAIAAPERLGEVRYYGTINNEAQAVRRLFQKLQGLYGNILSCYEAGPCGFGLYHQLTAMNIKFQVIAPSRIPKSPTDRIKNDHRDAISLARLLRAGELTPVWIPDLTHEAMRDLIRARAAAKRDSRVARQRILSMLLRTDKRYAGKHWTGKHRTWLANQSFSQPSQQIAFQHYCQSLEQIEDRILQLDQEISRLLPEWSLCNLVCQLQALKGVGQLIAITLVAELGDFSRFSNPKQLMAFLGLVPGEYSSGNSIRPRGITKVGNSELRRLLYEAAWSYRTPAKVGAWLIYYRPDSVTQYSKDIAWKAQQRLCSRYRTLTAKGKKSQVAITAVARELTGFMWNIALAAQSSFSQQKQN

SEQ ID NO: 97296 - protein, 346 aa, unidentified
MEQFVGLDVSQDVTHVCVIGSGGKIEWQGKCSSTPEAIADVIRSRAPAVVRLGLESGPLSTWHWHALKGMGLPVVCLDARHAKATMSGQVNKTDKSDAYGLAQIVKTGWYREVGVKSLESHTIRSTLGARAQLVGMRVEITIQIRGILKTFGIVLTRRTGAPFEQLVNEACADDGSMLNCTVRALLAVYTGLRSQIRRLDRELIAHARSSEVSRRLMSIPGVGVLTALAFVTAVDDPTKFSKSSSVGAYLGLAPRRYQSGEIDQNRGISKCGDGLVRTYLFEAAGTLLTRVEKWSSLKAWGLRLAKRSGLKKAKIAVARKLAVIMHRMWVSGASFRWSSTEPASAA

SEQ ID NO: 97297 - protein, 359 aa, unidentified
MQTQSSKLDFSGQNIYVGFDVHLKSWKVTIMTDELAHKTFSQPPSPEALHHYLEKNFSGGIFHSAYEAGFCGYWIHHKLESLGIKSIVVNPADIPTTDKEKVQKEDKRDSRKIAKSLRSGDLTPIYVPSTKTLEDRSLIRTRAMLVKDLTRYKNRIKSFLYFHGIEIPALFSNPQSHWSKRFMDWLEGIELNENSAKESLSALINESKNLRGSILTITRSIKKISQTEAYQENEKLLRSVPGIGLLTAMIILTELDSISRFSKTDQLHSFVGMVPSTSSSGESDKVGNITPRGHNILRTAIIESAWIAARNDPALMKCYHDYCKRMEPNKAIIRIAKKLLNRISFVLKNKQPYTCSVIK

SEQ ID NO: 97298 - protein, 332 aa, unidentified
MNYVGIDHHRQYSHLTLMDQEGQVLRSGRIPNIQAEIEKFLEGFEAVEAVIETGRSSYTMMDVLDEMGVTVKIAHPNEVKAIARAKIKTDKRDSEVLAHLLRMNMIPEVYRRSMENRQAQRVLRQRAFFVSAMTALKNRVYAFLAQQKEEVREDVARETNIFSAKGQKVLKELDLARGEKRLLEALLKTYRHLETRIEESTALVEKLYEESREAQLIRTIPGFGKYLSVLVVVEIADLARFADAAHLYAYAGVIPSTHSSGDRTHHGKIIRAGNRWLRWAAVEAVWPGIRADFDLRCFYERLARGKGANKAKVATARRLLTIIGFPYRHREQ

SEQ ID NO: 97299 - protein, 355 aa, unidentified
MSGAYEGRQIVGMDLHRRRSVLVRMTDTGERLETVRISNDPQYLAQVMARAGEAPEVVLEAAYGWYWAADTLAELGAHVHLAHPLGVKMFSYRRVKNDQRDATDLADLLRMGRLPEAWIAPPATRELRGWVRHRAKLVGLRSSLKCQVHGVLAHAGIWVPMSDLFGVAGQQLLAELSAGTRLSVESRSRLDSALRVIAALEFEIELFTKLVNGRLRTDPAYRAIQAIPGVGPVLAAVFVAEIGDIGRFHRPQQLASWAGLTPKHHESDTTVHRGRITKQGSRLVRWAAVEAVQRVSGHTRLGQHRDRVAARRGRNIGVVAAARELLTLVFYGLRDHHIRALDTPAPPPAANRSAA

SEQ ID NO: 97300 - protein, 351 aa, unidentified
MPRRSTVRAVATIGIDMGKNTLHMVGLDSCGAIVLREKVSRGRIASRLANLPPCLIGIEAGMATHYVARELAALGHDVKQVPPTYAKPFRQGHKNDFRDALAVAEAVQRPTTRFVPPKSNEQLDLQALHRVRSRLVSQRTAVINQIRGFLLERGIIVRQGLRFLRQLLPDILAKRTDVLSPRMVRIVSDLAGDWRQLDDRIETVTDEIETLAKADDSCRRVMTVPGIGPIISSAMVAAIGNGSAFSRGRDYSAWLGLVPKQMSTGDRTILGRISKRGNSYLRMLFIQAARVILLRPANWPKHGFGAWLVRAIQRLHPNVLAAALANKLARIAWTVLAQERSYEARVTKAEA

SEQ ID NO: 97301 - protein, 321 aa, unidentified
MSGSSVIGIDVASTHADVAAIGADLPAALGRVTNESEGHSALAEGLARLKPELVLMEATGGYEAALACALQAAGLRVAVVNPRMARDFARALQRLAKTDRIDAATLAEFAGVLARRPDCERFIRPLSEPEQQDLAALVTRRRQLVAMQLSERQRLRLARPLTRPSIEALLEAIACQLDDVEAQMVSHVKQHHAQMAKLLQSVAGIGKVAAATLIAELPELGRLSRRQVCALVGVAPYANDSGACRGRRRVAGGRFEVRRALYMATLTATRHNPAIRAFYERLLAAGKLKKVALIACMRKLITHLNAIVRDHLNAQHDPTTP

SEQ ID NO: 97302 - protein, 355 aa, unidentified
MSRDIKYIGMDVHKEATVIAVLNTNGNLVMESIVETKAGSLLQFIHGLRGELHVTWEEGTWAAWLYDLLKPQVQVLVCDPRRNALLKEGNKSDKVDARKLADLLRTGMLRPVYHGENGLRTLRELGRSYQTISQDLNRVMNRLKALYRGWGIACAGTQVYAPRYREEWLQKIEHAGVRRRAELLYQQLDGLQALRRTLRPELLAESRKHKATKLLRQIPCIGPIRAARLLALMQTPHRFRSKRQLWTYCGLGIETRDSAQYRFVRGQLQRAKKPQQIRGLNRNHNHEMKEIFKGAATRASCGVGPLRDFYVALLDKGMKAEMARLTLARKIAAIALTLWKKEERFDAEQLKTQAA

SEQ ID NO: 97303 - protein, 430 aa, unidentified
MKSNTQNAKIEAITEKTLVLGIDVGSETHYARAFDYRGIEYSKKPFKFSNTEAGFVTFKEWILDLKEKHEKDKVVPGMEPTGHYWFNLGKFLQDNEMKPVLVNPHHVKKSKELDDNNPTKNDRKDPKVIAGLVREGRYMIPYLPDGVYADLRTASNIRFQLQAELTRIQNRISRWFNIYFPEYKTVYGRPDAKSGMLILKQAPLPEDILTLGIDGVNQIWRDAKMRAVGKARAKTLIEAAEHSVGSKEGAVSARMEIRMLLEDYESRNIRLQEIMTLIEELVNQIPMAEKLLEIKGVGIKTVSGFLAEVGDISRFNNPKELQKLAGLALVENSSGKHKGRTTISRRGRKRLRYLLFEVAMSLVAKNPEFRELHTYYTTRRLNPLKKMQSLMAVAAKLIRVFYVMLTKGVDYDPKKMVGDIKRPAVYLQAA

SEQ ID NO: 97304 - protein, 461 aa, unidentified
MRKARRWGRKPGKKIVDVTAGMEALRPDAAGIDVGNAQHYVAVPPGRSDPSVQTFGSFTADLHRLVKWLQDCRIKTVVMQATGVYWMALYQVLESYGLQVYVVNAKYTRTLPGRKTDVLECQWLQKLHTFGLLNNSFLPPEEIRVLRTYLRQRENLVAGAGTCIQQMQKVLTVMNVQLANVMSDLSGKTGMAILKAILSGERDPQRLATLADRRIQASRQEIAQSLEGQWREDLLFVLRQVHDLYFFHLDSIADCDRHIEAHLKTLDAKAEGARPPLTVAPRLPHRKHIPQTNLREELYRITGVDLTRIDGIQVQTAQVVISEVGVDMTRWPDEHQFASWLGLSPNHTITGGKVIRRGTKKVLNRAATALRLAAQTLHRSKSYLGAKYRRFRARLEGPVAITAMAHHLARLIYRLLRFGTEYHDKGMEHYERQYRETQMKWLKKQAAQFNMQLIPTQEVVK

SEQ ID NO: 97305 - protein, 326 aa, unidentified
MDDLNNTFESFVGIDIAKEKFDVFFMATDSGFTLSYDPVGIQSLVERLQQLPPSLIVMEATGGLERRLAAELIAAGFVVAVVNPRLTHHFGNAFGKIAKTDRIDARTLALFAQHVKPRPLEKTPEKLAELEQLVGRRRQLITMRTMEINRRGACDSKVARKSIDKVLDCLKRQIDNLDIEIQRLIHCDADWCRKDELLQSVPGIGPTISAAIIAELPELGQLNRQQVAALVGVAPFNRDSGKCQGKRSIFGGRAGVRSAIYLAAFNLVHNCHIKPSRIRHFANRLTTNGKATKVVLTACTRKLLVAINTMLKNDALWNSNILPVSS

SEQ ID NO: 97306 - protein, 386 aa, unidentified
MTVRVINPSAAMHVETARCLFAIELSKQSWVIGFITPFSSKISRRTLNGGDWKGLLKLIEEVQTRVSREAGRAVDAMSCYEAGYDGFWLHRLLEAHGIRNYVIDPASLQVDRRARSVKTDRIDTERLLRSLMAYLRGAPKVWSVVRVPSIAEEDARRLHRERDRLISERVQHVNRIKGLCALHGIYDYQPLRPQAMARLEQLRTAQGISLPPRLKSEIKRELQRLELVVEMIATLEAERDAIVEDAASTHINAKKIRDLYKLKAIGPEFAAVLVGEIFHRNFNNRRQLASYVGYAPSPFQSGNVAHDQGISKAGNRKGRTTGIELAWLWLRYQPGSDLSAWFRARVGATKGRIRRIAIVALARKLLVALWRYLENGLVPRGAVLKG

SEQ ID NO: 97307 - protein, 391 aa, unidentified
MICVGIDVAKDKHDCFILSSEGVTLAEVFTIPNNLEGFNVLLDKLRACSTPQNSIKVGLEATGHYSCNILGFLLDNGLATYVLNPLRTNLYRKSLSLRKTKTDRVDARTIAAMLLSDAGLKPYTDTAYHNEELKSLTRYRFDKVKERAKLKTSVSRLVCILFPELEKLVPTLHMASVYALLSEFPGAKQIAAAHLTRLKSLLGEASRGHYGRDMAVEIRDAARCSIGSRMPAKSLELQHTIRLIRELDAEIEEIEAAIQTIMDELHSPITTIPGIGCRMGAMILAEVGDFSRFDSPDKLLAYAGMSPSTYQSGQLKNCYPHMEKRGSRYLRYALYNATKYVCHWDPAFAAYLAKKRAEGKHYNVALSHAAKKLVRLIFALEKSRQPYCPVI

SEQ ID NO: 97308 - protein, 314 aa, unidentified
MTQISEHERFVGIDVAKKHLDVHLLPEGKSWRIDYTPAGLARLLDQLEKVAPTLIAMEASGGYERACADCLAGAGLAVAVINPRLVRRFSGSLGKLAKTDQIDAAMIARYAAFAKPDTHHTPDRAQAMLMALTTRRRQLVGMIVMEKQRTDPGHAHPAILAGIKRHLRVLEKALAKLEAQIDTLIAGHPLWARMTTALQTVTGVGRQTATALITHLPEIGTLTRRQAAALAGLAPINRDSGTHRGRRFVQGGRQPLKTALYLAALSAANHHPILKTFYQSLKDNGKAPKSALIAVARKLLIILNAIARDTIATP

SEQ ID NO: 97309 - protein, 399 aa, unidentified
MTESTLIVAGADTHADTIHLAAISMTGAAIGDREFPTTRAGYAAAIRFLTSLGQVERIGVEGTASYGAGFTRTLTAAGIEVVEVTRAVKSTRRLKGKSDPLDAYSAARTALAGDGLATPKDDTTAGLRALHIARRSAVKHRTAAINQIKAMVVSAPDAVREKYRGLTTLRMIEAIARCRPDAQADPWAQSVLTAAKMLAQRVQFLETQAEALEAQIDAFAAEANPGLRAAYGVGSDTAAQLMITAGANPHRLHSEAAFAALCEVAPVPASSGKTNRHRLCRGGDRAANNALFRIALVRMSHHQPTKSYVQRQLALGHTRMEILRKLKRAIAREIFKLLTRQIAVPEYRDLRPARQAKNITVTAAANHFGVWPTVISRLERGLQRDDAFADTYRNWLKAA

SEQ ID NO: 97310 - protein, 417 aa, unidentified
MNHQPNASPIERYVGMDAHKHYVMVGGMNRQKEWVLRPRKVRVSSFRAWAERNLKATDAVVVESTTNAWTIYDIVAPLVGDTVVADPRQVSEIAKAKVKTDKCDIERLLRLLIADMVPEIWVPPIHVRELRSLISYRWRLNKQITMTKNRLHSVLHQHNLQAPEGGLFLDKNQDWWQDQVFSPMVAIQVEHDRELLQQLEAHRVSINQELARLSNAEPWDSQMVYLMQIPGFGVILGLIVVSAIGDISRFPHPKKLVGYAGLGAGVHDSGEKYSGKGITKQGRKEFRWAMVEVAWRAVGAYPYWKSQFETLKKRMHPNQAIVVIARKLLVTVWHVLTKQEAYQHATDEDIAYKMLIWSWNMDEKALDGLTRQQFAKYGLLRLGVGQDITRIVRSNLPRRLAPSEEVVKLRPELRPPD

SEQ ID NO: 97311 - protein, 390 aa, unidentified
MPEDAPRPAQPAIRTDLGAIFVSLELSRRAWLITSLSPGGGEKMSKHAVPASDVSGLLRRFAELGRKATARTGRDFPIIVIQEAGLDGFWIHRVLQSEGIESHVVDAASILTSRRRRRAKTDRIDGETLVRTLMAYKRGDPRVCSMARAPTPQEEDRRRVCRERRTLVGERVRHVNRIKGLLFAQGVFGYEPLRKGRRERLEDLRTGDGRPLPVQLKAQIIRELDRLELVLAQLKTVAAERDALLTPASEEAASPAAMLVRLKGIGPETAAVLWSEGLFRQFDNRRQVAAYAGLAPTPWQSGSIDHEQGVSKAGNPRLRTTMVELAWLWLQNQPTSALSLWFHERVRLAGRMRKTIIVALARKLLVALWRYTTAGVVIEGAVMKAAPTTI

SEQ ID NO: 97312 - protein, 342 aa, unidentified
MEITTVGIDLAKSIFQVHAVDAAGQVVVRKALRRAQVVPFFAKLPPCLVGMEACGTSHHWARELIRLGHDVRLMPPAYVKPYVKRGKTDANDAAAICEAVTRPSMRFVPVKSTEQQAALALHRTRDLLVKQRTQLVNMIRGLLAEFGIEMARGLRHALELAARLSAGDAAEVPPLAQRVVTGLADQIGAVQIQFTRLEKELLAWHRDSDLSQRLATIPGVGIVSATALAASVSEPERFRSGRQFAASLGLTPLQNCSGGKERLGRISRMGDRYLRRLLVVGMTSLIRRAKATPTSVDPRLPALLQRKPVRVVTVAAANRTARVAWAIMTRGGTYRAPAATAA

SEQ ID NO: 97313 - protein, 379 aa, unidentified
MSDSIIYVGMDVHKDFVMMAVLPADAPRPTRVERVPNEPTHLRRFFRRWVPQGRVRACYEASGAGYVLQRTLEGWGVECAVIAPALMPTRPGHQRKHDKRDAIELARLHRAGELVPIRIPTASEERVRDLVRCREVLQRELIRARHYLVKFLARRGLVYREGTPWAGPHERWLQALARSGALSAEDATVFGEYRALIAYVAQRRAELDRQIAALALTPAYAASVARLRCFRGLETHAAMVLASEIGDWRRFTSPRPLMAYLGLVPREASSGTHERRGSITKAGNSHCRHVLLQAAWSYRHVPARSERLQQRQQGQQGQPAEVVAHAWKAQQRLHRLYGRLAYRKRPAVAVVAVARELVGFLWAVMQDVAPAAEALAHVA

SEQ ID NO: 97314 - protein, 362 aa, unidentified
MIVIGVDAHKRSQTLVAVEAGTGELLGQRTVLASDDGALEALRYGQALDDERVWAIEDCRHVSGRFEQALIAAGERVIRIPPALTSTARRAARTPGKSDPIDATAIARAALREGLESFPEAFLDERAMEIRLLCDYRDQLITERVRLINRLRWHLLAIEPELEAQLSPAALDGPRIRARLAAQLRRQPQSTQLRIAKAMLTRISQISHQESELEAELTALIQEHNPQLLAERGCGTITAAILIGHTAGAQRFATEAAFARHTGTAPIPASSGNTSRHRLHRGGDRQLNRAIHIIALCRARTDPTTRIYLDRKAAEGKTKREAIRCLKRHLARHIWGLLYPTNPAAPRREQSLAEKSELANVT

SEQ ID NO: 97315 - protein, 320 aa, unidentified
MLSFCGIDVSKDRLDVMVLPEGQRSSVPNDVAGWAELVEQLRGCSIAAIGIEASGGYERGAIRALLAADLPVRQVNPFKLRQFARASGILAKNDPLDARMIASFVAIMPTRPVPQQAPPAERLAEMLAVRRQLTAEKVAAENASRLLEDAMLRRLSRRRIARLAADIDLLDRQLVEVAGTDAALAHRYRLLTSMPGVGAVLACTLIALLPELGRLSRKQAAALVGVAPYAFEGGALKGRRRIWGGRANIRQVLYMAAMSASNWNPVLKAFRDRLAAAGKLPKVVIVAVMRKMITMLNAMVRDDVVWADRHSGRHIVPTAR

SEQ ID NO: 97316 - protein, 387 aa, unidentified
MGQVVIGVDPHKRSATIEVIDQRERVLGKGRFGTDTDGYQAMLAAGREHTDRIWAVEGCSGIGRHVAQRLVADGETVLDVPAKLSARARVFSTGQGRKTDPVDAHSVAVVALRTSDLRQVVVDDTTVALRLLVDRRDQLGRARTEAVSRLHHLLLELVPGGAKKFLSAQQARALLNTVRPRDVVGKTRRWLASELIHELVTIDKKIKVANAELTELVDSTGSRLRTLHGIGPSGAARLIGDIGDVSRFTGRGHFASWNGTAPIDASSGDQNRHRLSRAGNRRINRVLHIMAVVQLRNDTEGRRYYRRKLAEGKTTMEAMRALKRRLSDVVYRLMTADAKRLRTGPGGQVGATLQSGAADPNPKADTSEKSLPGPAEDHLRTPLLTAS

SEQ ID NO: 97317 - protein, 344 aa, unidentified
MTIVTLGIDLGKNLNSVVGLDAEGQVVLRRRVRRATLVELADRLLPCTVAMEACCGAHHVGRLFATKGHEVRLMSPEYVRPYVRAQKNDDNDAAGIAEAATRPTMRFVELKSQDRLDLQTLHRVRSRLVAARKALVNQLRAILLERGYTFRLGRKVLEREIDPFLAEPPSELSTRILTLVGDMRAEWQSLDERIDALNHDLAEHVRTDEAASRLTSIPGIGILGATALVAAVGDGEAFRRARDMPAWLGLVPKQMTTGGKPRLLGITKRGNTYLRMLLIHGARAALPSLSKQATPLGAWLRGLLSRAHRNVVIVALAAKLARIAWASLRRGISFERGWGQAVAA

SEQ ID NO: 97318 - protein, 407 aa, unidentified
MIFVGVDWAEVHHDVCVMDADGNVLARKRIPDSLLGVGELHAVVAEHLGDDDEPSEVIVGIEKDRGLIVTALVAADYQVFAINPLAASRYRERHHVSGAKSDLGDAKVLADLVRTDRHNHRMVAGDSALSDAIKLLARTHQNTIWTRQRQVNSLRSALKDYYPGALEALGNDLSGPDAVAILAIAPTPGMAQTLSRARITTALKRVGRSRHLEERVERIYEVLHREQLRQPATLENAYGVTTEAAIANIIQLNASLAKLEASLSEHFEQHPSAKVILSLPGMGTVLGARVLGEFGDDPNRYYDAKSRRNYAGTSPITKTSGKSRAVLARHSRNKRLAGALDQWAFSSLLPSPGARHYYDELRARDKHHRKAVRQLANKWVGILHACLENDCPYDENIAWSPREERAA

SEQ ID NO: 97319 - protein, 375 aa, unidentified
MHEKLRFLGLDVHAETIAVAVAEPDGEVRSLGTIPNRTESIRKMIRKLGPAEKLRACYEAGPTGYVVYWQLAELGVQCEVVAPTLVPVKAGDRVKTDRRDAEKLARCYRSGDLTAVWVPDEGSEALRDLVRAREAAKQDQMQARHRLSKFLLRSGQRPPTGVRPWTRPYLIWVAQLRFTQIAQEATRQDYLHEVEHMRERVTRLEQAITEAVKLASPALQQVINDLQALRGIADISAVTIAAELGQVSRFGSARQLMGYCGAVPSEDSSGKRTRRGGITKTGNAHLRRVVVEAAWSYRRPPCIWYGLRRRQESISEEVKEIAWKAQHRLHKRYMKLGAAGKDQRKVVTAVARELLGFIWAIGTRAETVASRRLAA

SEQ ID NO: 97320 - protein, 357 aa, unidentified
MDGSKEYPPMTAGLDLGDRYSYLYLIDTQSGEIVEEGRLRTTPEALRRRFASERPMRIAIETGTHSPWASRILEECGHEVLVANARKLRLIYANKRKTDEIDAENLARLARVDPKLLYPLKHRGEDSQAHMAIVRSRQALVDCRTQLVNHVRGAVKSFGARLPKCPARSFHKRAKEHIPEALLPALGPILEQIGSLTERIRDYERKLEVISKEHYPETQLLRQVEGIGPLTALAFVLTLEDPYRFEKSRSVGAYLGLVPATDQSGDRDPQKRISKEGDEMLRKLLVGSAHYVLGPFGSDSDLRRHGEKIASRGGKNAKKRAAVAVARKLAVLLHSLWVSGEVYEPLRNAQGTGGKAA

SEQ ID NO: 97321 - protein, 391 aa, unidentified
MGTQSASAALTESRGGPASAGASLYVGVDVGRHHHLVAVISRERMEDGSWERGPVRRFVTNSAGFQELLAWLESSGLPASAVKVGCEPTGGWYARTVVAWLETYGYRIDWLQNWAVHDRRQLLIGKQTKTDALDARLIARLLFERDVLGAARGFLHRPPQNADALRLLVRNRFKLVNFRTRYRLQLGAVQDVLFPEFKQFFRARSTGRTARTLLEQFATPAQFGGRVCGGVGGGGDREGPRPGGGAPAARVAATGRQQRRPDPRHRPAAAHPGLAAPAAEGGEDEIAAADREVAAALEGWPGRDRAVLGSFPNMSIMRQAILLSAIGDVTSFQSDRQLRKLLGWYPEAVESGTSVYRHRLGQKGNRLARARCICLGVPRTWQEVFNVDRPA

SEQ ID NO: 97322 - protein, 392 aa, unidentified
MRISVGMDVAKAIHWACAIDEAGRTLLDRAVENTPEGIASFAADLRALGGEPVIGLDVVGSFAHFLGASLLAEGFRLVHAPGIAVNRAGQGFAGGESKSDPRDARTIADLVRTRELRPILPDDETVTAIRLKVGRRRDLIEEQTRRLCRLRGLLSSIHPGLERDLDVTCKGPLVLLTRYVTPAEIRHAGKRRIMAHLAKTPHVQGAEALADHALAAARAQMLAVPGEAAMAELVRELATEALEARVKIIRLDRDLAALLAVHPDGALIQSLPGMGAVLAAEFIACVGDIRRFPSADALASAAGLAPVIRQSGRKAGWRRTYGGDKALKRVFYQGAFCAVCRKDPLSKAFYDRKRREGKHHTQALIALARRRVSVLWTMIQRRKTYDPLFKAA

SEQ ID NO: 97323 - protein, 318 aa, unidentified
MNSPSVTVGIDISKNRLDLARFPQGDTFSVAYTDTGLAKMLKRLRSWSPQVILLEASGGYEYGVVAALVAADLMPVLINPRQVRDFARSLGILAKTDKIDAKVLAEFAFRVQPEPRPLPAAQQQELNHLLSRRRQLLEMIQMEYNRREVSPFPRVRQSIDHNLDSLRRQLADLEREIDDFFHQSPLWVQQDALLRTVPGIGPQTALSLQAWLPELGALTRHQIVALVGLAPFNRDSGVFRGRRMIRGGRHKVRQALYMATLSAVRFNPVIKALFNRLTNHSGKPGKVALVACMRKLLIILNAMVKNDTPWHCITPLTS

SEQ ID NO: 97324 - protein, 317 aa, unidentified
MKTNQSAIHIGVDIGKHQLDFFCHESGQHFTAANTVVGIGQALKQLSTSSIALLVMEATGRHEQALAFAAQRRNIPLVIAQPIAIRRFAGALGILAKTDKLDSRVIAQYAATIKPAARELPDKTTRQLKDLSVRRKQVIGMLTMEKNRLQVMPAFLRADIRRSLAALQRQLRKLDEHIHQLSLSVEAWRQKRQVMQSMPAVGPVLATTLISDLPELGTLNQKQIAALVGVAPMNRDSGKMRGKRRIRGGRAQVRTVLFMATMCAVQHNPVIKAFYQRLLAKGKHKKVALVACMRKMLILLNAMVRDETCWEEMKATA

SEQ ID NO: 97325 - protein, 344 aa, unidentified
MLYVGLDLSRKRLDWQALAGDGRRVEIGAVPPDADGLAKLTQRLGDADVVAVIESMSGARFVHDRLELAGWDVRIADAAKARGIAPLACKTDTIDTWVLAELARRELVPEIWLPDPEIRAERERARFRLHLVKHRSALKNRVHAILFQHGVANPLSDLFGGAGRVLLERLRLPEPWASTVGASLALIDVLDEQITACERELRELGAKHRYIPLLMSCPGIGWVLAFTIASEIGDIERFPSPRKLVGYTGLCPRVDQSGERDRRGPLRKNGPSYLRWALVEAAHTAYRHPLYSPILERKRAQLGQKRGTKIAALEVARRMAEAIWYMLTRDEPFAPASATGSLAA

SEQ ID NO: 97326 - protein, 338 aa, unidentified
MQARHVPSVPSAPPVPSVSAAVPEVVVGIDVSKATLDCYLDGPVGRWVQVPNDPAGVARLIAELRPLAVRLVVVEATGRLHRRLAAELLDAGIPVALVNPQRAREFARASGCLEKTDRVDARVLAEFGRGVRHRTLEKLPAKQAELDDLVSRRRALVQVRVAETNRLHDQLPKLARRQGERLLRLVDQQVEDLDRAIAGLIDGDDDWRRRGEIITSVPGVSDGTARQLIADLPELGRLSRQRIAKLAGVAPLAADSGTHKGERHIRGGRGPVRNALYMAAFNAMRYCERFKRMAEQMRTRGKAFKVIVTACMRKLLVTLNQMVKTNSMYDPKLNVPVP

SEQ ID NO: 97327 - protein, 496 aa, unidentified
MTIRRIVGVDLGIASTHTVVVIDETTEILARRRCRPTVESLERIESAALAGAPEGTRLEVIIEPTGAAWLPVAVFFCRRGHTVHRVSSAKAAALRRFLSQHAKANSIDAEALARLAIVDPDGLQPLQLVEGDAASLDRRVRATDRLTEAATRHKVRLRELARQAMPMLDDAITGEMTGADVAVLERYGDPRLLLRAGRARLIALIRKVSRGHHGEQRADAWRAVATAAVDLYGDDPAVPFEDLAAEMATEARLLRAVLTERDTHAGAREAAYRAVDPDGLARSLPGIAEIGGPVLVAAMGDPHRFHDAAAFKRFTGLTPKASETGNTDRKGQAMSKAGPRRLRDQLVQSANTARRTDPQLAEVYFTQMVERGAHHQKALCVVAARLAERAWVVMARGEPYVLRDVDGTPVTREQAKAIIDERYQVSEQVRRRRRSRKSAGKAPHQVLEAHAKGHTRHRVDSRGDLPRTTTRPQPPLTVKTTRDTATVDIAVNAAAP

SEQ ID NO: 97328 - protein, 387 aa, unidentified
MSQVDDLSRSLAAFDQNTTLTVVVELSEASWLVAGLVPAVDRQPLKKQEPDPRALLRLLERWRAEAAKTGRMIERIVLAFEAGRDGFWLARWLRARGIEVYVIHSTSVAVSREHRRAKTDRLDTGMLMRVFLGWLRGERGHCRMVAIPTLEEEDAKRPSRERESLVGERTRIINRMKSALARLGIRGFKPALRKAPQRLEALRTPEDTPIPPNMLDEVRRDMIRLAVVREQIDAIERARLVRLEQAPASGSHPMVRLLARVIGVGIETADMLVQEVLSRKLRDRRAVARYVGLTGSPDESGKRRREKGLAKAGNARVRRGLIQLAWRFLRFQKDSALAQWYRARTEGPKGVRKTTMIVALARKLLIALWRLVMTGEIPVGVVLRAAA

SEQ ID NO: 97329 - protein, 354 aa, unidentified
MIVGGLDVHRRQITYDWVDTETGEARRGRLAPADREHLRVWCAQFVGRRAAFALEGCTGWRYVVEELQRAGIEAQLAEPADTRALRGPKRHAKTDQLDARHLRELLTAGTVAQSWIPPAHVLEQRIRVRTYQDLRDERTAWQQRMHAQLFHQGVAADRDLLVPERRQRLEQGTGLSPAGREQVAVALRVIDALDVDLDLLRRELTRFARRQPGCRALLEHYGIGPVTAVAIWAELGDVRRFTSSRQAVRHTGLDVTVYSSDAKRTPGHLARQGPPVLRWALFEAACCAARAGAPDHAYYLQVKERLGGNRAVLSVARKLARRCYHTLHALGERALLPVEPDPTPSCREPLTAVA

SEQ ID NO: 97330 - protein, 332 aa, unidentified
MAIIGCDLHSRYQVIAMLETETGEVITRRLEHETGEAEAFYAGLEKPTLIGIEATGYTQWFERLLGELGHELWVGDPAEIRARAVRWQKTDRRDAEQMLDLLLTNRFPRVWVPTPEERDFRQLLKHRDKLVKMQTGVRNQLHFLAMSQGVCRKGKLWSVRGRKELEGLMLGKWASVRRQELLEMLDRLQPRLEEMDKAVKAEAERRAEAVELMKQVGVGPVTALAFVLTVGPVERFSSSRRLVSYLGLNPREASSGGHQRLGHISKQGNQMLRWLLVEAGQRAAQHDEELRRRYARLKFRRGGSVAKVAMARRLAVLLYWRLRRQAADSHAQ

SEQ ID NO: 97331 - protein, 343 aa, unidentified
MNQYIGLDVSMKETAISIRQDGKRIWRGKCASDPQLLAAVIRKRAPYVRRVVFETGPLSVWFYHALTAEGLPVICIDARHAKAALDMAANKTDANDADGLAHLAEVGFYREVRVKGFDSMLIRTLITARRQLLKMRLQISNQIRGLMKTFGLIVPKGAGSVFERNVRNLLQGEEKLARIVVPMLQAWSNIRHQIAALSKQLAAMAREDQHCRLLMSVPGVGTVTATAFAAGVEDPANFRNSRAVGAWVGLTPRRYQSGEVDNDGHISRRGDNQLRGLLYEAAAVILNRSRDTSTLRSWALELKERLGFKRAAVALARKLAVIMHAMLRTGELFDPHGGTPTAT

SEQ ID NO: 97332 - protein, 408 aa, unidentified
MNPLFVGIDVSSKNNVAYLMKPDGSKHSSFSVQNNLGGAKLLSERIVSALGSMQLERVVIGLEATSIYGDSLVYALREDGRLGRFQRKIHVLNPKQVRKFKEAYSDLPKNDWVDAFVIADHLRFGRINREVYMDDYRYKALQTLTRARFDVIQNLTREKQRFANYLFLKCSGMAQDKDIQNTSATTIALMEHFETVDDLANADLEELTAFITETGRGKFADPDATAKAVRAAAKGSYRLPKTVNDTVNQAMAVSIASMRALKGQVKVLDKAIEQQFEIIPNTLTSIPGIGKVYSAGIIAEIGDIHRFDSQASVAKYAGLVWNRSQSGDFEAEHSRMIKSGNRYLRYYLLEAANSVRRCDSEFRRYYDLKFKEVNKYQHKRALALTARKLVRLVFRLLKDNRLYIPPER

SEQ ID NO: 97333 - protein, 311 aa, unidentified
MGGLNAAIDVGKHQLDVALGSNGELFAEPNQARAIARLAKRLAKLGCERVLIEGGSYQNVLVGALRAAELPVVIINPRRIREFAKSIGQLAKTDHIDARVLALYGERIQPPVRELPDEQNQALRGLWVRREQLIEMLVMEENRLEHAPKALHRSLRSHIDYLRKQIKQADNDLDRAVRNSALWDKYQLLSSVPGVGPVLSVALLSDLPELGRLNRREVAALAGVAPFNCDSGTLRGQRKIQGGRKRLRRVLYLATVASVRCNPVLRPFYLRLRATGKPAKVALVAAMHKLLLILNAMLKTKTVWRPPCPAA

SEQ ID NO: 97334 - protein, 331 aa, unidentified
MSKYSNAIGIDISRDKFDVHDYNLDIHKEYPNNESGFKQLLSQSRKDHGRKLEGIIFCMEHTGLYSLGLSVFLTQKKIPFSMIPGLEIKRSLGMVREKNDKIDSYQIAKYAYLRREEIKEYNLPSEDILKLKSLLSLRERMVKHRASYMANLKELKTFYKKRKNPLLFKTQEKLIKDLSKQIEHIEKEMSSIIDNDAELKKMYRLATSVIGVGLIVGITFLVYTNGFTAFENWRQFASYAGIAPFSNESGASRKKPKKVNHMANKRVKTLLSSSASTSILYNPEMKQYYEKRIMEGKNGMSTRNIIRNKIVARVFAAVNRGTPYVNTLKYA

SEQ ID NO: 97335 - protein, 421 aa, unidentified
MRAFGLDVHRDFCEVAVAEGGEVRSAGRIATRVESLELFAQSLAASDVVALEATTGADRIVSLLQAQGIRVVVANTRKLRSITEAKAKTDRLDARTLARLLASGLLDQVWTPDERTRALRRLTNRRERLVRGRTRAKNEAHGVLARNLCERAPVTDTFGKAGRRWLARLELPLDERLTLDGCLRQVDFLDAEIAALDAEIAKQALAWPEVLRLMSVPGVNVQTAATFMAAIGDIGRFSSPRKLVSYLGLDLRVRQSGNSIARHGGISKAGASEPRHMLGEVAWKVMQTPGPLRAFFERVRARRGPQIAATATARKLAVLFWHLLTRGEDYAFARPAMTRNKIRQLELLAGAPPQKGRHGIAGGKSKAVFDAERELSRQAEAAYRRLVSDWRSTGPAKAGAGVTPGRASSRPSKGKAARQTP

SEQ ID NO: 97336 - protein, 340 aa, unidentified
MNEVITIGVDLAKNVFQIHGIDAEGGVVIRRQLRRGQMVPFFKKQSPCLVGMEACATSHHWARQLIELGHNVKLMPPRYVKPYVKRNKNDMADAEAICEAVTRPTMRFVEVKTPEQQSVLMLHRTRQLFVRQRTSLINALRAHLAEFGIVAGVGRNGLEKLLQVIEEGDDDRVPPTARDCLLALRDQLEMVKHQILGADRRILDWHRDSEVSRRLDDIPGIGPLIATALVASVPDPHIFKSGRDLSAWIGLVPKQNSTGGKDRLGHISKAGNRYLRTMLVVGALSVIRRAKQVGYTKRPWLTKLLERRSTKIAAIALANKNARTAWAMMAHGTYYQEPVS

SEQ ID NO: 97337 - protein, 344 aa, unidentified
MEHYAGLDVSLELSNVCIVDERGTIISEVKVASEPEALIGFLRTQEVKIGRVGLEAGPLSQWLHAGLADAGFEAVLLETRHVKAALSAMTVKTDRRDARGIAQLLRLGWYRPVHAKSASAQEVRALLTARKLIQAKLLDIESGIRGVLRGFGLKVGPISRGRFEARILELVDGHATLEEVIGAMLSARAALETEFKRLHRALLALVRDDPVCRQLMSVPGVGAIVAITFKSGVDDPSRFRRSRDVGPHFGLTPRKYQSGELDVTGSISKVGDRMVRTALYEAASVMLTRSVRFSALKAWAMAVAKRRGTKKARVALARKLAVILHRMWSDGTSFRWTNEETAIA

SEQ ID NO: 97338 - protein, 360 aa, unidentified
MQKQRTELNFKGQNLFVGIDVHLKSWTVTIVTETLFRKTFTQPPSIEALHNYLVRNFPGGIYHSVYEAGFSGFWTHYKLKEMGINNMVINPADVPTTQKEHLQKDDPTDSRKLARSLRSGDLEAIYIPDSSTLEDRSLVRLRSTLVKDMTRYKSRIKSFLYFYGISYPQEFQKAGTHWSKRFMKWLNEGISLQHDSGKQALKILVQEAEQQRKLLLEVTRRIRLLTRDEKYASNIELLRTIPGIGFVTSITFLTEMEKIERFENTDHFAGFIGLIPNKHSSGDKENNGEMTFRGQEALRSALIESSWFAARLDPALNMSFQNYIKRMESNKAIIRIARKVLNRMYYVLKNKREYVPCVVK

SEQ ID NO: 97339 - protein, 411 aa, unidentified
MSILEVALDPVTVIVAVDPGKVLNRVWVSNGGGLLEDPMSLPVSREGIGRLERLLVAHAAAAEPVIAIEATGSLHRSWAAELERLHPGAVRLFAPSETKAARMQLGSGRFKTDDRDCAALTYLSRQGGGRRQSEEVTVDALRAAVRHRRGLVADRKVAQQRLHDQLNVLCPGLSAPVGHGRSLAITTPTGQAVLACAAAFAGRVPTTRSLIARAPGRLIRGTAEYWVQRWRGCLPPPADAEQRARRLARDLERYRILRADIAALNDEIAVLLADTDGQVLTTLPGVAIVRAAAFAAHSLPIGRFPDAEHLYSATGLAPALYESATLHRRGRISRQGLAEHRDALMGIAWGLAAYSPGFAQRDAELRARGMSPIQARVAIARNACRLAYRLLVTQQPFDEEAYLRGRLSRGR

SEQ ID NO: 97340 - protein, 337 aa, unidentified
MTIKIQSTTRLWVGIDIAKATFQMALWGHEDIRPMRVASFNRNRQGCKKALAWLRKEAPEGALVGVVMEATGALAEETANWLVALDPTLHIAIVNPIQTSAFIRSLGLRNKTDDLDAKALAQYGTQRKPDAWMPMPLEFQILRELTRTRTDLLRARTAMMLRLKDHKRAMTLIPQAMRAVIRTLDTQIAKLDGAIRDHVEAHQTLEAQTQIGQSIKGIGLVTAVTVLAEVGDLRRFPRSRQLTAFAGLSPRQHLSGTSVHGRSPMCKRGSGRVRAALFMAAVCAVRFNPDMAEVYNRLIERGKHKRVALGAVMRKLLVTMRALVIADKHWQPKAATA

SEQ ID NO: 97341 - protein, 355 aa, unidentified
MDSTKYVGMDVHKDTMSIAVMNSAGKVVMESVLETKAVTILQFIQGLRGNLLVTLEEGTWAAWLYDLLKPHVTKVTVCNPRKNALLKSGNKSDRIDAQKLAERLRHGSLSAVYHGENGLRMLKELARSYLTVSKDLTRVMNRLKALYHSWGIACAGTQVYAPRHRLEWLSKITEVGVRGRAEFTYQQLDGLQALRQAVRRNFLAESRKHKATKLLREIPGIGPIRAALLVALLQTPDRFRTKRQLWAYSGLAIETHGSGQYCYLEGQLRRVKKPVALRGLNRNHHHDVKWIFKSAAVKASSPSGPLHEFHEALLAKGIKPSLARLTLARKIAAITLTVWKKGVRFDAEHLKLQAA

SEQ ID NO: 97342 - protein, 342 aa, unidentified
MQIKTVGVDLGKSWFHLVGCNRAGRPITRHKYNRGQLVHFIANLPQCLIGMEACAGSQHLARIFQRHGHDVRLMAPKFIKPYLKSQKNDFNDAEAIAEAVTRPTMRFVAVKSNEQLDLQAIHRIRERLIGERTAVINQIRAFLIEYGLPVKEGRASLRRDLPSVLEDAENGLSPRMRQLVARLRDHWHALEAQTAQATRDIELVAKRSDDCRRLVTVPGIGPLGATALVAAVGNGAMFNKGRELAAWLGLVPRQHSTGGRTTLLGISKRGNRHLRMLFIHGARSCLKHLKRDNHELGLWMTQLEQRAHKNVVAVALANKMARIAWAILARQEVYRSSAAVAH

SEQ ID NO: 97343 - protein, 266 aa, unidentified
MAVLPSGEEGQFTNDPEGIKAVTDRLAGVGSVLVVVEATGGMEVPVVSELAGVGVEAAVVNPRQVRDFARATGKLAKTDALDAQVLARFGEAVKPSVRPLPDATLRELRALTTRRHQLMKMLTAERNRLHPAAQRVQPQIKDHILWLQRQIKDLDKDLRDSIRSSPLWRTQENLLRSTPGVGPVVSSILLAQLPGLGILNRYQIGALVGVAPLNRDSGTFRGKRKVWGGRAPVRAALYMGALVPTRHSPVIKAFYQRLLDAGKPKR

SEQ ID NO: 97344 - protein, 375 aa, unidentified
MSDSSVPFASFVGVDLHKQTVTLRAVDPAGQPIARLTCDTKCVDRIRQWMLALPRPSHLAVEAVGFVEWFIDRFRDCVDRMDLADATELANRRGKRRKTDDKDALDVALRLARGECPLAWIAPEPVMQLRKLGRHWRNLSRTLSRTKHCMKSMLLAANLRGPRFDGASAQKWLLAHGHLLKDVQREAFGQFLDIVCLIERQRESLRRRIIFANRDPGFSGLTTILKSVPGIDEIWACLIAAEVGDFARFPNADALEFWSGMTADLKESAGRTQSGKITKAGSATLRWAICKAAITLCRSDARQESIRQRLIRRIGKPKANVAMGRRLLRILFAMVRDGTLYQGQVKTGHERHANKARLAQRPVRQRKELRELVPA

SEQ ID NO: 97345 - protein, 411 aa, unidentified
MTIVAPDGSVIQKPFKITHNKPDSLEKAVSAIKKAEELHSLESRTFLESTGIYHFPLFCYLVDCGFHVSIINPIITHSANNTSIRKVKNDKVDSIGIAKLGLSGDIPVSQFPAKLVLEIRSLTRKYYDLTDERSAHINKLKGDLHTVFPQYLDIFCDVTGKTSTMILRQYGTPDKILRGHKKTMIEKISKASRKGLSKAAERYEKLCAAATAAKTFGCQIDSIYFNISLTLDLIEKLDSALDSILQRIHQLVTFNKSEKFIQQIKWLDTIKGVGFLTAVTIMCEIGDFSAFRNPKQLFAYFGLDPEVNQSGKFVGTEMHMTKRGSRIARRAVFAVALASIRTKRNGEGINPYLREYYEKKSGQKPKMVALGAVMHKVCNIIFAVLRDEKEFELRSPEEHCRQYQRPALQAA

SEQ ID NO: 97346 - protein, 355 aa, unidentified
MTSTKYIGMDVHKESISIAVRNAAGKIVMECVIETKASMILQFIDGLRGDLQVTFEEGTSAAWLYDLLKPHVTKLVVCDPRKNASMREGNQSDKIDARRLADLLRLNHLHSVYHGEHGLRSLKELVRSYLTITKDLGRVMSRVKAIYRSWAIPCSGKQVYAPRYRVAWLGKITEPGVRRRAEFSYQQLDALRAVRQQVRRELLAEGKKHPAWKRLCQIPAIGPIRSAVLLGILQTPQRFRTKRQLWAYSGFGIETQSSADHRSVNGQLQRVMKQSSVRGLNRNCNHDLKNLFKGAAVVASSKPGPLQEFYPTLLSKGIRPEMARLTLARKIATIVLIVWKRGVCFEAQHLKPQTA

SEQ ID NO: 97347 - protein, 385 aa, unidentified
MRSLCLWLAVQIERYLKPLVTRDEFASKDDRQTACRLFSPAVFYHTFEGGSPLITVFPTWTAYMGIDVAKTKLDVVLRLGERAIHQVFAKTADGFAALDGWLSSFALSPAQVRVCLEATGSSSDAIALDLFARGSTLSVLNPAVLVDSRRSQQIRSKTDKLDAHLLARYAQENQPRAYQPLPAEILTLRALLHHRDDVQHMLRQERNRLEAGRMTDGIEQRVRKHIQDLQADFKATEGEIKAHLKAHPHLKAIWRRLQTIAGIGWLTATRLLAHLGEIGRFDKVGSLVSLAGLAVKEHRCGSSVRGKAQIDRHGRKDLRRSMSMSAVVALRVSPHMQQWAKRLQAAGKPKMIILVAIMRKLLPIVSGVWKTEQDSQPALAFPVAA

SEQ ID NO: 97348 - protein, 350 aa, unidentified
MLIIGCDYHPAFQQIALVDTDTGELQERRLQHREEAERFYRDLAAERMKVRVGMEASGHARWFERLLSELQFELWIGDAAEIRTKRVRKQKTDRQDAQLILKLMLEDRFPEIWVPSWENRDLRQLLWHRHRLVQARTRMMNQLQAVALNEGLRCKKKLFREAGREQLEGFRLAPWASRRRHDLLELLDRLTPTIAELTQAIEQEVEKCPAARRLRTHPGVGPLTALAFVLIIGKADRFQCGKQIASYLGLVPLEKSSGDQRRLGHITKQGSTLLRFLLVEAGQVTARSLPEWRSQYYHLTMRRGRKIAKVAMARKLAVRLYWMMRKEWDYGQLTKFGSYAGKPENRDGVK

SEQ ID NO: 97349 - protein, 329 aa, unidentified
MNYVGIDDHRQYSHLTLMDQEGQVVRSGRVPNLRAEIEKFLEGIEAVEAVIETGRSSYTMVDVLEEMGVAVKIAHPNEVKAIARAKIKTDKRDSEVLAHLLRMNMIPEVYRRSVENRQAQRVLRQRAFYVSAMTALKNRVHAFLAQQKEEVREEVARETNIFSAKGQKLLIGLDLGRGEKRLLEALLKTYRHLETRIEESTALVEKLYEESREAQLIRTIPGAVEIADLARFADAAHLHAYAGVIPSTHSSGDRTHHGKIVRAGNRWLRWAAVEAVWPGIRADFDLRCFFERLARGKGANKAKVATARRLLTIIYKVLKEGRNYIAYRR

SEQ ID NO: 97350 - protein, 327 aa, unidentified
MVLGEAGKVLVRKKFNQRQLLTYTANMPTSLIGLEACSGAHFLGRALRNQGHDVRLIAAQFVKPFVKSNKNDFVDAEAIAEAVERKNMRFVPIKTDDQLDLQAIHRVRDRLISRRTAVINQLRAFLLERGLTFARTPAKLRNALPDILENPEVDLTTQMRHLIGLLWTEWKTVEDQIEGLSHELERISAGDAGCTRLRQIPGIGPIVATAIVAAIGNGAAFRKGRDFAAWLGVVPRQYSTGGKTRLLGISKRGNVYLRKVLIHGARAAVLRMKRDRAPIGAWLDALDARAPKNVVVVAMANKLARIAWAVLSSGEDYKPASNLVKAS

SEQ ID NO: 97351 - protein, 355 aa, unidentified
MDSVKYIGMDVHTESISIAVRNGAGKIVMECVIETKASMILEFINGLRGDLQVTFEEGTWAAWLYDLLKPHVTKLVVCDPRKNTSMREGNQSDKIDACRLAELLRLNHLSPVYHGEHGLRSLKELVRSYLTITKDLARVMLRVKAIYRSWAIPCTGKQVYAPRHRAEWLGKISEPGVRRRTEFYYQQLDALRALRQEVRRDLLGESKKHQAWKRLCEIPSIGPIRAAVLLGVLQTPHRFRTKRQLWTYSGFGIETQSSADHRSVHGQLQRAKKSSSIRGLNRNCNHDLKNLFKGAAILASSKPGPFQEFYNALLTKGMRPEMARLTLARKIATIALIVWKRGASFDAQHLKPQTA

SEQ ID NO: 97352 - protein, 345 aa, unidentified
MKIIGCDFHPSFQQIAICDLETGELQELKLSHADGQAERFYGELGEPALIGIEATGNSQWFLDLVQRLGHEIRVGDAAKIRASYVRKQKTDKRDAGHILKLLLEKRFPQLWTPSAAMRDQRQLLRHRDKLVEIRTKVKNSLQHLAMNRGMQKKSRLWTRQGMEQFQQLAMAGWAATRREDLLQLLKELNGQIEPLDQAVKQAAEQHPQAQLLMTQPGVGPVTALAFVLTVGDVARFAGSKRLTSYLGLVPSEHSSGSKRSLGAITKQGNRFLRKLLVEAAQTTVRKDEGFRKEYQHRCHHRPKAVAKVAAARKLAVRLYWMLRSNVGYPEIVHIESNPRVPLGDV

SEQ ID NO: 97353 - protein, 372 aa, unidentified
METAYDGRQVVGMDLHRRRSVLVRMTEDGRRLGTARITNSPPELRKAIAQAGEAPRVVLEATYGWYWAADVLKAAGAEVHLAHPLGVKAFSYRRVKNDERDAADLADLLRMGRLPEAWIAPHEIRELRELTRYRHKLVGLRTSCKEQVHAVLAKLGIPVTCSDIFGASGELWLGALALPQPYAGKVASLRVLTAELTREITLLDTVIASLLERHDGYHAIQALPGIGPVLAAVIVAEVGDVRRFASAGRLCSWAGLTPRHRESDAKVTRGHITKQGSPILRWAMVEAIQRLPAGTPVGARRDAIIARRGKEARNIAKTAAARQLLACVFYALRDGRARSLDRRAAGDPPGRGQRVIAPRSGPRPGRRGRASD

SEQ ID NO: 97354 - protein, 341 aa, unidentified
MNHYAGIDVSLKCSSVCVVDVNGKIVQEGTVASEPEALIAWFSELRFEVIRIGLEAGPQSQWLYAAMRQAGLTVELLETRHVRDAFKAMPVKTDRKDAQGIAQLMRLGWFRPVHCKSMEAQETRAILGARKLVQSKLHDIEMSLRGTLRGFGLKVGKATSNCFAARIKELVAGHPTLQVIATSLLAVHAVLLREFKVFEKRVRVMARQDERARLLMSTPGVGVLVALTYVSAIDDPGRFTSSKRAGAHFGLTPKKYQSGETDITGRISKIGDKGVRTALYEAANIILTKPVKGSALKSWAARLAKRAGMNKAKVALARKLAVIMHRMLVDKTPFNPAAAAA

SEQ ID NO: 97355 - protein, 360 aa, unidentified
MSDGSKGRPKMTAGLDLGDRYSYLCLIDTENGEVVEEGRLRTTPEAFSRRFASERPPMRIAIEAGTHSPWASRVLEECGHEVLVANARKLRLIYANKRKTDEIDAENLARLARLDPKLLYPLNHRGEDSQAHLAIIRSREALVGCRTQLVNHVRGAVKSFGARLPKCPARSFHKKAAAHIPEALRPALGPILEQIGSLTERIRDYERQLETISKERYPETELLRQVEGVGVLTALAFVLTLEDPSRFAKSRSVGAYLGLVPARAQSGDRDPQKHISKEGDEMLRKLLVGSAHYILGPFGKDSDLRRHGEKIASLGAKNAKKRAVVAVARKLSVLLHRLWATGEVYEPLHNAHRRQEQEAA

SEQ ID NO: 97356 - protein, 339 aa, unidentified
MPIVGGLDIHRAQITFDYVDLRTGEETRGVIRPATREEFRRWLGQFGRKQAAFAMEGTTGWRFVVEELEAAKMKAHLAEPAETRARRGPKRRAKTDRADARLLRDLLLANNLPESWIPPTHLADLRTTVRLRKALVDNRSAWNRRIQAQLFHHGLPTAPHLQTLVGRDYVLSVDLPPAGRQVVEVGCRMLEVFDDEIEVLDAQLESFAKVQPGCQVLQRQWGIGPILSAAILAELGDTRRFSSSRQSVRFAGLDVTVEESDGKRTRGYLSRQGSPVLRWALYEAAGAAWRKASPDHEYYLEVKDRLGAKRARLSVARRILRRVHHDLANAGDDAFAEAA

SEQ ID NO: 97357 - protein, 410 aa, unidentified
MEVTYLRCCGLDIHKKLVVACAITPGPDGQPHKEVQKFGTMTQDLLALSDWLTGLAVTHVAMESTGVYWKPLYNLMEASFTLLLVNAQHITVVPGRKTDVKDCEWIADLLRHGLLQASFVPDQPQRELRELLRYRTRLIQQHSAEVNRVQAILEGANLKLASVVTDIQGVSAQAMLRALVAGETDPVSLAALAKGRLRAKIPQLQQALAGRFGPHQRFMLAEALGHLDFLEEAVERLSAEVTTRMVPCEAELQRLDTIPGVNRRTAETFVAEAGTDMHRWPTSGHFASWIAICPGNNESAGKRHSGRTRHGNQALRAALTEAGQAAGHTKDSYLGAQYRRLARRLGPKKAALAVGHSIAIIAYFLLQDSTSTYTDLGPDYFERRNREAATRRHVQQLQAMGYSVTLEKVA

SEQ ID NO: 97358 - protein, 361 aa, unidentified
MTKSSKEVSEIVGLDLGDRFSQFCVVSRQGEVMERGRVATTATAMRKQFERMARARIALEAGTHSPWVSRLLEELGHEVLVANPRKLRMIYDSDSKNDRADAETLARVARMDAKLLGAIRHRKEQTQVDLAVVRSRDALIKARTQLINHVRGVMKSVGSRLPKSSTPSFHKKATAGGIPEQLQSALAPILETLEKISEQIKNYDRQIEQLSREKYPETELLTQVSGIGNLTALTYVLTLEDPNRFGRSRAVGSFLGLRPRQGDSGKQEPQLRITKAGDPLLRRLLVNSAQYLLGHFGTDCALRRWGLELAKRGGKNAKKRAAVAVARKLAVLLHRLWSRGEVYDPFYQSQSQAAVPVLPLN

SEQ ID NO: 97359 - protein, 344 aa, unidentified
MGEVITIGLDIAKSVFQVHGVDGSGAVVIRKRVSRAKVLEFFAGLPRCLVGIEACPAAHHWARELQAIGHTVKLMPPNYVKAYLKRSKNDANDAAAICEAVTRPSMRFVPIKTTEQQTVLMLHRTRQLLVRQRTMLSNALRGHLAELGIVSAKGRNGTAELLKIIADSEDSRVSPLVRGILDVLARQYGAIGAEIASIDKNIMALHRVCEGSRRLAEIPGIGPLSATALVAEIGDWSTFSSGRSLAAWIGLVPKQHSTGGKERLGSITKQGNRYLRWLLVVGAMAVVRYARKYGAKRRPWLARLMERRPTKVAAVALANKIARMAWAIMVRGERYKEPKLLLAA

SEQ ID NO: 97360 - protein, 350 aa, unidentified
MLIIGCDYHPSFQQIAFVDTDTGELQERRLEHREEAEKFYRDLGAQGMKVRVGMEASGHARWFERLLAELNFELWIGDAAEIRTKRVRKQKTDRQDAQLILKLMLKDDFPQIWVPSGENRDLRQLLWHRHRMVQARTRIMNQLQAVALNEGLRCKKRLWREHGRKQLESFRLAPWASRRRRDLLELLDRLNPMIAELSQAIEQEAEKFPEARWLMTHPGVGALTALAFVLIMGRADRFQCGKQIASYLGLVPLEDSSGNRRRLGHITKQGSSMLRFLLVEAAQVTVRSLPEWRSQYFHLMMRRGRKIAKVAMARRLAIRLYWMWRKGWDYEQVKKFGSHAGQPGNRHGVQ

SEQ ID NO: 97361 - protein, 337 aa, unidentified
MARAGKRPKKRRIVGGVDTHADTHHAAVELMNGGRVADAQFPATAAGYAQLLEWMGSFGRLCAVGVEGTGSYGAGLARHLRGQDVDVIEVNRPDRRQRRNLGKSDPLDAYAAADAVLAGRARALPKGGDGVIESIRAVHLARAGAVKARTACINELRSLLVTAPTELRERMAGMSASVLATECARLRPAADLTDPLQGTKLALRSLARRYQGLTAEIKDLGIGLKALIGLARPDLLSIRGVGPETAAQLLVTCGDNPDRLTGPAAFAALCGVAPVPASSGKPADTGSHAAGIAKPTVPSTSSCSPAWPTAPAPAPIWPAARPKASPKKRSSAASNAT

SEQ ID NO: 97362 - protein, 376 aa, unidentified
MNRILKIGMDVHSTNYTLCVVEPKLEGDPDLLYEVQVEPDCWNILQIIEKPKQKYKEDQLFITCGYEAGCLGYTLYHELEDHGIKCVILAPSTIEMPGGKRIKTDKRDAYLIAKCLANGGYRAVYVPTSKDKDVRDYIRMRDDHRDLLKIVKQQIDAICLRNGHKYTKTRWTGNHLKWLKELELSSIDRETLNEYMLTYQYLFEKLERLDARIEEFASEEEYIEKVKKLRCYIGIKTYSALSLIVETGDFHRFAKGNIYSHYLGLTPGEHSSSENVNRTSITKAGNKHARTILVEAAQCICRAGIGRKSKALMARQKGNDLAVIAYADKANERLRRKYHKMIYRGHHRNIAVTAVARELACFVWGMMTDNIGMVEP

SEQ ID NO: 97363 - protein, 405 aa, unidentified
MNAVGIDVSKGKSTVTIRKPGDVVLLSPCDIPHTQSQINALIELIRGLDGETKVCMEHTGRYYEPIASWLSDAGIFVSAVNPSLIKNFGDDSLRSPKTDKADSKKIARYTLDRWANLKQYGGMDKTRNQLKTMNRQFGFYMEQKTAMKNNLIALLDQTYPGANDFFDSPARSDGSQKWVDFIYTYWHVDCVRSKSLEAFTQHYRNWCKRKGYNFSTLKAEAVYQLSSDLISVFPKDANTKMLIRQAVAMLNTASATVESLRLEMDKTASTLPEYPVVMAMNGVGPTLGPQLMAEIGDVTRFTHRGALTAFAGVDPGKDDSGQRVRKSVPTTKKGSPSLRKTLFQIMDGLIKRSPADDPVYAFMDKKRAQGKAYYVYMTAGANKFLRIYYGRVKEYITTLESSQQQ

SEQ ID NO: 97364 - protein, 342 aa, unidentified
MTLYIGVDIHARQQTVSYLDSSDGTTGQVVLDHERDDVREFYSQFRGEVMVGIEASGYTNWFEVLVEELGHKLLVGDAGEIRRLARRRQKNDRRDADLLLELLVHNEFPALYRYAKESREVLRQLRYRHKLVKLRTMVANTLHALALNAGLSLRTRLLSKGGRRQLSGLRLSAISQQQRDELLSLADELTQRIQMVEQWLEAQAKSDERVLRLQTHPGVGLLTSLCVVHTLGEVSRFSSTRKVAAYVGFDPMEDSSAERKAYGGISKAGSRLLRYLLIEAGQTAAKDDEQLKQFYRRLLPRRGKARAKVAVGRKLLIRCFIMWRAEIDYAEFLRRGPREETE

SEQ ID NO: 97365 - protein, 356 aa, unidentified
MSSKKDNAISFKGQHFYIGLDIHKKNWAVNIRNNGIRLKAFSMDPYPEKLKRFLEENYPEGTYHVVYEVGFCGFWICRILREMGIDCIVVNPADILTGHKEKDRKTDQVDANKLARELEKGSLKCIYIPDEADQHLRSLCRLYRTALQDTTRVKNRIKGRLYFNGVELPRHTSQWSGKFIAYLKSLPLDDGPAKECLMISIDELEQRRQTTIHILKKLREYVRDHREPSVFQNLLTVPGVGLKTAFVLYTEIIDMKRFRTLDHLKSFVGLVPSTDSSGENDWVRGLTYRKNKHLKHVLIEAAWVAIRQDPVLLHKYNKLIVRMKAQNAIIKIAVKLLDRIRYVWNNNCPYVQGVIQ

SEQ ID NO: 97366 - protein, 403 aa, unidentified
MTVRPQVWVGIDIGKTSHHACAVDEAGKVVWTQKLTNQQRTIEQLIERAHRTAEQVRWAIDLTSPMALMLITVLLGAEQSVVYVPGRVVNTMTHAFRGEGKTDAKDARVIAETARLRNDLADVTMPDELIVELSQLTGYRADVMADWVRGINRLRALLGSIFPGLEAAFDYSARTPLILASGLCTPGEIRAAGIEGVTAHLVEHQAWPAAIAKTAATAVALADEQPLALPGEAGTAALIKRLARRLLELDREIKDIDKTITERFRDHPYAQIIESLPGFGPGLGAEFLVVTGGDLTSFATAGRLASYAGLVPVPKDSGRVTGNMRRPKRYNRRLRWVFYLAALSSIRANGPSRQFYDRKRGERLIHSQALLALARRLVDVLWALLRDGREFTPDKPATANAAA

SEQ ID NO: 97367 - protein, 462 aa, unidentified
MKNKPSPDRAHKRLSKHLEQINLYAAGIDIGSESHYVAVPEGLDDEPVRCFGCFTGDLERLADWLVRIGIQSVAMESTGIYWIPCFELLEERGLEVLLVNASHVKNVTGRKTDVLDCQWLQQLHTYGLLAGAFRPAEQVSALRGYLRHRGNLVRYAGSHIQHMQKALRQMNLLLDNVVSDITGKTGMTIIRAILKGERDPAKLAAYRDGRCQRSEHEIAQSLQGHYREEHLFALRQCVELYDTYTRQILACDEAIERQLQGFAALGDPAQLPKSKKQKVAHAPAFDVRAELYRMSGVDLTAIDGVSELTALKVLSETGTDMSRWKTEKQFASWLGLSPGNRVSGGKLLSSKTKPAANRAAAALRMAAFTLANSKSALGAYYRRMRSKHGAPKAITATAHKLARLIYSMLKHGTAYVDQGQDYYEQQYQDRIMKNLKKRAAQMGFVLVPSTKDNGLVSEISMA

SEQ ID NO: 97368 - protein, 392 aa, unidentified
MVYAGVDIAKMDHVIGAVDETGAEVARPMPFKNSEAGFERCVAWLESVAESEDGVFVGMEATGHYWMACFAYLTAAGYRVCVVNPMQVRAMRSLKGMPGVKNDRVDAWLIAETLRQGDYDETRLATDEVQALKQLTRYHQALKQELATVKTQAICVLDAYFPEYAGLFSDMFGSASLKVLAECPTPSEVERRRAATIAKLLSEGSRGRFGEAKAAQVKAAAKSSVGIRLGEDAASFQLKTMVSQIEFLNRTIAKVEREVAALLEEIEPNITTIPGVSTTTGAQIVAEIGDVRRFGSAASIVKYAGLNSGVDESGKFSAQGVPITKHGSPYLRRSLWLAANRARQHDDRLREFYEKKRREGKPHRVAVTAVARKLCHIVYAVMRDGEPYDPAK

SEQ ID NO: 97369 - protein, 471 aa, unidentified
MSKKRTYRSVDVQKVEAAAFVALIFTACSAVGVDPVRCIVAIDVAKTKFFAGFATAQGELVRIVRYQHPKQTLAFLSLLRELNAAGANVEVAMEPTGTYGDALCERCEQLGLPVFMVSPKKTHDMAEVVDGVPSQHDAKSTVIIAQLHAMGKSAKRQPKSQVRRTMRALVDQRAIYQGPLEANYGKLEALLARHWPELEQWVELRTQRSWMTLLQRYPGPQAVAAAPCQVADLLRRASRGRCKPETIEGIVLSARTSLGVVMSEQECVLLGALVAEIERFTRQTDAIDKRIAELVRDDEVVQLMAQTVGAVTAAVLIAYVGDPRDYGSASAYEKAFGLNLKVRSSGNHAGQLKITKRGPGAARRILYMAALRLILTDPIAAAWYRNRKSYKADLKKKAVVAVMRKLVRALFHVARGNPFDSSKLFDTRRLCLEQDTDSVLPAPNAKGGCSAERKPTILPRRSHQTQEVSVS

SEQ ID NO: 97370 - protein, 337 aa, unidentified
MNATTYGVDIAKNVFQVHWVDLASGEICRRKLTRAKFVEFFARREAGTVVMEACGGAHHWARELSALGHQAQLLPPHEVRKFVSGNKDDAADARAIWLAAQHQDIRRVTPKSAQQQSELSVHRVRTHWMSVRTATINALRGLLYEFGLALPKGRVPALRWLGEHRVRVEEQLPPVMARLLDAQLQALRDLDDRLCALEVEIGKVQRSSEAARRLRQVPGIGLLGATALAATLGDGSAWRNAREFACCIGLTPRHSGSGGKVRMGGISKRGDAYLRTLLIHGARNLVRCAEPAPWVAQLLQRRPFNVVATAVAHKLARTAWAMTAHGTAYEERLKAAA

SEQ ID NO: 97371 - protein, 385 aa, unidentified
MTNQNDLSRSVVAFEQRNTIITVIEMSLNSWLVAGIVPGIERHPLKKLSFDEEMLLKLLYRWRDEAVKAGHTITRIVVAFEAGRDGFWLARWLRTRSIEAYVIHPTSVAVSREHRRAKTDRLDTELLKRAFLGWLRGEPDHCGMAAIPSLEEEDAKRPTRERENLVGERTRIINRMKACLIRFGIRSFKPTLRKSAERLNTLCTPEGVSLPPNTVAELRRDLARLRFVMDQINEIEAARLQRLEQTPAEGPHAMVRLLARVTGVGLETADMLVHEILSRKLRDRRAVARYAGLTGAPDESGSKRREKGLAKAGNARVRRGMIQLAWRFLLFQKNSALSQWYRTRTESAGKKRKTMIVALARKLLIALWRLVTTGEVPAGVVLRAA

SEQ ID NO: 97372 - protein, 349 aa, unidentified
MTIVEDTRVITGGVDTHADRHAAAALDPVGGLLGVREFPATAAGYAELLGWLRSFGTVALVGVEGTGSYGAGLARHLAAAGVRVVEVDRADRQDRHRAGKSDPLDAVSAARAAQSGRARGAPKGRDGAVEAIRALMVAKRSARHERTQAINQARALIVTGPDELRARFAGHAPAALVEAIAALRPRPGDVPGYATRVALRELGRRAQFLDAQLERLDELVIPLVTARAPGLLSLYGVGPDTAALLLIAAGDHPERLRSESAWAHLCAVAPIPASSGKVSRHRLNRGGNREANHALWRIVITRMSSRPGHPATRAYVERRAKEGLSRKEIIRCLKRYVAREVYHQLRDGI

SEQ ID NO: 97373 - protein, 392 aa, unidentified
MSQQHCHFDASRSLTALEQDSTIIAVIEMSQSKWLVAALVPGVERQPLKKLDAQEEELLKLLHRWRNEAGQAGREIKRIVVAYEAGRDGFWLARWLQARDVEVYVIHPTSIAVSREHRRAKTDRLDTELLTRAFLGWLRGEKRHCSMVAIPSIEEEDARRPNRERQNLVTEQTRIVNQMKAIFARLGIRTFRPTLRKAEEKLKGLRTAERTPLPENTRAELRRHLARLHVVREQIRAVEQERLRKLAAAPAAENGSHAMVRLIARVLGIGVETADMLVNEVLSRHWRDRKAVARYAGLTGSPDESGRRRRERGLARAGNARVRCGMIQFAWRFLRFQKDSALAQWFAARTADRRGSTRKTMIVALARKLLIALWRLATTGEASDGIVLRPAS

SEQ ID NO: 97374 - protein, 428 aa, unidentified
MDFEVKHLICAGLDVHKKTIVAAVCMTDPVTLEAAYKVKSFSTNNSQIAAMRDWLLSYNCHDVCMESTGKYWIPVFNILETHMHVVLTHPKYVKAIKDKKTDKRDAKWIANLFRFDIVKASFIPPADIRALRELSRYRLRLSYMRSAEKNRFQNSMTISRIRIDCVLTDPFGKTASSIMDYLLSDVPFDETECAKLIHGRVKASNEEIFDSIRGFEILSEQRFKMSHAKQHMELLSSYMDDIETELFRLSRSYDKVIKRISGIVGFTERSALFVISETGADMGVFESAKHLCSWAGLTPANNESANKKKSTRCSKAGQYLKTLLIQCALAAVKSKKNPYYAIKYKRLAKRRGRKKAVIAIARMMLTGIYHMILNNEEWKPDDYEAIIHPSKPVKVALTLDNVIQFLGEQGADPETLKLLQQQCAVTPG

SEQ ID NO: 97375 - protein, 338 aa, unidentified
MSQTTAGILYVGVDVHERESQIAIFEPGGKLLYETRIETKELSRFIGSLRGEKHVAIESIGFIYPIYDELKALPMCHVHVANPNRVQLIAKSKTKSDVIDAKVLGDLLRTNYLPTSWIPEDEETREKRLIVKDRVRYGVRKSGIKGSIKWLLKRKGIEVKSPFSIAGRKQLKSLGLFEIESRLEELSLVESMIKKLDGMIVKLVSGDKNAKLLDTLPGIAPYTALFLSSHVGDVNRFPDSRHMCADLGLVPMLHQTGDTKVLGHITKTGNKWLRRNLVECARAAIKKDQNLRKFYLKLRRKRGEKKALIAVARKLISYAYWMLKRNLTYEELDPWSRS

SEQ ID NO: 97376 - protein, 414 aa, unidentified
MSLALREAKFFTGIDWAAEIHAVCVMDATGKIVAQFTIAHSADGIATLIRRLARFGDPAEMQVAIERPNGRLVDLLPEAGHPVVPVKPNAIKAWREGEVLPGAKSDAGDAAVIAEYLRLRQHKLTVAVPYSGRTRALRTVVRTRGDLVQTRVATANQLTALLEDSWPGAAVIFADIDSPIALGFLARYPTPASAAHLGEKRMAAFCSSHGYTGRRTAAELLERLRSAPAGTTDEAVTIGLADAVLALVTVLTALGAAIKNLDRSAAARLGEHPDGEIFTSLPRSGQISAAQMLAEWGDCRQAYEHPDSVAALAGVTPVTKESGKHRSVQFRWACNKRFRQAVTAFADNSRHASPWAAQIYHDAIAGGKDHSHATRILARAWIRVIYRCWLDGVPYDPAKHGAAATLANQTAARG

SEQ ID NO: 97377 - protein, 395 aa, unidentified
MFIVGIDVAKRSHEVCMITSDGRTVQRPFSIRNNCTGYNLMLEKIRKHTNIKSQIVFAMESTAHYWLALFTRLRKDGYHVILLNPIQTSAMRDMFIRKIKTDAKDSFIIAELIRFGRYAESNVAQDRLLALKELCRNRFYLVDMAGDLKRKLIALIDRVFPEYEAQFDTIFCKSSVAVLKKYPTPQKLSNAHLDKLTELLWNSSNGHFGEWKARELKELARNSFGVEDCDGAYSTLILLMLDQIQSLSGKADALEKEISRLFQSFDTTVTTIPGVGPIIGAVILSEVGDISRFSSADKLAAYIGVDPSVNQSGEFQAAHAHMSKRGSPYLRRCIWMASQVAVQRDPMFRAYYEKKAAEGLKYMTIIGHVTRKMTAVVFAILRDHKVYEPVLPTAA

SEQ ID NO: 97378 - protein, 338 aa, unidentified
MKVYAGLDLHATNTYVAMIDAENKVLYKQRHRNDVPSILSALDPFREDIQGVVVESTFNWYWLVDALMDHGYRVHLANVSAIKQYEGLKQIDDRRSSLWLANLLRLNILPTGYIYPKEERPTRDLLRKRLQLVRHRTSHVLSVKNILARNLGIRMKTYDIKKLKASEVSTLFADTEMRLAILSSIGLIQHFQEEIDRIETVLTKKFKVKEEFKKLLTVPGIGEILGLTIMLEVGHIDRFPTVGDYSSYCRCIRSIHTSNGKVTGYGNSRNGNKYLSWAYLEAAHFARRHHERIQRYYERKRAKTNKVVAIKAVSHKLARASYYVMRDGVDYDEARLFV

SEQ ID NO: 97379 - protein, 408 aa, unidentified
MDAVLECCAGLDVHQETVVACVLHGPLDKKPRKEIKTFSTVTSDLLALGDWLESHNCSEVAMESTGVYWKPVWNVIEAYSYKLVLANAQRIKNVPGRKTDVKDAEWIAQLLRCGLIEGSFVPQTDIRDLRDLTRYRRRLVHNATQEKNRIHKILQDANIKITSYMSDIFGVSGRNILEAIIAGKTLKAKQISKLVKSQIKNKIPQLVDALNGRLREHHRNMIKLSWDHLIYLENCIVEIEKEINQCASNYSEEIELLDSVPGIDISASACILAEIGADMSVFPSDNHLSSWAGVSPGNNESAGKKKRCKTMRGNKNLKAVLCECAWAASKTKDTRLSATYRRFVIRMGQKKALVALGHLILRIIYNILSTKQKYKELGFDYLKDIEKRKEERLVRTLIAKGYQVNKVC

SEQ ID NO: 97380 - protein, 450 aa, unidentified
MPSGESAPLMPQAWRAPVQVPAGVAVARSLQWSNSMSDRKRWYAGVDWASESHHVRLIDEQGHDVGEKIFKHAGEGLAEMAAWLLATSGGAEPGQIDVAIEVPHGPVVETLIERGFAVWVLNPKQMDRFRDRYSMAGAKDDSRDSLVMASALRTDPHCFRRLAATDPIIVELREWSRIAEDLGGERIGLTNRMRQQLWRYFPAFLDLEADLSAPWLIELWQAVPTPDKARRIREASIAAILKRNRIRRLAAAQVLEILRQRPLAVAAGTTEAARAHIVTLVARIQLINRQLAQAHHQLDTLTAKLGAAEETEPGQIKQRDADILASLPGIGRIVLATLLAEATDALQRRDYSALRSLTGVAPVTRRSGKSCFVVRRHACHRRLANAVYHWARIATQHDRTSRAKYAALRSRGHSHGRALRSVADRLLNVACSMLKSGTTFKPALAIQNDP

SEQ ID NO: 97381 - protein, 344 aa, unidentified
MNDTTIAVDVAKAVFEVAVSAQPGHVRERHRLSREGFGRLLRAQPAATVVMEACGSAHYWGRRAQQQGHEVVLIPPHVVRPYVRGNKTERTDTKGLLKAFRNEEVRAVPVKSETQQALAALHRLRSTWVATRTARLNTVRGLLREFGVVIPVGARQVVPHVRALLEDADAGIPGLLRPALAEAVAEIGELETRLRAVERHLETAAAGSLVVGQLRTVPGIGVLTATALIAAVGDVQRFPSARHFASYLGLTPREHSSGARRRLGAISKRGDTYLRMLLIHGARAVLWHAKRPSARPLDRLRTWALQLERLRGHTKAAVALANKLARIVWAVWTRGTSFTALPMA

SEQ ID NO: 97382 - protein, 344 aa, unidentified
MGQYVGLDVSLKETKVHVLDEQGQRVWRGRCASTPEAIEAVIRKHAPQAVRIGLETGPLTTWLWQALTDVGLPMTCLDARKAKAALNMRTNKTDANDAEGLAHLVRSGWYCEVRVKGREAMLVRSLLGARTQLLGIVTELSNQIRGVMKTFGLIVPKGGGRIFEANVRRLLEGEAAVAGVIVPLLEAWRAVRERTAVLDRQLLAAARASATCRRLMTAPGIGAIVAAAFVAAVEKPENFRNSRAVGVWIGLTPRRYQSGEVDYDGHISRRGDARLRALLYEAAVSILTRVQSESTLRRWALALKTQVGFKRAAVALARKLAVILHAMWKTGTDFDPRAAVPAAA

SEQ ID NO: 97383 - protein, 405 aa, unidentified
MSPTDFDFYAGIDWGSRSHTVCRIRADGRGRREREFPHSLQGLHALADFLGQDTDASAVAVAIELPRGAVVDLLQLKGFAVFTLNPKQLDRFRDRHTVSGAKDDRLDAYVLADALRTDRHKYTELAAPDEEALALRETTRRLETVQRELRRHTNRLWGCVNSLWPQLLAFCPGADEPWFWALLERAAEPQKAASVRRSQVRAILQRYGKRSVRAEDVIAVLKQGPLALRPVNEWLLLGDIATYLPIIATLFAQAELCERHVRELAAEGGRLVEIVDSFKGIGPATAATLVGEAGQLLAAGELAGLRMLAGTAPVTRRSGKSGIVTMRRACNGRLRNAVRSWARTAITHDPLAHAHYQALRERGKAHERALRGVGDRLLAALVAAIRRDELYDPTRRISKSVGLET

SEQ ID NO: 97384 - protein, 368 aa, unidentified
MRKGRIKVLLFFHFLTTAMLKYSLGIDVSKKDFHACLSVIDANQHVKVKASRKFSNSQQGFKELLLWLGTHRKEANVPLSIVMEATGVYYEFCAMFLFKAGLQVAIVLPNKAKMYIKAIGIKTKNDKIDAAGLARMGAEQCLELWQPMDEFFYTLRALTRHHQSLQELKTNIGNQLHADEHSIYSNKKVIKQLKKLITTIEKELLETSNEIDKQLSSNLEIAEKVQLITAIKGIGNITVATILAETNGFVLFRSIAQLVSYSGYDVVENQSGKHQGKTRISKKGNSHIRRAMHMPAFNMIRYDVGDFKPFFERILEKQHLKMKAYVAVQKKLLVLVYTLWKKNEAFMPKRSEAEKHTSGERELVPSFA

SEQ ID NO: 97385 - protein, 364 aa, unidentified
MSESRTVTIGLDVHAASVRLAAVRADELLEERTLPYEHQAVERAVRRWPRVRCCYEAGPTGFGLYRHLVARGIDCDVVAPGLVPQRPGDRIKTDPRDARKLAQLHAAGLLSPIHVPTPELEAARDLIRAREDARIERMRARHRLSKLLLRNDRRMPTTCWGVTRRHWLGQQRFEEAPRQAAFDDYLHALDLVDARIAMLERGIAALAADPAFAELVGRLRCLRGIDTLTALGIAAEVGDFSRFASAEEFMSFVGLVPSERSSGERRRQGSITKTGNAHIRRLLVEAAWSAGRRPQVGERLARRQHGQDPLVRARAWRCQQRLYRRWRRMTARGKPRQKIVVACARELAGFVWAIATEQPLRAEG

SEQ ID NO: 97386 - protein, 332 aa, unidentified
MRMHQQGGVASGGDRPNAGVDVSKHHLDVCVGDDARRVANEAEGWGELTAMLQAAQADLVVVEATGGYERGLVCALQGAGMSVARVNPRQARDFAKSMGVLAKTDQVDARVLRDFANVLARQEARHKYIAPMLEPAREVLAELMTRRRQLVDMRVAEHNRLEHAGKRSVGSITSVIKMLDKQIATVDRHIDDHMDHHFGSQRELLDSVKGVGPVTILTLTAALPELGRLGRRQIAKLVGVAPLADDSGSRQGKRRTWGGRADVRAVVYMAAIVAMRHNPVIRAFYERLVAVGKPKKVAIVACMRKLLTILNAMLRDQALWDATRHIQLEPKA

SEQ ID NO: 97387 - protein, 447 aa, unidentified
MGRVIVGVDPHKLSVTIEAVDADGKVLATGRFDTDSAGYRAMTGYVRAQWPHRVWAVEGAHGVGRPLAQRLLAQGETVLDVPAKLAARVRVFDTGNARKTDAVDAHAVAMVALRTPRLRPLGYDEELIALRLLADRRDELAHRRVQTVNRLHRLLTELIPGGAHKRDLSARQAKRLLATRKPRTLVDKTIRRMAAEEIADLVTVDTKLKTLKKELHAAVLARGSRLMELFGVGPAGAARILCDVADVARFPDRNHFASWTGTAPLDASSGEQIRHRLSRAGNRRMNHVLHIAAIVQIRHDTEGRAYYRRKLAEAKTPMEALRSLKRRLSDAVYRQLLADAQAADDAADRATDRATHGASPGGHSGASSQSSAADLSTPVIGSSDQPLPGPAATTLPATKTPAKTRTAPAPQPRRRRAGAVKMERPTGRTTLTATSAGAHSKEPNLLP

SEQ ID NO: 97388 - protein, 324 aa, unidentified
MNIPTLGIDISKAKFNVCLINPHDKLKHKVFPNTASGFQQLAEWLTKQHVELIHVCLEATGTYGEALALFLHQAGHSVSVINPAAVKAYAGAQLSRTKTDRVDAELIARFCHTQRPPLWTPPSAEVRELQALVRRLEALVEMRTAESNRLEAAITASAVRASIEEHLAYLDVEIKRTEHLIREHINSDPKLKQQSELLDSIPGIAATTAATLLAEVADITQYRSARQLAAYAGLVPRARQSGSSVRGRTRLSKIGNARLRKALYFPAVTALRCSPFFQFWAKGLRERGKCKMSVIGAVMRKLIHLAYGVLKTGKPFDPEWAESA

SEQ ID NO: 97389 - protein, 334 aa, unidentified
MSNVTTCGIDLAKNVFSLHAVDGCGVMVLRKTVSRARLAAVVSQLPPCLIGLEACSGAHEWARRFAQHGHTVKLMAPKFVAPYRRSGKNDSNDAEAICEAVSRPSMRFVPVKSVEQQAMLTLHRVRLGFVEERTATINRIRGLLAEFGVVLAQRAVEIRRGAAATLDQLPSLAQRALRDLLAHVRVLDERIAEYERELEQHARRDERARRIQKLSGVGPISASAIVASVSDAHEFKNGRQFAAWLGLTPKQYSTGGKTRLGRITAHGDPYLRTLLIMGARSMLQTALRRTDRLARWALGVRARRGYHRACVAIAAKHARIIWAMLAKNESLKLA

SEQ ID NO: 97390 - protein, 357 aa, unidentified
MRCIPTDAAGITLGVDTHKDFHVAVVLDGLGRRLGTLSIPTTPAGYEELVDWANGFGPMEGVGIEGTGSFGAGLTRFLQAEGTKVFEVVRPKRRDQYRSGKSDPIDAELAARAVLAGTATTQPKGADGKVEMIRTLRVTRRCAVKARAQSVNQLKNLLITAPEKLKSELWDLSTAKLVAKVSGFRPGVNPSDVQAATKFALRSVARRHQRLSEEICELDEQLDRLVAEAAPELVALEGVGTDTAASLLIAAGDNPERLKNEAAFAHLCGAAPIPASSGKSVRHRLNRHGNRDANRALYVIALCRMSRDERTRTYVAKRTAEGKTKKEIIRCLKRYIAREVYRILASLSLNKPPILAP

SEQ ID NO: 97391 - protein, 393 aa, unidentified
MIYVGIDIASEKHDCCILGEHNKKLESFSFSNTRDGFISLLAACKKYAEPEQTKIGLESTGIYGDNLRDFLRRNGYEIRTFNPLLIKKSIQATTLRKTKTDKSDASFLASYLARELPDPDPQISYHISELKSLTRARFSVVGACSKAKTQLKALLVQVFPEFHTAFSDVFGVAAIAILRKYPTAKKLSAAKKTAVAKILSEASRHRLGEEKAAMLIDLAKNSVGCHSETKALEMQYYLDQIELNTAYIRRYEAAIREIMNEIDSPITTIPGIGLVLGAMILAELGDVTRFATPEKVLAFAGLDPSIYQSGKYTPASGTMVKRGSPQLRWALLMAARSTIVHNPNIAIYYQKKLSEGKHYNVICSHIAKKLVRILYSLLKKNTPYSLFYPQISA

SEQ ID NO: 97392 - protein, 394 aa, unidentified
MITTKEEETSPSMKITTQKPRTAITPTVFVGLDVHKKSIVLAARVEHDPKWLLERTFCTSNLNKLRKALKKLSKHGEVKCCYEASGAGYYLYRLLREWGFYCEVIAPSLIPTKSGDRRKCDRLDARKLCAYFDSGLLTPVSVPDAEREAVRGLVRCRRQMKEDIVRAKHQLNHFLHTKGLIYRDGQNWSKMHRAWLARQKYPCSADQETFDFYFSTLEYRERRLEEIDKRIQEIAENHPAYRESVRLLRAYRGVGVYTAMVLLTELGDIRRFGSPSQLMSYVGLTPSVHQSGDSGNKAGSITKAGSARCRHVLVQAAWNCARRPTRSALLRKRQEDVPSWVVEHSWHAQKRLYKRFKHLEATVGRAKAVVAVAREFTGFLGYALMRQANGGEEL

SEQ ID NO: 97393 - protein, 346 aa, unidentified
MEHPTRIFIDTSKSIFQLHGVNAAEAVVVRRRVRRGQVLEYFAELAPTTVGLEACGAAHHWARELAKLGHEVRLVAPQHVKAYLKRNKNDGRDAEAGCEAMSRPTMRFVPVKSAERQAAQMLAGVRQRLVRDRTRLTNEIRSYAAEFGLVAARGLDKIEPLLARIEAAEGLPELARALLAELGEALARLEGQIERTERRLMAWHHSDQVSRRLAAIPGVGPIGAVMLTVKTPAPQMFRSGRDFAAWMGLTPKDHSTAGRSRLGAITRAGDEDLRAVLVSGAMAVIQQVKAGRSPPSPWLVDLLRRKEPKEAAVALANKTARIAWKLMISGQAYQAEPTGQAPMQAA

SEQ ID NO: 97394 - protein, 406 aa, unidentified
MNYSQRIVYGGVDTHLDVHVAAVVDHAGTLLGTSSFPTSPLGLRRLERWLARHGEVAKVGVEGTGTYGLGLTRVLQAAGHTVLEVNRPNRQLRRSRGKSDTVDAEAAARAALAGHATAIPKSHDGIAECLRVLRVADRSAKEQMTRIGGQLAQLIICAPEQVRVDLHGLSELKIARKAAAYRPGDDLTQVTAATKMALRTLARQWLGLRDDRAELRAQIQQLATRANPALLQLPGIGPDTAAALLITAGDNPQRLRSSAAFAALCGVSPIQASSGKQHRHRLNRGGQRQANAALHRIVLVRTSHHDPRTMDYIARRTAEGLSKRDIIRCLKRYVAREVYHALLHPDNGIDASTLRTRRNSLNIPMRTVAEHFQRPINAIARLEKGTVHDPDLTTRHHAWLDTQTAA

SEQ ID NO: 97395 - protein, 314 aa, unidentified
MATECFIGIDVSKETLDVHTLPDRNELQFANDPEGIKAICRKFSKLRPNLIVIEATGGLQIPVATALGLKKFPVVVINPRQARDFARAKGRLAKTDKIDAAILALFGKHMEPEVRPLKDEQTQELSALMSRRNQLIRMLVMEKNRFSRAYGSVRKDIEKNIGWLEERLSEIDTNLGKMVRASPIWRERDNLLKSVPGVGDVLSRSLLSNLPELGTLNRREIAALVGVAPLHCDSGKHRGKRRVWGGRSDVRSILYMAVLSAKKYNPVIRDFYNRLKEAGKPHKVAAVASMRKLITILNAMVRSGQAWAQCANAA

SEQ ID NO: 97396 - protein, 392 aa, unidentified
MTATHNHCTKAQPRGLYVAFELGWSEWKLASGAAPADNPRLRTLRARNLEGLQQELTKAKKRFGLADDAPVFTCYEAGRDGFWLHRYLAAQGITNLVVDSSSIEVKRRGRRAKNDRLDAGKLLSMLLRHHGGEGNVWSLVRVPGVEDEDRRQLHRDLLELKAERTQHVNRIKGLLAGLGLAVEVGADFPDTLEALRSWDGSAVPAGLRQRLLREHARWAFVGEQIREVETQRRQEIRGGTTAGVDRVRKLLELRGIGLNGAWLYVMEVFGWRQIKNRRQLGALAGLTPTPFDSGDSTREQGISKAGNRRLRALAIEIAWCWLQYQPQSRLSQWYRERYGSGNSRVRKIGIVALARKLLVRLWLYLERDEWPEGAEKADWQTKAKGAGQAVAG

SEQ ID NO: 97397 - protein, 414 aa, unidentified
MEQIHDRVAGLDVHRDSVVACVRATGPRGGAVADRERFGTTTAQLSHLKGWLTDRRVSLVALEATGVYWKPVYYAPEHRFAVWLCNAQHVKNVPGRKTDLSDAEWLADVVAHGMIRPSFVPPPAIRELRDLTRYRKSQIDARVAEVQRLEKALQEACIKLTSVASKVLTQSGRAMVEALIVGQRDPAELAELALGKLRPKIPALREALAGHFGPQHAVAARRIGDHVDFLDASIAALTEQIDARTESYRGVFQLLLPVPGFDRLTIDTVIAETGADVSRFPSPGHLAKWAGVCPGNHESAGKRRPVGVGPGNRWLRRALIEAARAAARTGGSYFGAQYRQIAQRRGPNKAAVAVAHSLSDLIWHLLSTGECDQDLGNDYFQRRRDPEREPMRLVRQLEQLGYRVTLTATPPPAA

SEQ ID NO: 97398 - protein, 351 aa, unidentified
MRTSQKTGGTITTIGIDLGKNTFHLVGFDQRGVIILQQKVSRSQLERRLANIPRCLIGMEACSGSHHIGRQLAAVGHDVRLIPAQYVKPFLKGHKNDYRDAEAIAEAVQRPTMHFVAIKTPEQMDLLALHRVRSRLVSQRTGVINQIRGFLIERGVIVRQGVVPLRKALPDILSSQTGPLSPRTIGLITDLAQDWRRLDERIVAVSTEIEALAEQDNGCQRLMTVPGIGPIISSAVVAAIGNGAGFKQGRDFGAWLGLVPKQESTGDRTILGKISKRGNKYLRTLFVQAAHVVLVRRPSAAMRGLWPWIEQASKRLHRNMLAIALANKLARIAWAVLARGRAYQPRITAHA

SEQ ID NO: 97399 - protein, 394 aa, unidentified
MILVGIDIGKNKHTFSIIDKNSGEILLSPSDFSNNLKGFLFLIQKLSSYTKSELLIGMEDTGHYHFALLKYLLDRRYTVALINPTTTDLTRKLQGGITKNDPLDSLTICDVISSNHRNKPYRVTTLNRFDLYEQKQLTRHHHNLKEELNTYKNRLQKCIDIVFPEFNSLFHSKYGIVYMNILKAFSSAKAIANADIRSIRKCFEFKGQGKRISLSAEQLKLTAKSSIGIPSVAEEIQIRHLVSQIELLEKQLSEIDKRIEEFSLKNNSPILTIPGISHFSGTSIISELGDICNYTKASQIIKFAGVAPYHYESSQFTAQHTAITKKGSKYLRKTLYQIILPVISNNEVFYAYYTKKLNEGKGHRCAQGHCIRKLLRVIYHLLCTRQPFNPKLLL

SEQ ID NO: 97400 - protein, 532 aa, unidentified
MSEVIAIGGDVSKGRVDVVFLNQSGTVLSGSGAYDDTHAGHERLRTHLRALEEAHPAAEIRVAVESTGGYERNWLALFRDERRRGKRIDFWRLNPLAVKKWLDSDLHRSVTDAHAARGIAAYLLARRPSFSEAEPTPHQMLYRLVRSARADRGVLEQQLQLSLGQVHPELVQYCRRGCPQWLLTLLVTYPTAAKVAHATPERLAKIPYLTAERASALKARAITSVASFVGEAAELSVGLLVERITAVDATIERYTKPLLAALANDPRVAHLDSITGIGAWTATCLLLEIGDVTRFASCRQLIAWAGLDAHDDLSGDGVIRRGISKRGNAYVRALLYMPTVSATASNPVIKTFYQRLCARGKRSDVALVAAMAKILRIAYALLVRGVDFDPAYETNRGERNQRVRQPAPDQTIPSQTTPPATTDNDLTAPISSREAARRRRARTDQQKAAAPITPYTGSKSQKATGTDRNHSLPTDHERATDQSAPRLAGGRHADAIPPTKDASEGPLKGPKRCRPPASRGADDHTRKAGFVT

SEQ ID NO: 97401 - protein, 347 aa, unidentified
MRFYNRQHRHYCGIDLHVKTMYICILDSAGQVLVHRNVPSTPAALLETVAPYRDDLVVAAECMFTWYWLADVCAAEGIAFVLGHALAMKAIHGGKAKNDKLDSHKIAVLLRGGMLPQSYVYPAAMRATRDLLRRRLHLVRKRGQLLAHIQNTRAQYNLPAFARRLAYPANRDGVSAQFADPSVRKSIDVDLALIDQYDTLIVDLELTIVREAKRHDADAFHRLRSVPGIGKVLALTILYEIHDITRFDRVQEFASYARLVKCQKRSAGKTLGTSGAKMGNVHLKWAFSEAAVLFLSRNAEGKRLLAQIQKKHGKGKALSILAHKIGRAVYYMLARGTVFSMEKFLHA

SEQ ID NO: 97402 - protein, 446 aa, unidentified
MLRDAIGIDPDSKGCQCAHVKLGECQTQQRGYLATEEDMERFIRWVKKQGDIIVAIEGSNGLSKPMEKALRSEGIVFYSFKASDIDKFRKAVLGQNKNNKKDAESTARYAMALEVQGKLDNWKRVWSPDEELQSLTRSYAQRTKESTREVNRLWKLLRGASVDLYLALGGEHPDIDISENILQNDGILALLSAKPDIYEWKTLSETDFLAVMGDYNYKGHDKLIKELKKVSRSFKPIPPTLSLMIKNSTEQIILLKKQLTEIKRMIEKLTKDNKAVKTLEKYRGIGTMTASTLTAEIVDIRRFVKEDNLASYAGLCKREYKTGKNEKEVPNCFFNRRLKNAFMTAARNYVLFNPDSHLAGYYRNLVKGGMKKTEARKRVARALVRVFFRDLYSLVEPNDQDKVEDEKIGKESDMANGISRSDKNHSNIPPSFPIRDSTEESEKIKG

SEQ ID NO: 97403 - protein, 370 aa, unidentified
MDEGIKFFVGLDVHKDTIAAGVAETGRTPARLVGNLPHDVGKLRKLLTRYGDPAQVHVVYEAGPTGYGLQRELSRRGYRCEVIAPSLIPKRAGDRIKTDRRDCLRLAELARAGELRSVWIPDPADEAIRDLARAREDAVNARTQVRQQLKAFLLRHEVRYPQRTSWSKTFYRWLATLSFEGAGAQTAFTEYWQAVTIADERVARLTQALVASIAGWRFESVVQALLALRGIDQVSAIGLVAEIGDIGRFAHPRQLMAYLGLVPSEYSTGERVTRGSITKTGNAHARRLLTEAAWNYRFQPRIGYRAQRRAEELPQALRDIAWKAQQRLSGRFARLRARGVQINKVCVAVARELAGFVWAIATARAKLPQS

SEQ ID NO: 97404 - protein, 359 aa, unidentified
MSTQRKEFSFKGQKIFVGLDVHLKSWTVTVLSEQSVLKKFTQDPSPAALYKFLSNTYPGAEYYSVYEAGFCGFWIHWELHNLGINNIVVNPADVPTMGGERLRKTDAVDSGKLARSLRAGELRGIYVPDSITTEIRSLIRLRDSLTKDQTRHKNRIKSHLRYLGIDIPAEFCNSGRRWTNRFVLWLKELKLETDYGRKTLDLLIAQYEDLRAQQLNMMKELRALSKNERFEQPLRLLMTIPGIAQVSGLTILSEIDDIARFKDSSHLASFVGLIPMCYSSGEHDGTGNLTVRRHAQLRWLIVESAWIAARKDPVLAAAYVEYCRRMKPSKAIVKIARRLVNRIYFVLKHQHPYVNCYVS

SEQ ID NO: 97405 - protein, 409 aa, unidentified
MRVMNCRCAGVDVHQKSVTVCTLSGEAGGEPKIEKRVFLSTTSQLLEMSDWMKEQGVSQVAMESTGTYWKPVWAVLEGDFDLTLCNAAHIKQVPGRKTDQKDAEWIADLLRHGLLKKSFVPPQPQQDLRELTRYRAQITADRSAVSNRIRKLLEGANIKLGSVASDVTGVSGRRMLEAIIQGESDPYRLADLALGQLKEKREQLIEALSGRVREHHRRMLRLLLAEWNFLDALVREIERDIEEALRPFCEAVALVRTVPGFSAVSAASLVAELGDRMEQFASTGHAASWTGICPGNHESAGKHYSGRTRSGNVWLKRTLCQVAWAASHTRCTYFAAQFRRLAAKRGKKRAILAVAHSLLIAVYTMLKNRCAYQELGADYFDKLNAEGLKRYCLRKLEAMGNRVVLVPAA

SEQ ID NO: 97406 - protein, 372 aa, unidentified
MASIIYVGMDVHTTNFTFCCYTVDSDRGFAVAQTEPDYRQVIKYMERVQKQRGEECKFVCGYEAGCLGYSLYHQLTRCGVDCVILAPSTMHQEKGKRIKTDRRDAENIARCLAFSLYSPVYVSTTEDDAVKEYIRMRDDIKADLKRVKQQIIAFTTRHGFAFDGKSYWTQKHLKWLETLVFEHPLYKETLQEYLILYYMLDEKVAVYDTRIGEMSHLEHYEENVQKLCCFRGVAAHTALSLLVEVGDFQRFRSAKHFAAYLGLVPGEHSSSDKQIRTSITKAGNTHLRRLLVEAAQSYNRGAIGKKSAALKARQGGNPAEVIAYADKANERMQRKYYRITFKSRHNIAKTAIARELACFVWGMMTGNISNAA

SEQ ID NO: 97407 - protein, 330 aa, unidentified
MLHAGLDLSRKRLDFCLLDEGGERVEVGAAAPDGDGLVGFVRRVREEHGDIPVCAAIESMNGARFVHDTLERCGWEVEIADAQKVKGLAPLACKTDKIDAWVLAELSRRDLVPAIWLPSFELRAERERARWRLYLVRKRSSLKHRVHAQLLAFGHRCPVSDLFGRSGRELLERLEFPEPWRSGVLAAVSMIDDLDGQITAIDRELKALGADHRYVPLLMSVPGIAWVLGYTIAAEIGDIHRFASPTKLCGYTGLCPKVYQSGSKDRRGQLTHAGPRYLRWALMEAAVHSAKHPVYRERYQRNKRRLGRLSSTVWSFALAVVRLRLRPSRP

SEQ ID NO: 97408 - protein, 328 aa, unidentified
MENEIHFIGIDVAKAKLDVDMLRPDGRHRSKKFANTPGGHDELVSWLQGHQVIHAHICMEATGTYMEDVAAHLSDAGYQVSVINPMLSKAFVQSQGIRSKTDTVDARQLAYFCREKRPAIWEAPHPVERALRALVLRHQALTEMHVQEQNRRESARDVQLPSIDMHLLWLDTELKRLEKQIKDLTDDDPDMKHRRKLLDSIPGIGPKTSAVLLAYVGLKERYRESRQFAAYAGLTPRQHESGSSIRRVSRMSKMGHVSLRRALYMPAMVTLYKTEWGREFRERLEKNGKNAKLIIGAMMRKLAQVAYGVLKSGRPFDATLHTKNACMA

SEQ ID NO: 97409 - protein, 331 aa, unidentified
MKFEEVIGIDVSKLTLDACIHSQQIFTQVPNTKKGYSKLLTWATKSTGCSMANVLFCFEHTGMYSYALACHMSEKQMNYIMVPGLEIKRSLGIQRGKNDRVDAIRIAQYAYRRREEVTTCQLPEKAINKIRQLLSLREKLVKQRAGYEATLKDLSDFIESSESKVLVGVQRNMIKALAREIDKVEKEIDSVLEASPDIMDNYRLITSITGVGRQTALYLIIVTNNFLSFDDHRKLASYAGVAPFANTSGTSIKGRTKVSPLANRKLKSLLSACAISAIRHDPEMKIYFNRRTDIGKHKMNSINAVRNKLLARVFAVIRRGTPYVPLCQYAA

SEQ ID NO: 97410 - protein, 340 aa, unidentified
MKEYIRIGVDLAKNCFQIHALESEGGRVTTRKLSRSAMRTFFAGIKPCLVGMEACGSAHYWARELRAMGHDVRLMPPAYVKPYVQRGKNDPVDAAACCEAVSRPMMRFVPVKNEEQQAMLMAHKTRDLLIKQRTMGVNALRGHLAEFGIIAAKGIGHVEELIEKAADAGLPEMARAALSVLVGQLAALDGAIADVTRQIARVHARDPISRLVASVPGVGALAASAITASAPDPSAFRSGRDFAAWLGLTPKQHSTGGKEKLGAITKQGNRSLRRLLVLGAVSLLRVAAKRKGSVRDWLVALRARKPGKVAAVALANKLARIVWAVMSTGEAFRTHTFGRA

SEQ ID NO: 97411 - protein, 391 aa, unidentified
MLQAPNGSQQASFEIPHTIEGFARLDVERAKFSLSAKECLVALETAHNLVVDYLWSRQYQVYVIAPAVVKGSRGRYGASGAYTDASSAHLLADLLRTDLARFILWQPDGLLVRQMRAKLSLIEALRRDVNRWSNRLLAVLLRVYPHPVDLFSKLTTQIGLHFLMAYPTPQATQGLSYEDFEAFCRQHRYPASRWPTLYADLQSPRPESDPAALLAYQDEIPFLARTLLPLVQHRLQLIREVKELFGQHPDHFIFESLPGAGDLLAPSLLVKFGDHRQRFPNAAIPQALAGTCPYTKQSNKKRVVLFRKACDHDFRRIAQQFAMESVKQSVWAATYWQEVYARCRSKSQAYRCLANRWLAIIWKMWQTRKPYDEAYHLKQRLLRRQPRSRKP

SEQ ID NO: 97412 - protein, 354 aa, unidentified
MNSVRYVGMDVHRDTISVAVLEESGRLMMQSVLATRAAAVLDCIRGMRGPLHVTFEEGTHSAWLYDVLVRRVAKLVVCDPRKNALLKWGSKSDAIDARKLAELLRAGLLSPVYHGETSALEVQQMARSYTQLTEDTTRVMARLKAVFRGQAVSCAGKKLYGKRYRQEYLRQLSSGLRRRAEHLYAELEALQPLRQAARRELMGECRKHAAAQWLQSVPFLGPIRAALLMGRVQTPHRFRTKRQFWSYCGLGLETRDSGEYRMVKGQVEHRRRPALIRGLNWNHNHEMKNLFKSTATAASVRPGVWREFYLQLLEKGMRPEMARLTLARKIAAITLRIWKKGETFNAEHLKLQAA

SEQ ID NO: 97413 - protein, 386 aa, unidentified
MEGEGMNWSGGYMIYVGIDIAKKKFDYCIIDSELSVIKRGILINNNYGFSEFLKIIKNYRNIKIGMESTNIYHVNLYNYLIDNNSSAIILNPLETKLLKSSRIRKNKTDKIDAEAIAKYIIIRKNNIIAMKKNNENTYTNLKEYVYTYIRINKKITMTKNQLIVDMDLLYPGLTALANISSKYFMEIISNIDQIIDNNYKIKYISERKYSEIRNILINSNNNNAVKYDIDINIETLELLNKQLIKTKSIIEDEYNSIDSKIKTIPGIGTITGSIILSSIGDINKFDSVLKLRAYSGMDPVVKQSGDYNITSKISKRGNPLIRYALYLSTISAIKFNPVIKRYYTRKKNDGMKGNKLMIACSNKLLNIIYSVLKNDKDFEDPLSEMN

SEQ ID NO: 97414 - protein, 355 aa, unidentified
MSEITRVGVDLAKHVIQVHAVDAAGKLATNRPLNRDKFMLWCAQLPAGCLIAMEASSSAHHWARKLVTLGLDARIIAAHLVSPYRMQGKGGKNDANDAAAICEAASRPMMRFVPIKTIGQQGMLCVHRLREGLKTERTACINRIRGLLAEFGLVFAQSPKALREELSSIIEDAENELAGIARLVIEQAQSLWQELDEHIEWCDKRIAGHLKDDVQAKAATQLMGVGPVTASAVVATVGDFKQFKNGAQFGAWLGLTPRQNSSGGKNNLGGITKRGDMYVRMLLIQGAKSAIMTAHKRDDPISKWAYQLREKSGWQKAVVALANKNARILWAVFARDKPFDANHVSMKPASAGAGV

SEQ ID NO: 97415 - protein, 341 aa, unidentified
MRFVGVDLHKKSISLCVMVQEPGGRRVIDRHRFACDDVESIAAYFHALGRYRVVVEATASYEWFVKLLEPTADRVVLAHPKKLRIIAESTKKTDKLDAQVLAELLALDMIPEAWRPTDRVRQHRSLVRFRRRTSRRLASVKNSLRRVLSHYNADIPRLFTRLGRKHLAGVELSAADRFQVDLLSEELDEYADRLKRIDAELAAFAERAPLAEQESRAVLATLPGVGAVTIDVVLAELGDPRRFRSQRKAVAFAGLAPGIRQSAGKSKQLSITKEGSPLLRWALVQAAWRVVRYTRRWQVPYERLKKRCGAKKAIVAIARRLLGVMVAMLNNGQAYRPMAPA

SEQ ID NO: 97416 - protein, 367 aa, unidentified
MEKSTKVFVGMDVHKESIDITLAEEGGEVRRLGQIGGDRGSLLKMVRRQQSQGGERVFVYEAGPCGFWIYRELAALGERCMVVSPALIPKRAGDHVKTDRRDSERLASLARAGELAAIHVPDIRDEAIRDLVRGRDDAVIAQRRVRQQLKALLLRNDIRYVGKTSWTGAHRRWLSELKLPEPAQQIAFEEYVDAIAVATARIERLTRAIGTEGIAWRFAPVVAALQALRGIQFVHAVTLIAELGDLTRFASARALMGYLGLVPRENSSGEHRRQGSITKAGNSYARRALVEAAWAYRHPARVTRIIATRQAGLPKAACDIAWRAQLRLSAKYRRLHARHLNHNKIVVALARELSGFVWAIGQCVKPQ

SEQ ID NO: 97417 - protein, 347 aa, unidentified
MGYFAGLDVSLEETAICIVDEAGLIVREARVASDPEALIAFFRATGMAMERVGLEACSLTAWLHQGLTEAGIAAICIEARQARAAMGAMPNKTDRNDARGIAQMMRTGWYRAVHVKNPICRSWRALLMARRMVLNKRRDVENGVRALLREAGLKIGTPSRKNFAARVEELAADDPVLAALAKSLLSVIDVMTREVDRLTRRVLDEVRVEPTCRRLITVQGVGPLTALAFRATIDRPDRFRRSRDVGAHLGLTPRRYQSGETDVQGRISRCGDELARTALYEAAHSLLIRSTKWSALRAWGMNVAKRRGMARARVAVARKLAVILHRIWSDGSEFRWGKQTSSPAVAA

SEQ ID NO: 97418 - protein, 407 aa, unidentified
MQLSALHKRVIGLDVHQAQITACALIEQADGTTRIEHRQFGAFARDRRELAHWAAALRPDEVVMESTGIYWKSPYAALEAVGIAAKVVNARHVKNVPGRKTDVGDAQWLATLSRAGLLNASFVPPANLRELRLISRERQKLVSQLARDKNRVHKILTDGGIRLNVVVSDIHGKSARAMIKALLAGAQPQQVLKLASRRLKASHQQLLDALQGNLTESHRFVLDELLEQIEHIEARITRFEARLLAALGPQHDILALLQTLPGVDLIGAAMLLVEIGTDMSVFGSPERLSSWVGICPGNNESAGKRKSGKMRKGNPYVRRLLCEFAHAASKTTSVFKSKFQALLLRRGYKRAIVAIGHKLVRTIFFMLNRREYYRDSAVNYEELAVRRNAPRWIKSLTRFGFIAPVSA

SEQ ID NO: 97419 - protein, 341 aa, unidentified
MAVAGMDTHKDTLAVAVIDGQGRELDRIELENSAAGHHRLVGWLRRFQLERVGIEGSGSYGRAVALAVHGAGFEVVEVPPQLTAQARKRQRSNAKSDPIDALLIARITLREPDLPLTRPDGDVEDLRVLVRYRRELRAERNRQANRLHADLVQLRPGYQRRIGRLTTERNLDRARRLLAGDDGVRARTARQRVTRLRQLNRQMAEVTAEVRQRAATIRSGLTTIPGVAELSAAELLAEIGDATRYRTKAQFAMANGTAPLPASSGRTQRHRLNRGGNRQLNRIIHYIALTQISRHPEGRTYFDHKKAEGKTTQEAMRCLKRRISDRIFQTLRDTRTPASAG

SEQ ID NO: 97420 - protein, 434 aa, unidentified
MRQQNISTPSTPPVYAAFVGLDWGDEKHALSLCAADATVIERTTLPQTPEALADWANVLRSRFPSGKIALCLEQARGALLAGLMQYEHIVPYPVNPKTLACFREALYPSRSKDDPIDADLLLDLLLKHREHLRAWQPDTVQTRQLALLNEQRRHFVDHRTALTNELLSHLKAIFPQALELVGQSLASRLATDFLKKWPTLQAVQKVKPAVLRQFYYGHNSRSQELITGRLERVKNAVALTSDPALLAVHSLAIQTLAGQLQALRPFLDQHEQQIAELFAAHPDAALFDSLPGAGSALAPRLLAALGSDRSRFPDALSIQCYSGIAPVTERSGKTQYWVHLRWSCPKFMRQSWHEFANCSLKFSTWARACYEDLNKRMDHHEAIRKLAYKWQRIVWRMWQERQPYDETRYLRSLQKRGLKIYADLVPQPIAPAGE

SEQ ID NO: 97421 - protein, 416 aa, unidentified
MSFALPEALFFTGIDWAAETHAVCVMSAAGKIAAEFTIEHSADGIATLTRRLAKYGDPGEVPVAIERPDGRLVDLLLEAGHPVVPVKPNAIKTWRDGEVLSGAKSDAGDAAVIAEYLRLRAHKLKAAAPYSDQTKALRTVVRTRGDLVEMRVAATNQLSALLDAHWPGAKAIFADVESPISLEFLTRYPTPAAAAHLGEKRMAAFCVKHGYCGRRTAVELLTRLRSAPAGATGEALTEALRDAVLAAVSVLTALNASVKALDRSAAAHLGEHPDSVIFTSLPRSGQVNAAQVLAEWGDARQAYEHPDSVAALAGVTPVTRESGKHRAVHFRWACGKRFRVAITTFADNSRHASPWAAEIYNHARASGKDHPHAVRILARAWIRVIRRCWLDGVPYDPALHGAAATLTKQTAEQIAA

SEQ ID NO: 97422 - protein, 403 aa, unidentified
MNSVGIDISKGRSTIAVMRPFGEVVISPFEVRHTDSELSELARQLKSLNGETRVVMETTGNYHAPVAKLLHDAGLYVSVINAKLVHGYGNKDLRRVKTDRKDAVKLANYGLDRWLALPRYVPEEDTRLLLKNCYRQYRQYSKVQTVLKNNLISLLDTVFPNVNRLFSSPARADGSEKWVDFVAEFWHCGCICERSKKAFVSKYQKWCKKHGYNFGKEKACAIYAEASGHIGVMPKSETTKLLVEQAVSQLRATSAALAALKHEMQSLASMLPEYPAVMDMFGVGLTLGPQLIAEIGDVRRFYSKKALVAYAGLDAPPNDSGDVTGRHKSMSKIGASSLRRTLFLVMSVYLQNAPLDEPVYQFMDKKRAEGKPYRVYMMASANKFLRIYYATVKAYLESLEHTA

SEQ ID NO: 97423 - protein, 344 aa, unidentified
MKLTTVGIDLAKNVFQIHGVDERGKAVLRKKVSRDQMATFFVRLEPCLIGMEACGSAHHWARKLQAMGHTVRLMAPQFVKPYVKSNKNDAADAEAICEAVTRPNMRFVPIKNTEQQAALSIHRARQGFVKARTAQANQIRGLLAEFGLIVPVGIAHIVTRVPELIEDATNDLTAPFRQLIDRLVEHFKELDRHVSELELQIKRWHRDNALSRKLEEIPGIGPITASALVASVGNATCFDDGRQMAAWLGLVPRQHSSGGKQLLLGISKRGDVYLRTLLIHGARSVVRMAKAKIAAGVAQPSWLHKLLERKHANVAAVALANKNARIVWALLAHGREYEAGYAMA

SEQ ID NO: 97424 - protein, 266 aa, unidentified
MWYVGLDVHFRQSTYCVLDEHGRKVKTETVKGPWDKVLLALARIKEPWAVCFEASTGYGVLWRRLQAMARRVVVAHPGHLRLIFRSKRKNDRIDAERLAKVLYLDEVPAVHVPGAEVLAWRGLIAHRNRLVKERTALKNGLRALLRGQGIVAPRSLWSRKGIAWLRALELPTLLDALRRDQLLERILTVHGQIHRVEQELNRIGEKHPGVTLLRTIPGVGMRTAEAVVAYVDDVKRFANLRKVGSYFGLVPQQDSSSTVNHLDHIT

SEQ ID NO: 97425 - protein, 282 aa, unidentified
MSLSTRTSQYHLYVGVDIAAKTLTAAWMAPGATPGRPLTVDQTPQGFATLQDRLLATGHPAATILVVMEATGSYWVGLATTLAQAGFVVSVVHAAQAHHFAKALLKRAKTDAIDAQTITQLAARLEPAPWTPPPAIYTELQQRLAQRDTLMTLRQQVRNQRHALQHLPVVIASVLERMEALIATFDAQIAAVEQEIEQVLSQDAAWATTATLLLSITGIGLLTAAWLLVTTLNFTICATAEEATAYAGLAPHPYESGTSVRGRAAIGHGGNGRLRTALYLRP

SEQ ID NO: 97426 - protein, 316 aa, unidentified
MENIKVETVVGIDVSQDSLDYFDSRTRHGASVEYSTASLQTFIESLGTNRPDLIVCEATGGLERRAVAQLVAAGFAVAVVNPRQVRDFAKATGRLAKTDRIDAQVIAAFGLAVQPTARLPKDEVAQHLDDQLRRRGQLIEMLTAEKNRLARASRPVIKNIKLHITWLERQIDNVDHDIDTTLKGSPVWQAKLDLLKDFKGIGPVTRASLMAWLPELGHLNRKQIAALSGVAPFNCDSGTLKGQRHIWGGRQSVRNVVYMATLVGVRHNPTLRAHYRQLRARGKAAKVALVACMRKLLVILNAVFRSGLPYVERATT

SEQ ID NO: 97427 - protein, 313 aa, unidentified
MTTASAWIGVDICKKFLDVGSTTGTPVRVANDADGRAALARRLKGENVRGVIVEATGGLERALVQALDAERVPASIVNPARVRKFAEGTGQLAKTDRIDAMILARFGAYMQPAPTLLPDAPRQQLRDLIAYRSQITREITARAAQVRLYAAPGLLERAKAAIEALRSERKALEREMEALIKSQDAMRALYRRLITVPGIGLIGAATLIAELPELGRLSRRKIAALAGVAPFPNESGDRRGYRAIRGGREEVRQALFNCARVAIEHNPVAKPFYERLRARGKSHKVALVATMRKLLTILNAMLKTNTDWTCKPA

SEQ ID NO: 97428 - protein, 314 aa, unidentified
MSENPEIFVGIDISKDTLDMGFQPSGQTVRLPHDAQGITEATRRLGEAALCLVVLEATGGLETPLAATLMAAGVPVAVVNPRQVRDYAKATGQLAKTDRVDALVLAAFARAIRPELRPMKDALTRELDALVTRRRQLVEMRVQESLRLGRASKVQEKSLKRHIAWLDKRIEEIEADLRQRLRASPAWRAKDDLLRSIPGVGDTTSATLLAKLPELGTLDRKGIAALAGLAPLANDSGKQRGRRVIWGGRADVRCVLYMSTVAAIRCNPVLRAFADRLKAAGKPAKVVIVACMRKLLSIMNAMLKSNLPWNPKIA

SEQ ID NO: 97429 - protein, 432 aa, unidentified
MEIINNHSAGIDIGSRNIYIGLSDSPVKVLGTFTKDFKEAGAYLREHNVTSVAMEATGSYWVILYDILIEYGLDVWLVDGRQTRQVPGRKTDVKDCQWIQQLHSYGLLNRCFVAEGDLKEVRSYQRLRDDHIRSASMHINHMQKALIEMNIRLPEVLDQIHGASGIAIIRSILTGERNPQILLSLCHSSIIKRKSTELLSALEGFYTKQGIFALRQAYEAYMFYQKQISECDNALSNLFSKINKGKSIREVSGRKAIRHHKPDIDELGKHMLDIFEGRDATILPGITDYSWMQIYSETGADLERWASEKHFTSWLGLSPGQNNSGKTKKRVNKKGKPAAGKIFRTLAQALLSSNKIAFGAFGRRLRGRKGPRIAVKAVARKIAAQYWRLMVKGKDFIEQGIANYQQILLQQKTKYLNKLALELNVEVMPMKQ

SEQ ID NO: 97430 - protein, 349 aa, unidentified
MLIVGCDYHPSFQQIAWVEMDSGEVGERALLHSTGEAERFYRKLKEQGVKVRVGIEATGHARWFERLLAELGFELWIGDAAEIKAKRVRKQKNDKEDARLLRTLLIENRFPRVWLPDASNRDLRQLLWHRHRLVQMRTRVMNQLQAVALNEGVRRKKGLWSKAGRAQLESFPLMPWATRRRKDLLELLDNLTPRIAALTAEVEEQAEQNREALRLMTHPGVGPLTALASVLIIGSPERFRCGKQIGSYLGLIPSEESSARRQRLGHISKQGNALLRFLLIEAAQAATRSNPAWRREFLHLTLRRGRQIAVVALARKLAVRLYWMWRNDGITRSHCNSVRTWGSPGPAMV

SEQ ID NO: 97431 - protein, 415 aa, unidentified
MLKIVYPICCGLDVHRDFVYACIATTVNGVTTYKSHRFSTFTKGLRELLSWLLASNCKDVCMESTGKYWIPVYNILETDCKIVLAHPKYVKAIRGKKTDKKDAKWIADIFKHDLVSGSFIPPADIRQLRDLVRYHAKLTNFTTGEKNRAQNCLTVSNLKLDSVFSDVFGKASSKIISHILANPSEKLSDVSAFRTKGMKATDEEILEAVDGEIYPEQAEKLRIIRDHMSSLDLCKANLQSLILSTAEKYIPEIDLVCTVPGIATFSAISVIGEIGVDMSVFPTSKHLCSWAGLTPQNDQSAGKKKTTRISRAGAYIKPLLVQCALAAVKSKNKHPEVYNRYSALKKRRGHKKATIAIARMLLTAIYNILKKHEPYNAEIYRKSDAPPEHRNVSVEEAIFILQRQGYLISSPVSIE

SEQ ID NO: 97432 - protein, 468 aa, unidentified
MKRKSRHAKQQKASLLSEDLQLIEPDAAAIDIGSRSHWVAVNPQRASEPVREFGTFTTDLNRLADWLTECRASSVVMEATGVYWVTLYELLEERGFNVYLVDAHTVRHLPGRKKSDVVDCQWIRRLQSYGLLQGSFRPPQQIRRLRTYLRSRSKVLECAAQQQLRMQKALTLMNIQLHHVISDLDGVTGMGIVRAIVAGERDAKQLARLRDPRIRASRETIEKSLQGNWQEELLFDLKIALESYDHFQTQIAAYDEQIRQELKALPSKVDLQKQPLGAPRPKSCRTRHGTTQQQQVDLRQELYRISGVDLTRIDGVSLQTAQKVLFEIGTDVSAWSDERKFSSWLGLSPNHHISGGKVLKRKSRKVINPLSIALRLAARTLRNSKSALGANFRRLIAKIGMPKAITAMARKLAVLIYRMLKYGSDYVDKGMQHYERKYQETKLQYLRRQAARLGMQLVPNQGVATSVH

SEQ ID NO: 97433 - protein, 433 aa, unidentified
MSKLEKIKLHAAGIDLGSEDFFVSVDGETVKSFKTYTNSLMSLAGYLVDHSIQTVAMESTGVLWLPLYDILESRGIEVFLVNAAHAKNIPAQKSDPADCRWLQRLHSYGLLRASFVPSDEIRKIRTYARLREDHQEIAASHIQHMQKAMELMNVKLHNVISQIHGASGQRIVQAIIAGKTNTVELAELCEPIILKNKRDLVIESLKGNYKEEYVFMLKQAYTAWQFYQQQIQGCDHKIEQILIVLTKGIAITNTGKASPSRHNRPDIANLHDKMVKLHNGKNPTVLPGITDTTMLKLTAELGCDLTRWPTEKHFTSWMGLSPRKHQSGKSNKIRRRKINTRAGQIFKESAMSIANSKYLALKGFYFRIKSKHGARAANKATARKLAVLYYRFMTKGMDYVEIGLKEYEKRYKEIVYKNLSKKANSIGYQLIST

SEQ ID NO: 97434 - protein, 242 aa, unidentified
MTDHTIGLDISKSRLDVFRLEDAAAQRFENSAAGFRALRKWLGEVPIARIVFEPTGPYHKAFEAALGGTFPLVKVNPLQARRFAEAHGTRAKTDAVDAQMLARMGAAFDLAPQAPRSKESLVLRDLHVARTGLIKDRTRLRNRARTQDIAVLKRQAMARLGQMERQIAELDAEIAALIEARETTARIRDILCSIPGISTVTAAVMLTLLPEIGALERKKVASLAGLAPITRQSESVRSFVYE

SEQ ID NO: 97435 - protein, 363 aa, unidentified
MEVAGRFIGIDLGKRTYEMCIVDQKGKITRTGGKTDFAGIDKLCEKLNADDAVAIEACNLAFRIERAIRKSVGCKVCIMNAGRLAVIYMSTRKTDKEDSMKLAKLLKNHDEDELPIVTPPSDEEWERRKLLSEYRSLKCQRTKEINKLHAIFEHNGYTQFVRKDMSSEKNRDNILPLLKGYEKEEAERLIERLTLLEKQIAQLLQKINAEVEKDEKIQKVMTVPGIGPITALAYVAYVGDVKRFDNAHQVSNFIGFVPKVDNSCTICRSGHTTKQGNPLLRSLLVQAAWATVKSKNGGALRDKYKYMAETRCIGKGKSIVTIARKLGELLYLILKTDQEYKPQKFITPEIRISRLAEEALEYS

SEQ ID NO: 97436 - protein, 343 aa, unidentified
MQIRSVGIDLGKTTFHLVALGDNGKVLLKKKFTQKQLIAFTANMQTSLIGMEACGGAHFLGRALRAQGHDVKLIPAQFVKPFVKSNKNDFIDAEAIAEAVDRQNMRFVPIKTDDQLDLQALHRVRDRLITRRTSVINQLRAFLLERGLVFAKSPARLRERMPEILENADEDLTPRMRNLLALLWSEWKDLELQIVAMNDDVEQIASSDPACTRLRQIPGIGPLVATAIVAAIGNGAAFHKGREFAAWLGLVPKQYSTGGKAKLAGISKRGNIYLRKILIHGARAVVLRSKRERIAMGSWLTALEARAPRNVLIVAAANKLARIAWAVLSSGEDYRAVQELVAA

SEQ ID NO: 97437 - protein, 405 aa, unidentified
MNSVGIDISKGRSMVAAITMTKEVTVKPREFEHTELGLEQLLDVLAPLTLEGETRVIMEATGRYHEIVASTLYEAGIYVSVVNPLLIHDYGNNSIRCVKTDRKDAMKIARYGVDNWGELREYTPVDSARQLLKLLSRQYNQYMKVLVSQQSNLIALLEKTFPGANDLFKSPRRDDGHQKWVDFVQVFWHSDCVIRLKEREFIERYQKWCKRKGYNFSEDKAFDIYVYAACCGYSLPKNSSTKALISVAVEQVIACSKSVAAIKAEMLKISAQMPEHKVVLSMFGVGDITAAQLIAEIGDVRRFNNRGALVAFAGVDPSTFQSGKYASKSGKATKRGSAHLRKTLFQVVGAYLKRSPADEAVFQFLNRKRAEGKHFYVYMTAASNKFLRIYYARVKAFMESLDHNN

SEQ ID NO: 97438 - protein, 335 aa, unidentified
MRYVGLDVHYGTSTYCVLEANGQELECETVRGHWPKLLERLRTVAGPWTVCFEATCGYGYLYRELSRLAQRVVVAHPGQLRLIFRAKRKNDRIDARKLAKLLYLDEVPAAYVPNEEVQSWRELIEHRRHMMDRQTTCKNAIRSLLRSHGKIAPKGLWTRKGLAWLRQEEMPTPAACLKRDLLLDELSEAKRRVRTVSKVLDKSGERHPGVLLLRTIPGVGIRTAETVAAYMDKAERFNRCNQVGAYFGLIPCQDASAGVNRLGHITRQGPATARKYLVEAAWQGVYRSPTIRAYFERVLHGRPERRKIALVATAHYLLRCMHAMLVRNQPWHEAA

SEQ ID NO: 97439 - protein, 455 aa, unidentified
MPPKKGSPGFSIVHPHAAGIDIGSTFHVVAVSPDCDPTPVRQFQSFTTDLHSLSQWLWELGITSIAMESTGVYWIPVFEILESDGFEVILVNAREVKQVPGRKTDYNDAQWLQKLHQFGLLRASFRPSEHIASLRAYLRHRERLIEYSAAHIQHMQKALMQMNLQLHHVVSDITGATGMKIIRDIINGERSAAKLANHRDIRCKASEKTIAAALTGNYRDEHIFALKQAVELYDFYQERISECDKQIEQNMAMLNQKRVTPDVPLPKARHRTKQHNEPDFAVRSALYTLTGLDLTQINGFGPYTALRMIGECGDDMSKWATEKHFVSWLSLSPGNKVSGGKILSSKTRRTKNRATTLLRIAAVNVGKTETALGAFYRRLAGRIGKAKAVTATARKLAVLFYSMMKYGKAYVEPGAVYYETQYRNRVLSNLKKRAKRLGYELIANPAPEILCAEVS

SEQ ID NO: 97440 - protein, 400 aa, unidentified
MLSIGIDVSKGKSTVCGMKPGGEIVYTPFEVQHTREGMSELVSLLRGSGEEVRAVLESTGSYHCPVVAALLENGIFVSVVNSLRMKRFCSQSIRKVKTDRIDAMQIALYGLAYWQELQPTRLPEDTYRELQLLARQYYQMTSMLIKAKVDFNALCDQVLPGMQELMNDHAGRHKLSDFVLRYRHTTHILEMGETRFQKDYCKWAEKKGYRNCERMAAHIFATAQNGIPVLPNAPSTQIVITEAIRVLHTVEASRDAILTQMQALAKTLPEYSLVREMPCIGDTLAPRLIAEIGDVRRFHSKRALIAYAGIDAPPYQSGKFRANNRHISKRGNRYLRKTGYEVMQSYVMHKPANDPIFTFIEKKRSEGKSGKLAMVAGLNKFLRVYYGKVTELYRSLPAIE

SEQ ID NO: 97441 - protein, 421 aa, unidentified
MLTAEWFVGIDWATDTHEVCVLDRAGRIVDRRAVPHTAPALQAWIDTLLERAGGDPSRVAIGIEVPRGALVELCVERGCPVYAINPKQVDRFRDRFTVAGAKDDPRDAHVISDALRTDPQAFRAVRLDHPLVIQLREWSRLDEDLREEVSRLTNQLRDLVYRAMPGVLTVCPAADEPWFWALLAAAPTPTAQRRLSEANVRHLLRDHRIRRVSAPALHRVLQQPPIYTAPGVVEAVAAHIALLVPRVQLVARQRQEAEQQLARVLDALEAERPPVGDQREHSDVAIVRSMPGIGTRVAARMLAEASQPLVDRAYHVVRMWMGVAPVTKKSGRRRRGIVTMRYACNRHLREAAYHWGRTAAQHDSATRAYYQALRRRGHSHGRALRSVVDRCLRILFGLLKHGQLFDPMHAQRSPLAVGAGA

SEQ ID NO: 97442 - protein, 347 aa, unidentified
MRFYTTQHPFYCGIDLHARTMYVCILDQSGEIVLHRNMKTDPETFLKAIAPYREGTVVAVECMFTWYWLADLCADAGIPFVLGHALYMKAIHGGKAKNDKIDAHKIAVLLRGGMLPQAYVYPAPMRATRDLLRRRMHLAHKRAELLAHVQNTNSQYNLPAIGKKIAYKATRDGVAERFADPAVQKSIEVDLALITYYDELLGDVERTIVNTAKHHDANTLYLLQTVPGIGKILSLVLLYEIHDITRFPRVQDFLSYCRLVKCAKESAGKRLGTSGAKIGNAHLKWAFSEAAVLFLRDHPAAQKYLARLERKHAKGKALTVLAQKLARAVYYMLQHQGAFEREKFFQR

SEQ ID NO: 97443 - protein, 370 aa, unidentified
MNYNTVYVGMDVHKETFSLCCYTNEKEQAEYPQKVDAHYSKVLNYLEAMRFHYGDDVMFICGYEAGCLGFMLYHQLTSHNVKCIILAPTTMSKPTGKKKVKTDKRDAALIARCLAHHDYSPVHILTEQDEQVKEYIRMRQDHKLALKKIKQQILAFCLRHNYRYDTTKSHWTQAHLTWLRSLEPEGLYQEILTEYLATYDQLTDKLERLDKRIEELASKEDYQENVSHLSCLLGVKTQTALSTLVEVSDFKRFASAQQFASYLGLTPGEDSSGEDQNRLGITKAGNSHIRTLLVEAAQSYTRGKPGYKSKALKARQNGNPADIIAYADKANERLRRRYYQLVLGQHKKANVCSQNSNRQRTCVLYLGHDD

SEQ ID NO: 97444 - protein, 398 aa, unidentified
MYAVGIDVSKGKSNVAILTTEGEIIEEPFEIIHDRNGLNYLLEKVKKYKKDEIKFLMEATGHYHLPILNELIENNYFVCIENALVVKKYCDLDLRKTKNDKKDALKLANYCSEKWFKLRKFEIIDNVRIQLSFLSRQYSNFVVNQTNLKLQLTNMVDKTFPGIKKAIDDENRYNLFLDIYEKYSYPENVLKLSEKEFINDIDFMAKKYRHKVGKTIGKNIYDLAPNVVTSCPYNESIQLVINSCILLLRETLKVTNDIITKMDELAMQLEEFNTVKEMKGVGPKTRARLIAEIGDVRKYTNANALIAKCGIDTPQYQSGTFNSENRHITKRGNKYLRKVAYEIVKSIKSSKPKEDNAVYLFIIKKEQEGKPKKVAKVAGMNKFLRIYYARVKELYNNC

SEQ ID NO: 97445 - protein, 336 aa, unidentified
MSHYCGIDLHSNNHLVVVIDEDDKRVLEKRLDNDLSLTLETLSPFRESLHGIAVESTFNWYWLVDGLQEQGYDLHLVNTMAVKQYDGLKYSGDRHDAFHLAHLMRLGILPTGYIYPKEQRAVRDLLRRRLFLVHSASAQLISVQSQIWRTTGRRIRSADLRKPDFIASGVEGYTLQAVEAGLAVYQAVQREIDALEQSAQQAVRLSNDFKILQTVTGIGKVLGLTIMLETGTIERFAGPGNYASYCRCVDSRRDSNGKKKGEGNAKAGNKYLSWAFSEAAHFAVRFEPLAQRFYERKKARTNGIIAIRAVARKLARATWMMLKHQVPYDARLMFPG

SEQ ID NO: 97446 - protein, 392 aa, unidentified
MINIGIDVGKFRHCASVLDDRTGEWIYVPFFFTNDKAGFESLYEKIKPYLNRKHAVGMECTGHYMYNLSNFLLEKKCTVMYINPRATHMRRIELGRAAKNDKLDSKMISEMLSEKHFWQHVTEHSLELDELRELTRVYHQLVEQQNQDQNRLQRALDIVFPEYTGLSWKSYGTAYMNVLRRYPSAAIIASTDIRSLRSVLATKGRGRKSSVTAEILKSAAKDSIGDAHNVAVELEIQSVIAVIEARAEQIDILEKKIEEFSQQLNSPITSIPGIGSITGMSILAEIGDITRFSDASKLISFAGMAPGVYQSGSYDAARLPISKHGSRYLRKALYQAVFTVCNYSPIFNKYFSGKQSQGKQYRCAQGHAVRKLLRVIYKLLSTGTQYDPALCL

SEQ ID NO: 97447 - protein, 423 aa, unidentified
MDILYERVAGLDVHKDTVVACVRILAEGNTRRECRTFATTTDQLMELRTWLEECRCTQVAMEATGVYWMPVFRILGEGSFELVVANAAHIKNVPGRKTDVNDAMWIADLLACGLIKASFVPSEEVQELRSLTRTRKQLVREQTRHVQRIEKTLAEANIQLGSVISDIMGASGRRMIEAMIKGVRQPRQLAELAGKQIKATPKELYDALHGRLTDHHRFLLELHLKQWDGLDETIRKIDREIDQRIAGMHTKAGSGEVPFRTLIELLSTVPGISTVSASAIVSEVGCDMSRFPSAGHLVSWSGLCPGQNESAGKRKSSRLRKGAPWLKTMLVQCAWAAKRKKDSYYRAQFFRLQSKRGPQKAICAVAASILTAVYHILKDGTEHRDLGAAYFDRRPVEVKTSRLVARLKKLGFNVQLQPATEAA

SEQ ID NO: 97448 - protein, 339 aa, unidentified
MKLYSGMDLHSNTTQVGIMDETRKPVIDRKLRNDPELILKFLEPYRADLEGIVVESTYNWYWLVDALQEGGYRVHLAHPVANQQYRGLKHSDDRHDAFWLAELLSLGILREGYIYPKELRSVRDLLRKRLQLVRYRTALLLSVKNMIHRNRGVIVEASQIKRLTQDVVSPWLEGDEALGLAGQASKEAMDCLSRQIQQIERWVLKQLRLEQQFSNLLTLPGVGEILAMSILLETGPIGRFAKVGHYASYCRLVSSQYTSNDKIKGQGNVRNGNRYLAWAFSEAADRARRYSALCRDFYNRKLNQRGTKVAHKALAHKLARAAYFILRDHDVYREEKMFS

SEQ ID NO: 97449 - protein, 312 aa, unidentified
MAMLSFCGVDVSKDRLDVVVLPEGWFFSVSNDTAGWAELVVRLRPLTVSAIGLEPSGGYERGIIRALLAAGMSVRRINPNKLRQFARARGVLAKNDRLDARLITEYVAIMPTRVVQRDAAVERLAEIVTMRRQLCDEHVAAENQSAHLEDAMLRRLSKRRQTRLEADIRLLDKRLAEMVAANVALAQRYELLTSMPGVGPVLAFTLIALLPELGKMSRKQIAALVGLAPYDFDSGKLKGHRSIYGGRMSVRNVLYMAALSASRYSPALKAFHKRLADADKKSKVIIVAVMRKMITTLNAMLRDNAAWQPQST

SEQ ID NO: 97450 - protein, 420 aa, unidentified
MAFKIFRFNCCGLDIHKTWIFACIGLTDANGRTEYKEKRFSSFSRGLRELAAWLASYKCTDVCMESTGKYWIPVFNVLEKTCNVVLAHPKYTKPQKGNKTDRKDAKWICDLYMCEMIKPSFIPPANIRHLRDLVRYRFKLTNMLTGEKNRAQNCLTVSNLKLDDVFSDVFGKSSRSLTEYILDHPGETFDVTPFIDKRCKTPIEEIQAAVDGAVSPEQAVKLRQCLDHIDELEKHKEEMEREILRVSDPYLDALELIRTVPGLDKNPFTAIQVLSEIGGDMSVFPTDQHLVSWAGCCPRNDQSNFKIKSTRISRAGSYLKPVLVQVANALIKSKKHPEITERYRRIKSHRGHKKAIIAVCRMLLTAIWHILTDLKPYTAEGYLSPRPVKEDKILTTSQALSLLKLRGYVIKDDDSTVTAS

SEQ ID NO: 97451 - protein, 359 aa, unidentified
MQEQIKTLNFEGQNIFIGFDVHLKNWQVTILTENMSHKTFVMPAKPEILKNYLQNNFPGGTYYSAYEAGFSGLWTHYQLKALGINNIVVNPADIPTTQKEKVQKEDKRDSRKIARSLRSGELSPIYIPSESTLDDRALVRTRSMLVKDMTRFKLRIKSFLYFYGIIFPPEFERRSTHWSGRFMKWLDGIPMKEQSGRQALDTLIEEARNQRKLLLETTKKVKKLSETEKYSHQVILLRSIPGIGLINSMVILTEVEDIKRFTKDEKFASYVGLIPTSHSSGDKEKMGEITFRSHDFLRKAFIESAWIGARCDPSLLMTYQQLCKRMEPNDAIVRIAKKLLNRVYFVLKNKKKYEYNRTS

SEQ ID NO: 97452 - protein, 347 aa, unidentified
MMIAVLGIDLGKNSCSVAGLDETGRVILRRRLTRDGVVRLAGKLPACVMAMEACCGAHHLGRVLREQGHEVRLMSPEYVQPYVKAQKNDERDAEAIAEAATRPTMRFVELKSEAQLDAQILHRARSRLVGQRTALINQLRAVLLERGIVVAKGRRRLETFLTETLDPEAEPPSTLSARTRLLIEDMRLEWGDLDRRIAALTAEFVARAREDQAARRLVSIPGFGALNATALVAAIGTGETFRSARDLAAWLGLVPRQATTGGKPRLLGITKRGNTYLRTLLIHGARAALPSLSAGPTAMGDWLRGLLGRAHKNKVVVALAGKLARIAWAVLRSGEGYAATTGRPVVA

SEQ ID NO: 97453 - protein, 354 aa, unidentified
MEQIIKQCAGIDCAKKDFAVTFSVCDAMHEVQHLSSRTFANDELGFKAFNKWVGKFYKRSIPMSFVMEATGVYHERLAYFLNALGYQVTILLPKRAKDFSKTLKVKKITDKIASQYLAIMGLEKKLDVWNKPKKEYLDIRHLSREKERIQHQISQLKNQMEAETSGAHPGKKTIKRINEILKLLKKQKKEVLTEMEQVINGNEELKEKVRKITTIPGIGLMTAATVIGETDGFNHVKNKRQLVSYAGYDIINHESGTSIKTKARISKRGNRNIRKAMHMPALTSIRREINSKNLFIRLVTRTGIKMKGVVAVQRKLLVLIYTLWKNESEYDPDYESKKGGSFTPPHELDQVRSL

SEQ ID NO: 97454 - protein, 347 aa, unidentified
MNHYAGLDVSLEETAICVVDSTGQIVKEARAASEPETLIAALREIDLPLERVGLEACSLTAWLHDELHSAGLPAVCIETRHANAAMKTMPNKPDRNDARALAQIMRTGWYRQVHVKSRQCRLWRSLLVARRTVLNEMRSIENVVRAVLREGGLKLGTPSRAAFAERVRDLMAEDASVKPLVDPLLTILVTMLDQFARLTKQVLDIVRREKVCRRLMSVPGVGPITALAFRATIDRPDRFRRSRDVGAHLGLTPARYQSGETDVSGRISRCGDELARTALYEAAHTLLVRSRKWSSLRAWGMKVAKTRGMARARVAVARKLAVILHRMWSDETEFRFGRNPAAALAAA

SEQ ID NO: 97455 - protein, 411 aa, unidentified
MDVVVACCAGLDVHQASVVACVNSTGRDGRSHKEVRTFATMRDDLIALHDWLKDAGVTQVAMESTGVYWKPVYAALEDDFDTIVANAQHIKNVPGRKTDVKDCEWDSDLLRHGLIRRGFVPPREIRDLREVNRYRRKLAQVQAGERNRLIKVLETAGIKLAGVASDVFGVSGRAMIRALIEGEATPEAMAGLARGKLRGKRTHLARALDAPLQPHQRLMLRTQLARIEQAETDLQRLDVALTEMIAPYHRQMRLLMSIPGVEWINAVTIIAEIGVDMSAFVSAAHLASWAGLCPGNNESAGKRRSGKSRKGNVFLKTALITAAITGSRRGGGSYLGEKYRRLSARRGKLRAAVAIAHKILVSIWHMLTEGTFYQDLGAAYLDRLDRTRTARNLVRRLAAMGFDVQLQEKAA

SEQ ID NO: 97456 - protein, 367 aa, unidentified
MKKTSTAAVKATKNFSPRKLTIGLDLGDRSSWYCLLDEAGDVLLEQKLATTPKAMREGFGAIPRCRIALETGMHSPWVSRVLTELGHEVIVAHARNVRLIGESRKKDDRLDARTLARLARIDPQLLCPVKHRSAQAQADLTVIRARAGLVRSRTALINTARGLAKSYGERLRGCAPRKVNPEKAQGLSPELQAALAPLLAASEALSERIQEYNQQIAKIARESYPQVARLEQVKGVGTLIALTFLLTLEDAHRFRKSRDVGCYVGLQPGRRNSGQSEPQMHISKEGDPYLRTLLVQGAHHILGPFGVDSDLRRWGLKLAERGGKNGKKRAVIATARKLAVLLHRLWVSGEAYEPLHNSNPAALPAAA

SEQ ID NO: 97457 - protein, 424 aa, unidentified
MTQTSPDTFAAFVGIDWADAKHDICLQAAGSAKRECCQLAHTPEAIDAWVTTLRTRFGGRLVAICLELTKGPIVSALCKYDFLVLFPLNPLTLARYREAFTPSRAKDDPTDAELQLELLLTHRDKLPALQPQSSTMRALAQLVEHRRRVVGDKVRITNRLTSTLKNYFPHVLQWFQDKDTHIFCDFLSRWPSLKAAQLARRSTLETFFHDHHVRGGDVLAKRVHAIKTATPLTADEGVIAPNTLLVQALVSQLRVTLDAIEAFDQAIAQHAQRHPDFPLFQALPGAGPVFASRLLVAFGEQRERYPSAAALQKYAGIAPVTERSGKKAWVHWRLQCPKFLRQSFVEWAAESIRHSFWAQVYYQQQREKGKAHQAAVRALAFKWIRILYRCWQERTPYDESIYLQALSRRGSSLLHHRAKEAGKP

SEQ ID NO: 97458 - protein, 400 aa, unidentified
MMTPDDIDVWVGLDVGKSAHHAHALDHDGNTLYDKPLKQDEKAIRTMLGKLSKHGRVLLVVDQPNTIGSLPLTVARNMGIAVAYLPGTAMRRTAQLLPGDAKTDRRDAHVIAWAALKLPETLRDAGPDDETLAALKLLAGHDEDLAHESTRHVNRLRSLLLQTHPAFERALKGERITRDATLALLERYGGPMGVKRAGIEDVKDWAKSNGLRAGRIIDDMFKAIGEQTVTVPGTLMAETIIPSIAHDIKTIRDRRREVGRQVEKLLEDHPLLTVLTSMPGIGVRTASNILLGIGGDIANFKSSAHLAAYAGISPVTGQSGTSIKGERPSRRGNKRLKNALWQTAFVTSTKHPPSVAYYKRKREQGKHHNAAVICLARRRCDVIYSMLKNGVLYQEPALVA

SEQ ID NO: 97459 - protein, 344 aa, unidentified
MGEVATIGLDIAKSVFQVHGIDAEGVVVVERRLTRARVLPFFEKLAPCLVGIEACATAHHWARQLRALRHEVRLMPPAYVKPYVKRQKNDAADAEAICEAVTRPSMRFVEVKTLEQQSVLVLHRTRQVLVRQRTQISNAIRGHMGEFGLVAPMGRNGLQTLIEIISNKADRRVPEAARECLVMLVDQLQLVDAQILETSRRIMASARATEVGRRLMDIPGVGPLLASALVAIIPDPHAFRSGRNLAAWIGLVPKQNSSGGKERLGGISKQGDRYLRQMLVVGAFAVIRYAKRQGSRRPWLVQLMARRTTKVAAVALANKTARVIWAIMTSGQPYREPRVATAQD

SEQ ID NO: 97460 - protein, 458 aa, unidentified
MGRSKSTDRVRRAMAMVHPNAAAIDVGATTHVAAVKADRTPEPVRSFGTFTKDLHRLVDWFAECGVDTVVMESTSVYWIPIFELLDSRGFAVFLVNARDAKHVPGRKTDVSDAEWLQRLHSYGLLRASFRPKGRIVELRAYLRQRERLLEYGASHIQHMQKALTEMNVQLHHVVADITGATGLRIIRAILAGERDPAVLARLRDSRCHATVETIEKALTGTYRAEHLFALEQALALYDTYQEKASSCDTRIEAVLKELSIRRGREAGPLPSPRQRMRRQPNGMDFDVRAALYALLGKDLTQINGLGPYLALRLIAECGDDLSAWPSAKHFTSWLCLAPSNKISGGKVLSSRTRPSASRAAALLRLAATTVGRTDTALGAFYRRLSARIGKAKAVTATARKIAVLFYNAVRHGMEYVDPGASFYETRYRARVIDNLHRRAKAFGFALQPLKPTAAIPVS

SEQ ID NO: 97461 - protein, 462 aa, unidentified
MHKRGNKGRRKSNKPSPQSLPVIRPKVAGIDIGSREHWVCGPALQDGGVNVRVFFTTTSSLNQLADWLIEQGVESVAMESTYVYWIPVYELLESRGLEVVLVNARQLHNVPGRKTDMQDCQWLQLLHSCGLLRGSFRPGESICRLRSLHRQRCNLIEQRSRTVQWIQKSLDQMNVQVHRAVTDITGKTGMLIVRAIVDGERDPLKLAAFRDQRCKKTEEEIAEHLTGNWRDEHLFNLASALRLYDVLQAEAELFDQHILEVLIELQPPQRRHDNVPAHPNPQKRYDIKHRGEQAQRNELWRFAGCDLTQIDGISPSTAAIVLTEIGIDLSDFPSEKHFVSWLHLAPRRPISGGKQLHKRRNGTGSNRIAGALRIAALSLSHSKTALGAYYRRTARRKDGKTAVFATARKLAQLIFRMLRYGQDYIDIGERAFEEHFRQNHLIGLRRAAEALGYTLTSHASGG

SEQ ID NO: 97462 - protein, 360 aa, unidentified
MTSMATTAVLVTGGVDTHGHTHHAAVLDYMGRQLGDREFPTSPAGYRALLQWMSGHGVLDRVGVEGTGTYGVGLARHLREAGVHVVEVDRPDRRARRAQGKSDPLDAYSAARAALSGRASVVPKVRDGKVEAIRAIRVARSSAVKARTQATNQLKALIVTGSPGFRQQLRHLSTPLIIAHCARLRPSPDLGDPEQATKTALRRLARRHQQLSEEITEADRELHQLVRDVAPALLDLPGVGSEVAGQVLISIGDNADRLKSEAAFAHLCGAAPIPASSGRTHRHRLNRGGDRSANNALYVVVLGRMRHDPRTRAYVARRTHEGLAKPEIIRCLKRYVAREIYNTLNLATPARKPEQLLDRP

SEQ ID NO: 97463 - protein, 408 aa, unidentified
MEQNIVFGIDVSSHSSTVCVVIDRIKQGEPFIISNDSFGYQKLLDHLNCYLITPLVVFESTGVYSLSLQAFLEENHIKYLKLNPLKAKKLMDNNLRHNKTDKLDAYHLALIEFCAPQKLREPQPKEYHEMQNASRYFEELTKNLIVVKNQLHRNLQSTFPQIESIMSNSTGKVYWTIVSLFPHAQYVLESNETRIYQELLSIPGIGKQRARYLTARLYSLAEQAYPYDSRDSITVRAIQRNISDLFSLSEERDNVINYLEKLAKIVNSRALTIYQSIPGIARTTALRLIAELGDLRRFDTSAQIDAFIGIDPGRYQSGEMDNHLGITKHGNHIARKILYRVIGQMESTKLSQPCHITDYYDNKKQSSHSRGYKKIAIASVHKLIRTMFALIKQNQLYDYNVATKNKRL

SEQ ID NO: 97464 - protein, 357 aa, unidentified
MKQSSCLDFSGTIIFCGVDVHKTNWRVNIQDQEFELEDFSQDADVVLLHKHLVRKYRGADFKVCYEAGFSGFSAQRYLASKGIECLVVNAADVSTTDKDKRRKTDKIDARRLCDHLQSRKAKGVYVPLAAWEHSRSLVRSRCRIVSDQTRCKNRIWQLLHFSGLKLPKGYNCTQYWSKRFLNELEALDCGSRALKTSLDLYIANYRQTRTLLLTATRAIRQMCAHQEYARQVALLKSIPGVGQINAAVMLFELQQINRFKHIDHLNSYAGLIPDIAESGDNKVVKGITNRANHFLRAALVESSWAVIRKDPALLMKYKEYSKRMNKNKAIIRIAKHLLSRIMFVLKNEQEYVTGVVQ

SEQ ID NO: 97465 - protein, 401 aa, unidentified
MKTVLSVDVAKNKSMIMLMNSDGEIFIDTKEINHNLEDFEKVKEEIKEINPQNLTVFMESTGTYHLPVERYFKENGFNTLVINSLTTKNNYDTIRKTKTDKKDCYRLAKLFFVNEVEYHDLSKKDLYANLKAMTRQYFYLLQNNVSCKNRYKRLINICFPELEKIFKSTRIYDDTALNFIKEFPHAEIVKEKRIDALYNNLYKTNGRNLNFYKKLVTTIKTASINSYPGVDKEHEDVKNLSYMAKIVQNNNNIINELREKMIETAKQSPYYKIINSFYGIGDTLTAEILGELGDITRFDSPKEIIAFCGLDPTIKQSGKSINVKGAISKRGNKYARYILFNCSQMVVKLGASNYPEHPVYIYYQNKKAEGKHYYESLTACSTKILRMLYSMCKNNKQFLEN

SEQ ID NO: 97466 - protein, 417 aa, unidentified
MSQDAYAAYIGIDWADRKHDIYLYDCSTGEGEESVIGSQPDAIAAWVEGLRKRYGNTLLAVCLEQKRGPLVYALCQYENLVLFPINPRTVSNYRKAFQPSRAKSDPIDARILVELLRKHGDKLPAWQPESAQMRALRQWVESRRMLVGEKVRLTNRLTSALKNYYPQVLDWFEDKDTQVFCEFLERYPTLRAAQAATQAELTQFFQQHRVIRRTAIARRIEQIAASGIPLTEDPGIVEPMQWLVETLIGQLKLLLTRLTQLTLKIDQCFTSFSDADWFAALPGAGEHLAPRLLAAFGEDRTRFDNAQQMMCYFGIAPVKESSGKKNWVHWRWSCPIFLRQTFVEWANQSRHHCAWAQAYYQMQRSKGNSHPAAIRSLAFKWIRILFRCWKKGEAYDEAKYLASLKRKGSPIANLLAL

SEQ ID NO: 97467 - protein, 410 aa, unidentified
MTETNIAQNAPILVAIDIAKARHEVLIAIPDKKRRRRLTVLNQLDDFNRLVASLASYGRPVRVAFEATGNYHRALAYHLAAAGFEMKLVSSVSLARTREALHNSWDKNDPKDAQVILHMMEIGNTQFYHDPLACGTNDIQELSKTHDIVSRSKTELWHRIMTHYLPLYFPEADRFHRSSRGDWFFAFLERYPSPHLISAMDRDAFIAEAWDVVGRKVAKERLLTDIYETAKTSVGLPVGRESDAVGMFRLVLGEGRGLIAQRSQIEARAVELLKDLPDYQLLTSIPGIGPINALTILAEAGDLRRFNHHRQFLKFCGMDLATIQSGTFRGQTKLSKYGNARLRRTLWMAGQVAILQKTNSFRDKFERYIAKDRHNSHLRRKAYTAIAAKMARTVHGIIKHGEPYRPFFEG

SEQ ID NO: 97468 - protein, 310 aa, unidentified
MQNLCGVDVSKDWLDSFIPPSHFERFENSPEGIDRLADFIRNHAASLVVMESSGGVERLPFYMLWEQQIPCAIVNPRSVRDFAKAMGHLEKTDRIDAGVIAHYAATKCLRPTPPPSRNQQRLSALSARMRQVVSDLTVQKQRLHTAHDDMARQGLLEILALLKRQSKSLSAEIASLIGNDPLWAALDATLRSVKGVADRTVATLMADLPELGILSNKAIAKLAGVAPLADDSGKRQGTRRTRGGRSSVRVILFLVADIARKYDQSLTAFRQRLIAKGKCKMVIRIALAHKLLVRLNAKAHETRAAFANNP

SEQ ID NO: 97469 - protein, 403 aa, unidentified
MFDTEDVGVFLGLDVGKTAHHGHGLIPAGKKVFDKPLPNSEPKLRAVFDKLTVKFGTVLVIVDQPASIGALPLTVARDAGCKVAYLPGLAMRRIADLYPGEAKTDAKDAAVIADAARTMPHTLRSLELTDEITAELTVLTGFDQDLAAEATRTSNRIRGLLTQFHPSLERVLGPRLDHQAVTWLLERYGSPAALRKAGRRRLVELIRPKAPRMADRLIDDVFTALDEQTVVVPGTGTLDTVIPSLARSLAAVHEQRRALEAQSNALLEAHPLSKVLTSMPGVGVRTAGVLLVTVGDGTSFPSAAHLASYAGLAPTTKSSDTSIHGEHASRGGNRQLKRAMFLSAFACMNADPASRTYYDKQRVRGKTHTQALLRLARQRISVLFAMLRDGTFYEPRLPQATAA

SEQ ID NO: 97470 - protein, 361 aa, unidentified
MSTQITASPKVYIGLDIHKKTWTISMQTDLFFHKTYSMPSKSSDLYEYVEKNFPQHEVNLVYEAGCCGFSVARYFFNLGWHVLVVNPADVKTGDKQKYQKTDSLDARNLSNQLKAGTLVGINIPTEAEDQFTSLARHRTQVTKKLRQTKSHIKSLLLFHGIEIPEKYDNSNWANGFIEWLENLKFSTTCGDLALQGKIRMFKFIKKEYLEIANQMRAYCRKEHKTDYYLLKSIPGIGGYLASVIIAECGDLRRFNTEGQFASFVGIVPGMYNSGGGEKCLGITPRSRSQLRSYLIEAAWISIRKDAEMQAYYRKHVGKNVKTIIVKVAHKMTRRILSVVKKQTPYQVNMNLVLEKNENKTA

SEQ ID NO: 97471 - protein, 401 aa, unidentified
MEGPIVSIDVSNGNSHYMCFIKNNKRFGKVKKIDHDIEGFKRLLEDIQKLEAETNEKVCAVFEATGVYTKPLERFLSKNSIKTYMINPLESARKRKEEIHNKKTDKLDPISISKVYYDKEEMMELKKKDETYNWLRKKNRLYEDQLNHLRKYKVTFQNQLSICFPGYLDLFKDGYSDIPMTILKKYPHPDLLKNKKAETVARYLEKNTCHTHKVSLEYALKIIEFAKKTYPGCEKGDVEVEIFKILLDKVIETQRECEKTLNEMITVASTLEEYRYISSIDGIGPNLAARIIAEIGDIEEFKSREALVAYAGLDPHIYQSGDQDGKHLKISKKGNKYLRCLLFLAVGCSIRGAKDNPVNRFYQKKKQQSNPLNSKAAKTACTAKLLKIIYGICKNKTTYER

SEQ ID NO: 97472 - protein, 421 aa, unidentified
MNAWNEVTHFGGFDWAKDHHDVLVLDGAGKIVTEFRFEHTSAGWALCQEKLKQFPQLAIAVEAGHSAAIERLVLLSYRVYPVHPRSSKSYRTRKLPSGTKTDHADCWALADALRLEGESWRALTTPEPLVQQLPLLCPDEVALIEQRTALINQLQQALYQYYRTALEAFEDWCAPSAWAFVERFPTPQLLVQAGKRKWENFLHAQKLFHPEWNQKRLAIFAKANQFCGAEATIAAKSALAVAVVKLLQTLEVQLVRFRSLISQCFKKHPDHALFASLPGAGPKLASRLLGELIALKPLADAPQALQCLAGVAPVSYQSGKVSVVYVRYQCNRFLRHTIHLWVDLSRHYCDWARIYYEAHRKKGQSHACALRCLGMRWLKIVAAMIRNQTPYDAALHTRNQLQHGSWILQLQTLRPEKGDAR

SEQ ID NO: 97473 - protein, 355 aa, unidentified
MKQGTQLDFSGQKIFVGIDVHKKSWKVCLRTAQMELKTFSQPPSVADLSKHLKENYPSATYHVVYEAGFCGFSYQRDFSDRGINCIVVHPADVPTTDKEKQRKSDTVDCRKLSKSLSENGLEGIFIPGIEQQDDRGVIRVYQQMIKDQTRFKNRIKGRLHFQGITIPGGDDHKYWSANFIQWLKALPLAPSAKVGLDILLLGYEQSRSMVLAATKQVRILSRQDRHKEGITLLRSIPGVGEITALLFLTEIGDMARFKELDDLCDYVGLVPRVSGSGEKETVMGLTHRGHHQLREKLIEASWVAIRLDPAMTMAFNDYCKRMKKNKAIIKIARKLLNRIRFVMKNQVKYVTAVVK

SEQ ID NO: 97474 - protein, 413 aa, unidentified
MLFVGDDWAEAHHDVEIQDETGRRLVRRKLPEGIVGIGQLHALLAEHLSADAEPGRVVVGIETDRGPWVQALLAAGYQVYAINPLSAARYRERHVTSGAKSDPGDAKVLADLVRTDRQHHRPIAGDSELAETVKVLARAHQSLIWTRQRQVNALRSTLREFYPAALLAFDDLASRDALAVLAKAPTPEQGGALRVTQIEAVLRAAGRQRNLRPTAEAISAALRTEQLTATPLVARAFGASVAAHVAVTAELVRQTATLEEQLTASFEQHPSAEILRSLPGLGVVLGARVLAEFGDDPHRYADAKARKNYAGTAPITRASGKSRVVLARYARNRRLADALYLWSFSALTRSPGARALYDTQRGRGATHHAALRALANRLVGILHGCLRHGTHYNEATAWPRLAVTVNQDQEVAA

SEQ ID NO: 97475 - protein, 340 aa, unidentified
MANNPHSFIGIDVSKDHFDASLLVVLDHKKQSPISSVFHNTPQGIQGFHRWLTANGVTMDGNSLVVMENTGIYHRLIWSFCSQQQLPLHIGNAAHIKWSFGIARGKNDKIDSIRLANYAFKEADALRASAPLDRELLLLKDLIAARTKLLKQRGSISVTMKELECGHDGLSMKIMEKSLRAAIDGIAQSILSIEQQIRKLINSNRAFRENYDLLMSIPGIGKVTATYLISCTANFAARPTGKQLACYAGVVPFEHTSGSSIRGRTRVHRMANKELKRLLHMGAMSVKNNNREFREYFIRKKEEGKHSMSILNAIKNKLALRIAAVIRDRSKYMDRNKAQI

SEQ ID NO: 97476 - protein, 343 aa, unidentified
MDYFAGLDVSVKESSVCVVDDAGKIVREARVASEPEALLQVLTNTLYRFKRVGLEAGPLSQWLLSALAEAGLPVICVETRHMRAVLKAQINKTDRNDARGIAQMMRVGLYRPVHVKTLLSQKLRMLLTHRKLLQSKAIAIENDLRATLRNFGLKVGVVGTVKFEARIKELVENLPDMAVLVEPLLTVRRVLREQITVLHRRLLAIVRDDDVCRRLMTVPGVGPVVALTFRVTVDVPARFRHSKAVGAVFGLTPSKYQSGESDRSGGISRCGDEMMRAMLYEAAQSMLMRSAKWSWLKAWAMKIARHRGLKKAIVALARRLAVIMHRIWVAGTEFRWTREVAAA

SEQ ID NO: 97477 - protein, 449 aa, unidentified
MSLIEAEGESDQVVERVAAVDVAKASAMVCTRVPHRSLPGRRLTRVWEVRSTTNAIIALAEQLVGEGIERVVVESTSDYWRPFLYLLEAHGLTVWLVNARDVKQVPGRPKTDKLDAVWLAKLNERGMLRRSFVPPVEIRRLRDYTRLRVDLIQDRSRQVQRLEKLLEDALIKLSSVVSDITGVSARAMIGALIAGERDPRVLAEFARGPMRGKRAALVEALTGRFDDHHAELAQMLLDEIDALTAKAERLTLRIEELIAAIPAAHPADRGPAAGIAVSDPTGAQLSVVARLDEIAGVGVHAAHAIIAEVGLDMTQFPTAAHLVSWSKVCPRTIQSGPKRRSGSTGSGNPYLKRALGEAAAAAARTDTFLGERYRRLVRRRGKLTALVAIERSILVIVWHLLTDPSARYHDLGSDFYARRINKNRRIRNLVHQLEALGNHVTLQPVAVAG

SEQ ID NO: 97478 - protein, 424 aa, unidentified
MNLTQNDRLKQVTSDTLIVGVDVGSQTHFCRAFDWRGFELSRRVFKFSNTGMGFLTFLRWTEELMNKTEMKKVIVGCEPTGCYWLTFQKFLQDHGIQLVTVNPFTVNRSMELDDNSPEKSDLKDPKTIALLVKDGRYSTSYLPSGVYAEIREASVCRDQIMKQHVRLSNQIQGWLQKFFPEYFECYADWDSTSGLMLLKEAPLPQDILRIGAGGINQIWRDAKVRAAGIKRAQTLVEAAQNSVGLEAGEAARLEIWVLVNDYILKAEQLKRLDEYLEEKVKEVPNVEKLLAIKGVGMSTVIGFIAEVGDIGRFTDPKQIQKLAGLEIVKKSSGKKKGQPRISKRGRRKLRRTMYESARALMNWNPAFQDVFLYYRNRQKNPLGGMQAKIAVACKAIRVFYVVLQTGCDFDEEKFRRDIIRPEAA

SEQ ID NO: 97479 - protein, 404 aa, unidentified
MYNAVGIDVSKGKSTVAVLQPGGTVIRKPFDVSHTSQNLIELARYLGSLEGSTKIVMECTGRYHEPMLKALYEAGLFVSVVNPHLIKNFGNNSLRKVKSDPADARRIARYTLDNWAELRQYSGMDNTRTQLKTLNSQFSFFMKQKVAAKANLIALLDNTYPGVNKLFDSPPREDGSEKWVDYAYSFWHVDCVRRIGLKTFTERYKAFCKKHHYIFQQDKPEKLFNASKELVAVFPKEKTYKLLIQQSIRQLNLASEHVERLRQEMNALASTLPEYSTVMGIYGVGKTYGPQLIAEIGDVSRFTHREALTAFAGVDPGVDESGQHKSKSNRASKVGSARLRKTLFQIMTTLLQNAPVDDPVYRFLDKKRAQGKPYYVYMTAGSNKFLRIYYGKVKECLRNLEQAE

SEQ ID NO: 97480 - protein, 355 aa, unidentified
MDSKKYIGMDVHQATISVAVRDAAGKLVMESIVETKAATILQFIQGIHGSLWVTFEEGTSAAWLYDLLQPHVAQVVVCDPRRNALLKAGNKNDRVDARNLSDLLRAGLLTPVYHGQSGVRTLRELARSYLTITKDGTRVMNRLKGLYRSWAIPCGGDKVYSVRHRNAWLEKLSEAGVRRRAEWLYQQLDILLDLRREVRRELLTESQKHPAHQLLRQIPRLGPIRVALIIALVQTPHRFRTKRQLWAYCGLALETHSSGEYRVTEGRLQYTKRPPAVRGLNVNHNHDLKNVFKSAATQVSASGDPLGDFYQNLLAGGMRPAMARLTLARKIAAIALKIWKKGERFDPGQLKRKCA

SEQ ID NO: 97481 - protein, 408 aa, unidentified
MEVLYPRCAGLDVHQQTVVACARVASGSTVQQDVRTFGTATADLLALADWLAAHGCTHVAMESTGVYWKPIWHVLDGQFELILANALQIRSVPGRKSDVNDAMWIADLLAHGLIRGSFVPPAAIHELRDLTRTRKQLVREVAQHTLRIQKVLEDANLKLTSVISDVMGMSGRAMIEAIIRGEENAERLADLSQGRLKASRPAVIAALQGRVTSHHRFLLRLHLTQIDALEVAVRDVEARLGDALTPFQAAVDRLLTIPAVGRTVARVIVAEIGFDMSRFPTAGHLVSWAGLCPRLQESAGKRLSTRTRPGNPWLKTTLVQVAWVAARTRNTYLRAQFLRLKSRRGPKKAILAVAASILTAAYYILKDEVTYHELGADYFERRDKAHITKRLIRRLEDLGLSVEVRPAA

SEQ ID NO: 97482 - protein, 418 aa, unidentified
MNGEGNTRDSKRYVALDIHKHYCVVAAVDREGKVVLSPVRVEHADLEGWLKKNLRADDHVVIESTTNAWHVYDLLSPLVERVVVANSFKVKQIANARVKTDVRDTLILARLLAANLVPDVWVPPQHVRELRQLLSQRRQLVEAHTQMVNRMHSVAHRHHLKHERGKRFNEKNTGWQKDKRLSKMEQFQLELEMENRAYLEKQTERIGRAVAKLSHQKPWIESMTYLMQMPGFGVITAMTVLAAIGEIQRFETAQHLASYSGLTPGLEQSGTKHRGKGITKEGRKELRWAVVEVAQRAVKSDPYWKKRFEAMQKRMHRNQAIVAIARQILELVWHMLTRRQPYRHFSQERIAYKYLTWGWQMDEEARDGLTRQQFTRYYLMRLGIGHDLTRIALDPKHPRKIASEAEVLALRPELQRIE

SEQ ID NO: 97483 - protein, 354 aa, unidentified
MPIVSEKYRRVVGIDTHAATNTLAVIDASNGAELRSATFPTTWAGLARASAWAGRRTGDDPALFVVEGIGSYGAGIARALADRGQPVVEPSQMSKADYRGHGKTDALDAVRIARSVLGVDLSLLRLPRADGGHRTALRVLVVARDQMTTERTRLVNALTALLRMLDLGVDVRRPLTAGQTATVARWRQRSTDPVAVATGRAEAIRLASRIVALDSELVDNRKHLDTLVDQHAPQLRQLLGVGTVVAATILVAWSHPGRVRSESAFASLAGTCPIPASSGNTDRHRLNRGGDRQLNKAITTIALVRMRCDPATRAYVSRRTAEGRTKKEIMRALKRYISRQLFRALAPKQAPASP

SEQ ID NO: 97484 - protein, 400 aa, unidentified
MLSIGIDVSKGKSTVCGMKPGGEIVYTPFEVQHTREGMSELVSLLRGSGEEVRVVLESTGSYHCPVVAALLENGIFVSVVNSLRMKRFCSQSIRRVKTDQIDAMQIALYGLAYWQELQPTKLPEDTYRELQLLARQYYQMTSLLIKAKVDFNALCDQVLPGMQELMSDHAGRHKLSDFVLRYHHTTHILEMGETRFRKDYCKWAEKKGYRNHERMAALIFATAQNGIPVLPDAPSTQIVITEAIRVLHTVEASRDAILTQMQALAKTLPEYSLVREMPCIGDTLAPRLIAEIGDVRRFHSKRALIAYAGIDAPPYQSGKFCANNRHISKRGNRYLRKTGYEVMQSYVMHKPANDPIFTFIEKKRSEGKSGKLAMVAGLNKFLRVYYGKVTELYSSVPAIE

SEQ ID NO: 97485 - protein, 373 aa, unidentified
MPKYSTAFGMDVHLRSTTVCALDADTGEAVTRRFPGNPWGEIAGWMDGFPGPSLAAYESGYLGFAPQRELAGLGVECVVAAVSKIPRSAADSASKNDRNDAARMAKAILAHDISPVWVPSPEVEGIRDLAGAYDGATARLATAKQRLLAFLAKRGFVYGGTTPAGNPRKYWTYDFLRWLDKVRPEDDGGVRALAALRNEVEAAAEARADLLSEYRAAVDASPIAAEVAALQSIKGCAFALAAAFSAEVGDFTRFRSGRQVTAYFGLAPSQRSSGDSVRLGGISGAGNALVRKLAVEGSWCYAAARHQPKLMPRDTGVPLEIRMHGRKGSERLLRRREEMLARGMPAAKANAATAAELVRWLWALGMMCREGAE

SEQ ID NO: 97486 - protein, 510 aa, unidentified
MITIPVITETCAGIDVGKRGLAVAVATGPADKEAAITTRWCGTTVPALRELQAWLRACGCTSVALESTGVYWIPVKNILEEECRITLVCARKHHPKKGDKTDFQDAINLAIYHRHGLLTGSYLPERGIVELRDLTRRRKKLIGAIQSEKNRIQKVLETANVKLGNIVSDVFGVSGQEILQALLDNAPMMAAELANMAKRRLRKKLPQLTEALEAHQMNDHHRWLIEQSIAHAKFVDEQVEELEKKIEEQLQPYRRQYELLMTIPGIKEASAANILAEIGPRMDQFPDGDHLSSWAGICPGNNRTAGKSKSSHIKKANKFLVASLVEAAWGATRKKDSASQRKFYRWLRKLGKKKAVIAMCHHQLKVVWSVLKHGRPFIEPDPIVLKTIERQKQIRHHANRLRQLGADAEAITAVMETLLADEPVATASAPANAETTEAANPTCQPRCKCSSQKMKRSLPRGVLGFRLRNAYKDLYSTVKEPTGTTLDTPPPKTTKRRGPTRKKAGASVEQ

SEQ ID NO: 97487 - protein, 454 aa, unidentified
MQKQDSYDYYVGIDCAQNKHDFAMKNNQDKFLIKKGHFSNTLQGYEKFLNTVLSKCLDKDKILFGMEVTGIYGTNLYERLKSDGYHVVMIFPDSVKNYRDYKRLNKTDKIDSACIAELLLNGDAQIVHAEKNGYTDLKAYIRRRNALKVTCTQETNRFLAKVCLYFPDLLKVFPSGRATLKAIFSIYPTPYSIIEADFDELVSVLQKASKNKFGVDKANELIHAARNSIVVRKSISDGELYNIHSLIDSIDSLESEIRNLEKIIDSKAEEFPAYHVLLTLTGCGKITAATIVAEIGDISRFHKASQIVSLAGLYGDNSKSGSSVNKRGKISKKGSRYLRHAIYMVAEFARRNNPIFKAYFIKKKNGDRTKHTLAVNAVANKLCKVIYSLMKNQSTYIIQYRDLAKLSESTQNEFFQNAETDFSAKTRRKKYLYEDEYGELHEFVFKSLKTALIE

SEQ ID NO: 97488 - protein, 405 aa, unidentified
MIFVGIDWSEEQHEVEVMAAAGQRLRSLRIAHGVEGLAKLQETISEFTSDPSEVVVGVESDHGLLVNALVGSGYQVYPINPLTAARYRDRHSLAGNKSDRRDAQMLANVVRTDRHQLRPLAGDSEPALEIRARARAHLRAIRLQGQLRNQLRSLLLEFYPAVVPLLAEDDIRDALAVLAVAPTPAAGRRLSLSKLAATLRRHGRQRNLAPRAQEIQGLLRAPQLDLQRPRLIAAHGDEVASLTRVLLQVRQELAQLEAQMAAAFRVHPDAQILLSFTGLADILGARVLGESGDDPTRYADATARRNYSGPAPVTRASGKKREVTRRVARNRRLADATFCWAESAVRHSPGARECYRRLRRRGQPHNQAIRVIAYKLVGKLHACLRDRTLYDEHRAWSTDLTQCAA

SEQ ID NO: 97489 - protein, 451 aa, unidentified
MAKTTKQEKQSLQLAIIRPCCAAVDVGSMMMMVSYSDAGGNQYLLEADAFTEDLEQVAKTLVSASVKELAMEATGSYWMAFYQILEEHGINVTLVNPKHFKNVDGQKTDVKDSQWLHQLHAHGLLRASHIPEEVYRELKSYLHERNVLQQQKSDTLNRIQRVLTQMNIKVQHLISDIEGVEGMKLLRGIASGINTPQNLLDLIKVDRLKASKEDLLKSLHGHYKPQFIKILQHQLTALDFFKEQMKEYELLIEDVLKKMLPQDEEGNKPEIKKKTTQTRKNQYGINVKEFLKHIVGVDLTSIDGLDEISVLEIISVTGLDMNKWVTAEHFASWLGLSPRPKKSGGKIIGYDKKVTKNNATQAFRIAAQTMWQNKGALGQLYRRLSAQRGTKKAIKAVARKLAVIFYTMVKHKVAFDKEKLKVDTARQNAKKIAFLKKEASKYGFTLQNLAA

SEQ ID NO: 97490 - protein, 331 aa, unidentified
MFPVGIDVSKNTLDLCILYDGIKGRIKTRNIQNTRPSVENILRWLRLQHCGPEDVHVVMEATGVYHERLATELHDAGFRVSLANPHRSREFARGMGIMTKTDKVDAYMLACYAFLKKPHHWEPPSPEIRYLAALLRRRDVLLGDALREENRLEKYLSTDTPADIISSCRRMAQLLREEVSNIERQIKAHIKASPALRRDYTLLNSIKSVGPQLGMHMLVELRSHNFASAEQAAAFLGVVPIEKRSGTSVRSRPRMSKIGPPQLRARLYMSALCGKIYNKRMRNIYDEMCLRGKPKMVAIGALMRKLVHWCYGVLKTGTVFNDEGLKQVLST

SEQ ID NO: 97491 - protein, 334 aa, unidentified
MWHIGIDLHREFIVLAAVRDDGEVGKPVKIACQDTNALLDAIRPLAPFRVVVEASGTYRWLYDLLRPYGTVLLAHPLRLRAMIQRRSKTDKLDAQLLANLLRINQIPLAYVPPEPYQRLRDLVRCRAKLGQDRAEAKIKLRDLLSRNNLWAPYKVPFGPRGLAWFRSQDFGMVGNMLRDELLARLEHYDRQIAIFDEQLERCRPDFPQTQALADIHGIGFYSALLVVAELGEVERFRTARQVGAYAGLTSRVHQSGGHCYQGSITRQGSPWLRWILVEAAMKTIREDAALKNFYQRLRKRSSAKIARVATARKLAEICWKRLRRWQREHAGKAA

SEQ ID NO: 97492 - protein, 338 aa, unidentified
MTLYCGIDLHSTNNYLGIYDQDDREVVAKKLPNDLPTVLRCLDPYREDLAGIAAESTYNWYWLVDGLMDHGYNVVLANPAANAQYDGLKYTDDRCDSRWLAHMLKLRILKTGYIYPPEERPIRDLLRKRMRLVQHRTAHILSIQNIISRNTGRSLRWSKIEEMTADEVNELFDDEFIAMAPRASLEVISTVNKQVSLIEKTVKGQAKLRPEFSLLKTVYGVGEILGLTIMYETGQIRRFGEVGNYCSYARCVGSRRMSNGKKKGENNTKNGNRFLAWAYVEAANYAARFYPEAQAFVQRKTARANRTLAIKALGHKLARASYYVMRDQVEFDPARLFG

SEQ ID NO: 97493 - protein, 338 aa, unidentified
MQFKHFFGIDVSKNTLDLTVLDIQGNQIAYEHLANDLKSIKKCFLGVLKRHQILMEDCLFCLEYTGIYNLPLVQWLTSLEAHIWLESGSQILKSQGIVRGKSDKVDSLRIAKYAFLNRNEVRLWKAPREIIQHLALLMSLRSRFIKNKKQLEVPVKELNGFFNKETIRSINKHNKAPLNALKLQIDKIEKEILEVIKSDERIHQLYKIITSVDGVGLVTATQVIITTNEFINITEGRKYACYSGVVPFEHRSGTSIRGKNRVSHMANKKIKTLLHLAAISAIRVKGDIQDYYLRKVAEGKHKMSVLNAVRNKIILRIFACVTQERMFEKKINFCLEKP

SEQ ID NO: 97494 - protein, 424 aa, unidentified
MTQHQDTSILRVMHEVCCGLDVHKKLINACLITTDENGQEDSELKVFQTFTDDLYRLRDWLLDHNCPIVAMESTGIYWRPVHNILEGLFEIILVNARHFKNLPGKKTDMSDSHWICGLLRVGLLKGSFIPQKHVRQWRDLTRYRRSKIEDLGDAKRQVHKLFESANIKIDSVASQLFTRTGRNLMELLLKKDQELTLEEVKECLRGTLKSKGEELYRAIRGFFEDHHRWLLEKMLANVEHLEHLINDIQLRLRSLLQPYEDVIDRLNEIPGIDFISAYSIISETGPTLSTFPNTASLCSWAGVCPGNNESAGKRHSGRSPVHKGNLKTILIEVAWAAVRAKRSYYRAKFFSLRSRLGPKKAIMAVAHRILKAIYHVIKQGAKFKDLGEDYLSNLHKNSKLNYLIRQAGKFGYTLTPSGVAEKSF

SEQ ID NO: 97495 - protein, 420 aa, unidentified
MLEETNQTEEIVERVAALDIGKAELVCCVRLPGKAGKRLQEVTTYATMTRSLLQLADQLAELGVTRVVLEATSDYWKAPFYLLEAQGLEVWLVNAREVKHLPGRPKTDKLDAVWLAKLAERGMLRPSFVPPLPIRRLRDLTRYRADLVAVRTAEKQRVEKLLEDAQIKLSVVASDIFGVSGRAMLAALIQGERDPKRLAELARTRLRAKRGQLQEAFTGQFTDHHAFLLATMLGRIDQASADIAELDRKIEAEIAPFGAAVERLDEICGVGRTAAQTIIAEIGTDMGRFPTPGHLASWARYAPGVKQSAGKSKGKATTGHGNPYLARVLGEAAVAAGRTDTFLGERYRRIARRRGAKKAIVAVGRSILVIVWHLLADPNLRYHDLGPGFYDTHVNAERAKHNHVRQLEALGYKVTLEPAA

SEQ ID NO: 97496 - protein, 351 aa, unidentified
MDKITTVGLDLAKQLIAMHAVDARGQVVLRKVLRRDALLRWSATLPPCEIAMEACGGAHHWARELTQQGHSVRIIAAEFVRPFRKSGKNDANDAEAICTAVRQANMRFVAIKSVEQQAALCVHRLRQGLVEERTALINRMRGLLTEFGVVAPLSPEKLRRELRLCLDEEKTHVPLMVRQLVTDELAALDALEQRIADYAAQIAAQVRDNVSAQRLQGIAGVGALTAAAMVATVGQPQEFRNGRQFAAWLGLVPRQHSTGGKSRLGRITRRGDAYLRTLLILGAKSALQAALRKPPPLRHRLRQWIVDVFTRIGYHKTLVAIANKHARIIWALLVKGEDFDVQRLTLTAVAA

SEQ ID NO: 97497 - protein, 384 aa, unidentified
MRTVALDLGVKKICFSEVRNQQVIRRATVRGVSGLLALLGPDQGKARVALEACREAWHFHDTLQSWGHEVIVVDTTRIREIGVGQHGKKNDRLDADALALALERDQIPKAHVLPPERRRLREQLNVRRMVVEQRAQTITTIRGIVRGAGQTLKRCGTESFLETYRKDKLPDELQMLLAPAIAVLETLEAQLSVVEDKLFQLCDREPAVQLLCSTPGVSIIVAAAFVSVVDEPGRFKNAHQVESYVGLVPKEDTTGGKQRLGRITKAGNSYLRAVLVQAAWCILRQRGDDPLKQWGDAIAKRRGKRIAAVALARRLTGVLWAMWRKNTVYDPALVGTASAHGLAQQAQTTAARAVGMQRAAQKLARRRPRRRASSSNERSETLTR

SEQ ID NO: 97498 - protein, 421 aa, unidentified
MLVLYQRCAAIDIGKDVIAVAVRLPGDGPDHRQTIKRTFKTFYGVLKHAARWLTEQQVTHVAMEATGIYSMPVYHALIEHGGFEQVLVCNAGHVRNVPGRKTDLSDAEWLVHLLECGLLRGSFIPPAQIKAARDVIRYRTKLTESRTSELQRLGNILQDAAIKVDSVASTITARSVRAMVEALIDGERRPLVLAELAKGRMRAKIPDLQRALEGRFDSHHALMCRLHLDHLDYLDEMIVRLDTQIEDMMQPFRAQRDLLTTIPGIGPFVAAAVISEAGADIAETFPSADQFASWIGVCPGNHESAGKRHSGKPRKGNQHLQHVLVECAWAASRTPGYLQSHYRWHVRKFGGSRNATAKNKAIVAVAHKLAIIIWHVLATGKPYADLGADYFDRRIDPAAETRRLIARLQALGHTVTIEPAA

SEQ ID NO: 97499 - protein, 346 aa, unidentified
MLYVGLDVHSKQSSLCILNSAGGTVNEIQLKGPRSSVVDRLRQLQEPFSVCYEASCGYGHLYEQLRPLAHHVAVAHPGKLRLIYRSKRKNDRVDAQKLAKLLLLDMVPPVHVPSIDVRAWRSLIVLRQRLLAQVVRAKNQIRGVLRENDIQGAKWLWSKKQLLWLESLDLHPVAKLRLELAVQEFKSLNEKIKRIEKELQKYADRTPAVTLLMTIPGVGIRTAETFVAWVDDITRFRNNRQIGSYFGLVPCQDASADKNRLGHITRDGPPVMRKLICEATWTAIKKCPRFKEFFEQVMGGKSERKKIALVATMHRMTKVMGAMLRSGESYRGIEPSGSPLRKTPDA

SEQ ID NO: 97500 - protein, 338 aa, unidentified
MLYSGIDLHKRTVVIATVDETGKVVCEASLPTSRFAVARYFAELPDSTRATVEATSSWYWLRDLLHQEGVPLTLAHAKFVKAIAYAKVKTDAVDALTLAQLHRVDLIPRAHIVSPELRPLRDLLRTRLQLVEKRVSAKNSVHRLLEKFNVPDPASLPDEAALSASLYEEQIELLDSQIRRIEQQLQPRLIPEHDIQRLLWIPGIGKITAFTLYLEIDGIDRFPSVRQFFSYCRVVPGAHNSGSKNRHGRRKDGNRYLKLALSHAAVRAIQYYPEIKRFYQRKARQKNPAIARTLVQKELARSVYIVLAEGVEFNHTFKGQPLERRKQSKWPRRASPDV

SEQ ID NO: 97501 - protein, 389 aa, unidentified
MKIYVGINIAKLNHFAAAISSDGEIIIEPFKFTNDADGFQLLVSKLESFDRNSIIIGLESTAHYGDNLVRYLVAEFYQVCVLNPIKTCQMRKNNIRKTKTDKVDTYIIAKTLMMQDDLRFVSFYDLDMMDLKALERFRQKTIKQRTRLKIQLTTYVDQVFPEIQYFFKSGLHQNAVYALLKEAPSPKEIASMHMTHLANLLKVNSHGHFTKEQAKELRVLAQKSVGANDSTISIQITQTIQQIELLDSQLEKIEAEMTDIMKFNDSVIMIIPGIGYINGGMILGEIGDIHRFSNPNKLLAFAGLDPSVYQSGNFQAKTTRMSKRGSRILRYAIVNATWNVVRNNATFKAYYDAKRAEGRSHYNALGHCAGKLVRAIWKMLTDEVEFNLE

SEQ ID NO: 97502 - protein, 388 aa, unidentified
MPKFDDLSRSLAVFEEDSTLIAVIELSRSSWLVGGIVPGLSRDPLKQISPDAAELLRVLLRWRDEAVAAGREIGRLCVAYEAGRDGFWLARWLRARGVECHVIHATSVAVSREHRRAKTDRLDVGLLKRSYLGWLRGEAKHCRMVAVPTREEEDGKRPLREREGLVGEATRLVNRMTSLLALYGVHQFNPRRKRAAERLAQLTTAEGEALPPQMLGELQRGLERLNMIKGQIAAIEAAQRARLATAPAAGPHPMILALAKVVGVGVMTAELLVREVLSRHLRDRRAVARYAGLTGAPDESGKRRREKGLARAGSARVRRAMLQLAWRWLRHQPHCSLAKWFRARTLDGRRDTKLAMIVALARKLLIALWELAVTGKLPEGIRLHRVAA

SEQ ID NO: 97503 - protein, 421 aa, unidentified
MISFPKRQRAQRAAACVGVDAGKFTHTLVVRPQGQPDSRPLTFQTTRASFDQAVAFIQHQIGTATPETILIGIELAGNYGFTFAHYLAQLGFQVVSVLPAHTKRWKDVAHNQPLKTDAKDAATITDLLAQGHFVAFPFLQAAYAELRYLAAGRERLALLRRGALTQLRSLLQVVFPEFEALFSRITKKTPLVVLQAYPAPQDLLAAPKRRVLQLLRTASRGHCGRETYDRLMSAARSTLGLPGAQSSLRDEIRLTLERLAVFEHQIAALEARMVAALRAVPEAPCLASIPKLGPVTAAVFLGAIGDPRAYESGAQILRVAGLSLVERSSGILRGTKRLSKRGRPLLRQAAYMFAVRSITTGGLFRAEYDGLMARNGGQAMKALGAVMRSALRLMYSIARDRRTFTAKPPVRGRRGPLAVCA

SEQ ID NO: 97504 - protein, 326 aa, unidentified
MDFLGIDLAKLTFDVTLLSSTASSQHHQFPNTQTGFKQLQHWLAKQRVTQLHACMEATNVYWEALAQFLYDQGYTVSVVNPARIKGYAISQMQRNKTDKQDSATIASFCATHTLRAWRPPTPAQRKLRALVRHRDDLIATRIQQTNRLQDTTEPEVRASLEAVLVTVKAQLKTTQQQITAHLKANADLGDVHRLMDTVPGIGAVTAQKLLAEFYDLAEYRSAKAAGADAGLTPANYESGTSVRRRPRLSKQGKASVRAALYWPAITVMTHSMEFKQFAQRLAARGKSYGVILGAVMRKLIHIIYGVVKHKTPYVPEKVLGKSVHAT

SEQ ID NO: 97505 - protein, 364 aa, unidentified
MKKISTAKIKSQAASKKVTIGMDLGDRSSRYCLLDEEGMMIGEASIPTTKVGMAKVFGAMARCRIALESGCHSPWVSRELEAFGHEVIVANPRNVRLIGESTRKDDRLDARTLARLARIDPMLLSPVRHRGAEAQADLAVIRARRVLVRARTMLINAARGLTKSFGERLRKCGAGQVGPTLAAELSAEIRAAVVPLLAEVEALNQRITAYDRQIEQLAKEHYPEVDRLTQVKGVGTLIALTFVLTVDDPNRFQRSRDVGCYMGLRPGRRNSGKSEPQLHISKEGDRYMRSLLVQGAHYILGPFGIDCDLRRWGLKMSERGGKRAKKRAVVAVARKLAVLLHKLWMSGEVYDPFRNSRPLVARAA

SEQ ID NO: 97506 - protein, 403 aa, unidentified
MNNVVGIDVSKGKSMVSVLRPFGEVVAKPFSVGHTGSELKELADYLKSLDGETRVVMEHTGRYYEPVARFLHDEGVFVSAVNPKLIKDYGNNTLRKVKTDKADSRKIARYGIDNWAELRQHTPMDTIRMQLKTLNRQQSLYSKTKTMMKNNLIALLDQTYPGVNALFDSPVREDGSQKWVDFATTFWHVDCVRNMSLTAFAERYRKWCKRHGYNFSQSKAVEVHAGAQDLIAMLPRDALTKTMVRQAIDALNAVSASLERLKAEMQALAAQLPEYPVVMAMHGVGDSLGPQLMAELGDVTRFTHRNAITAFAGVDPGADQSGTHEAKSTRVSKSGPPELRRALFLVMDCLLKTQPQDDPVYRFMDKKRAEGKPYLVYMTAGANKFLRIYYGRVKEYLAQLENS

SEQ ID NO: 97507 - protein, 356 aa, unidentified
MQTQCNKNDFSSQNIYVGIDVHLKSWKVTVMMDSLFKVTFSQNPCPQTLYNYLVKNFPGANYFSAYEAGFSGYWTHHNLCALGIKSIVVNPADIPTTAKEKVQKEDARDSQKIARSLKNGELLPIYIPSLASLGHRGLIRLRKATVNDTTRVKNRIKASLHFNGISIPAEINTPKWNRKLVKWLTELELEQAYRQIIDTQLSTLAHLRQSTLNITKQLKSLSKTEQYEQDTGLLISISGIGLISALTILTELESMDRFNSLDKLCSFIGLVPSTNSSGDTERTGNITPRGHKVLRSALIECAWVAARTDPALAKSYNQYCKRMKANQAITRIAKKLLSRIRYVLINKQPYVLGVIK

SEQ ID NO: 97508 - protein, 325 aa, unidentified
MILGIDIAKKKFDVTLTQAGKVIASGQFNNTPAGFKKLSKWLKKKTNQPIWACMEATGRYGDALALYLFEQHHQVSVVNPARVKKYAESKLQRNKTDKMDAKLNADFCWTQQPALWTPPPLEKRQLQEMVRRRSALVNERTRERNRLQSGLQSDIVIESVNANLDFLKVQIAKLEAQIQAHINQHPALKRDRELLTSINGIGDKTAAIILGELPEVDRFDHSGQAVAYAGLSPQQHQSGSSVHKKTKLTKTGNQKLKTALYFPALSALRHNPIIINQSTRLAEKGKEKMVIVGAAMRKLLQLAYGVLKSGQPFDPYYATKSQAAI

SEQ ID NO: 97509 - protein, 350 aa, unidentified
MELHTIGIDLGKTVFHLVGLNQRGEVMVRKKFSRKQLLHFTANLQVKLIGMEACGGSHFLGRALREQGHEVRLMPAQYVKPYVKTNKSDYIDAEAIAEAVERPKMRFVPIKSDDQLDLQSLHRVRERWVMRRTAVINQIRGLLLERGITLRQGRRHVDEALPGILEDASAKLSGAVRLLLAQLKLELDHLQMRIDEADAVIQKIAGENEACRRLVVIPGIGPVTATAIIAAIGNGAAFKKGRGFSAWLGIVPGEYTTGGKQKLPGIGKRGNSYLRRLFVQGARAVLQQSAKQSSGLSAWLAQLTTRTHSNVAAVALANKLAHMAWAVLAKNEPYRPPMWAGAATERLACR

SEQ ID NO: 97510 - protein, 408 aa, unidentified
MLWGGRRGQAFLSLETTDGAPYAAAKRLEQILAALEQDITLIAVIEMSQSSWLVAGIVPGIERHPLKKLEPDEAALLRLLWRWRDEAAQKGRTIMRIVVAFEAGRDGFWLARWLRARGVEAYVIHSTSIAVSREHRRAKTDRLDTELLKRAFLGWLRGEQDHCSMAALPTLEEEDAKRPTREHQTLVGERTRIVNRMKGTLARLGIRGFKPTLRKAPERLETLRTPESAALPPNTRAELQRDMARLHFVIDQLREIERTRLERLEQRPAEGQNEMVRLVARVVGVGIETADMLVHEVLSRNLRDRRAVARYAGLTGSPDESGSKRREKGLAKAGNARVRRGMIQLAWRFLLHQQNSALAQWYRARTAEARGGMRKTMIVALARKLLVALWSFVRTGEVPSGIVLRPIA

SEQ ID NO: 97511 - protein, 372 aa, unidentified
MITCFIGIDAHTTNYTLSTAIDAEDKPFNTCKYAPKLTYILKYANALCKKYNLKKEDILLGYEAGCLGFKLQRDLNENGFNCVVMAPSTIPGTAINRRKKTKNDIRDAEAIAKALRNDDYSSVATPDEEDEAIRAREDVRMELKRCKQHIMAFCNRHGQHYEETGWTQKHMKWLNNLAFSQPVLKETLNSLLLEYEYLTEKLEEKDRRIEEFAQMDKYRESVHKLTCFKGIKTLTALAVIVEIGDFARFMKAKNFVAYLGLSVGEQSSGNDHNQTGITKQGNRFIRKLLTEAAQCFSRATSKKSKELKKRQEGNVEEVIAYADKANERLRKRYHHLVIHNMKSPNKAKCAITRELACFIWGMMTDNIHTVLV

SEQ ID NO: 97512 - protein, 420 aa, unidentified
METIKTKKVKKFNPKSLIVTIDIGKETHYGYFRAPDGTEVKPFAFHTTRTSFDTFYDKMQRFADSQGAEEIVIGFESTGPYAEPFFHYLKDKPVKLVQINPMHTKRIKELTGNSPNKTDRKDPRVIADVITLGHVLTLVIPQKHAAQLRRLSQARQRLIKKCTAASNQLNALVYSLFPELSSIFKDITCKSALYVLRHHPMPSDITALDRQALTRMLKKISRGRIGTQRTNALVDAASRSVGIQEGREALAMEIGLLIEEIDRHHHCIEQLEGQMQEALKKIPYSGSILSIKGLGIVTVAGLIGEVGDFGQFKTISEITKLAGLDLYEISSGKQTNGRRRISKRGRPLMRKLLFFAAINTIRRGGIMHDTYHQMLKRGMVKIKAVTAVSRKLLALIFALVRDNSVYVDNYHRNHEFKRAA

SEQ ID NO: 97513 - protein, 427 aa, unidentified
MKYNQNLKILQITEKTLIVGVDIAKETHHARAFDFRGIEYGKRIEFSNDIDGMEKFFKWAVEIMNKSNKEHLMVGMEPTGHYWLCFAQFLRDKNHKVVLVNPFHVKRSKEFDDNSPTKNDRKDPKTIAMLVKDGRYVEPNIPDGIYSELRIAVDIREMLTKDLNKIKNRVARWLDIYFPEFNKVFADWEGKAALITLKEFPTPAKIIGIRAEEILAAWKKEVNRAVGIKRALKLIEAASQSVGKRDGIEMAEIEIKIILEQYEMIVKQIKEIESKIEELFMQVPDSSEMLGIRGVGVITAATFIAEVGDITRYEHPKQIQKFAGYNLVENSSGQHKGQTTISKRGRRRLRSALYKMMMPILANNKEFQELHKYYTTRKENPLKKKQSIIVLCCKLIRVFFAILKKGVKYDGNKMLRDIKRPEIRNAA

SEQ ID NO: 97514 - protein, 367 aa, unidentified
MKKVSTAAAKQIRNFSEQKLTIGLDLGDRSSWYCVLDESGSVMLEQRLSTTPKAMQEMFGAIPRSRIALETGMHSPWVSRLLHQLGHEVIVAHARNVRLIGESRRKDDRLDAQTLARLVRIDPQLLCPVKHRSAKAQADLTVIRARAGLVRARTALVNTARGLAKSYGERLRGCNVRNMNPEKAEGLSPELQTALEPLLAAIESLSERIREYNEGIERLAQESYPQVALLKQVKGVGTLIALTFLLTLEDAHRFRKSRDVGCYLGLQPGRRNSGQSEPQMHISKEGDPYLRTLLVQGAQHILGPFGIDSDLRRWGLKLAERGGRNGKKRAIIATARKLAVLLHRLWVSGEVYDPLRNSGELAMPAAA

SEQ ID NO: 97515 - protein, 435 aa, unidentified
MNPNAAGIDIADSEMQVCVPADRDGDNNRRFGSFTRDLNEISGWLKACGIETVAMEATGVYWIPLFFKLQKDGFDVQLCNAREVKNISEKKTDESDAEWLLVLHSYGMLKPSFQPENAARQIRNLARHRGGLLKSASKEVQHMQKAMEQMNIKLTNVISDITGVSGLRIITAILKGERDAQTLSALADSRCKRSREEIALSLEGTWDADHLFELKQSYELYQIYQGMVEECDKEIENLLQGFVSRIDEDNVGLLRTKKRINKKNAVAFDVESYANAIWGVNAMAITGMSSGSLLQLIGELGADFTDKFDSPAKFCKWCNLVPNNKISGGKLISSRLPKRKNPVGQIFRLCANTVAKSNSPMGFYFRRIKSRAGHMSAIVATAHKMAEIFFIMVRDRVDYDEGRVGLDEETLLKRKIERTQRQLEALNAKLYATAS

SEQ ID NO: 97516 - protein, 341 aa, unidentified
MEKATIIGIDIAKRVFQIHAASKDGRPVLRKKVSRAQLLGFLAKQPPAMVAMEACATAHEWGRAISGLGHDVRLVPPIYVKPFVRRQKNDASDAEAIAEAASRPTMRFVALKTEEQQARSMIFRTRDLLVRQRTQLVNALRGHLAEHGIVAAHGLAKVKVLATAMRDTGSLHPLVHELGQRYLDHIARLDVEITEFDKRLRRPSKDDEMAKHLQSMPGMGPITAAAIEAFAPPMATFKRGRDFAAWLGLVPRQHTTGGKPRLGRTSKMGQRDIRRLLIIGAMSVVRWAVRKGTAKGSWLARMLATKPRLVVAIALANKMARSVWAMLSKGEEYRGSALAPA

SEQ ID NO: 97517 - protein, 391 aa, unidentified
MYIVGIDIAKRKHEAAVIDGEGTVIIKPFSFTNNCSGYNRLLAMLAKAKLPLDEVSFAMEATGHYWLALFTRLQKEGFRVQVINPVQTNSIRSFYIRQAKTDPRDALLIAEVIRFGHFSESTLHPENIYELRELCRGRHAIVSMQADVKRKVVALLDQVFPEYETAFANMFGDTSMAILQTCPTPKELSEMRLEELCHLIEVSSHKRFRMAKAQELQALARNSFGFAMAGDVFSTMIRLYAKHLDFLKQQVREMDRKIAEIMETLDTPITTITGIGPTLGAYILSEIGDISRFSSAAKLAAYAGIDPTMRQSGEYNGVRNRMSKRGSPYLRHAIWLAASSAVLHDPALKLYFQKKRDEGKPYMASVGHACRKMVSIIYAVMRDNKAYCLCA

SEQ ID NO: 97518 - protein, 387 aa, unidentified
MTEQFASASTAAAFDHDSTLVVALELSGKSWDMGAVLPGVVRRPRRGLAPRDLAGLLTQLERWKAEAQRAGRTIRRTVLAYEAGRDGFWIARSLLKQGIEVQIMHPASIPVERRGRRAKTDRIDLDMLLRTLLAWLRGEPRVCSMVQIPSVEEEDMRRPERERERLVSERIALENRIENLLYLHGVTGFKPRMKKAVERLDDLRDHAGAPLPPRKMEELRRLMARHRVMSDQLKEIEAARERTVMASEPDSAAQQIQMLAGMVGLGLATATGLVREVFCRSFADRKAIASFVGLTGTPFNSGGSEREQGISKNGNPRIRRLLVQAAWRWLRFQPDSALSCWFAERTGGAKGRIRKIMAVALARKLLVALWRYVETGEVPAGARFAAA

SEQ ID NO: 97519 - protein, 402 aa, unidentified
MNCVGIDVSKGKSMIAVMRPFGEVVVSPFEVRHTANELSELAGLLKSLDGETRVVMESTGNYHAPVAWLLHDAGLYVSVVNAMLVHDYGNNSLRRAKTDKKDAVKLANYGLDHWLTLPRYIPEEDTRLMLKICYRQYQQYSKVQTMLKNNLISLLDTTFPDANRLFTSPPRADGSEKWVDFVATFWHCECVCGRSEKAFTTQYQKWCRKHGYNFSEDKALDIYASACRHFGVIPKTDTAKLLVEQAISQLQTTSSALAALKQEMQSLAASLPEYPVVMGMFGVGPTLGPQLLAEIGDVRRFHSKKALVAFAGIDAPPYQSGQIDVRSRSISKRGSASLRRTLFLVMSVILQRAPMNEPIYQFMNKKRSEGKPYRVYMMASANKFLRIYYASVKSYLDSLEHD

SEQ ID NO: 97520 - protein, 393 aa, unidentified
MVALEDKLGFAGNPLGGSQRPAASSFAPWCFTHRPEAGTAAGVLVSTRTIAWAIEARIRKEGSTAMNDSKLLTADVQAFFGIDVSSQSLDLADFPASLAETFSNDPNGIARIVEHLRERPVARIVVEATGGYEVPLVLALHEARLPVVLVNPRQVRDYARALGILAKTDRIDAKVLARFAHDVQPPIREFPDENGRKLDALVSRRRQLLDLRTAELNRRHQANLPEIQRSIDSVVELLDRQLAEIDEQLARAIQASDTWRIKDQILQSVKGVGPATSHALLAELPELGRLNRREIASLVGVAPFNCDSGRLRKPRCIRGGRASVRSALYMAAFNAVRCNPQLRSFYERLRQAGKTFKVAITACMRKLLTTLNAILRDLTPWRDPTVANSQNTC

SEQ ID NO: 97521 - protein, 341 aa, unidentified
MLIIGCDYHPSTQQIAWLDNQTGEYGERPLTHRVEAEKFYRELQERETRVRVGMEATGQSRWFERLLSELNIELWIGDPAQIKAKRVRKKKNDREDARLLRKLMLEDNFPRIWVPDPENRDVRQLIWHRHRLVQMRTRVMNQLQAIAMNEGIRRQRGLWTKSGREQLEGLPLMPWTTRRRQELLELLDRFDPKIAELTEGVKQQAERRPEVERLQTHPGVGPITALTYVLVLGTPERFHCGKQVGSYLGLIPCEDSSAAHWRLGHISKQGNNMLRHLLVQSGISAARCEPDFRRQYLRLTMRRNQAIAKIAVARKLAVRLYWMWRRGWDYDEWKKFGSNVG

SEQ ID NO: 97522 - protein, 410 aa, unidentified
MNKQKANTVFVDHRNIVGIDIGKRKHAATAVTPKGAIIASLKSFDNNKAGVDLLERQVLVPATGKCKPRVAMEATGQYWNALHDELQRRGYPCVVLNPIQTGNRGAKRIRKTKTDPTDSELIARTILAGDAQATLVPDESIYELRLLVRHRWRMIRVHGVILRYAIGLLDRVFPECDGVFCKPFLTSMRALIREVGLTPKMLVANKAKAMKTLEKASRKRLATETINELLKRAEQSIGTRQGDSVINAQFRMIADYLDFAESQVQTINKELKERMTALDSPLMSLGIGAEVAATIFAESGDITRFPGPGEYAAFCGLDPSVRNSGDSIRGISHISKRGSPLLRWALYVSAPTMVTKHRDFTKIYERHLNKKRGHRFAMTVVAHKLARVIWRLFKDGRSFAKRPPKRLSKK

SEQ ID NO: 97523 - protein, 418 aa, unidentified
MSILNSLFVGIDVSKNSNQVYAMNFDEKKLLSFSSPNDTEGASKIENKLLECLVKNNYENVVIVLESTGMYSFHIATYLSSSESLLKYNVLVYCIDPKTSCNYRKSFSEMDKTDPKDAYILADMARAGKVNKLNPVKGPQKLAMQRLTRHRKHISEQIVREKLYVLNNIFLKFSAFDRKYDGIQPFYDPFCATAQEILLEYKSPEEIINTPIEDLTSFISTASKNRFADSKKVAEILTKCARVSYRLDKTAYEPINTAIASSLAILRCLENEIKHIDKEIANLTKGYNSDEYTCLISIPGIGPVFAAGILSEIGSIKQFDNEEALAKYAGLTWRRHQSADAEYEDTPMTKTGNSYLRYYLCEAASMAALRNPVYKEYYQKKFAEVKTHQHTRAIALTARKLVRLIYGLLSKNQLYKNQ

SEQ ID NO: 97524 - protein, 390 aa, unidentified
MAKRSTTVGLDVHKDTIDVVIAEPEADGEVRHFGTIGGDLGSVDRMLKRLRRPGRRLQFVYEAGPCGFQLYRHLTGQGVECAVVAPSMTPRRSGDRVKTDRRDAEALARLHRAGELRAIYVPTPEDEAIRDLVRAREDAVEIQRRARQRLKAFVLRHGFRYAGRAGWTFRYRHWLAGLRFPHPAQQLAFQEYIDTIGEAEKRVARLTEEITKALEGWCRAPVVRALQALRGVSLLTAATLVAELGDIARFATPCELMAYLGLVPSEYSSGAKTRRGAITKAGNPHVRRVLAEAAWAYQGQARVGRAMMCRQEKLPQAIRDIGWKAQLRLTTRFRRLAARGKARPKVATAIARELTGFISDIARHVPLTSQLAAGGIPRVVPVAARGSAGL

SEQ ID NO: 97525 - protein, 400 aa, unidentified
MISVGIDISKDKSTVCMLRPYGEVVEAPHSIDHTEQALNALIERIQSFDEDVKVVLEATGGYHQVVVTKLLSAGIFTVVVNPYIMKKYCAAALRKAKTDKIDSIRIASYGIDHWFSMTAYCPPDEIYAELKLLGRQYDRYVRLKVNCKIQLANLLDGVMPGIKTILQGTVPAYSTKDKLCDFVEKYWHYDNIKKMSEKRFIEDYGKWAKKKGYRCSESQAIAIYQLSKNNIPTLKSDTPSTKMLVLQAVKAVRDAEITLSLIISQMQEIASTLPEYSVVRNMKGVGDVLSVRLIAEIGDVRRFHNGSALVAFAGIDAPPYESGKFIGTKRNISKRGSSTLRKIGYEIMHSLKVVKPTEDSAVYDFIIKKETEGKPKRVAKIAGLNKFLRIYYARVMETYC

SEQ ID NO: 97526 - protein, 346 aa, unidentified
MMIIGCDYHPSWQQICWLDTLTGETEERKLDHASGEAEKFYRGLSGPVLIGMESTGNCQWFVEMATTAGHQVWIGDAAKIRASEVRQQKTDRRDAALLLKLLLEGRFPRIWTPSGEEKDLRQLLLHRHKLVRIRAQVKNELQHLAMNQGVTKRNKLWSKAGEKVLRELPLKPWASRRREDLLRVREMLNGQVALLDQAVVEVAEKNEKARLLMTQPGVGPITSMAFVLTMGDVSRFPRGKQVASYLGLIPREYSSGGHQRLGSISKQGNGFMRMLLVEAAQVAVRCDPQMRQEYLHRCHKKAKGVAKVAAARKLAIRLYWMLRTNRGYPEVVRVESSSRVPLVSAS

SEQ ID NO: 97527 - protein, 396 aa, unidentified
MGYVGLGEESSRRATKEEPVMMKNTRYVGLDVHGETIAAAVGEGHGKARSLGQFPNRPESVRRFIDQLGGPEGLKICYEAGPTGYALYWQLTKMGIECEVVAPSLIPRKPGDKIKTDRRDAEKLALCHQSGTLTRVWVPDAAHEALRDLVRARAATKRDESRAKHRLVKYLLRNGLRHPEDCRAWTHPWWRWVQAIKFDFEPQQVTLGDCVAEVLHQTERLGRLDLAIDRAIESAPPEKRAVVEALQAMRGVAKLTAVTIVTEVGTFQRFRKPTELMGYTGLVPSEYSSGGREAKGRITRTGNAHLRHVLGEAAWHARHRPWLNKRLKRTLPTLPAGVSEIAWKAQERLHRKFTRLTFHRKPPAKVATAVAREFVGFIWAIGRLAESHATASTGDT

SEQ ID NO: 97528 - protein, 366 aa, unidentified
MRKVMAGMDLHGNNVMVGIVDDQGARLQHRRLACELPEIIEFLAPYKAELESIAVESTFNWYWLVDGLRAAGFPVVLANPAKIDQYSGIKHADDKNDAYFLAELQRLKILPTGYVYDPELRPVRDLFRRRMSLMRQRTTLFLSAKSLHQRTTGRGLELRRLKAMEPEEAAALYTHPANQLIAQIQKEHIDSLDQSIRQIEKAVLKVALQQPYYQRLQTMPGVGIILGLTISMEVGNIDRFAGPGQFASYCRTVDAKRISNGKTKGDNNQKCGNKYLAWAFVEAAHGARRFDATCRRWYDRKAGKKCTTVATKALACKLAKAAWYVMAKGTEYQAGKIFPGLTEPKAEEISGEQASASKGVGPNPED

SEQ ID NO: 97529 - protein, 351 aa, unidentified
MIISQNVGIDGGLKDFKVCLMILHQDQSLKVKGTRTFTNNLKGFEAFFCWAEKKKEQTDPLRFTMEATGVYYEQLAYFLHRKAQHVSVILPNKTKAYFQTLNLKSKTDKLEARALAQLGLERKFAKWEPLSKQMYELKTLCRERVMLLEEKTMVSNRLHAETHCQSPNSSVVKRLKKRIDFIKRQIKEVEKQLKTIVKKDKELDKRMDNICQLKGLSFITVITVISETNGFALFRNRAQLTSFSGYDIVQRQSGSSVLGKTKISKKGNRYIRRALHMPSLCVIKYNEEYRNLYERVFERTKIKMKGIVAVQRKLLLLIFSLFKKNQAYDPDFSKQKTAKNCRQDTIPAYAG

SEQ ID NO: 97530 - protein, 415 aa, unidentified
MEGVTPKYYIGIDWASDKHDVCVVDAAGQIQLAGVSAHTAEGLAELLRRLTRFGAPAALPIAIERPSGLLVDTLVEAGFPVVPIHPNALKATRPRYAAAPGKCDPGDAYILADVLRTDGHRFRPLRAPSDATKALRALVRTRDDLVATRVQLANQLRSLLESFWPGAAVIFADVDSPIALDFLTAYPTPDAARYLAAKRLERFLLRAGYCGRRSAAELLGRLRAAPVTRAGPRERETKGQLVHSLVAVLRPLVTQVRELEGLLAAQLAQHPDGALLQSFPRSGSVNAAQILAELGEDRGRFASAEQLAAEAGVAPVTHSSGKHRGVACRFACNKRLRQALTTGADNSRHGSAWAAAGYRNARARGCDHPHAIRILARAWTNVLWRCWQNHSRYEAVRHGRALPFQNHSTDPSIAA

SEQ ID NO: 97531 - protein, 371 aa, unidentified
MAFYSKYVGLDVHMETIAVSVAEANGGEVRFIGEIANTPEAVLKLVRQLRKGEATLLFCYEAGPCGYGLYRQLIELGQACQVVAPSLIPKKPGDRVKTDRRDSMALARLLRAGELTAVWVPDEPQESLRDLTRAREDMKHWQRQAKQRLLAFLLRHGKTFSGKTRWTQAHFRWLETLKFDQPVQQIVFQEYVDMVLAMTKRVAALDEQVESAGAESVFAPMIEGYMALRGINRLTATTIVAEIGDFRRFPTAPGVMKYLGVVPSEHSSGPNKSRGGITKTGNGHVRRVLVEAAWTYRHPARKSPPLQRRAERTSEAVQAIAWAAQKRLCARYRKFEARGKKKVQICTAIARELAGFIWAISQALPQPTAKA

SEQ ID NO: 97532 - protein, 343 aa, unidentified
MAQSNLIAIDLAKNIFQVAQLQGSKLKSNKQASRKALLELLVKAKPSVVAMEACASAQYFARTAQSFGHKVMLLDPLFVKAFRQGQKTDANDAIAIAIASKVPNVRTCKILSIEEQALQSLSKVRALADKQKIQLSNQIRGLLLEFGIVINQSEAAFKAAIPDILEDAENTLPLELKHALALTYALYQQQCDNKVELQKQIERIVKQNDGCQRLMALEGVGPITAIELLSFLGDTTQFSNGRSTAACAGVTPLQHSTGGKAKIGCIPKRRGGALRRNLFLGARSIVSKLKNREASTEKERWIKSLLIRKGVKCAAITLANKTMRTAYALLKKGTNYEPTAPTA

SEQ ID NO: 97533 - protein, 407 aa, unidentified
MISIGIDVSKSKSTVAALGFGKEVIFKPFEIYHVKNDVNKLINKIKSLGSDLKIVMEATEIYHIPILISLVNEGFFVSVINPLKMKRFCQALSFRNVKTDKKDAIHIAEYGLMNWNDLIEYKEDKEEYVRLKQLNRSYQHYQKIRINHLNYLDKEIEKRHPGLKKLIPHANGNYQKDKLIDFVERWSNSEKILKRSQDQFVNDYEKWANKKGYHPNAQKAITIYQNALESIPTISSSNSKIDANVLDSIEFLRVINKTLNNILSQMKEIATELEEYKIAKEFSGIGEKLALQITAEIGDIRKYKNKKSLISFAGIDSPPYQSGNFSAKQRKISKRGNPILRKVLYMTILCMKKAKDETNPVYKYIIKKEREGKAKKVSNIAGINKFLRIYYAKVMEEKNKEELQKAA

SEQ ID NO: 97534 - protein, 343 aa, unidentified
MKLTTVGIDVAKNVMQVHGVDERGKAVLKKQLKRNQVLAFFGNSEPCLIGMEACGGAHYWARKLEKLGHTVKLMAPQFVKPYVKTNKSEAADAEAICEAVGRPTMRFVPIKTGEQQAVLSLHRARQSFVKARTAQANQIRGLLCEYGIVIAQGIGHIAKRLPEILEDGEHDLPGQFRVLLQRLGEHLKELDRQACELELQIQLWHKENEASRKLAAIPGIGPITASALVASIGDVRDFENGRQLAAWLGLVPRQHSTGGKPTLLGISKRGDTYLRTLLIHGARAVTRVAERKAGHAESWLARLMARRNKNVAAVALANKNARIVWALLAQARTYRANYKAIAA

SEQ ID NO: 97535 - protein, 348 aa, unidentified
MALTIVEDTRAVTGGVDTHADMHVAAALDPVGGLLGVGEFPATAAGYARLLGWLGGFGTVCLVGIEGTGSYGAGLARHVTAAGIRVVEVDRSDRQDRRRQGKSDPLDAVSAARAAQSGRARGEPKGRDGAVEAIRALMVAKRSARSERTQTINQARALIVTGPDNLRARFARHTAAGLVSELAALRPRPGATVGYATRIALRELGRRAEFLDGQLGRLDELIVPLVTARAPALLALHGVGPDTAALLLIAAGDHPHRLRSEAAWAHLCAVAPIPASSGKRTRHRLNPGGNREASHALWRIVITRMSSHAPTRAYVERRTKEGLSKKEIIRCLKRYAARQVYRHLRPAG

SEQ ID NO: 97536 - protein, 427 aa, unidentified
MAYRIAAVDVHKKMLAVVIADVEGEGEYHFERRKFGASPEQLHILAQWLVEQEIEEVVMESTAQYWKPVWGTLERYWKPARQKRDGATKMSGKLHLCQAKSNRGPRGRKNDYADAERMIKRLVAQELVLSFVPDPEQRLWRTVTRRKHQLTRNRVRFQNQLESLLEQAHIKLSSFVSDLLGLSARRMLKAIAEGETDPAAVAALADCRLRATPAELRDALGACAELNIVYRRLLQMALDELKLMEEQIEQLDREASNLLQEHHDTVQRVAEVPGFGVDSAMQMIAEVGAEAAAFETAEKLASWVGVCPGEEETAGKSKSTRSPKGNSTMRRLLNQAAQSAVKVKGSIFEITFRKLQPRLEYKEAIWAIAHRLCRLLWMILHKKIRYEERGPAVSAKSQRARTARMIKTLQKFGYRVEGGPLPAGSPA

SEQ ID NO: 97537 - protein, 425 aa, unidentified
MDFKQNQKINQVTEKTLVVGIDIAKRTHFACFVDDRGRVLQKSFSVSQSGDGFDLFYQRILAAMKENDKTEVIVGIEPTGHYWLNLAYFLEERGIPLAMVNPMHVKRSKELDDNLPTKHDRKDALVIARLVKDGRFSYPRILKGMEAELRVGSSLRSKLVEELGAVKNMMIRWLDRYFPEFTQVFPSFGKMALAALECTPFPSDFHQKQPDEVLSLYRKVEGLKSPQRPKAMRLIEVAANSIGVTEGREMARIEIATLVRRYHQLVQDIESIAQRLVELVKTSVEYEWLSTVPGLGDTTIVDLLAEIGSFSHYEDPRQLIKLAGLTLRENSSGLHKGQKRISKRGRRKLRALLFRVMMPMILHNEAFKKLHEYYTNRKVNPLRKKQSIVVLCGKLLKVLHGISTKQKAFDAQRMMRDIPSLVEAS

SEQ ID NO: 97538 - protein, 373 aa, unidentified
MSVNLRYLGLDVHAETIAVAVAERGAEVRSLGMIPNDPTAVARLIRQLGARGQLRACYEAGPCGYVLYWQLTKLGVACAVIAPTLVPTKPGDRVKTDRRDAEKLARCHRAGDLTVVWVPDAAHEALRDLVRAREAAKADQLRARHRVSKLLLRHGIRPPADAKPWTQRHRRWLDTLAFAPPAQQATLADYVHEVDHAGARLERLETALDAAVAAAPAPMRAVMAALQTLRGIRQITAATIVSEVGPLSRFTHPRQLMGYSGTVPSEHSSGSSVHRGAITKTGNAHLRRVLLEAAWAYRFPPKCAKALRTRQRGQPAAITEIAWKAQHRLHTRYRRLLGRGKPMPHVITAVARELVGFIWAIGVTIEREVPAAA

SEQ ID NO: 97539 - protein, 357 aa, unidentified
MVESKTEAKSSEVGVTNPYRRTEHCDKIHGYRCDKEVGVIGIDVSKDHLITSRGRVRKYKNNKRGYEEILKMKPCTIVLEPTGVYAIRPCQYFKEKGIKVLQVSPNVLSREKEFRGKKTDFYDAEKLENMVDKAKEYEYNPLRELVTLYLFLKDIEVKYKNRLKRALFLVSDNDKINKDRLERLAKGDFTQEELYQLEYTPIVLEEIRVLAKTLLETQEKLEEVRRMIEEQVPQDHVLLTIQGVGRLAAGIIIGIVGDVKRFPRPESFVAYCGLDPVVERSGKAVISRGISKRGNKYLRSLFYFLAGRNYSKNPTLLKFYESHKDRLQGKKLFTALARKLARIVWSVWYNNKPYEPK

SEQ ID NO: 97540 - protein, 343 aa, unidentified
MLSNNIIAIDLAKNVLQVCHISVHGEMLSNKPLSRQKTKEFLAKAKSSIVAMEGCCGCHYWGQLAEQFGHEVRIINPKKVKGYLEGHKTDHNDALAIANAAIQIGIKYSRPKSLEQQSMHSLETSRRFLSRSVVSLALHIRGTILGYGIANSRGEKGLKASVQTVLDGETSIPTNVVSVLSMLWEQYKELKAKLIAFEKEKNALTRQIEPCQRLMEIEGIGETTAAMLYTTLGDGKQFKNGRQASAFVGLTPKQHSSGGKVFMIGIDKCGGVKELRSLLYLGAMSYVGRLPEKPKTQKDAWLRSIIDRIGFKKACIALANKVVRTAWAMLRYETEYKPVLLTD

SEQ ID NO: 97541 - protein, 365 aa, unidentified
MIVDNYTTIGMDVSDRKIQVCVMAKSGVNPKIVLETTIPTTKEGLQKFLSTQDKNSPVVFETGTHCRWMHEIAEGMEFKVYVANPCRLKMITESKTKNDVNDARMLARIALSDPGLLHPVKLRDAEHQKMLNLHEMRNLLVKQRTATIVQMRAIAKAMGFRIPKTSTNYFHKLDRSSWPKDFSDIAWPMLKNLEQLDITIKTYEKLIRDLAETPTFKARVDRLREIHYVGLFVATGFVAVTGGDIDRFEKPRDIGPWLGLSPKQDQSGDIDKQCHITKAGSPFMRRLLVESAQMILRDGSIQTNLKMKGMRICARGAKIAKRKAITAVARSLAVLMVAMLKKMDTPYVPLSEANEKELAAMLALA

SEQ ID NO: 97542 - protein, 413 aa, unidentified
MDVVHPRCVGIDCSKKDAKVCVRIQGQGRRRGSSTVTTWGATTSQILALREYLVAQKVTCVVIESTSDYWKPFYYLLDDELNVMLVNASRVRNVPGRKTDVSDAAWLADLGAHGLVSASFVPPPSIRALRDLTRTRTHITRERSREIQRLEKLLEDAGIKLSSVATDITGVSGRAMLEALISGQRDPAVIADLAQRRMRSKIPALTEALTGRFSEHHSFMARLFLDRIDSHSADIARLDQRIEEAIAPFVAARELLASIPGFSRIVAEVFIAETGADMAVFPTAGHLASWAGLSPGSNESAGRVKSTKTRPGNRYLKGALGIAALSAARSKNTYFSAKYRRIASRRGPMRATVAVEHAMVIAAWNMLTNGDFYRDPGADYYTAHHPARSKARALNQLEALGYRVTLQPLTQSA

SEQ ID NO: 97543 - protein, 456 aa, unidentified
MPRGTNAPGARFREFFNKVPTLAARSGGEGLMEVIHRRCSGLDVHKETVVACVRLVSDGKITREVRSFETTTCGLLLLLAWLTEMGCTHVAMEATGVYWKPVWNVLSDGDFELVLANAAHIKNVPGRKTDVSDAAWIADLLAHGLIRSSFVPEQEIQELRELLRTRKQLGRQQSNHIKRLQKTLESANVKLDSVITDIVGKSGRAMIQALIAGQTDPVKLAALADRRIKASPQQLREALHGRVTDHHRFLLHLHLQHIDFADAAIQDIDRNVTALIARMDQEVQAGQTRATFQSLILLLMTIPGIDVLSARIILSEIGRDMSRFPTAGHLLSWAGLCPRNDESAGKRRSTRLRKGDLWLKTLLVQCAWAARRKKGSYFNAQFLRLRGRRGPKKAACAVAASLLTTIYHMLKDGTQFQDLGADHFDRRSKDVRAKRLVTQLANLGFDAKITPFAQAA

SEQ ID NO: 97544 - protein, 411 aa, unidentified
MQVVHERCCGLDVHKKTVVACILITLANGEVQRHIRTFSTMTAGLLALSDWLESLAVTVIAMESTGIYWRPVFNLLEEGRSVILVNAQHMKAIPGRKTDIKDSEWLADLLRHGLLKASFIPPAPVRELRDLTRYRKTLVQERAQEVNRLHKVLETANVKLTAVATDVLGKSGRAMLEALMKGATDPEILAELARGRLRQKLPQLQEALDGRVEPHHRLLLKHILAHIAFLEETLEQLQRDIEERLHPFEEAMTLLMSIPGIQALAAATIVGEIGDDMTRFPSAKHLVSWAGVCPGNKQSGGKRLSGKTTRGNATLRAILAEVVWVLSHMKDNYLSAQYHRLARRLGKKKAVMAVSHSLLVIIYQILSTKQPYSDLGADYFEQRDSARLTQRSVRQLEALGYAVTLVPKEVA

SEQ ID NO: 97545 - protein, 343 aa, unidentified
MRTITTIGLDIAKSIFQVHGVDADGDVVLRRQLKRRYVLSFFQKLPPCLIGIEACASSHYWSRELQALGHTVRLMPPAYVKPYVKRQKNDAADAEAICEAVTRPNMRFVPTKTPEQQSCLMLHRTRHLFIRQQTALINSIRAHLAEFGIVAPVGRNGVEQLLEVVADANDARLPEIARACVAALGSQLQALKAQILAFDRCIMAWHRSNETSKRLDAIPGVGPALATALVASVADPKAFRSGRDFSAWIGLVPKQNSSGGKDKLGSISKQGDRYLRSLFTAGALAVIRYAKLQGTKHRPWLTALLARRPTKVAAIALANKMARMAWAMMTRGERYKEPVALAA

SEQ ID NO: 97546 - protein, 426 aa, unidentified
MNATTNFAATIGLDWADQKHDLWIQPAEGSKAQHLHLEQTPEALHEWAAKLRERFGNRPVAIGIETSRGPVISALLAYDFIVLFPLNPKALKDYRAAFSVSGAKDDRTDAQLIEEFIRLHRHKLKALEPDTQLTRQLAGLVQNRRHLVDERTRIVNQLHAVLKTYYPLAETLLPRQMNTPLAAELLARWPDLETLQHAELKTLRAFFYKHHSRSARKMEERISQVQKARALTSDPAILTPARLLVVGLAGMLKPLHQALARLDKEIEQAMDRHPDAPIFRSFPGAGPALAPRLLVAYGTNRDRFHDAGQVAQLYGVAPVVIQSGNSKTTHIRHRCPKFGRQTFHENAGCALKQEPWARRYYDQHKKRHDDKHHQACRALAYKLNRIYFACWKRREKYDPQRYLRALAKNGSPLHKQLEIPSPASGE

SEQ ID NO: 97547 - protein, 451 aa, unidentified
MANRGKTACGTTILGRSQMFGKEIDDGTWWTVGVDCGEERHRFVLLDDRGNRESACWVINRRDKIEEAVAQMVLALPGGVRLRVVTEGVRSLGWVVAQVSGSLGMEVWQVNPKALNHYRDLEGQPRKDDDIDAYLAARMVVFGMEGCRVAVDPQPEERALCRLTRLRRQLNDRRKEVKNRLRSLLVELAPEVISKDWEGPTHDSKGMRAVLRRWPAFEGLEKARASTIEKMLASSTRLGARCGAMSAPLKEMATRVEMAPMELEIVKMDISMAIDELDVLDGSVAKLEKEIRRRVMEHPVGRKLMCMPGEGPVTVGTDIGEVLPVARNVSEGQAATYSGLTPLSRRSGKGDRPSKLARGVNKHALRTNFLSAFAAVSASAIDAAYHQKQKDRHQGHPKSHVKATLALARQRFKIKYKLMTTEAVYDKEILISSHLERQRRVIADQNRSHVA

SEQ ID NO: 97548 - protein, 320 aa, unidentified
MEKEKEYVGIDVAKSSMDIAVHATEQRWSFPNDDYGISKTVSLLRKLAPVLVVMEASGGIELTLTAALASAGLPLAVVNPRQVRDFAKATGKLAKTDTLDARVMAHFAATVRPVPRPLPNAQAEKFSSILARRRQVIEMLTAEKNRFGTANKAVRQGIEAHIKWLEQELSNIDDELRQSIQRSPVWREKDNLLRSVPGVGPVLSTTLLAELPELGILNRRQIAALVGVAPLNRDSGTMRGKRTVWGGRAPVRATLYMATLVATRYNPVIRRFYQHLCTAGKAKKVAITACMRKLLVILNAMLKHRAPWCYVNAQMFGLCH

SEQ ID NO: 97549 - protein, 347 aa, unidentified
MKTTSYEGKPVFIGLDVHREFFVASCICDGIVVKRCRMPGTAEAVISLVSKEFGGASVRAAYEAGYSGFWLYRKLVVAGIDCIVVHPASIEVSSRDTVKTDKRDSLKIAQQLAAGRLRGVRVPTEEQEQQRLLTRTRDQLMNKKRRVMVQIRMRLHYFGLFPASIQRRIKLQDVDEILGSLDGDWQRTIGMMRDEWVELAKSIKEIDRLLVEQAKDDPLDAVYRSVPGVGPLISRILSAELGDMSQFRSERALFSFTGLTPSEYSSGGHICRGHISRQGNTRLRHMLVEAAWKAVRKDPVIKEYYIKLSERIGKRKAIVAVARKLAGRIRSALRKHEHYRLNYRAAA

SEQ ID NO: 97550 - protein, 338 aa, unidentified
MLNIGMDVHLKRTSLCVLDQNGKTLSERTIRGSWDKVIEEVIKVKQEYHERITVCFEASGGAGHLFDQLDKICDRVVVAHPGRTRLIFQSKRKNDRIDAQKLAKLVFLGEVPPVYMPGPQVRAWRQMIEHRDRLVKKRTRVKNEIRSLLHSQGVKAPYKLWNKAGLVWLSGLELESFPQLKLNLLLEELTFHQQSLRVVEKELARHAGKNPAVALLMTIPGVGIRTAECLVAYIDDPRRFGKPGEAASYFGLIPSLDSSAGKDRLGHITKQGPATARRLLVEAAWFAVRRSPSVKARFDRLVGNDPDRRKIAIVAIAHYLVRVSLSMLKSGECWREAA

SEQ ID NO: 97551 - protein, 328 aa, unidentified
MNNVGVDVGARELVVSIDRNEMRESGVVFTNDADGHRKLIRWATKKGARAQFVLESTGVYGLDLAFALHRAKRVVVMVANPRAIAAFAKASLQRSKTDALDAETILEFSMRMPFVAWNPPAPSILELRALSRRIEAMSKTVTQEKNRLHASQQSKELSDFVKEDIRELVELLKGRIGRLRKQALLVIEQDPELAKAFGHITSIKGIADAAGIQLLAELATLPKDMTTRQWVAHAGLDPRQHQSGTSVHKPARISKIGNAHLRRALFLPAMVASRWEPNVKAFYEKLLAKGKAKMQALVAVMRKILHSIHGMLEHDQDFDGEKFFVVKG

SEQ ID NO: 97552 - protein, 498 aa, unidentified
MRLWRTTWHENEVQKQYRWAGQPVIQATLDGDCLEVGTYSVTTQIPRRRLTRAGKGITFCRTRKREGRIAVSVTDLRRSNRLHYGGVMQTLVERGCGLDVHQATVVACLLIVLQNGKVQKQIRTFGTTTRELLSLREWLLSERCTHVAMESTGVYWKPIFAILEGAFEIVVANAQHAKKVPGRKTDVKDAEWIADLLCHGLLRSSFVPPKPIRELRDLTRYRRKLVESQTAERNRLLKLLETANIKLASVATDVFGVSGRLMLEALVEAKATPQEMAELAKGRLRQKIDELEPALEGKLEEHHRFLLRLQLQRLEAAEKDLAVLEQRIQERPKPYEAQLTLLDEIPGVDWTLAAVIIAEMGVDMSVFQSVSQAASWAGVCPGNNESAGKRKSSRIPKGNVYLKTALVEAASAAAKAKGTYLRDKFYRLKARRGYKRAAVAVAHKILVAIYHMLSHQVCYDELGDLYLDKLNKHHLTRNLVHRLERLGYNVTLEEKKAA

SEQ ID NO: 97553 - protein, 332 aa, unidentified
MSNNIHFSCICGIDIAKKVMQVFKVTSDGVVTNTSVSRKDFLEHFRNIPPALIGMEACATSQHWGRELQGLGHTVKLLSPKAVKPYVKGLKNDRNDAEGIYRALIMGVREVSIKSTAVRDLSLLQTMRAKRQRDKVATINHIRGILAEYGLVMGKSVRAFVSNAGTLIARLKESETTSQLVISELEKLLKEVKEIVSRIEELESSIKKIASENKNYDLFRSAPGVGPITAAMMVVLLCNPTVFKNGRDFAAYLGLAPMSFGSGGRNQVTGIPSKYRCHNEARSLLVQCAHSITRLKYKSDWVASILSRKPKKVAIIAIANKLARQLLSLIHI

SEQ ID NO: 97554 - protein, 346 aa, unidentified
MMIIGCDFHPSWQQIAWLNTETGETGEQKLVHASGDAKRYYAQVPGPALIGMEATGNSQWFVELAQELGHQIWIGDAAQIRASYVRKQKTDRRDAAHILKLVVEGRFPKLWTPDQEQRDLRQLVLHRHKLVEIRSRVKNELQHLSLNKGMQRKAKLWSQAGQKLLRELPLQPWATCRREDLLGLLGMLNEQIGKLDEAVQQAADEHPQARLLMTQPGVGPNTALAFVLTMGDVSRFPRGKQVASYLGLIPREESSGGRQKLGAITKQGNRLVRSLLVEAAQIAVRLDPGMKKQYLHRCHQKPKGVAKVAAARRLAVRLYWMLRTEKAYPEIVRIESSPRVALVSAS

SEQ ID NO: 97555 - protein, 402 aa, unidentified
MNAVGIDVSKSKSVVAIMRPFGEIVSTPFEIKHTASDIHSLIELINSVEGESRIVMEHTGRYYEVLAHQLLEANLFVSAINPKLIKDFDNDSLRKVKSDKADAVKIARYALDKWQNLKQYNVMDELRNQLKTMNRQFGFYMKHKTAMKNNLIGILDQTYPGVNTYFDSPARSDGSQKWVDFASTYWHVDCVRKMSLNAFIDHYQNWCKRKKYNFSQSKAEEIYGKAKELVPVLPKDAITKLIIKQAVDQLNSASTTVESLRTLMNETASKLPEYPVVMAMKGVGTSLGPQLMAEIGDVSRFTHKGAITAFAGVDPGVNESGSYEQKSVPTSKRGSSDLRKTLFQVMDVLIKTHPQDDPVYQFLDKKRAQKKPYYVYMTAGANKFLRIYYGRVKEYLASLPES

SEQ ID NO: 97556 - protein, 401 aa, unidentified
MNAVGIDVSKGKSKVAVIRPFGEVIAKPFDVVHYPDQLTKLADYIKSLDGETRVVMEYTGKYSEPIANFLCNAGIFICMVNAKLIHDYGGDTIRRAKTDKIDALKIAGYCLDKWAKLTQYEPVDEQRKILKTYNRQLSEYTKIKTMLKNNLISLLDQTFPGINELFTSPAREKDGHEKWIDFVKAFPHCNSIISLSNHKFTEKYEKWCRKNGYKFCSQKAQNIYERAVNCFPTLPFDKFTKTLIIGAVTQINSLCETIAKVKSEMSKIASELPEYETILSMHGVGKTLAPQLIAEIGDIRCFPKRSSLARFAGIEPPENQSGIYNQHSRRISKQGSPHLRKALFQVMCCVLQLKHEHEPTFQFLDKKRSEGKPYKVYMIAGANKFLRIYYARVNECYEEMV

SEQ ID NO: 97557 - protein, 414 aa, unidentified
MDIVHTHCAGLDVHKKTVAASIIVPDEKNGLQKETRTFGTMTCDLLALSDWLMGYGVTHVAMESTGEYWKPVFNILENNFEVLLVNAQHIKAVPGHKTDVKDSEWIADLLRHGLLKASFIPPLGQRELRELTRYRSTFVRERATLVNRVQKVLESANIKLASVATDVMGVSGRAMLDAIVQGHSSPAEMAELAQKRMRQKRDLLAKALEGRVKSHHRFVLTELLCQIDSLDETIERFNKQIEEYCHPFEEAVVLLDTIPGVGREVAEVIVSEIGIDMSCFPSADALASWAGVAPGNNESAGKRRSGKTTKGNKALSVALNQAAHGASHTKDTYLSAQYRRLAARRGKKRAIMALMHSILVIAYHLIQRSEPYRDLGGDYFDKRRPEATAKHLVKRLEQLGYSVSLQQPAICPVA

SEQ ID NO: 97558 - protein, 370 aa, unidentified
MEKLITYVGLDVHKETISVAFAQGGDRGDACYIGKIANSAGALSKLARKLSQEGRRLRFCYEAGPCGYAIHRHLTGLGHDCVVVAPSLIPRRPGDRVKTDRRDCLGLAKLDRAGALTAVWVPDVAHEAMRDLVRARAAAARALRRARQQLSGFLLRHARVRSGKNWTRAHRRWLAEQRFEQPAQRIVLEDYIQAVEEAQARCERLTAQIDALVASWSMAPLVKALQALRGVALVTAVTLVAELGDLTRFESPRQLMAHLGLVPSENSSARRVRRGGITKAGNGEARRVLIEAAWCYRFPARVSRCLLERSSGLPKALRDIAWKGQLRLCGRYRQLRAQGKDAPVVAAAIARELLGFIWAMAQAVGPAKTA

SEQ ID NO: 97559 - protein, 336 aa, unidentified
MDYYSAIDLHSNNSFLVVIDECDKIIYERRLPNDLDKILFVLACYKDHIRGIAVESTFNWYWLVDGLKAAGYALHLVNTTAVQTYSGLKYTDDKHDARWLAHLLRLEILPTGYIYPRETRPNRGLFRKRMQLVQQRTRNILSLKSLYARWLGASFSTNDFYRNPDEFLPKDKAISLIARPNIELFKLMTEQIITIEKMLLSKKFKQRELFLLIKTLPGIGDILAMTVLLEVGDITRFKSVGNFSSYSRCVESKKVSNFKKKGSGNRKCGNKYLSWAFHEAAHHARVFYPEVDKFYERKKRKTNRIVAIRAVAHKLARACYHVLDKQEAFDMSKAFN

SEQ ID NO: 97560 - protein, 406 aa, unidentified
MRYVGIDIAKKDHQIAAVDEFGNVILKSFSAGNNESGFAKIAEKLEAARIESDECLVGMEATGHYWISLWEFLDANGYEVVVINPIQTDAFRKVDSLRKTKTDAIDSVLIAEYLRFANPESSKMANPDVEQLRELARFRSFLVEQATQLKNKAIRVLDQAFPEYGKLFSNTFGEASKALLKQCPTPEEVLATDIRTLTRILKENSGGNCGRAKAEAVKDAARSSIGAKFGARALSFEIKLLVKRLSFTQVQIEELEDEISELLHRSDGHWLTTIPGIGDSLAASIAGGIGDPDRFETPKKLIAYAGMDASKYQSGANQDTNGHMSKRGSSELRRALMLAADKVRIYDPYFGEYYDSMKARGKHHYVALSGVARKLAGVCLSLMREQRPYESEPPEHHLPGHLQRQA

SEQ ID NO: 97561 - protein, 349 aa, unidentified
MDRTTYGLDLAKNVMQLHWVDAETGEIGRKKLGRAKLAEHFAQLRPVRIAMEACGSAHHWARVLGGLGHQVELLPARQVKPFVRSNKDDSADARAIWLAAQQGDIRRVPLKTCEQQAVLALHRTRQHWVSVRTATVNALRGHLYEFGVVLRGGRKAGLKALGEQRADIDAQLPGVMRGLLDGQLQMLTQVQQRIDALEHEIAALQKQLDNAPTLREVPGIGVLGATALAATLGDGQAWRSGREFSASLGLVPAHSGTGGKTRMGKLSKRGDPYLRTLLIHGARSVIEHAKHKPRWLEQMLQRRPPNVVAVALANKMARTAWALVAHGREYQREWKSTPPKGCAAQAAAA

SEQ ID NO: 97562 - protein, 347 aa, unidentified
MVTLGSDSHKRTHTLVAVDGNGRQLGSRTVAATSAGHLEGLRWAQQWPERKWALEDCRHLSRRLEADLLAAGEAVQRVPPKLMAGARQGGRELGKSDPIDALAVARAALREPGLPVAQLDGRSREVKLLLDHREDLVADRTRMQNRLRWHLHELEPGYEIGAGTLDRRGVLESVTALLSKREGVVAEIASELVERIGEVTASINQLERRISAMVAELASSLLALEGCAGLTAAKIVGETADVSRFGSRGAYAMNNGTAPIPVWSGNRSRFRLNRGGNRQLNAAMHRIAVTQIRLSGRGRVYLEQRMAAGNTKTEALRALRRRISDEVYRRLWQDHFARSARPAAVAA

SEQ ID NO: 97563 - protein, 341 aa, unidentified
MANATLIGIDLGKHCFFLHAQDAHANEVWHRKMNRKQLYAWLAQAPACVVAMEACAGAHWLARKCQSFGHQTRLIAPQFVRPFVKSNKTDFADAQAICEAASRPSMRFVALKTPAQQVLLALHRVREALVSERTATSNQIHGFLLEFGVSLPTGALAITRLPVLLDDPVHALPLPMVTLLRRLHERYKQLREEIDALEAQIKRQVLEDDAGQRLLTIPGIGPITASSLLAMAGDARAFRCGRDFAASLGLVPRQHSTGGRPNLLGISRRGDRHLRSLLVQGARAVMRHIERRTDALGRWVQALLQRRHSNVVACALANKMARIVWAILARGGEYRAHPGVA

SEQ ID NO: 97564 - protein, 360 aa, unidentified
MQTKVNEKLFDGQPIYIGIDCHKKNWTVTILGEHYEHKTMSQNPDPDILASYLRRNFPGAEYNAVYEAGFNGFYPCRKLKQLGINCNVIHAADVPTRQKEKLQKIDPVDSRKLARSLRSREFEPIHIPDPNLEADRALVRQRFRMMKDVTRTKARVISLLFQFNIIVPDRFTLGQTRSWSKVYITWLKELQIEYESLKQTLDNYIRIGELQRKELLYANRQVRSLSQTDAYRGNYNLLISIPGIGFLTAMTFLVQIGDIRRFERLDDLCDYVGLVPMMHGSGDKMSTGKLINRGRKELKIMIIEAAWAAVRLDPALIAKFNELTRRMNKNKAIIRIARKLVSRMRYVLMAQEPYKLGITE

SEQ ID NO: 97565 - protein, 401 aa, unidentified
MEQFIGCDAHKKYSVFVAVDERGEASSAIRVEHDREQYRQFLEGLPAGSQIALEAGGHYYWMVDDMEAAGHHPRLAHPLEAKKRMGKTGKKTDQVDATGLGILLRNGTLPEVWIPPAELRDQRELLRLRMFLVQQRTRLKNRIQGTLARYNIQIAGVSDLFGVEGRLRLGTRLGELPEHTRQSVELELVTLDFLEVQLEDTEKRLAELMKVTAEADLLKTLPSVGRILSMVMTLEIGRVERFPSAAHLASYAGLVPRVHSSGGHTRLGQICGDVNQYLKWAFIEAGNLVVVHQKHLAGQHVVRLYQRVKRKKNHQKAVVAVARHLAEAAYWILKKQEVYRDPQPQPKVPVKAQTANVFVGARETAEPAIAHAGQSAATAASVPAIRAGVQPGMSAGGKRCA

SEQ ID NO: 97566 - protein, 377 aa, unidentified
MSKIRFVGLDVHAETIAVAVAESEGEVRSLGVIPNHEESIRRLVKKLGPVEQLRACYEAGPTGYVVYWQLTALSVKCEVVAPTLVPVKAGDRVKTDRRDAEKLARSYRSGDLTPVWVPDAAHEALRDLVRAREAAKQDHLRARNRLSKFLLRHGWRRPSGMKAWTKRHMRWIKGEVHFQQLAQEITLLDYVHEVDHAAARIERWEGAIDEVVKSAPAEMQAVIGALQALRGIAQLSAVTILSELGAISRFQAPRQLMGYSGLVASEHSSGERSWRGGITRTGNAHLRRVVIEAAWAYRHRPWVGGVLHRRQEKLSTEVKEIAWKAQPRLHARYRRLTARGKNKQQAITAIGRELVGFIWAVGIQVEAEKSKQKMCAI

SEQ ID NO: 97567 - protein, 394 aa, unidentified
MILVGIDIGKKQHIFSIIDKQTGEILSNPFVFNNNQDGFLLLIGKLSSYAKSQLLIGMEDTGHYHFALLKYLLDRRYTVALINPTTTDLTRKLQGGITKNDPLDSLTICDVIGSNQRKKPYRITTVNRFDLYEQKQLTRHHHNLKEELNIYKNRLQKCIDIVFPEFNSLFRSKYGIVYMNVLKTFASAEKIANSDIRTIRKCFEYEGRGKRIQLSAEQLKTTAKDSVGISSVAEEIQIRHIVCQIEMIEEQLSEIDKKIEEFSLQNNSPILSIPGISHFSGTSILAELGDICNYTKASQIIKFAGVAPYHYESSQFIAQHTAITKKGSRYLRKTLYQIILPVINHNRVFTVYYHKKLAEGKSHRCAQGHCIRKLLRVIYHLLSTGQTFDPALLI

SEQ ID NO: 97568 - protein, 320 aa, unidentified
MSGMLVVVGIDVAKAHVDVAVLGRAWPAQRFANDIDGHSALAAAMQPLAVSLVVMEATGGYEAPVACALQATGLPVAVVNPKQARDFAKGIGRLAKTDRIDAEVLAELAAVLVRRDDLARFLRPLPDAQQQELAALVTRRRQLLTMLGSERLRLPLAVPKVRPSIEAMITAIRNQLDDVEGQMQTQVHEHYAELDALLRSTKGIGPIASATLIAALPELGRLNRREISALVGVAPMANDSGTVRGTRRIHGGRFDVRNVLYMATLSARTCNPAIRAHYERLRAAGKRPKVALVACMRKLLTILNAMVRTSTPWTNNLHRA

SEQ ID NO: 97569 - protein, 501 aa, unidentified
MEEVDELELLVERVAGLDVGKAELVACVRVPHPSKPGRRMQEVRAYATTTAELVVMAVWLRQHRVQRVVMESTGTYWKGIYYLLEAEGLDCWLVNARDVKNLPGRAKTDTLDSIWLAKVAERGMCSPSLVHPEPIRRLRNLTRYRRALVADRGREMQRAEKLLEDAQIKISSVLTEVHGVSGRAMMEALIAGKRDPHTLARLARGRAKVKTAQLEEALRGFFTDHHAVMLRMMLDNIDRMSAQISALDGRIEEAVARFCDRVDRLVDLPGVDRVAAAELIGEIGVDTSSFPTAAHLVSWGQVLPADPPVGRQDQTQGPRQRQPVAGRHSRPDRVRPVPHRHLPRHSLPATSQTPRQAESDRRARQLGTHSRLPPARRSRGPLRRPRARLLRIADQHEPPRPQPRHTAAGDHRPEDRHPRRKGGHRRIRCLTTTYATLDTWACTHHHPGAWSRGRATEDFRVRSPEPQDGWAAPDSARSGKCRPISSERESVAPVTLARLVT

SEQ ID NO: 97570 - protein, 353 aa, unidentified
MGIVVALDVHRKQITYKALDRDSGELRRGRIAPAARADVRAWLAQFAGCEAEFALEGTTGWRFVVEEIERAGHSAHLADPAETAAKRGRKRRAKTDNADCDLQLRLLLAGELSESWIPPAQILELRTRVRMRKTLIDQRTAWQQRIQAQLFHQGIPAGLRLRTQAGRDALAQAALSPAGRELVALGLRMIDALDRELAPLDRELHAFARRQRGCRALIAGLYGVGPVSATAILAELGDCRRFASSDDAVRHSGLDVTVYQSDSKRAAGRLSHEGPELLRWALFEAAVSAARTGSPDHAYYLQVAERLDHTRACLSVARKLCRRAYHILRELGDDALAPVDRDRHAEEATAAAA

SEQ ID NO: 97571 - protein, 402 aa, unidentified
MNAVGIDVSKGKSMVAIMRPFGEIVSTPFEIKHTTSDIHSLVELINSVEGESRIVMEHTGRYYEVLAHQLSEANLFVSTINPKLIKDFDNDSLRKVKSDKADAVKIARYALDKWQNLKQYSVMDELRNQLKTMNRQFGFYMKHKTAMKNNLISILDQTYPGVNTYFDSPARSDGSQKWVDFASTYWHVDCVRKMSLNAFIDHYQNWCKRKKYNFSQSKAEEIYGKAKELVPVLPKDDITKLIIKQAVNQLNSASTTVESLRTLMNETASKLPEYPIVMAMKGVGASLGPQLMAEIGDVSRFTHKGAITAFAGVDPGVNESGSYEQKSVPTSKRGSSDLRKTLFQVMDVLIKTHPQDDPVYQFLDKKRAQGKPYYVYMTAGANKFLRIYYGRVKEYLSSLPES

SEQ ID NO: 97572 - protein, 372 aa, unidentified
MPEIQAFVGLDVHKASISVAVAEAGRAGELRRLGSIPNTVEAINRLVQRLGKRYGCLEFVHEAGPCGYSLHRHLERLGQASHVIAPSRIPKQSGDRVKNDTRDALLLARLSRAGELEPIWVPDEVHEAIRDLVRARQAASFDVRKARQRIQSFLLKHDRRYSRKPWGRQHRVWLAKQSFTHPAQQIAFENYLRAEAQAVSRRIELDQQIREVLPSWSLLPVVQALQSLRGVALIIAVCVVAEIGDMSRFRTARHLMAFFGLVPGERSSGATVRPRGITKTGNKIVRSHLLEAAWCYRLRAKIGERLVRRDGSLPELAKEIAWKAQVRLCGRYRRLMARGKKSQLVTTAIARELVGFIWAIGREFHPQPGHAA

SEQ ID NO: 97573 - protein, 354 aa, unidentified
MAETLRTTVAVIGIDIGKNSFHVVGLDRRGAIVLRQRWSRGQVEARFANLPPCLIGMEACVGAHHLSRRLQALGHDARLMPAKYVRPYSKGQKNDFRDAEAIAEAVQRPTMKFVATKTADQLDLQALHRVRERLVSQRTGIVNQTRAFLLERGVAIRQGLRFLRIELPRLLAAPPDVLSPRMVCIIEDLAGDWRRLDERIAALSAEIEAIARQDGGCVRLRSVPGIGPIIASAMVAAIGTGEAFAKGRDFAAWLGLVPRQISTGDRTILGKISKRGNRYLRVLFVQAAWVVLIKPKSWARHGLKAWLEAAKKRLHHNVLAVALANKLARIAWSVLAHGRAFEALTIDEATARPV

SEQ ID NO: 97574 - protein, 412 aa, unidentified
MPDPLLVGIDVHRQNNTVHLMDGQGQEVAKAFAVANNRPGSQALASKLSQVASAGGHDCLQVAAEATGFYWWHLFVALSQDPLLAQWPLSLYPFNARPIANFKKAYIDLDKSDAIDPFVIADRLRWGRDLPQPFHADATLTAIRCLTRHRFHLSQNLAREKAYCLAYLYLKASEYTHLKAFSDVFGAASRAVIADFASIEDIAAIPLAELVEFIDNKGKGRFADPSQNARLLQQVAQDSYPLPEAMQAPVNLILRQSLQSISTIERQRQRLDAVIAEHMQAVPNSLQTIPGCGPVYSAGIIAEIGDLERFHHDEAKVAKFAGLKWRQTQSGDFKADETRLTRSGNPYLRYYFTEAANSVRRYDADYAAYYQRKYDEVHTHQHKRAIVLTARKLVRLVVRLLTTNQSYQPRRQ

SEQ ID NO: 97575 - protein, 343 aa, unidentified
MNATTYGLDIAKAVFQMYWVDGQSGEICNRKFRREQLIQFLATRAPGRVALEACGGAHWWARKIQSLGHQVVLLHAKYVRPFVKTNKTDAADAQAIWTASQQAGMRTVAIKSVDQQAILSLHRIRSGLVATRTRETNQIRGLLAEYGLYFRYGRKALMNELKARMAEIEEVVPELVWRALLRQLEQLQQVEQGIAEAERENRQWLKSNPQAKTLDAIAGMGPLTVTATVAVMGSPNAFRSGRAFAASLGLVPRQSGTGGNVRLGGISKRGDPYLRQLLIHGARMVVTHSKQRPQWVEALLKRRPVNVVVVALANKMARTAWALLAHNRSYEREFVSERPAVAV

SEQ ID NO: 97576 - protein, 348 aa, unidentified
MNGISIIGLDLAKEVFQVHGADEAGRCVLRKQLKRREVLRFFAKLGRCPVAMEACGTAHHWAREIAKLGHEVRLLPPSYVKPYAKRGKNDRIDAEAICEAASRPTMRFVPVKTVESQSVATLHRSRDLLIKSRTMLINALRAHLAEFGFVAAKGIGKLPDLIKIVSEAPAAALPDMVRATLSGLLDTIVGLNAQVAIIEKRLVAWHKTSTDSKHLTTAPGIGLMIATACCALVPEPRAFKNGRHFAAWIGIVPKLDGTGGKTRLGRISKAGDRYLRRLFVLGATSLLRSLENKTTPLALWVQGLLARRSRRAVTVALANKLARIAWAIMARGEKYRPLAAAQAQAGCA

SEQ ID NO: 97577 - protein, 325 aa, unidentified
MEKLYGGIDIHKENLAGCIMDKDGNIKREHTFPSSKKAVERFFCNIPSPEITIAIEACGMWRGIQKILTELGYQVKLANPKKTHDIAGSKKMDKIDAKTLADLLRTHYLPEVWIPDEQTLQFRDITRHKANLTRLRTQVQGKIRGYLLRKGAKYSKLSTEKTLTILAKEDPDIKNLVQVYHCIKQEEREVMRRIKRIAQNMKQTNLIMSMPGIAEFSSLMILAEIGDIKRFPSPKELVSYAGLCCGIYQTGTTERTVHNTAVNKWLKWIIYECSGRALMLDPRFQNYYYKIKEKKGFKTARRATARKMLTIIWYMLTREEPYHAS

SEQ ID NO: 97578 - protein, 314 aa, unidentified
MTTTETYVGIDVSKDRLDLAVLEEKRIKQYTNTARGINKLVKEMKELKPALIVVEVTGGYERAVVNALFEEGLRVARVSGYRARQYARAKGLLAKTDPLDAMNLADYGKHVQPRMYEAKSEQGQCLSGKLARRRQLGEMVKAEKNRLRLVYGDIGASIERVIEFLQVELKQLDEEIRAYLDNEPEWLEQEQLLRSVKAVGPVTAATLLAELPELGKLDGKQIASLVGLAPINQDSGKRSRYRKTGKGRPSVRNVLYMATLVACRYNPVIKAQYENLLKRGKVKKVAITACMRKLLVILNAMVRDQEPFRYAAVS

SEQ ID NO: 97579 - protein, 345 aa, unidentified
MSVYVGIDVHRKRSQVAVIDAVGEVLANRNVPNGVTPILSVIGDLPSGTPAAFEAAFGWGWLVELLEDYGFEPHLVHPLQCKAIASARLKNDKVDAAILAQLLRADLLPEAWIAPPQVRQLRALLRHRIQLVRLRTLLRNRIHAVLADHGHDRPGGYWSGPGRAWLASLDLPAVSAEVICDALALIDALESVIDRLDAEIRGHARSDPRVKILTQLPGVGPFTALVLLAEIGDVTRFASARKLASWAGLTPTVRGSDRTVRHGHISKQGSVWVRWILCEAAQTAKRSPQFAARYQIIARKRGKKIATTAIARKLLTRAWHLLTDAERAASPPAITTASAPPTGAP

SEQ ID NO: 97580 - protein, 391 aa, unidentified
MFYIGVDIAKNNHEASIIDSDGKPVSESFSFSNSIRGLEKFQKFISSFSIDSNNCIIGMEATGHYWLSLYSFLIDLGFSCIVINPIQSDAFRKMYIRQTKNDSVDSFVIAQILRFGEFSVSHFSDEDTFALRNLSRFRFALVDETSDWKRKLVAILDQVFPEYSSLFSNIYGVTSKELLSKYPLPEDMISIPADELAKLLSKCSKGHFGIDKAKEIQEKASNSFGVKFALKSFSFQIKQIIAQISFLEDQILELEDEISSMINSLCPVITSITGIGNVLGAAIFSEIGDISRFERANQLVAYAGLDVAVKQSGNFNATDTKISKRGSPYLRRAIWLAASVAAFKDPALSVYYQKLRQRGKAHGTAIGAVARKLTNIIFAVLRDNKVYIPNI

SEQ ID NO: 97581 - protein, 397 aa, unidentified
MPEHSISGGIELTKLLKFSNTGEGFDHLSQWMQSICKQHEKAEIIVGFEPTGHYWFNMGDYLKSQGHKLAMVNPFHVKRTKELDDNSPTKNDRKDPKTIAMLVKDGRYREVYIPEDVYQELREAVAERDRLVQRLTAINNQVDRWLDIHFPEFEQVFKDWRRQAAFLTLRHFSTPEKIAAAGAMKIVAIWKQSMKRTTGAKRAQELVKTGRVSIGRKIGLVAAEASLQNLLDEHELYVKHYEELEQLMMELLLQVPNAGKLLQIKGVGLITAATFVGEIGDVSRFQDPRQIQKLAGLNLVENSSGKHKGKTRISRRGRKRLRHSLFMAMITILAKNTEFRMLHQKNLTRGKNPLTKMQSVIALCGKLIRVFYGILTTGRDYSAEKMLGDIERGKTAA

SEQ ID NO: 97582 - protein, 364 aa, unidentified
MDVHLRSTTVCALDAETGEAVARRFRGNPWGEVAEWMSGFPGPSLAAYESGYLGFAPQRELSALGVDCVVAAVSKVPRSAADLSSKNDRNDAARMAKAILSHDVTPVWVPSPEIEGLRDLAAAHDAATARLAAAKQRLLAFLARRGYVYGGTTPAGNPRKYWTYGFLRWLDKVRPADDGGIRALAALRNEVEAADETREAVLAEYRAAVAAGPLSAEVEALQSIKGCGFVLAAAFASEVGDFSRFRSGRQVTAYFGLAPKQRSSADSVRLGGISGAGNALVRRLAVEGSWSYVQASHQPKLMPKGSGVPLEVRMHGRKGSERLLRRREEMLARGMPQAKANAATAAELVRWLWALGMMCREAGE

SEQ ID NO: 97583 - protein, 338 aa, unidentified
MALYGGIDRHSNNNVTFLLDEQDRVTYQKRLPNACATILEQLAPYQEEIRGVVVESTYNWYWLVDGLMDAGYRVHLANPAAIQQYSGLKYTDDHSDARWLAHLLRLGVLPEGYIYPKAQRPVRDLLRKRSHLVEQRTANVLSIQNIIVRNTGSRLSANRIKQLSRNDVEGLLPDADQALAVTSALAVVSCLTEQIKTVEKRVSTRMQSTPLYELLQTVAGIGPILAQTILLETGDIGRFPHVGDYASYCRCVASTKVSNGKRKGQGNVKNGNPYLAWAYAEAAHFAIRVQPSVQRYYQRKQTKTTVPVAHKTVAHKLARACYHMMRHQVPFDAAKAFG

SEQ ID NO: 97584 - protein, 343 aa, unidentified
MQTITTIGLDIAKSVFQVHGVDAGGQVAIRRQLKRRYVLAFFQKLPPCLIGIEACASSHHWSRELQALGHTVRLMPPAYVKPYVKRQKNDAADAEAICEAVTRANMRFVETKTPEQQSGLMLHRTRHLFIRQQTAVINAIRAHLAEFGVVAPVGRDGVEELLNIVTDTNDKRVPEIARVCLAALGAQLRRFKEQILEFDRLIMAWHRSNEMSRRLDDIPGVGPVLATALVASVADPKAFRSGRNFSAWIGLVPKQHSSGGKDRLGSISKQGDRYLRSLFVIGALAVIRYAKIHGTKHRPWLAALLARRPTKVAAIALANKIARMAWAMMAKGERYKEPVALAA

SEQ ID NO: 97585 - protein, 392 aa, unidentified
MIYVGIDVAKEKHDCCILGPDGEVLRDSFTFANNRQGFEVLLAAIQRALQGKSPDEVRAGLESTGHYSTNLVAFLRSNGFEPVVLNPLSVNLFRKSQTLRKTKTDKADARFIAAMLLTSDASPHASVSYHIEELKVLTRSRSRLIEHRGKLRISLTRLLDVVFPELAALVWSTNQKSVYHLLLELPNPQAIAHCRIDRLANSLSAGSHGKYGREKALEIRQAAADSIGSNSPAMAFEMQQTIRLIQNIQLEIELLDRQIETAIEAVQTPLLTIPGIGHTLAGIILAEIGAIERFQTPAQLLAFAGMEPSTFQSGKFSANQTPMVKRGSTYLRWAVLQAARLVAMRDRTFRDYLLKKRQEGKHFNVALSHVGKKLVRVIFHMLQTNRVFVPQT

SEQ ID NO: 97586 - protein, 407 aa, unidentified
MSVAVGIDIGSESHAVAVCREGAQEAERRGLKIAANRGGFDDLDAWLRRQPEPVALVVMESSGHYWFNLASHLCRQGYPVAVVNPLEAKYFGKRRLQRSKSDPADARTLATFAMVDQPPTREPLVGAELREASRFAMRLVREQGQVCQRILRLVDIGFPELAEVWDDPTCMSALAVLRRAPTARTVARMRVETLAQLRRPGSGARAIGPAKAAELKRRATTSVAAPELEVQVGFEMRLLIGQYDLLEQQIEAADRRVAALLDGEVAQRLLSIPGVGPSIAGTLMAEIGDIWRFTDVDQLLAYAGVHPQERSSGKKGANPETSWVMAKTGNAFLREAAYRMAIVGIQHNPVIRAHYARKRAAGKSRMNAVGHCMSKALSLVWGVWRGGKAFDAAHGSAATTPPTAPEA

SEQ ID NO: 97587 - protein, 338 aa, unidentified
MKFKRIAIDTSKHVFTLHGVDAEDQPVLRREIRRAQLEPFFAKLAPTEVALEACAGSHHWGRVLGAMGHRVKLIPPQYVKPFVKRSKNDRNDAEAISEAASRPSMRTVPVKSADEQAATIIVKHRELMVNQRTQAINALRGHAAEFGIVAAKGCANVTALLAVLSAEEMIPAIAKAMFEQMGRHVTDLEAKIDELERQLLEQHKANAVSARLAAIPGVGPITAITMALTVNPTNFETGRHFAAWLGLTPREHSTGGKHRLGRISKAGSERLRQLLVVGAMAVIRYAKPGSKSATAWLLQLLERRPRKVAAIAMANKMARIIWAMMARGEAYRRQPVAA

SEQ ID NO: 97588 - protein, 355 aa, unidentified
MDSAKYIGLDVHKESISIAVVNAAGKIVMECVIETKAITVLQFLGGLRGELHVTFEEGTWAAWLYDLIQPHVTEVVVCDPRQNALLNTGNKSDRIDARKLAELLRMGQLKPVYHGEHGVRALKELVRSYLAISKDTARVMTRVKALYRSWAIPCTGKQVYAPQHRAEWLAKITEPGVRRRAEFYYQQLDALRSLRQQVRRELLSESQKHPAWKLLCQIPSIGPIRAAVLIGILQTPHRFRTKRQLWTFSGFGIETHSSGDYRSVEGQLRRTNRPVSVRGLNANHNHDLKNLFKGAAIVAANKPGPLQEFYTALLAKGIRPEMARLTLARKIAAITLHLWKKGARFDAQYLKPQAA

SEQ ID NO: 97589 - protein, 340 aa, unidentified
MKEVITTIGLDLGKKVFQVHGVDAVGGVRVRRSLRRSQVLGWFGKQPACLVGMEACATAHYWGRELSRLGHEVRLIAPAYAKAYVRRNKNDAADAAAICEAVSRPGMRFVAIKTAAQQAAGGLHRVRDLLQKQRTMLINQLRGLMAEFGIVVAGGPQHVKDLLAVLADPADARVPELLRGPLLGLAQVLGDVERRVATLERQIVAWGRGNATYRHLITVPGYGPILAGAFAAFVIEPSTFRSGRDFSASLGLVPRQEGTGGKLRLGSISKRGNGYLRRLLVNGAMSILNTSRARQDPWIARLLASKPRKLVAVALANKLARIGWAMMVRQEDFRPRSAAA

SEQ ID NO: 97590 - protein, 313 aa, unidentified
MKHIPSNVFIGVDVSKDRLDVAVAPSGESMRFANSEDGIALLADFLKPRNPELVLFEATGGWEMNAVNHLVAQRLPLVVLNPRQVRDFAKATGQLAKTDAIDARILARFGQAVRPEVRSLKPLELRKLDDLNTRRRQIVEMLTAEQNRLVSAPEWIRPDIEDLIAILKKRLAAINRDLNKLIRKSPLWREKDKILQSFPGVGPITASTIIAALPELGTLTRRQIAALVGVAPLNCDSGTHKGKRKIWGGRADIRSVLYMCAMTAARCNPVIRPFYQKLLRAGKPNKVARTACMRRVLVILNAMMRSNACWQPT

SEQ ID NO: 97591 - protein, 343 aa, unidentified
MQKVTTIGLDIAKSVFQVHGVDAVGQVIIRRQLKRRYVLAFFQKLSPCLVGIEACASSHHWSRELQALGHTVRLMPPAYVKPYVKRQKNDATDAEAICEAVARANMRFVPTKTPEQQSGLVLHRTRHLFVRQQTSVINAIRAHLAEFGIVAPVGRKGVEELLHVVADPTDNRVPAIARACLAALGAQLRRLKEQILEFDRLITAWHRSSELSRRLDDCPGVGPALATALVASVADPKAFRSGRNFSAWIGLVPKQHSSGGKNRLGSISKQGDRYLRSLFVIGALAVIRYAKIHGTKHRPWLTALLARRPTKVAAIALANKIARMVWAMMAKGERYKEPVALAA

SEQ ID NO: 97592 - protein, 427 aa, unidentified
MKKLEEKELEKEIRAWIGIDWADEKHDVSLYDVATGKQEALTIRQSPEALQEWLGQLRSRCEGGYVAVVLEQGRGGLLNALMGCEFLVLYIINPKSLSRFREAFYGSGATSDPVDAELMRDMVRQNPSRFRAWRPDDVLTRSLRLLTEGRRNLVNQSTALTNQLTALLKGYYPQALAWVGTLDTAWACDFLEQWPTLQSLQASGRRQILRFYEKHPRASLDLNEQLKQIQDALALTQDEAVLESSGLMVQALVSQLRPLLASIAEFDRKIAMIFRKHPDRPIFESFPGAGAALAPRLTAAFGTDRDRFQAAKEMQELAGIAPVTEKSGKKSFVHWRYACPKFMRQTFQEFADHSRRWCKWAKAHYELLRRRGKSHNAAVRALAYKWIRILFRCWKDRQPYQDEVYTKSLFNHGSPLSALLAESVENP

SEQ ID NO: 97593 - protein, 334 aa, unidentified
MEQITTVGIDLAKNVFSLHGVDAAGKAVFKRTVRRDRLVETVATLSPCLIGMEACSGAHEWGRRFQQHGHTVKLMAPKFVAPYRKSDKNDGNDAEAVCEAVARPNMRFVPVKSVEQQALLAMHRVRQGFVVERTALINRLRGLLSEFGVVLPLRSVTVRRQAAQAAETLPQLARRAIGDLLEQLRLLDERIDGYDSEIEAQARLSAPARRLMQIRGIGPTTALAIVATVGNAREFRNGRQFAAWIGLVPGQYSTGGKTRLGHISKRGDAYLRNLLVQGARSVLQSAHRHQDHLSRWALELQQRRGYYRTLVAIANKNARIAWALLAKDQELRTV

SEQ ID NO: 97594 - protein, 421 aa, unidentified
MEQSQDVEEIVERVAALDIGKAELVCCVRVPDPKRPGRRLQEVERYSTMTRSLLGLADRLVELGVSRVVMEATSDYWKPPFYLLEAAGLDPWLVNAKDVKHLPGRPKTDRLDAVWLCKVAERQMLRASFVPPLQIRQLRDLTRYRTDLVNACTAEKNRVEKLLEDACIKVSVVASDIFGVSGRDMMAALIAGERDPKVLAQFARARMRARIGDLEEAFTGYFTDHHAWMLAKMLARIDQISADIADLDDKIGDQIAPFAQAVERLDEIPGVGRIAAHVIIAEIGLDMTRFPTPGHLASWARFAPGVKESAGKKKGTGATGHGNPYLARALGEAAVCAGRTDTFLGQRYRRIAKRSGRKKAIVAVGRSILVIVWHLLSEPDEHFHDLGPDFYDRRINPDHKKRNHVRQLQALGYHVTLQPAA

SEQ ID NO: 97595 - protein, 392 aa, unidentified
MVVSVGIDVSKDKHDCFILSSEGEVLVDVFTIPNTMDGFNCLLQRIQDCTTPQGKMKVGLEATGHYSYNLLGFLLDNGLATYVLNPLRTNLYRKSLSLRKTKTDRVDARTIASMLLSDAGLKPYTDTAYHNEELKSLTRYRFDKVKERAKLKSSVSRLVCILFPEMEKLVSTLHTASVYTLLEEFPGAKQVARAHLTRLKSLLETASKGRYKRDMALEIREAARNSIGSRMPAKSLELQHTIRLIRELDTEIVEIEEQIQSLMDELASPITTIPGMGFRMAAMILAEVGDFTRFDSPDKLLAYAGMSPSTYQSGQLKNCYPHMEKRGSRYLRYALYNATKYVCRWDPTFAAYLAKKRAEGKHYNVALSHAAKKLIRLIFAMEKSRRPYCLAT

SEQ ID NO: 97596 - protein, 412 aa, unidentified
MDRWIERCCGLDVHKETVAACVRVPGAKGRRTQEVRTLGTTTPDLLALQDWLAAHQVTHVAMESTGVFWKPVYYVLEARFTVLLVNAAHIKQVPGRKTDVRDCQWIAELLEHGLLRGSFVPPPVIRDLRELTRYRRTQIQERTRVANRLHKVLQDANVKLSNVTHHVLGVSGRAMLDALVAGTTDPDVLADLARGQLRKKLPALRQALTGRFRAHHAFLLGQILAHLDYLEEAIAAVSAHIEEQLRPFAPQVERLMTIPGVQRRTAETILAEIGTDMAVFPTAGHLASWAGMCPGNDESAGKRRSGKTRKGSKWLRTSLIEAANAAARTKATALGARYRRILPHRGHRKAIVAVGRHILEISHHLLRTDRTYQELGPDYFDRRHAERLQRRCIRQLEQLGLQVTITPASAAA

SEQ ID NO: 97597 - protein, 450 aa, unidentified
MARRQKSTQNLPVIEPNAAGADVGATQIFVAVPADRDPEPVRCFDTFTTDLEALADWLEACGIRTVVMESTGVYWIPLFQILEKRGIEARLVNARHVKNVPGRKSDVADCQWLQYLHAVGLLRGSFRPDQEICALRSLWRHRDSLIQMASVHLQHMQKALDQMNLQIHHVISDIAGTTGLAIIDAILAGERDPKRLADLRDWRIRATEETIMKSLVGDYRDEHLFTLRQSLVAYRHYQQLIAEVDEKVRQLLSELPAKVDPAEDPIPKARNPRKTPWRNEPMGLREDLYRAFGVDLTQVPGIDSLTAQMLLTEIGPDLSAFLSISAFASWLRLCPDKRVSGGKVLSSRTGPTKNRAALALRMAAQGLHHSQTFLGEYYRRMRARLGAPKAITATAHKLARIIYHLLTRRQAYDESIFIVQEIRFRQRKEGRLRAQARELGFQLVPVAALP

SEQ ID NO: 97598 - protein, 319 aa, unidentified
MAQNDRVVVGIDVAKDKVDACIRTLSQLRTFESTAEGRRQLVAWLRRHKVGKAAMEASGGYERDWAKALREAGLEVRIVDPKRVRSFARSAGRLAKNDAIDAEMIAWFAETFGEAPAQAYDAARDKLVQIVNARQALLDVQTELQNRGEHAAPEVVQKMQARLLKKIALEVAKLEAAIAAMIKTTAHFTELSEIIESVPGLGRGTSAGLIAAMPELGQVSNKAAAALLGVAPYDDDSGKRRGERQIKGGRRKVRNLFYMACLGAATQHNPVLKAFYRRLIAKGKEKKVALVACMRKLIVILNIMIARGEKWDASRYAVS

SEQ ID NO: 97599 - protein, 304 aa, unidentified
MNGIGIDVSKRQLDVGTTDGETLQVSNNLTGFSELDVWLREHPAAQIVLEATGGYEQPVLDFLHKAGHPVVRANALRARRLAQGMGHIAKTDRLDAYALAQMAALVKLPPYQPLELWQQKMREFVRARRQAMEMLTIARQQQEMVGDRELRRLLQANINRQQALVERLGKQIAEQVAQQPQLAVLKSMKGVGPALQAVLASYLPELGRISGKRIASLVGVAPMSHDSGTMRGKRSIQGGRAEIRQVLYMAAMSAMRHEPRLRDFYQSLRARGKEGKVAIVAVMRKMLVILNARVRDAESGPIPA

SEQ ID NO: 97600 - protein, 353 aa, unidentified
MRTYYVGMDVHQASIVIVVLNGAGKVKMESIIETGAETVRGFLKQLRGKVYVTFEEGTQATWLYDVVRPLVSEVVVCDPRQNKLLESGNKSDRVDARKLAELLRNGSLRAVYHGNQGVRTLKELVRNYDCLVGDTTRVMLRLKALFRGRALACAGHDVYRSERRAQWLAKLSEPGVKQRASCLYEQFTALQRLRQEAKRVMLKEARRHPAYQLLLSIPLLGPISVAQLIAVVGTPFRFRSKRQFWAYVGLAVVTRTSAEYVLVNGLVRRSSRPVATRGLNRNHNHLLKKVFKNAASSACVSGPFKPGYDARVAQGMDASLARLTIARQLAAITLVIWKRGEQFAPERLKQQVA

SEQ ID NO: 97601 - protein, 523 aa, unidentified
MSATRVRQRPRSRRREVLQKPAGVIHVRVQKVGPEHFGIVGVDCAKARSKWMLCDFFGNILIPPTVVEHNRADLEAAVVRLRQAQQVHALDDLIVAVERTGRYHHIVRQAFAAAGYEVRIVHPFTTKRYRQISDPGNKTDDTDLAAIHRAAVNGFALLERPVEPSWRELQLLVRHRRDLVFKTSALSAQIREHLEAALPGFASCFDKLWDRALAWTLLRHFESAPAMHEAGLPKLLELLHRQQVRFQRPTVERVYAWAGQAAPSDEAAALHRRIGLALYDDRTRKTQEILERERDIAGYLTQTPYVLLLSFPGINVVSAADFAGEMGPIGNYANARCITGRAGLCPSRHQSDQVDLRNGPLRRCANRRLRAAILGIADNLILCNHHFNALAVRWRAAGKDPRHTHVKVAQRFCRIAYHMVAGGQVFHHPALQQRHYILDKLLAFHREHDTPLPQTLTGLESAVGHIPPSAHADEAKPLAAELLRIHAGRRRGPQALGDILPLVLARLGVGALQSTESGERDST

SEQ ID NO: 97602 - protein, 381 aa, unidentified
MARVPQGMCYSIDEKAISRVSLIYSKILKDMNTQIIATPKLFIGIDIHKRSWKVHCSTDLFAGKSFSMSADAEQLHKYVLKHFPGHEVSVAYEAGCCGYHAHRCFEGYDWRSLVVNPADIHRKGKERHTKTDRIDAQLISRELKDGRLESIIVPDKKREELRSLFRRRNDLVKDFRRIKSYIKMQLLYFGIKEPEEFDNDHWSHKYRKWLDDMVFEHPTAKATLESRMRFFRFVDQELRDVSTQLRRYCKTHYKKDYLLLRSIPGIGGIVACGILCELGDLRRFNNVKHLAGYVGLAPSVHQSGGNQKAMGMTPRAHRLIRSYFVEASWQAIRADPVMQAYYRKHMGKNVKSIIIKVARKLLSRTLAIIKTEVPYTIGVVE

SEQ ID NO: 97603 - protein, 313 aa, unidentified
MPQETVFVGVDVSKGTLEIGEVGARSWPAPNDPGGWKKLIGWLRKLGRLVVVGVEPSGGYERGLVKALQQAGVEVRWCDPARVRALAKALGAPAKTDAIDVGMIARFLAQTGGRPIQADDERDALKAALAARRAAQDTARRLEAQAQALPEGSAREALEALATHAREAERELTRQALRLVRESSALGDRWRRLQTAPGIGPLVAAELVAHMPELGAVSGKAIAKLAGLAPFIRKSGAWAGKAVCSGGRPIPRQMLYLATIASLRARNGARPLYEHFIGHGKPPKLALTACMRRLLVTLNAMIRDASDWKAAEA

SEQ ID NO: 97604 - protein, 418 aa, unidentified
MKTYLLKTPAIVEPKARLKKSTARQGPAPTSLADVSSRDSQPRVLFIGLDVHTDTIAVSVAPSDSTEVRRYGLIGGTHAEVLQLAKKLQAAHRGAELRFCYEAGPHGYPLSRFLQNHGYGCILVAPSKIPRQPGDRVKTNRRDADRLARLYRAGEVTAIHVPDPQDEAVRDLLRARDQVRQHQHRARQQLKMFLLRHNLRYAGTTAWTPAHLRYLATIKMPFAEQQFVFQEMLCVITEAGQRLERYEKQLPGVVAGWRWEPVVRALMSLRGLALLNAATLVAELGDLHRFPTARQLMGYLGLVPSEDSTGHERRQGGITKMGNGIARRALIEAAWHYRAPARISAHLQKRQEGLPKAVTDIAWAAQLRLHRRYRHLVLVGRKKSTVAAAALGRELAGFVWAIGRLMNPHPRPTSTAPR

SEQ ID NO: 97605 - protein, 362 aa, unidentified
MFRPHALYIRIRIVRKVFEPVFAMMDQDVNDVIKTKNRTAMKYIGIDVSKATFVVAYSSAKGGEIRTFDNTTAGIKQFIGTLPKDGSIHCVMEATGNYSAMLLYLLNVAGIAVSMENPLKIKNFARVMLSTVKTDKIDARLIALYGEKMNPQPFKIQGEAILRLRQKRTVIRQLTKQITAMSNLRDSLACLPVPDKGATHTVDETIKFLEKRRDRLQSELTDLVEIEFSRQLALLTTIKGIGITLATALIITTGGFTYFQNAKQVSRYLGICPTYEQSGTSVNIRGHINRNGDAYTRGLLYVAAWTASRFNTKCGETYTRLRQNGKPGKLAMIAVANKLVRQAFAVIAHDKVYVDGFVSNRP

SEQ ID NO: 97606 - protein, 415 aa, unidentified
MTQPYRFFIGIDWAWKEHTVCIVDADGKKLDQTTIPHSGVGLAQLHQLLGKLEGAPQSVAVAIETPRGAIVESLLERQFPVFSLNPKQMDRFRDRHTIAGAKDDRRDAFVQADSLRTDQRLFRKLDPDDQAILRLRELSRTEEELQQDQERAQNRLGHLLNRYFPQLLELSPAADEPWLWELLKKSPLPKTAAQRPQHQWTQLLRKHRIRRFDAHTLWQILQAPALPTAAGTAKIISERVQLLLPQLHLLHGQQHEVEKQIAELLEEMSENPKCQQHRDAQILLSLPGVGRVVGATMLAEAHQPLAHRDYHALRGLAGCAPVTRQSGKKKFVVMRRACNPRLRQALYYWAMASLKTDPRSKQYYAALRSKGHSHGRALRGLADRLLAMLIAMLRSGATYDPARRNAVPAVQPVAA

SEQ ID NO: 97607 - protein, 392 aa, unidentified
MYIVGIDIGKNHHEASIVSPEGKQIGRSLRFATTHKGADSLMSFIFKNIGNSPCVFGMEATGHYWYPIYSFIKAKGYTIYVINPIQSDSLRKMYIRQTKNDSIDSFLIAEVIRFGQFGTTSMADENILAMRQLCRYRDSVISSRTEIKLRIGTIMEQIFPEYEKQFSSLWVSTSMGILEKYLTPENIENAPIDELFEIIKDKSHNKLTMKKAISIREAAADTFGIKIAQDAFSFQLKQLIDRMNFLDKQIEALDCQIPEYYEKFDCYLHTIPGIGMIAAATILAEIGDINRFKSSSALVAFAGIDPTVRQSGEFSSTHNHMSKRGSPYLRHAIFLAATTCSFHNSPLNAYYKKKRDQGKHHLTATGAVARKLTTIIYAVLRDSKPYEPKKFC

SEQ ID NO: 97608 - protein, 351 aa, unidentified
MNSMHYVGLDVHKKTISYCLRQADGTIVQEGTIPSTRQALAGLLEGFPQPWVAGLEATMFSAWIYDHIRAQGGSVKVAHSMMLKAIAAGKRKNDRVDARKIADLLRCDYFPECHMAAPEVRDRRRVLRFRNLLVRQTVRMKNKVSGLLMETGIEYNKGKLHQKKYFSQMLEEQRAQMPESLPELLQLSRTTIETLTRMDRQLLRALEHDTMLAARVERLMTIPAVGTVLALTWALEIGDIRRFASLKHVVSYCGLCGAERSSAGKQQRTPISKQRNKHLQTMLVEAAKLAPRWYPELALVYEREKQRGNRNRATLAVARKLAAYLLAVDRGERSFQTAAPAREGTGASRAA

SEQ ID NO: 97609 - protein, 492 aa, unidentified
MAPGRQLNIGEAFRHSPRSESIYRPTWAVVFRKATQMQDNREDRSKIEGLPVVRPNVAGIDLGSTQHWVCAPTEDGTGREVAKFGCTTPELIRMAQWLYERKVESVAMESTGVYWIAPHEVLEAQGFELLLVDTRQLARVPGRNKKTDRTDCEWIQRLHSCGLLSGSFRPKEDICILRTLVRDKGNLVAETGDWLRRMQKSLDQMNVRLHRAVSDIDGVTGMSILRAIANGERDPLKLASFRDPRCSRSEEEIAKELTGHWREDHLFSLRQSLKMYDAIQERIEAYDQEIQRKLGEMRQEDPPIGRAPELKNREKAKAIKKRGEEPMRQALYQMAGVDLASIDAIGVETIQIVLTEYGPDLSRFPTEKQFVSHATLAPHKPTSGGKSLKKKKRNSASTRVAAALRMAALSQRHSQTALGAYYRNIARRKEAAVALFATARKLATYIYRLLRWGQPYVDTGAAAYEKQYDQRRIKSLMAKAKQLGYQLAPATT

SEQ ID NO: 97610 - protein, 362 aa, unidentified
MRIIGCDLHARQQTLAMLDTTTGEVVEVTLKHEGDNVREFYSALPRPVRVGIEGTGSMQWFLNLMEELGIECQVGHPAQIRAAEPRKQKNDRRDAELILKMLVEGRFPAIWLPSKELLDLRALLRHRHQWVRMRTRIQNALQSIALANGLRRGTALWSHDGQSRIASLPLAPHTAYRRSELQAMYEKFEAEIEKLNQRVEEQACQRPGARLLMTHPGVGPITALATEVFLGDPARFADSKALASYVGMIPREYSSGGRQRLGGLSKQGNPLLRFLWGEAGAHAARKDPELQRFYRRKLVQKGLGKASVAVARKLGIRLWIMLRDHIEYNEFCRRGQKQQKSSDACAGMPETPYGANSHRPVD

SEQ ID NO: 97611 - protein, 341 aa, unidentified
MMCLGLDVHEKWTTVVALDPETGELRRFDRVPNEAEAFRRTLGELGGPLHGVMEAGWNSWAVYDLLEPLFSRLLMADPAEMKRRMSGRGAKTDRRDALQMALLLAEDRVPAIWVPDRKTRDLRVLTRGRARISQLITQVGNQIHALGASFGHDCPASKLRTQRGRSWAETMELPPLASEMRDRWLAVLTLMEENEAQLETMIRQIASQDPRAKCLATMPGVGALSALTIVAEVGDVDRFDNAKSLVGFAGLGPQVHQSGEELHYGPLPSSGNPWLRRIMVLAAQHVARMRADDKLKRQYWRAFIKHGPNTAKVATARKMLVVAHHLLRHLEDYVERPPQAA

SEQ ID NO: 97612 - protein, 350 aa, unidentified
MMIIGADYHPSFQQIAFVDTETGELQERRLDHPAAAEKFYSDLAAQGKKVRVGMEASGHARWFERLLAELNFEVWIGDAAEIHRKRERKQKTDRQDAQHILRLLLKDDFPRIWVPSWENRDLRQLLWHRHRMVQARTRIMNQLQAVALNEGLRSKKRLWREHGRQQLESFRLARWASRRRHDLLELLDRLNPTIAELSQAIEQEVEKCPAAQRLMTHPGVGPLTALAFVLIIERPDRFQCGKQIASYLGLVPLEDSSGNRRRLGHITKQGNSLLRFLLVEAAQVTVRSLPEWRSKYVHLTMRRGRKIAKVAMARKLAVRLYWMMRKEWDYEQVKKFGSHAGQPGHRYGVQ

SEQ ID NO: 97613 - protein, 346 aa, unidentified
MMIIGCDFHPSWQQIAWLDTATGETGERKLVHASGEAKKFYRQLAAPVLIGMEATGNSQWFVELAEDLGHEIWVGDAAQIRASYVRKQKTDKRDAAHILKLMVEGRFPRLWTPDREQRDLRQLVVHRHKLVEIRSRVKNELQHLSLNKGMQKKRTLWSQAGQKLLRELALKPWAACRREDLLGLLAMLNQQIGKLDAAVQHAADEHPQAQLLMTQPGVGPNTALAYVLTVGDVSRFPRGKQVASYLGLIPREHSSGGHQMLGSISKQGNRLLRSLLVEAAQIAVRFDPGMKKEYLHRCHQKPKGVAKVAAARKLAVRLYWMLRTQVAYPEIVRIESSPRVALVGAS

SEQ ID NO: 97614 - protein, 315 aa, unidentified
MTNKIKRKTIVNVGVDVGKASLDIVIHEKKLHWQEENTEPGIKRILKRLSYYQVERLVMEATGRYEFNLAEAAYNKGLPVCIAKPLSVRRYAGAVEQLAKTDKIDAAIIAEYGAVCKPRVNPRKSKNLIAIKNLLVRRRQLVNLRTQEMNRKGIMGKDLEVSCKRIIRTLDTEIERMEKRLSQHVEQQSEWSEKHSLLKSAPGVGDTLIYTLLADLPELGSLNNREISALVGVAPINRDSGRMRGKRRIQGGRASIRTVLYMATLSATQCNPVIKAFYKKLVAQGKHKKIALTACMRKFITILNTMVKNKTEWAF

SEQ ID NO: 97615 - protein, 346 aa, unidentified
MEVVIGVDPHKGTNAVAVLNDRGGLLEYAVFATDRAGLRSLVRWAKRFGERRWAVEGASGLGRPVAQHLVAAGETVVDVPAKLSSRIRLLSVGNERKNDQVDAICVAVAALRGERLTEVGEEEEQATVLRMLSERRKDLTKERTRALNRLHGLLRDLVPGGAPKNLSAHKAALLLRGVRPRVEPVLTRRRLAADLIGDVRRLDRGLSDLERCIREAIEQASTSLIGLFGVGPILAAKIIGEVGTIARFPTKAHFASYTGTAPIEASSADVVRHRLSRAGNRQLNHALHLIAICQIRHDTEGRTYYRRKLAEGKSEKEALRCLKRRISDAVFKKLYADLEGGISNVA

SEQ ID NO: 97616 - protein, 344 aa, unidentified
MDHFAGLDVSVKETSVCIVDDTGKIVREVKVASEPAALLAVLKNPAYHFKRIGLEAGPLSQWLFSALAEAELPVICVETRHMRAVLKAQINKTDRNDARGIAQMMRVGLYRPVHVKTLRSQKLRMLLTHRQLLLSKAIAIENDLRGTLRNFGLKVGMVGKVRFEARIRELVENLPDLAMLVEPMLIVRRVLREQVVILHRRLLAIVRDDEVCRRLMTTPGVGPVVSLTYRATVDIPARFRKSKSVGAVFGLTCAKYQSGEVDWSGRISRCGDEMMRVMLYEAAQAMLRSKKWSWLKAWAMQIARRRGMKKAIVALARRLAVIMHRIWVDGTEFRWTREQATATA

SEQ ID NO: 97617 - protein, 408 aa, unidentified
MNIIGIDVSQGESHATLITKEAEEIAFKFKHNKSGFQILNSYIKPGTIIIFETTGVYSAQLTTYLKNKKVKFYELNPLEAKLRMASLRRNKTDKNDSFKLALLGKTQLAEIKNHCNKQSNSLYESLRILSLRYKQLIKCRTRILNFLRSSLELTFPELNQIFKNAYAVLALQVFRMYCHPDFLVGLTLKEMTTRVYQSVSRRIHKDVIQSYCAQVWLAAKDSYPAVPADSLEIEIISEYCDEIESYNKEIAYIQSKLIKTAVGLDDFKVISSIPGAGQLNSALLLGFTGDIARFDNYKQLNAFLGLDLNRYQSGKYGKGDTINRRGSSQGRAVETDMIRSMLRNQGKIQNHLVDYYYKLKKPPFNKHDKVALIACANHLNRTIINLVHTHQLYNYSKAFINKCLARNK

SEQ ID NO: 97618 - protein, 380 aa, unidentified
MNKYIKYVGMDTHKEMIKVAIAKDVPGEAMYYGEIMNTEGVIKKLAKKLSSDGSQVVFCYEAGPCGYWIHRLLTKEGYECKVVAPSLIPKKAGDRVKTDRRDALTLAKLLRAGELTPICVPEKEQEAMRDLTRAREDMKAMERHARQRLGAFLLRHDKIYSGKSKWTQAHFRWLEGIKFESPVQQIVFQEYVDTVKHAQNRVAALEEEMRRALDGWSMKEEVNALMALRGIGMVTAMTIGSELGDLSRFETPRQLMAYIGLVPSEYSSGDKRRQGGITKTGNGHVRRVLVEASWCYRFSARKTATLQRRAEKTDEEVQAIAWKAQKRLCMRYRHLLNKGKLKVQVCTAVARELIGFIWAIARQVNGKRNTNKAVFAGSAQ

SEQ ID NO: 97619 - protein, 292 aa, unidentified
MIIIGVDFHPEFQQIASGDTETGEFQEKRLAHPAEAEKFYRALVGQKVRVGMEASGHARWFERLVAELQFELRIGDAAEIRTKRVRKQKTDRQDAQLILRLLLEDRFPQLWVPSWENRDLRQLLWHRHRMVQARTRIMNQLQAVALNEGLRCKKKLWRERGRQQLESFRLAPWATRRRRDLLELLDRLTPTIAELSQAVEQEVERCPAAQRLRTHPGVGSLTALAFVLIIGEVNRFRCGKQVASYLGLVPLEESSGNRRRLGHITKQGSFDDAFPAGGSGTSHGAQSAGMAQ

SEQ ID NO: 97620 - protein, 369 aa, unidentified
MDDITFVGLDVHKATICIAVAEGTRGGEVRQLGVFENRPEILRKVVSRLSKGGRRLSFCYEAGPCGYGLHRLLSGYGHECVVVAPSLIPMKAGDRVKTDRRDALILAKLHRAGELTAIWIPDAAHEAVRDLVRARATAVRVLVKARQHLQGFLLRHERIYRGARAWTLAYRRWLSTVRFDHPAQQIVLQDYIHAVQEAETRRDRLTQQIEELLPNWSMAPVVAALQSMRGVALVVAVTVVAEVGDFRRFANPRQLMAYLGLVPSEHSSGSSVRRGGITKAGNALARRVLIEGAWTYRMSARVSRKLHDRLEGLPAAVRDIAWKAQLRLCARYRRLAATGRPKVVVTTAIAREMVGFIWAIARVAQPALV

SEQ ID NO: 97621 - protein, 411 aa, unidentified
MGDPLRLFVGDDWAEDRHDVEVMDGAGRRLAKARLPEGVAGMARLHTIVGELAGDDADGVEVVVGIETDRGPWVAGLVAADYTVLAVNPLQAARFRDRLGVSGAKSDAGDAHVLADMVRTHAHRLRPIAGDSAQAEAIKVVARTHKTLIWERTRHTQRLRHALRDYFPAALSAFEDLDAADTLELLAKAPTPEQAARLTIPQISAALKSAHRKNVADKAAAIQAALRADHLGQPEAVTAAYAACVQALIAVLNVVNTQIKTMQGQVEAHFGQHPAAKIICSQPGLGPVLGARVLAEFGDDPHRYASAKARKNYAGTSPITRASGKKRVALARFVHNDRLIDALMAQAFTTLRLSPGARAYYDRQRARGCGHNAALRQLANRLVGILHGCLKTGTLYDETTAWSQRANSPTA

SEQ ID NO: 97622 - protein, 344 aa, unidentified
MSEYAGQQFVGIDLHRRRSVIVRTTGSGEVVESVRILNDVESLDRVIERAGEDPEVVLEATYGWYWAVDALQEAGARVHLAHPLGVKAFEYRRVKNDFRDAADLADLLRMGRLPEAWIAPPATREVRELVRHRAKLVALRSHCKAEIHAVLAKCGIQVSMSDLFGVAGTALLDRLQLAAPYAARIASLRRLIDDLDFEIEVFTNAVQGRLHADPGYVAVQQIPGIGPILGAVFVAEVGDVTRFDSAPQLACWAGLTPKHHESDTHVRRGPITKQGSRLVRWAAVESVKRVGPHTRVGAVRDRVAERRGGNIGAVAAARQQIEYVFYALRDGHVRALAHPARASA

SEQ ID NO: 97623 - protein, 371 aa, unidentified
MKSILSVGMDVHKNSFSLCAYDGYTGEIVSESTFASDVKLVIKFIETLKSRYENDAEIKCGYEAGCLGYSLYKSLTARGVDCVILAPTTMQVSAKNKMVKNDRMDALNIAKNLASGSYKAVYVPDEEDVEIKEYIRMIHDFKKELKRVKQEICAFVLRHGYQYDGKSKWTIRYMNWIRELEMSEIQRETLNEYIAEMENLNNKIDRFMNRIDEMYQSERYHEKVSKLRCFKGIDTFAAMTIQVETADFERFPNAKAYASYTGLTTGEHSSGDKNNRIGITKQGNTVIRKTLVECAQSLVKGNVYAKKSQRLKSRQKGMDVNIIAYADKATERLKKKYQKLIERNVPRNKAIVAVARELACFIWGMETGNIH

SEQ ID NO: 97624 - protein, 326 aa, unidentified
MPLRAQLPAGQGPCIGVDVGSKELAAATADAVTLDTPVTRMANTEAAITRWLRTLPPGCRIGMEATGRYHQRLAELAWRAGHVVYVFNPAKVAKYLGALRSRAKTDVLDARGIARYVLNESAGCHPYVPPSPFHAQLARLIQRRHQIIKHRDSLRMSLVDLPGCQAATKALKDAFKRLLAAVDAQIEATFRSDALLQARRRRLRSILGFGPLVSAAVTARLSRTPYANSDAVVAAFGMDLRVRDSGQFRGQRKLSKQGNAEERRLIYMAAVSACNNPLFRALRDKLLAKGRTAIQAHCTIARKLLRIAFAVWTSDRPFNPSLVGTG

SEQ ID NO: 97625 - protein, 437 aa, unidentified
MDEVTDEPLYRDRVCGIDIGKAGMVATIRVPSDANPARRAAETRSFGTTRREVLALADWLRCWQVPAVVMEATGDYWKGPFYRLEAEGLDCVLADAKQVKHLPGRPKHDPGDSRWLAACFERGAVTSCFVATPEFRVIRLHTRYRRDLTDERTREKQRAEKLLESAAIKLSSVVTDLHGVTGRDIMDHLIAGERSPKVLAQLARARARRKIAELEAALEGAEFFTPAHAALLAAMLERIDRVNAEIARLTEVIEALLAPHEEQLQQAESMPGWGRRAAQDALAETGADMSRFPSGAHLASWAGRTPLDNSSGKHTGRAKAKKGNRYLGGLLGETALAAGKTQTREGARYRRLSRRRGKAKALVAVGNTQLKVYHALLSSPGTRYEDLGPDYYDRQASMRRQIAHHVGRLGVLGFEVTLCRIPEPDPGPGQADSTQAA

SEQ ID NO: 97626 - protein, 328 aa, unidentified
MFYLGMDVAKAKLDCCLLLDEATGRRKTKAVNNTRPGIVELLALVAKQNISPQELHVVMEATGVYHEQAALALADAGVTVSIVNPAQVKDFGRGLAVRTKTDGVDSFVLARYGALLKPVAWQPPPPEARMLQALLARREAIAQDMQRERNRQEKADATDTPEPIRQSLADSIGFLSRQLAQLQQDIDRHIDRHPGLKHDLALLQTIPAVGPKVGSNMLSVMHSPDFGSAEQLAAYLGLVPVERQSGSSVMGRARLSKAGPARIRAVLYMAAVVATKYNPHIKAVYERLLARGKSRMSALGAAMRKLVHLCFGVIKTQTPYQPNYVKIA

SEQ ID NO: 97627 - protein, 342 aa, unidentified
MKEASIIGLDLAKRSFQAHGALADGSVAFRKKLTREKVLGFLAEQPRCVVAMEACGSAHHWGRAIRDAGHEVRLIPPAYVKPFVKRQKNDAADAEAIAEAASRPTMRFVAVKTEEQQARAMLFRTRDLLVRQRTQLINALRGQLSEHGVVAPQGPANVAILAQAIDDMTASLPLLVVELARVYLDQIDGLSEKVAELEKAIACEAKRGAVTRRLQTMPGVGPITAMAIETFAPPMEVFRRGRDFAAWLGLVPVQHSTGGKQVLGKTSKMGQRDIRRLLITGAMVIVRWACRKGAREGTWLHRMLGRKPRMLVAIALANKMARSIWAMLTKGEDYRVPAAATI

SEQ ID NO: 97628 - protein, 403 aa, unidentified
MNSVGIDISKGRSMIAVMRPFGEVVISPFEVRHTGSELSELARQLKSLDGETRVIMEATGNYHTPVAKLLHDTGLYVSVVNAKLAHGYGNNDLRRVKTDKKDSVKLANYGLDRWLTLTRYVPEEDTRLLLKNCYRQYRQYSKVQTVLKNNLISLLDTVFPNVNRLFSSPIRGDGSEKWVDFVAEFWHCRCVSEKSQKAFTNKYQRWCRKHGYNFSEAKAHTIHAEACGHIDVIPKSETTKLLVEQAVAQLRATSAALAALKHEMQALASMLPEYPVVMDMFGVGPTLGPQLMAETGDVRRFYSKKALVAYAGLDAPPNDSGDVTGRHKSMSKVGASSLRRTLFLVMSIYLQNAPLDESVYQFMDKKRAEGKPYRVYMMASANKFLRIYYATVKAYLESLEQTA

SEQ ID NO: 97629 - protein, 360 aa, unidentified
MQKQSNELNFEGQNIYAGIDVHSKSWTVCIMTEHLEHKKFTQPPQAEVLKNYLTRNFPGATYHSVYESGFSGFWAHRQLEVLGINNIVTNAADVPTGQKEKLQKDYPVDSRKLARSLRSGDLDAIYVPSESTLEDRSLLRMRLSLVKDMTRFKQRIKSLLYFFGIPYPERFHKSGSHWSKNFLRWLKEEVEFSEESGKQTLVIMIQEVEAQRQLLLVVSRQIKQLSEKEKYSSNVKLLKTVPGIGLLTAMHFLTEMETVERFEDTDHFAAYVGLVPDRHNSGNVKNDGEMTFRGQSILKKCIIESSWIAARKDTALALAYHKYVARMEPNKAIIRIGRKLLNRIYCVLKNKKEYVTCVVK

SEQ ID NO: 97630 - protein, 426 aa, unidentified
MSESEVLRQEPEFAALVGIDWADQKHAWCVQAAGTTQRESGEVEHTPEAVEAWIGQLCQRFGNRPIAVAVEQVKGALVFMLSKYEPLHLFPVPPAMSAKMRAALYPSGAKDDPRDADLLVDLLLQHRDKLRRLSPDSEATRRVQNLVEERRHLVEEKTAQSNRLTNHLKIYFPQMLDWFDRLDTELVCALLEQWPTLEELQKVPPARLRAFFRKQRCHYPELVERRLVGIRQAMPAIRDRAVIEAKSAVVKVSARVIRSLIRGVADLDGKIEEAAAAHPDFFIFESLPGAGAVLAPRLLAAFGSQRERYANAAEVQGYSGIAPVTEQSGKKKWVHFRWACPKFLRQSFHEWAGHSIAHSPWARSYYQQQRERGKGHHAAVRGLAFKWIRIVFRCWKDRVAYDESRYLAALAKRNSPLAAVVGGTIL

SEQ ID NO: 97631 - protein, 408 aa, unidentified
MNTLYVGIDVSSKSNVVYLMLPNGDKHSNFSVANSHEGSTQLVKRILSALTSHSLDTVLIGLEATSVYGDNLVYFLREDATLTPFNRKIHVLNPKQVKKFHDAYNDLPKNDYVDSFVIADCLRFGRINKEVYLGDYHYKALQNLTRARFFAVQNLVKEKQRFMNVLFKKYSTMTQEKVFSDTFSTTALAVYDEFDSAEALANMDLHELTDFIIEKGKNRFPDPDAVAKAIQKAARSSYRLPKTVNDSVNQVLSISITSMKALESQIKEFDKAIKAQMELLPNVLISIPGIGPVYSAGIMAEIGDINRFNSQAALAKYAGLAWKQHQSGGFESEVTRLIPSGNRFLKYYLCEAAFSLVRCDKEYSDFYRLKYKEVNRCQHKRALALTARKFVRLVFRLLKDNRLYCPAK

SEQ ID NO: 97632 - protein, 363 aa, unidentified
MGPARISAVLLDYGVVDRVSLPNDTHEVCLRGFATRCASISTSEEDNDMEIFIGLDVSLASTAVCVLGERGKILKEADVISEPEALVSFFKDLPYAITGIGLEAGPLSQWLHKGISEAGQPVVLMETRRVKKALNACAIKTDRRVAQGIARLLQMGWFSEVHCKSVPAQETRALLTARKAIQNALINLELSVRGVLRNFGLKIGPVSKVRYDVRIRELAAGNTMLQAAVDDPTRFRRSRDIGPWVGLTPGRDESGERSIAGAITKAGDAGLRAALYKAANVMALLQKGGLRREFPFPLRVQATRTISAVPRALKRFMSAMRTWISAVKSTGQVVSPNAVTARCADCSSRRHPASFVRSNASRP

SEQ ID NO: 97633 - protein, 434 aa, unidentified
MRRVIGMDIHRTFAEVVFWEDGRLRHHGRIDMTRSGLEGFGRSLVATDEVVVEATGNAMAVVRVLSPLVGRVIVANPMQVKAIAHARIKTDKIDAGVLAQLQASGFLPEVWVPDERTERLRRLVARRNQVVRHRTRVKNEVHGILQAHLVPKCPHADLFNNRGRAWLARQVLPDDERAAIARHIREIDRLAEDLADLDVDIAMEAVDDPQVRRLQTITGVNAIVATGIIAAIGDIHRFGEPQKLVSYFGLNPRVRQSGLGIAQYGRISKHGRSHARAMLVEAARAAAKAPGPLRAFFLRIRSKRGHQVAAVAVARKLAVLIWHLLTKEQDYFWVRPALVAAKQRQFALKAGAPNERGVGRRGAAYAYNVKELRNREKAAAENAERAYELMVRHWRSRGPKRRTDATKEERLGCAAALSSSRATLRHVVVRAGRS

SEQ ID NO: 97634 - protein, 399 aa, unidentified
MSLKGSFDGFVGIDVSKDKFDACGITGDEVKLFQFSTTMDRKGFEKLKGHLAAVSISSVLIGMESTASYHVNLFSYLVSEGYKVFLINPLLISNYVKMQLRKTKTDKKDAVVIAQFLLTNGDTLVQRATPSLVSDLRDLSRQRESLIDEMTSLKIEIKQLLNITFPELEHMAGIFTKSILKLLQQYPSAFALRDANLGQLSQMLIVDSYGHKREAFAAELIKAAHSSIGSKSPAKDMILKQKIALLHHLEDALQEITGILIEMSRKLMEEEINLMTSLKGIGEKAAANFLIEMGGDINQFERSGKIIAMAGLDPAVYQSGKHDGKGRITKRGNRHLRRIIWLMTTKVIQYTDVFSVYYLKRRKEGLPYKMAVLATAHKLIRVIYAMLTHRTTFCAQVNS

SEQ ID NO: 97635 - protein, 366 aa, unidentified
MAEDITYVGLDAHLRKILVALLTPGGEALEWQVLNEPASLGRLKRKLAGYRPIRICYEAGPLGYVLKRQLDAADLPCAVIAPSLTPRRPGERVKTDRRDAMKLAELLRAKMLVEVYPPNEEQESMRDLWRSREDAHQDLMRARHRLGKFLLRRGLVFRDGGAWSKAHRLWLRTLDFERDIDRSIFEDYMLAVDQMVTRREGIDQRIEEACALPVYRKQIGALRCFRGIATVTGLAVASELFDARRFPTPAHLAGYLGLTPSEYSSSDRRSQGKITKAGNTHLRRLLIEAAWHYRHPARVSAQMRKRREGQPFEIIALADRAQQRLCRRYRRMMMRGKHNHTIVVAVARELTCYLWTALQLVQVQEN

SEQ ID NO: 97636 - protein, 367 aa, unidentified
MKEYIGCDAHKKYSVFVAVNELGQHGPTHRVSHDRDEYRQFLASLPGNSPIALEATGHWYWLADEIEAAGHQVHLANAGEAKKRMGKTNKTDKLDACGLGMLLRNGTLPEVWIPPTELRDQRALLRTRMKLVRIGTGVKNRVHGALDRYGLQSEGYSDLFGKSGRQHLAGCLNYLPEHTRHSVERELALLDYLQPQIATLEEHIARVVQPSREIAWLRTLPGVGEILAPLIAWEVGQVKRFPGPGNLAGYAGVVARTISSGGRTWHGRVSSAVNHYLKWAFLEAANAVVRHQQKYDGWHVVTLYQRLRGPKGHAKAATAVGRHLAEATYWILQRGEAYRDPARSTLETAARAAGSSCPGKRDVALAH

SEQ ID NO: 97637 - protein, 409 aa, unidentified
MRLFVGLDVSSFDMKVCFLNGEGEKLDSFSVSNDLPGAQVLKERLLQCTTNQEVETVIIGLESTSVYSFHPSMFLHHDEDLKRFGTKVFLLNPKQVANFKKSYSDMNKTDEIDAFVIADYLRFGRNQMSIVKESQYVALQQLTRSRYQLVRMLTKEKQHFLQHLSYKCNTFSQEVDSSIFGNAMMELFLEKFSLEELSDMPLEELAEFLQEKSKNRFGEPKCVASTIQKAVRTSYRLDKVVEGSIDILLGTSIEIIRIYQKQIKELEKSIKRIMAGLTQTLESIPGIGPIYAAGIIAEIGQIERFDDETKMAKYAGLYWRTYQSGRFTAENTSLSRNGNHYLRYYLVEAANSVRKHVLEYQEYYAKKYNEVPKHQHKRALVLTARKFVLLVDALLRNHQLFTLERRVKV

SEQ ID NO: 97638 - protein, 412 aa, unidentified
MEVLYACCCGLDVHKKSITACVLWAEGKGKTRKEKRRFGTFTRELLQLADWLRACGVTHVAMESTGVYWKPVWNILEGQFEVLLVNAQHIKAVPGRKSDQKDCEWIADLLQHGLLHGSFVPPKERRELRDLTRYRVSLAQEENRIANRVQKVLEDANLKLASVASDPLGVSGRAILTAILAGEEDTERLAEMSKGILRKKIPDLRLALEGRVTEHHRFLLQELLDHQEFLEKKMAEVEAEIGKRMRPFEAEVERLDTIPGVDRVTAWSLVAEVGVRMEQFPSAGHLASWAGLCPGSFESAGKRLSGRTRKGSASLRRCLCQVGSVVSHLRDNYLSAQYRRLAARRGGKRAVLAVAHTVLVMAYHILKRKQNYQELGADYFDRLNADAIRRSLVRRLERLGHRVTLEPILQSA

SEQ ID NO: 97639 - protein, 354 aa, unidentified
MTNTTILAIDLGKYKCVACAYDRATTAAEFRTVTTSRAEVERLIRDSRPAVVVIEACTLAGWVHDLCDEIGVPCEVANTASEAWRYKHAKRKTDRDDALRLAQLEALGQIPAVVVPAKAVREWRALIAHRQALVTQRVAAQNRIRAVLVGQGLPAPRGARAWTAAGLAGIAQFARPLAECAPDELWRGLLELALTAYRQAEELIAAVEAKLDQIGGADARVRLLDTMPGLGPRTAEAVVAHLDDPKRFKSGKQVAAYGGLVPRQFQSGEDDRRGRITKRGPAILRKLLVQCAWCMLRYNRWARSVFERLSRGQARKKQAVVALARKVLVRCWAMLRDGAAWRPDPDPSPAAATA

SEQ ID NO: 97640 - protein, 336 aa, unidentified
MRYIGVDLHTTQITVCYLKAEADFEIRKYQLIEMEKFVNSLEISDEIAVEATGNTRWFAEQVAEKVRRVVVVNPRQFEVVKNSVRKTDKNDALNLARFLRADLLPEVRAKREEATRVQSLVNTRTKLVRLKTSLINKIHALYVSNGRKLKKTSLASEKGLEKVLLSEWSAIERIELEIIIEQIRSLKVSIKKLDTAIEVESGKLKGFENLKSMSGIGSLSAGILLSVIGNIKDFETADKLASYFGIVPRVSNSNETVNHGRITKRGNKTGRTTLVQCSLSAIKKSEYLKNYYEQVKARRGHGKAKIALARKYLGIIYNTLSNNWVFADFNNFELAE

SEQ ID NO: 97641 - protein, 345 aa, unidentified
MTYFAGLDISLEETAICVVDDKGELVRELRAASEPPALIAALRELGLPLERIGLEACSLAAWLHDELRAAGMPAICIETRQANAAIKMMPNKTDRNDARALAQIMRTGWYRQVYVKSRQSRLWRSLLGARRTVLNEMRTIENVVRAVLREAGLKLGKPNRAAFAGRVRELVDGDLAVVPLVEPLLTILAAMQRELTRLTKQVFQIVRKEEVCRRLMGVPGVGPMTALAFRATIDQPDRFRRSRDVGAHLGLTPGRYQSGETDIQGRISRCGDELARTALYEAAHTLLVRSRKWSSLRAWGMKIAKQRGMAKARVAVARKLAVILHRMWRDETDFRYGKDPSAVAA

SEQ ID NO: 97642 - protein, 402 aa, unidentified
MRELSDELAVVAIDSGKVVNRVWVTDRTGLVGEPCSLPTSREGIEALERLVGQRDAVFAVEATGALHRAWAAELERRRPGSLRLFAPSETHAARAQLGSRRFKTDDRDCAALVWLARQGAGRPAAPSGIEALLGAVSHRRQLILALTPLRQRLHDQLNALAPGLSAPAGHGRALALGSPTGHAVLACAAVFAGRAPSVRSLKARADGRLSDATAAFWAERWRDCLAPPADAELRAARLARDLERFRALREDIAFVDGQLEQLLADSAGQILTSLPGVWTVRAAAFAAHTLPVERFATPEHLYSATGLAPASYESATVRRRGGIARTGLPEHRDALMGIAWGLGQFAPAFQARLAELNRRGKTGIEARVALARHACRLCWRILHTQQPYDDRRYDRARRDRGR

SEQ ID NO: 97643 - protein, 475 aa, unidentified
MGNGSGVSRGDRNRNARLGRLRALVPVANAIVGIDLAEQKQMVVVTDHDSKVLARKTFKTHAWSLGPALDWAGKQAAANGFTGATVACEPTGHRWRVLGQLAADRRMPFVCVQPMLTSWARRSEDLTFDKTDEKDAVLIARLTAQLRCYVPEPVDETWGRLRHLGARRAQLLVESGRQVQQIRALLECVWPAALQTARYPFRSATWTAALSVVVDRDGGDLARTRRRGLARWETAVRREVIRRGGIRPCLRIVRAMFAALCDPAGVTAHRRGGLERVGLILTDWLETHRRLADTETRMTTVLDELALTGLVTSIPGISAIGAAAILAETGDLNRFATARALVKHAGLAPREKLSGTFIGRTKLTGQGRPGLRLAAWRTVWGAQSANPVYAARFTHLTGREQNRLTATQAQLPHPGAVRNHRNTRIAWSRHGRERVPARVPRATRSPFVGRDARTGFATVYPEDVAEPFILRSGSI

SEQ ID NO: 97644 - protein, 354 aa, unidentified
MDKNTPYASVATIGIDLAKKVFQVHAVDVCGQVVLRRTVKRREVLTFAAQLPPCVIGMEACATAHHWARELARLGHDVKLIPPAYVKAYVRRQKNDMADAAAICEAVTRPAMRFVPVKSAEQQGVLLLHRVRELLVGQRTALINALRGHLAEFGVVAPQGKRHVAELVAVVADAADGRLPEIARGALAPLVRQMQRLDREIDGFDKRILAWHRADESSRRLAAIPGIGPVTATAIVASVTDPSMFGSGREFAAFFGLVPRQSSSGGKERLGRISKMGDRYIRKLLVVGATAVLRNAKKGGSPSKAWAEALLQRKPFKVVAVALANKTARIAWAVLARGEIYQADKAGAAATAAA

SEQ ID NO: 97645 - protein, 339 aa, unidentified
MSLYSAIDLHSNNSHVAIIDDQQNRVFYRKLANDPKVIANAFAPYRERLKGIVIESTFNSYWLADLLIEKGYPVHLANPCGIQKYSGLKHADDKHDAFWLAQMLALDILPEGYIYPKEDRPLRDLLRKRSQLVRVRTSLVLSLQNMVMRNHGIKIRSNELKKLTQDPVAELFKDQQELALAGKASKEIIDFLTRQIQRIETAARNKAILKEPFSKLLTLPGVGDILGMTILLETGPIERFKAVGHYVSYCRKVPSRWTSNEKRKGKGNTKNGNRYLSWAFSEASDHARQTHGPSRDFYNRKLNQTNASVAHNALAHKLARAGYYIMRDHVEFEEAKMFP

SEQ ID NO: 97646 - protein, 371 aa, unidentified
MKDAMKYVGLDVSKEKIAVAIAEEGREAPRYWGVIDHTSEAIKKLMKKLGDTKTLRVCYEAGPTGYALYRLLSDMGIHCEVIAPSLIPQKPGERIKTDRRDAIRLAQLHRAAELTSIYIPTPDDEALRDLVRCREDAKEDELRAKHRLSKFLLRNDIKPPAGINKWTVKYYRWLDTLQFENVHLRIVFQEYYYQLKELKQRILRLEEEINIHAKEGVHAEKVQALQALRGIALVTATSIVAEIGSFKRFSTPRQFMAYVGLIPSEYSSGERRKQGSITKTGNRHVRRLLVESAWSYRYQPAVKGDLERRIKGQSPVIQSISWKAQNRLHKKYYRLLSKGKNGGKAVTAVARELAGFIWAVMQEVEEMPSAN

SEQ ID NO: 97647 - protein, 339 aa, unidentified
MITIGIDPHKGSHTATAVDEREAVVGELRVIADRHQRTRLLEWAAAFEPRRWAVEGATGMGALLAQQLVGAGEHVVDVPPKLSARVRLMDTGRIDKTDPNDARSAAVVALRNGSLNVVGADTEHRVILRLLADRYHQLTSQRTRTVCRLHAVLCLVIEGGTGRALTAARATKALASVTNRDPITLERVATCRQFVDEIELIDQALADTRARTVAAVTASKTTVDDVYGVGPIGTAIIVGHSGDVRRFPTAGHYARHNGTAPIEASSGPKSRHRLNPRGNRQINHALYTAALTQIAHDTPGRVYYERKLGEGKTKKEAMRALKRRISDAVYRQLLSDTRD

SEQ ID NO: 97648 - protein, 311 aa, unidentified
MTDHTIGVDISKSHLDVFRLEDGAAQRFENSAAGFRALSKWLSKAPVARIVFEPTGPYHKAFESALGKTFPLVKVNPLQARRFAEAHGTRAKTDAVDARMLARMGVAFDLAPQTPRSREALILRDLHVARTGLIKDRTRLRNRLQVQDVAVLKRQTKARLAQVNRQIAELDAEIKALIEAQQTTARSRDILCSMPGIGPVTAAAVLTLLPEIGTLDRKQVASLAGLAPITRQSGQWQGKAFIGGGRKPLRNSLYMPALVAMRYNPELKTKYEDLRAAGKPAKLAIVAIMRKLIEMANALVKADRLWVEQGA

SEQ ID NO: 97649 - protein, 344 aa, unidentified
MDYFAGLDVSVKETSICIVDDTGKIVREAKVASEPEALLAALKKPAYHSKRIGLEAGPLSQWLFSALAEAGLPVICVETRHMKAVLQAQINKTDRNDARGIAQMMRAGLYRPVHVKTLRRQKLRMLLTHRKLLQSKAIAIENDLRGTLRNFGLKVGMVGTVKFEARIKERVENLPDLAALVDPLLVVRRVLRQQLGILHRRLLAVVRDDEVCRRLMTVPGVGPVVALTYRATVDVPARFRTSTAVGAVFGLTPAKYQSGEINRTGAISKCGDDMMRVMLYEAAQILLVRSAKWSWLKAWAMKIARHRGMKKAIVALARRLAVIMHRIGVDGTEFRWTREGAATA

SEQ ID NO: 97650 - protein, 343 aa, unidentified
MVDKVTEAAVVGGVDTHKDLHVAAVVDQNNKVLGTQYFSTTRQGYRQMLAWMTSFGTLKRIGVECTGTYGSGLLRYFQNAGLEVLEVTAPDRMERRKRGKSDTIDAECAAHAAFSGIGTVTPKTRDGMIESLRVLKTCRKTAISARRVALQIIHSNIISAPDELREQLRNMTRMQLIRTLGSWRPDASEYRNVTNVYRISLKSLARRYLELHDEIADLDVMIAAIVDELAPELIKRNAIGYESASQLLITAGDNPQRLRSESGFAALCGVSPVPVSSGKTNRYRLNRGGDRAANSALHIIAIGRLRTDAKTKEYVARRVMQWQNRSSVHSKKGSSQKTENKAR

SEQ ID NO: 97651 - protein, 354 aa, unidentified
MSQELNSAVAVIGIDIGKNSFHIVGHDQRGAIVLRQKWSRSQVETRLANLPTCLVGMEACVGAHHLSRKLQMLGHDARLMPAKYVRPYSKGQKNDFRDAEAIAEAVQRPTMKFVATKSAEQLDLQALHRVRERLVGQRTGIINQIRAFLLERGVAVRQGLRFLRAELPGILATRSDVLSPRMLRLIEDLAGDWRRLDERIEGLSNEIETLARQDQACTRLMTVPGIGPIISSAMVAAIGTGDVFSKGRDFGAWLGLVPKQISTGDRTILGSISRRGNRYLRVLFVQAAWVVLVRLKQWERYGLKSWIEAAKKRLHHNVLAIALANKLARIAWAVLNKGRAFECVKRDAMASRLA

SEQ ID NO: 97652 - protein, 405 aa, unidentified
MSENDQLVVGGVDTHRDTHVAAVVDTTGRVLDTASFPADVTGYEQLGDWLGSWGQVAQVGIEGTGSYGAGLSRHLMSIGVEVTEVNRPNRQLRRRYGKTDATDAEGAARAVLSGQATGTPKTGNGPVEAIRMLSVARRSAVKARTQAINQLHALVVTAPDQVKDHLFGLSPKARVKVCAAFRPGTAQTTIRYAKQALRLLARRYQALTAEITQLDTEIRRLCVRANPALLAASGIGPETAATLLITAGDNPHRLTTEASFAALCGTSPVQASSGRTVRHRLNRGGDRQANHALWRIAMVRLRADPRTIEYAQRRQTEGKTRKEIIRCLKRYITRQVHQLLTNPHQTPSGTHLRCLRQNTHITLAQAATALHAHPTRLSQLERGQYHNHHLATRYQTWLTTPRTPI

SEQ ID NO: 97653 - protein, 392 aa, unidentified
MIYVGIDIAKDKHDCFITNSDGEVLFKSFTISNNRDGFETLFQKIQSVSDDLTKVKVGLEATGHYSYNLLGYLLDKGLPTYVINPLHTNLYRKSLSLRKTKTDKVDARTIASMIMSDVNLKSYSDTSYHNEELKSLTRYRFDKVKERAKLKTSVSRLICILFPELEKLVPTLHMASVYALLSEFPSAHAVASAHLTRLINLLSQSSKNRYGKDTAVMFREAARNSIGSNMPTKSLELKHTIKLIQELTSEIDEIEAAIKQIMDEEIQSPILTIPGISYRMGAMIIAEIGDFCRFDSADKILAYAGMSPSTYQSGQLDNCYSHMEKRGSRYLRYALYNATKYVCHWDKSFGAYLEKKRSEGKHYNVAISHAAKKLVRLIFAMEKSGKAYLPTA

SEQ ID NO: 97654 - protein, 386 aa, unidentified
MPKPADLNRCLAPLDQDHTIIAVIEMSQSSWLVAGVVPGIARHPLKKLAPDQGALLKLLHRWCAEAGQAGREISRIAVAFEAGRDGFWLARWLRAHGVEAHVIHPTSVAVSREHRRAKTDRLDTALLKRVFLGWLRGEPDHCHMAAIPTLEEEDAKRPTRERESLVGERTRIVNRIKAALARLGVRGFKPTLRKALEHLDALRTPEGAALPPNTRAELHRDMARLRFVTEQIQQIEAARSERLEQAGAGPNAMVRLLAQVVGVGIETADMLVHEVLSRNLRDRRAVARYAGLTGAPDESGSRRREKGLAKAGNARVRRGMIQLAWRFLLHQRESALPQWYRARTADARGSTRKTLIVALARKLLIGLWRLVTTGEAPHGVALRPAA

SEQ ID NO: 97655 - protein, 349 aa, unidentified
MTIVEDRPVITGGVDTHADLHVAAALDPIGGLLAVQEFPATAAGYASLLGWLGGFGDIALVGVEGTGSYGAGLARHLAAAGIRVVEVDRADRQDRHRAGKSDPLDAVSAARAAQSGRASGAPKGRDGAVEAIRALMVAKRSARAERTQAINQARALIVTGPDELRARFAGHRPAQLVEAIASLRARPGDVPGYATRVALRELGRRAQFLDAQLDRMDELIGPLVTARAPGLLALHGVGPDTAALLLIAAGDHPERLRSESSWAHLCGAAPIPASSGKVSRHRLNRGGDRQANHALWRIVITRLGSRPGHPATRAYVERRTKEGLSKKEIIRCLKRYVAREVYHQLRAGA

SEQ ID NO: 97656 - protein, 330 aa, unidentified
MTGTKYIGMDVHKESISIAVRNDAGKIVMECVIETKASMILQFIDGLRGDVQVRFEEGTSAAWLYDLLKPHVTKLVVCDPRKNKSMREGNQSDKIDARRLAELLRLDHLTPVYHGEHGLRTLKELVRSYLTVTKDLARVLSRVKAIYRSWAIPCTGKQVYAPRHRAAVLLGILQTPHRFRTKRQLWNFGGLAIEMHSSADHRSVDGHLQRSRKNVLVGGLNRNCNHDLKNLFKGAAVMASSKPGPFQEFFAALLATGMRPEMARLTLARKIATIVLMVWKRGVCVDEVVGTIPGKQVVLTELKLIAQAIRGGGDPESAGRNAGDRGGDPL

SEQ ID NO: 97657 - protein, 359 aa, unidentified
MSTQSKPFPFKGQKILVGLDVHLRSWSVTVLSEQAVLKKFTQDPSPATLNKFLTNTYPDAEYYSVYEAGFCGFWIHWELHNLGINNIVVNPADVPTMAGERLRKTDAIDSGKLARSLRSGELKGIYVPDSLATEIRSLIRLRDSLTKDQTRHKNRIKAHLRYLGIDIPEEFQRPGCTWTNKFVLWLKRLDLETDYGRKTLDLLIAQYEDLRGQQLKMMKELRLLSRTERFEEPLRYLMSVPGIGQLAGLTIISEVDDIARFKDAAHFASYVGIVPMCYSSGEHDGTGNITVRRHAKLRWLIVEAAWVASRKDPVLSSAFVEYCRKMKPSKAIIKIARRLVNRIYFVMKHQQPYVNCYVS

SEQ ID NO: 97658 - protein, 353 aa, unidentified
MKTYYVGMDVHRASIVIVVLNGAGKVVMQSVIETGAERVRGYLKQLSGKVNVTFEEGTQANWLHEVVRPLVTEVVVCDPRHNKLLTSGNKSDRVDAQKLAELLRLGSLKAVYHGDHGMRALKELVRTYDCLVSDTTRVMNRLKAIYRGRAIGCAGHDIYRQDRREQWLEKLTERGAKQRASFLYQQLAALKPLRHEAKRMMVKEARRQPAYPWLMSVPQFGSVSVAQLLAIVSTPHRFRSKRQFWTYIGLAVVTRTTADHEVVNGVLRRSQRPVSTRGLNRNHNHLLKRVFKNVASSACHSGPFKAAYELRVAQGMAPSLARLTVARQLAAITLAVWKRGEQFNPERMKQQAA

SEQ ID NO: 97659 - protein, 338 aa, unidentified
MFIIGIDPHKGSHTAAVIDGDEQLVGEVAVRADRRQRDRLLCWAGSFVPRVWAIEGATGVGALLAQQLVSVGETVLDVPPALSARARVLDSGRKDKTDAHDARSAAIVALRHPNLRPVALDDHRQVLRMLARRHHQLVAGRTRAICRLHAVLCEMIEGGLARNLSAKRAAEEIRKLRPIDAVGIERKQIASEFLAEVRRHDRALVELHARIVAAVNAADTNVTGVFGVGPIVAAYLIGYSGDIHRFPTAGHYARYNATAPIEASSGPKVRHRLNPNGNRQLNHAIHVAALGQISHDTPGRAYYLAKQAAGKSRKEAMRCLKRQISDAIYRQLRADLTT

SEQ ID NO: 97660 - protein, 338 aa, unidentified
MTIETLGIDIAKNVFQLHGVNRGGRVVFKRRVMRDQLLEVVSRMDRCTIAVEACTGAFYWARKFEGLGHQVRIISPQYVKPFVRRQKNDGNDAEAICTAARQPHIPFVPKKTVEQQDIQTLHRARQRMVNHRTAVVSQIRGLLLDRGFAMAKSITRARRLVPEILADTTNELTALAREAISELYDLFRDLDRRIASFDKKIDRIFFESEPCRRIATIKGVGPKTATAIIAAIGDGSEFKNGRHLAAWIGLVPRQFSSGDRKVLMGISKRGSQHLRSLLVHGARAVVRTAPSKMDPNNTWVNQLRERRGFNRATVAVANKNARIIWAVLQTGEPYRAAF

SEQ ID NO: 97661 - protein, 339 aa, unidentified
MQVTTIGLDLAKNVFQVHGITEDEEVVFNRPLKRAQLLPFFSKLEPCLIGMEACSSAHHWARELTTLGHDVRLIPPMYVKPYVKRGKSDAIDAEAICEAVTRPTMRFVAVKTVEQQALLSLHRARDLLVRQRTQLINGLRGMVAEFGVYIARGLARVIGFAEDILAGEVLDLPEIAHEVIHNLCEHLMVLHRRVRWYENRLKLVAKEDARVRLLRTIPGVGAVTASAIIASIGDGHQFSNGREFAAWLGLTPANKSSGGKEKLGRITKMGDQYLRSLLVVGMTSLVRQTRSHPERASKWLTSLLERKPARVATVAMANKTARIVWAVLTRNEPYTPHSV

SEQ ID NO: 97662 - protein, 333 aa, unidentified
MCIYSFFIGSDISKSVIDISYIVDGEPIYLGQFLNSEEGFNDFVKALLKITDVPFCEWFICFENTGVYSKPLLNWLISKDIACKEENAMKIARSLGLRRGKNDKVDSKDISRYAFEKRDSIQATILSKPLIISLRKLLSRRDLLVRQKQSLSVSLTEQKSYIDENLYETLKQGDDILLKAYNNQIKIIEKLIQELIQSDPEVALNDQLAQSVIGIGKVTSAYIIAFTANYTTFKNARKFACYSGIAPFSNQSGTKKGKTKVSHIANKKIKSILSNCIASAITHDPEISWYYNRKVGQGKEKGIVLNAVKNKLIHRVFSVVQRQTPYVKMMRYA

SEQ ID NO: 97663 - protein, 319 aa, unidentified
MTPAKVYVGIDVAKRRLDIALWPTGEQRTLANDATDINELVTWLQTQQPQLIVLEATGGYERAVVASLGAAALPVVVVNPRQVRDFARAVGRLAKTDTLDAAVLARFAEAVKPSPRPLPHAQMELLRALVTRRQQVVEMLTAERQRLASAQPSIQGLIEKHIAGLEKELALLEEELDRTIRQSPLWRAKERLLRSVPGIGPTVATVLLAEMPELGQLDRRQVAALAGVAPLNRDSGQHRGRRSVWGGRATVRTALYMAALAGTRWNPVLKNCYQRLLALGKAKKVALVACMRKLLTILNAMLRDGTAWQEVPAAHAIPA

SEQ ID NO: 97664 - protein, 300 aa, unidentified
MALTIVEDTRAVTGGAGTHAGMHVGAALDLVGGLLGVGEFPATAAGYARLLGWLGGFGTVCLVGIEGTGSYGAGLARHVTAAGIRVVEVDRSDRQDRRRQGKSDPLDAVSAARAAQSGRARGAPKGRDGAVEAIRALMVAKRSARSERTQTINQARALIVTGPDDLRARFARHTAAGLVSELAALRPRPGATVGYATRIALRELGRRAEFLDGQLGRLDELIVPLVTARAPALLALHGVGPDTAALLLIAAGDHPHRLRSEAAWAHLCAVAPIPASSGKRTATASTPAATARPATPCGGS

SEQ ID NO: 97665 - protein, 341 aa, unidentified
MDKVTTIAVDIAKRSFSMFWVDTEGEIGAKAMTRAKFEEFMRTREPSRVVLEAGGSAHYWGRWLARQGHEVRLIAPQHVRPFVRTNKTDGADARAIWEAAQRPEVKWVAVKSEASQAVLGLHRIRRQLMDMRRMQSNQLKALLYEFGVVVPALTKITAAQLQDWVVAGRVPELVQASLREQIERIARLKREEVELTRAIERHNESDALAIELMAVPGIGPLSASALSAELAAGAKSFANGRQYAACKGIAPRLSGTGGKVRPGPISKRGDPYVRTLLIHGARSVIAHQRRAKRLSPWLSALLERRPLNVAVVALANKMARTAWALAAHGRSYQQNYGAQAA

SEQ ID NO: 97666 - protein, 359 aa, unidentified
MRIIGCDLHARQQTLAMLDTATGEIVNLTLTHEGDHVREFYSNLPRPVRVGIEATGSMQWFLNLMEELGIECQVGHPANIRAAEPRKQKHDRRDADLILKLLVENRFPSIWLPSKELLDLRGLLLHRHQWVRMRTRVQNALQAIALANGLRRGPSLWSHAGQEKLASLSLAPHTAHRRSELQALYAKFEMEIEKLNQRVEKQAWERPTALRLMTHPGVGPITALATDVFLGDPTRFEDGKALASYAGIIPREYSSGGRQRLGGLTKQGNPLLRFLWCEAAIHAVRKDPELQRFYRRKLFQKGLGKARVAAARKLGIRLWILLRDQIDYNEFCRRGQMRQKNGGTCVGMPARVIAQTVAD

SEQ ID NO: 97667 - protein, 404 aa, unidentified
MFYFGIDWSEKHHNLCVQNAAGATISELKLKHTLEGFEQLDRERCKLDVPAANCFVAIETSHNLLVDYLLDRGYIVYLIPPQATDKYRGRKRSSGARTDESDAAVLAKAVRTDGECHQRLRPNSALTQQILAQVRLIEVLRRSIQRQSNQLRAVLLRIYPQALGLFGKLTAQINLHFLMTYPTAQEALALSKGEFEAFCRQHRYCQAGLISRRYAQLMAPAPEANPSAVQAYRDQVRILPELLLPQVRRRNEALSLLKQLFSQHPDAFIFDSLPGAGDLLAPALLAKFGDHRDRFPSSASVQALAGTCPVTKASGKYKIVLFRRACDREFRRITQQFACASVKQSGWALAYWHDVRPHCETDSDAYRRLANRWLAIIWRMWLDRKAYDETYHLQQRAQRRRPRS

SEQ ID NO: 97668 - protein, 286 aa, unidentified
MKITTIGLDIAKSVFHAVGVDKAGKLIKKKMLRRKDLLPFVAKIEPCLIVMEACGGASYWAREFEQFGHVVKLIAPQYVVPFRQGNKNDYNDALAIAEAAQRPNMRFVKPKSVEQQDVQLLHRMRERLTKQSTALINQVRGMLAEYGIVITKSKSAFKAQLPDILVDEANMLTIKGKAIFYQLYDEVIDIEKRLKSCDTQVLNETHNNVICQRLQTIPGVGPVTATAIYAAVGDGKDFSNGRHFSAWCGLVPKQHSSGGKDNLLGISKRGNAYLRTLFIHGARAVL

SEQ ID NO: 97669 - protein, 367 aa, unidentified
MKKVSTVAAKQTMNFPQPKLTIGLDLGDRSSWYCVLDETGSVLLEQRLSTTPKAMREVFVAMPRCRIALETGMHSPWVSRLLSAVGHEVIVAHARNVRLIGESRKKDDRRDAQTLARLARSDPQLLCPVKHRSAKAQADLTVIRARAGLVRARTALVNTARGLAKSYGERLRGCNVRNMNPEKAEGLSPELQRALEPLLAGIESLSERICECNERIEKLATESYPQVALLKQVKGVGTLIALTFLLTLEDAHRFRKSRDVGCYLGLQPGRRNSGQSEPQMHISKEGDPYLRTLLVQGAHHILGPFGADSDLRRWGLKLAERGGKSGKKRAVIAVARKLAVLLHRLWVSGEVYQPLRNSQQRPLVIAA

SEQ ID NO: 97670 - protein, 351 aa, unidentified
MSIIGGLDVHRAQITFDWVDRDSGEAQRGRITPATRAGLRAWLGELPGAEGAFAVEGCTGWRFVAEELQTAGLVAHLAEPAETSSLRGPKRRAKTDRSDARLLRELLEQGRLPCSWIPPAWILDLRTTVRLRKTLVDQRTAWQQRIHAALFHHGLPRPDQELLSRATRGWLEQVPLPPASRQALAVALGQIDHLDAELDPIDQWLRTLARSQPGCRALMTHHYGIGAITAPTILAELGDARRFAGGDQVVRATGLDVTVYASDGKRSPGHLSRQGPEVLRWALFEAAKAAARPRSPDYGYYTQVKARQGGNRATLAVARKLARRVRHTLVALGDAALVPVEGLQLPLPEAA

SEQ ID NO: 97671 - protein, 352 aa, unidentified
MTVTNLPRCITGGVDTHLDVHVAAALDERGALLGVESFATTESGYKKLLGWLADFGPVDLVGVEGTGSYGAGLTRLLQAERVRVVEVDRPNRQRRRLKGKSDPQDAISAARAALSGDAAGEAKTRDGNVESMRVLRVARSSARKGRTQALNQMRNLISTAPEPIRAELRGLNVYHLLERASAYRPGAKRDVISLTKFTLRMLARRAITLEEEISEIDAILKPLVKETAPELVGTLGIGTDAASTLLVTAGDNPERLRSEAAFAHLCGASPLDASSGKNQRHRLNRSGDRQANSALWHIVITRMVYDPRTTEYIARRRTEGLTKKEAVRCLKRYVAREVYGLLPHEKLGLDSP

SEQ ID NO: 97672 - protein, 406 aa, unidentified
MKQIVSVGIDVSKGKSTVCAMIHPNTIIKESFEVLHTVEEMSMLADYIGSLDGEIRIVMESTGHYHLPVAQFLYQKGFFICVENAYIIRQFSRIMLHGAKTDPLDAKKLAKYGLAYWSELKPYKFHPSCYTELSLLSKQYQTYIKLLIAAKQNVIHLMDEMLPGFKEALDTASSVQFSKVKYVDFAKEFYHVDMIKSMGKEIFRENYKQWCKEKGYRFQSEKADELFHLAEDGIPTLPTEFPSTRLCMEVATEQVSQLGYALEQILSQMQNLAKTLPEYQTIRQMGGMGEKLCVRFIADIGDVRRFHNGKALVAYAGIDAPPYQSGQYTGTKRRISKRGNSALRKTGYEVMKSLKSHPPKTDTRVYDFIIKKENEGKSRKQAKIAGLNKFLQIYYARVMEIYKNIA

SEQ ID NO: 97673 - protein, 318 aa, unidentified
MTIISFDVGKRELVGVRINKSAQIKERIVLANAPEAIDSFLDEVKQKYPRLIMSSEATADYHYCLAKHCLELEIPFRLINPILTKQFIRSTIRKKKTDLTDALIIAKLTLQGEGTLLSLKSLDPLKAVNRTAFKINRIYGMLSAICSRIERVFPEQEAVLSEVRKPLLPLEQTVIALRSQVAEGIDQSLKNLLISIPGVGPTIAATLITEIGDIQRFPSGKSLVAYAGLDPRIRQSGISLKRNTKLTKRGSPYLRKAAYIAAYIAKRYDPELKEYFEKKKNEGKRHKEATVATARKLLYRVYAVWKRGTPYLKRYPQE

SEQ ID NO: 97674 - protein, 334 aa, unidentified
MSNVTTVGIDLAKNVFSLHGVDARGVVVLRKTVSRARLASFVAQLPASVIGMEACSGAHEWARRFAQHGHTVKLMAPKFVVPYRKSGKNDGNDAAAICEAVSRPSMRFVPVKSVEQQTMLTLHRVRLGFVEERTATINRIRGLLAEFGVVLPQRAMEVRRGAAASLEQLPAAAARALSDLLAHVRVLDERVNEYECELEQHARRDERAQRIQSLSGVGPISASAIVASVADAHEFKNGRQFAAWLGLTPKQYSTGGKTRLGHITAHGDPYLRTLLIMGARSMLQTALRRTDRLARWALGVRARRGYHRACIAVAAKHARIIWAMLAKNEVQQLS

SEQ ID NO: 97675 - protein, 353 aa, unidentified
MNKVNQLSFAGETICCGLDAHLTNWKINLLMGGMEISRFSQNPDPELLYKHLQKNYPDAKFKVVYEAGFCGFGIQRSLTKLGVECIVVNAADVPTSDKEHKRKDDKRDAAKLSRELSKGQLEQIYVPSIEMEHYRTLVRQRYRLVKDQTRCKNRVKHLLMFSGLAVTDPQQRWSKKYVEQLEALNCQTEALKIAVALVINEYKQIRDLLKQATLSIRKLSKQPPFSTIQSYLQSIDGVGLINGMVFQTEIQNIYRFKTFDQLSNYAGLVPDISSSNDKTVVKGVTKRRNEFLREALIESSWILIHKDPAMLMKYNEYTKRMKGSKAIIRIAKHLLSRISYVWKNQKKYERGIV

SEQ ID NO: 97676 - protein, 402 aa, unidentified
MKKVCGLDVHKDSIFCAIYNGENYSQVKEFSTMTPNIYSMGEYLQSEDVEEVALESTGIYWIAVWDLLYEMGFNLTLVNPYFIKQMPGRKSDVKDAQWIATLLHKGMMRGSFVPPPVIQELRVYSRKQGKLKQQVTRVLTVMDGILVKSGIRASSCLSSITTKSFQCIVEALIAGWSDPGYLVSLVYGNRKNKQSGKLKEALTGNLKAHHRQELSWAKQEYEMYQVQISECLSEMRRICDEHFSVMVKLLQTIPGISQVAAMTIIAETGGDMSVFESSDKIVGWAGLRPRNDESAGKYKSTATTKGNKYLRSILVQASWAASRMKGSFFKDKFQRLAMRKPRKKALIAIARKLLVVIWNVLQYAKEYNPRLVPVQDPVKMKARLAYHKKEYEKAANLLNITV

SEQ ID NO: 97677 - protein, 370 aa, unidentified
MDVHSKNYTLCAMEPVIGAEDRIFANIKVTADYKNILMFIENLKLKLGINDTYDIECGYEAGFLGYSLYNRLTEAGIKCVILAPTTMLTQQGQRIKTDTRDAKMIAQCLSYGGYHPVHIPTEEDDSVKEYLRMRGDHKLALKKIKQQINAFCLRHGYCYDKTKWTITHLTWLKQLDMSGLYRETLDEYLASYDEHTAKIERFDKRIEELSSQERYCEKVKKLGCFLGIRTHTALSLIVETGDFERFAKGNIYAAYLGLAPGERSSSDNINRLGITKAGNSHLRRLLIEAAGGICKGAVGHKSKDLRQRQKDNTAEVIAYADKANTRLRSRYYRFLRHGKRRNVAVAAIARELACFIWGMMTDHIGMKGER

SEQ ID NO: 97678 - protein, 346 aa, unidentified
MNYYAGIDVSLEWSSVCVVDGAGKIVAEAKVLSEPDALIGWFGKLGLPPLSRIGLEAGPLSQWLYAALREAGLAVELLETRHVRTALKTMPVKTDRNDARGIAQLMRLGWFRPVHCKSLEAQETRALLTARKLVQEKLHDVEMSLRGILRGFGLKVGPTTLLRFEARIRELVDGHPSLEAIAQRLLAVRTILRREFAGFEKELRAMARSDVRARLLMSVPGVGAVVSLTFSSAIDDPARFTSSKNVGAYFGITPTRYQSGETDVSGHISRIGDAGVRAMLYEAANIIITKPLKGCTALKSWAMRLAMRAGMKKAKVALSRKLAVIMHRMLADGTTFRDAAACVAAA

SEQ ID NO: 97679 - protein, 353 aa, unidentified
MFKIFRKNCCGLDVHKTWIYACIGITDTNGLTEYKQARFSSFSKGLKELAEWLAKYSCTEVCMESSGKYWIPVFNILEKICFVTLAHPKYTKPQKGNKTDRKDAKWICDLFMCDMIKPSFIPSPEIRQLRNLIRYRTKLTNMLTSEKNRAQNCLTVSNLKLDDVFSDVFGKSSRSITNYMLDHPGETFDVAPFVDLLYTLPGLDKNPMTAIAILSEINPDMSVFPSSQNLVSWAGCCPRNDQSACKVKSTRISRAGCYLKPLLVQVANALIKSKKHPEFKERYHRIKSHRGHKKAIIAVCKMLLTAIWNMLSKLEPYNPDGFLEHRPINEKKILTRSQALELFRLSGYTITDD

SEQ ID NO: 97680 - protein, 344 aa, unidentified
MWYVGLDIGLKWHYVVVMDVAGHIAQQQRLPNDPLVIQQFFETLAGPAKVVLEATGNWVAVYERVEPYVQEVVLAHPLKVKAIASARIKTDKIDATTLAHLLRADLIPRAYIPPREVRDWRELARHRAFLVRLQTRVKNRLHSLLAKRGVTPPALGDLFGVTGLAWLTALELAEPYAAMRTRYLALLARLREQLRAIEQTIDQTVTTTPEARLVMTIPGIGRYLALLLLAEIGEIRRFPGPKQLVSYAGLCPSTYASGQTLRHGRLTHQGSPWLRWACIEAATHLERRRPADRLARQFQRLCQRRDAKTARVAVARELCHVVFHVLSKREPYRDPSSALMIPGR

SEQ ID NO: 97681 - protein, 360 aa, unidentified
MDVHKKTITVAIADESRQNQPRIYGTINNDLSALDKFCRKMVSTANQLHFVYEAGPCGYGIYRHLTEKGFDCMVAAPSLIPKKSGDRIKNDRRDAKMLARLHRADELTAVYVPNAQDEAMRDLSRAREDAVMVAKKAKQRLKAFLLRNRVVFTGSSQWSKAYFKWLADIAMPHPAQQVALQEYIYAVHESLNRVTRLTDQIRQIVPGWRLAPIVSALQAARGVSLVVAVTVLAELGDLSRFEKPSQLMAHLGLVPSEHSSGESIKRGAITKTGNSHARKILVEAAWAYRMQARVSRLLLKRQQGLPDQVCKIAWKAQLRLCARYRRLVAKGKTKQKVVTAIARELSAFLWAITKQVQPLA

SEQ ID NO: 97682 - protein, 346 aa, unidentified
MNHVEGTKTTNQIGLLAIDLAKGSFQVCAVGPDRTVLYNRALSRTRLAALLAEQPACVVAMEACATSHHWGRVAQGHGHEVRLVPAIYVKPFVKRQKNDRADAEAIAEAALRPKMRFAAVKDTETQGRAVAFRTHQCLVRQRTQFINSLRGHLAEFGVVAPKGPANLNLLENALADEASDLPDTVRQMGMVYLEQIARLTEVIERLADELEAASRTDTELRRLCSIPDIGPVTAGAVAAFAPDLETFDSGRNFAAWLGLVPRQRSTGGKARLGSVSKMGQTDIRRLLIVGAMSVIRWVVRKGGSPNRWLAALVARQPKMVAAVALANKMARMIWAVTTRQEFYRMA

SEQ ID NO: 97683 - protein, 353 aa, unidentified
MTDQRGTVVAGVDAHTDEHHVAVVDLQGRLLGAAAFPTTAEGYTRLIRWLRGQGEIERVGVESTGAYAAGLVRALRANRIRVVEVNQPHPHARQRLGKSDPIDAELAARAALSGTATAVPKQTSGVVEAIRQLGVARNGALKARTAALQQLDDLIITAPEQLRSELRRGRTLKARAALCLHLRPDSDRLHEPAQAAKLALRSLARRARELEREITELDQQLERLVALAAPRTVQLFAVGTQSASQLLVTAGENIERLRSEAAFARICGAAPIPASSGRTTRHRLDYGGDRQANRALHMIAVCRLRHCDRTRAYATKRTADGLNRREILRCLKRYIARETYYALRADLEALNGA

SEQ ID NO: 97684 - protein, 388 aa, unidentified
MDVLYQSCAGIDVHQATVVVCILHGPLTSTRPKREMAQFDTTTKGLKACHDFLSQFHVEAVGMESTGVYWRPVWHELCDDFELILAQPAHMKAIPGQKTDKKDAHWIAQLTRIGLLPRSFVPDETIQELRELTRQRKHYVESRNRETNRIHKILQSGGIKLTTYIEDIMGASGRNLLQLLIDETPVTPRMIHQSVYTSLKRKVPQLLEALDGYFSAHHRFMLGQSLEIYDFYQKQIDCLEERMNGYLNLYERPVEILDSIPGIDLITASVIIAEIGVDMSQFPTAGHLASWAGLCPGNNESAGKKRSTKIRHGNSYLKRCLCQAVFAAKKQKGSPLAERYYQIQSRRGPQKATIALAHQLLKIAYILLKENLTYQEFVLQKRLLETSQ

SEQ ID NO: 97685 - protein, 337 aa, unidentified
MYYTGIDLHRKTSFVTTVDQSGQIVKKVNMINDEVTVLDYFLSLDDDTKVVIESTANWYWLYDLLTEHQIPVVVSNPVKTKAIASARIKNDKLDSHMLAQLLRANFLATVHVSSQHTRQLKELLRHRSKLVRDMVRMKNRIHNIMAKNNVTVPTSDLFGKRGLDFLLHVQLPSYQRHQVDTYLTLYQQLKAHTEVLTKQVKHYALDDPMAQLLMTIPGVGPITAMFMVAEIEDISRFKSYRHLSSYAGLVPRLDASADKQRMGRITKQGSAYLRTALVEAAQAATRTKSRLNIFFRRRIVRSGYQKAIVATAHKIIQYAFYILRDQTPYRENIDAVA

SEQ ID NO: 97686 - protein, 421 aa, unidentified
MTPTSHDTFAAFIGIDWADAKHDLCLQAAGTAKRERFQLEHTPEAIDAWATTLRTRFNGQPVAVCLELDKGPLVSALRKYDFLVLFPINPLTLARYREAFTPSRAKDDPTDAELQLELLLTHRDKLQPLQPQSPTMRALAQLVEHRRRVVGDKVRITNRLTSALKNYFPQVLQWFQDKDTRIFCDFLSRWPTLKAAQLARRSTLETFFRDHHVRTADVLATRMHAIKTATPLTTDEGVIAPNALLVQTLVSQLRVTLDAIEAFDHAIAQLAQHHPDFPLFQALPGAGPVFASRLLVAFGEQRERYASAAALQKYAGIAPVTERSGKKAWVHWRLQCPKFLRQTFVEWTAESIRHSFWAQVYYQQQRDKGNTHQAAVRALAFKWIRILYRCWQERTPYDESTYLQALTRRGSSLLQNLAKVS

SEQ ID NO: 97687 - protein, 311 aa, unidentified
MIITPRCVGIDVSKHHLDIFDEGIGVSERVANAPHAITELVARWRCDALVVFEATGVYDLELRAALRAADIRFARINPARARDFARASGQLAKTDPIDARMLAAFARAMRPATEQVSTPARNALARLAKRRDQLVLMRAQEKNRRSEAGDRAMVERICRLIEVLDHEIAEIEADISALITAEPEIADDAQLMRSLPGVGPVACMQLIAQMPELGHVGPKQAAALAGLAPFNVDSGAYRGKRKIGGGRKRVRNALYMAALNAVRRADRFKAFYAKLRQAGKPAKLALMAVARKLLTILNAIMRDRKSYMPAQ

SEQ ID NO: 97688 - protein, 400 aa, unidentified
MISVGIDVSKGKSTVCLLKPYGEIVCKPFEVQHTEKDLEDLANLLQKLDGEIKIIMEATGIYHLPILTFLLEKGFFVSVINPLMMKRFSKDNSLRGAKNDRLDSVMIASYGIEKWYKLKKYEVNDRIYTELRLLGRQYYRFMQTHVKLVQELTHLLDYTAPGLKAMFNSWNEHSNRDKLSDFVERFWHFDLITSLSREEFVEQYLLWAKEKKYHQSRSKAEKVYDLASNGIPTLSSHTPSTQLMIQGAINVLRIVNNSLYHILSRMKELAKSLPEYATVRSMGGVGDSLAPRLIAEIGNVKRLRNGHSLVALAGIDPPPYESGQFVGTHRRISKRGSPILRKIGFEVMRMLKSHKEPEDNAVYNYILKKEAEGKNKKLSKIAGLNKFLRIYYVRVMEVYQ

SEQ ID NO: 97689 - protein, 345 aa, unidentified
MTIIGCDLHSRYQVVAWVNQETGEILTRRLEHEDGEAKRFYSGLPRGARVGIEATFPALWFERLLQECGHELWVGDAAKIRASETRKQKYDGRDAEHILDLLVASRFPRIWTPSPAERDLRQLLVHRMKLVRARTAVKNQLQALAMSQAVCRKHKLWTAKGRAELEGLTLLPWASQRRKALLGMLDQLDAAIQPLDQAVEKEAQSWEDAVRLMTHPGVGPVVSLAFVLTLGPVGRFPNSRKVVSYLGLNPRENSSGGRQRLGAISKQGNTMLRWLLVEGAHRAVVYDPELRRAYQRLKFRRASGVAKVAMARRLAVRLYWMLRAQVDYAQLVRMSGSPSSAVVPK

SEQ ID NO: 97690 - protein, 418 aa, unidentified
MSKPKEYAFFVGIDWADSKHDVAIATPNGTAKVTTIEHSTEAIDAFVSDLLSKAKGLPIAIILEQSKGSLIHALVLRDNVDLYPINPKQFASYRESFRTTKAKSDKNDALLLSRLLFERHKQLRVWKPEDENTRLIARLCSRRRVWVEQRTTKGQRLLDLVKSYFPVLLKLADSKLYDCPLLLEILRKWPDPRRLKRANPEVLAKVLASHGIKNQAKLEKIIACLKKAPIHSKDESLLIVSAIEAKYLSKQLKADQELIAQLDQEIQAALAKHPDAKLFTSLRGAGKALAPRLLTAFGTDRSRFKNAEEVACFVGVAPVTKQSGKSCSVERRRACNKYLLQTFHEFANAAAKWCPWSNAYYKMHREKGMKRHAILRKLAYRWIRILFRVWQTKTTFDPERYIRSLMAKSPEIKRYLPT

SEQ ID NO: 97691 - protein, 351 aa, unidentified
MIVAHHYDYVVGVDTHARTHTYAIIATKTGEILGTKAFPVTATAIDRAIAWVRSVTSGSVLFALEGTGSYGSSLGRALQRDAIAFCEIRPPKKSSRLRGKTDEIDAIAAATSAMSIELDALTRPKADGLRNALRVSLDARRDMEVRRTSARNQLNALVRTADFGLDTRRALTDRGVQQLAGLDAERTDVAERIIRAEAVRLASIVIELGHQMLRNRASLAELVELLAPGLQQIYGVGPVTAAVAVAAYSHPGRVRSEAAFAALAGVSPIPASSGNTTRHRLNRGGDRQLNRALDVIARVRMVSEARTRAYVARRTAEGRTAREIRRCVKRYISRELFEALQSRMTPITSPG

SEQ ID NO: 97692 - protein, 340 aa, unidentified
MTITTVGIDLAKNVFAVHCIDQNGKAVLVKPKVSRAALSELIAGLPPCVIGMEACSGAHYWARLFRQYGHDVRLMAPKFVSPYRMAGKTGKNDAADAQAICEAVRRPHMRFVPVKDESQQAMQCLHRTRQGFIEEKTATYNRLRGLISEFGVIAPQSTDALRHVVSDQKETLPVQVRLCIDDLLTHVTNIEEKIAEYDRVLSRVAKTDHRSQQLMELKGVGPTTASALVASIGNAHDFKNGRQLAAWLGLTPSQYSSGGKSKLGRITKAGDAYLRTLLVQGARSVMVGAENRTDPFSRWVCSLIGRRGYWRAVVAIAAKNARLCWASLHYGDDFRLYSTT

SEQ ID NO: 97693 - protein, 324 aa, unidentified
MIDGILGIDVSKNTLDASMSSCNKVRTRSFANSSDGWRHLLDWLIAQKTQRVHACLESTGRYSLGIACALYEADHVVSIVNPAQIRDFARTKLGRNKTDGVDASHIREYCELFKPQPWAPPSEAYRRLGELQTIRAGIIAGLTEWKNRKNSGMVDAVAQALADVTISHFTGQLGAVDEAIAQTIDNDSGLRWKRDLLLSISGVGETLAGVVLAELPGPDVLRSSAEVVAYAGLNPRRHQSGTSIDRVTRISKIGNAVLRAALYMPAMSAMRYNPAIVALVARLKSRGRLKPKQIVVAAMRKLLVLCFGVLKTGKPFDSAIAMGC

SEQ ID NO: 97694 - protein, 373 aa, unidentified
MDNSITHVAMDTHKKEHAVALVYPDTGEVEAFTVKNTVKDITKMVKRIQRKAPGAVRFCYEAGVCGFTLQRQIEALGSSCAVIAPSLVPVKKGDRIKTDRRDARKLLGQFLAGELTEVYPPRVEQEAAREITRCRQAAQEDLKRSRHQLLKFLTRHGYIYSDGRHWTGKHGRWLLSLQFDSPDLQEVFDWYYTQLQHGQQRLATLDKEVAALAARPEYRKIVGALRCLRGIDTLTAITLVTELFEFGRFASPRKLMAYLGLVPSEHSSGEKRRPGAITKTGNARVRRLLIESAWHYRHRPSVSKALKHRREGQPPWAVDTADRAMCRLHQRYQRLMARGKVPHKVVVAVARELAGFIWSLLREYQERQSRQAA

SEQ ID NO: 97695 - protein, 340 aa, unidentified
MTITTVGIDLAKNVFAVHCVDQNGSTVLVKPKVSRAALPELIAGLPPCVIGMEACSGAHYWARLFRQYDHEPRLMAAKFVSPYRMAGKSGKNDAADAQAICEAVRRPHMRFVPVKDESQQAMQCLHRTRQGFIEEKTAIYNRLRGLISEFGVIAPQSTDALRRIVSEQKNYLPLQVQQCVDDLLEHINRIEDKVSEYDRTLSCMAKTDHRSQRLMELKGIGPTTACALVASIGNAHDFKNGRQLAAWLGLTPSQYSSGGKSKLGRITKAGDSYLRTLLVQGARSVLIGADKRTDSFSRWVCSLIERRGYWRAVVAIAAKNARLCWASLHYGDDFRLYSAS

SEQ ID NO: 97696 - protein, 392 aa, unidentified
MYIVGIDIGKNHHEASIVSPKGKQIGRSLRFATTHKGADSLMSFIFKNIGNSPCVFGMEATGHYWYPIYSFLKAKGYTIYVINPIQSDSLRKMYIRQTKNDSIDSFLIAEVIRFGQFGTTSMADETILAMRQLCRYRDSVISSRTEIKLRIGTIMEQIFPEYEKQFSSLWVSTSMGILEKYLTPENIENAPIDELFEIIKDKSHNRLTKAKAISIKEAAADTFGIKIAQDAFSFQLKQLIDRMNFLDKQIEALDCQILEYYEKFDCYLHTIPGIGIIGAATILAEIGDISRFKNSSSLIAFAGIDPTVRQSGEFNSTHNHMSKRGSPYLRHAIFLAATTCSFHNSPLNAYYKKKRDQGKHHLTATGAVARKLTTVIYAVLRDSKPYEPKKFC

SEQ ID NO: 97697 - protein, 364 aa, unidentified
MMDYITWVGMDDSANKINAAILHGQEINPREELVIINDSTGLGRLAKKLKTIPGEVRCVYEAGVNGYHLQRFLSKHGIFCDVAAPSLTPRRTGKRVKTDKLDAKALAKLYRAGELTCIVIPQREQESLRDLVRGREDALEDQQRARHRLARFLMRRGLKYPAGKNWSLGHLKWIKSIRFEDDRDQMVLEEYCLALEEQSERLDKFQAKIEALAKEEVYKKRVSYLMALKGVQELTAMTIISEALDLRRFTDAPAFMAAIGVVPSEDSSGDVERRGSITKTGNSHIRRVMIESSWHYQHSSVPGKNLKKRREGLPTAVLEIARKCDQRLHKRFKHLANRGKDRRKVAVAVSRELAGFVWAIGQVA

SEQ ID NO: 97698 - protein, 412 aa, unidentified
MGSLLQRSLPTATLVVAIDPGKARNRVWLSTDAAGLVVEPLSVPVLRSGLDELDALVRRHSPDGGPIFAVEATGALHRAWVAELNRRFPQAVRVFAPSETAAARAQLGSRRFKTDDRDCAALTYLARQGQGRSVPADDHEALLAAVRHRRGLVAERKAAQQRLHDQVNALCPGLSAPTGQGRSLDLAGVTGQAFLQCLIDFGGRPVGARSLRARAPGRLSAANAAFWAARWKDCLPPPAHVAAGVDRLARSVRRWRNLNDDITAVETDLETLLAGTDGQILTSLPGVKAVRAASFAAFSLPVTRFPDAEHLYSATGLAPASYQSSSIDRRGRISRQGLPEHRDALMNMAWGLAQHCPPFTDREEQLRIRGMKPMQVRVALARHTCRLAYRMLTTQDAFDEQRYRRNRHQVRR

SEQ ID NO: 97699 - protein, 360 aa, unidentified
MPMKTVQRKGLNFEGQNVYIGIDVHKKSWQVAIQTETGYEESFRMSGNHVEELRKHLTTNFPQANYHSVYESGFSGFSTHRELTSAGINNIIVNAADVPTMQKEQVTKTDVIDARKLVRALRKKSIEGIYVMTKQEESFRELERHRDSLTEDIGRLKSRIKHLLHRNGIRFEEKFGGSGHWTKAFVKWMKEEIELPQMTKRALDDELDLYLILRKKKLEISLEIRHLMKDEFASEYELLTSVPGIGLITAATLLAEIGNFDRFRNEKTLASYAGLSPTCHSSGEKETKGEITFRCNRRLRQCLIESSWVAIRTDSALSSSFLELRKRMPACNAIIRIARKLLNRVLYVMKNGAIYEKGIN

SEQ ID NO: 97700 - protein, 358 aa, unidentified
MNSVGIDIHKTRCNACVKTSEGRILEEFTFQNNTQGLEELVTHLNVHQETQVAIESTGNLWTRIYDRLEQQQIRVVLTNPKKTRALTENKVKTDRIDARLLADLLRGNLLSASYVPPREIRTQRSIIRERARLVQTRTILKNRIHTLLDKYDLHPSFTDLFGKHGLEWLRGLQLQPGDQVILDVNLEQLSSLTRSIDALTANIALSAVDNPEVKLLMGFTGIDYYGAMLLLNEIGPVARFPSAKKLVGYAGLAPSTHQSGPVTIHGHITKEGNSHIRWILIEAAQNASRHDPRFKHFYLRIAKRRGHQIALVAVARKMLVTIYHVLNHHSEYRGLRPELFENKIRRLQRITRSDLQTK

SEQ ID NO: 97701 - protein, 400 aa, unidentified
MESLLVVIDVGCRRHRVAIGMPDGTLIDQFDLDHQPASFNKFFLRVEKQATKFGFPVSVGMEGYGGWARPLDEMVLGKGWKLLNVNNLKLARFKEIFPSPAKTDAIDARKVVELMRLRPLLPQAKDILNEVIPSPQVNHDMKLLTRRRRQLVNERMMVTNRLHSDLQAIAPGLLEITGNVDNLWFLHLLTAKDSFDQLSRMHQSSIMKIKGVGKKYAKLIRDWQKTALLPSDVLIVGDMVIEDAGRVLALTEKIKHIEARLKDLIPQSPLATSIESITGFGLVCASELAGEIGTMERFSAESALARYIGMAPLDNSSGVYTGTKGGKQVNRRAKAAMMTAVARHYWHTPQSKEYYEKKRIEGKRHNQAVRSLGRHITRVIWSLVKKNRLYEHKEETPQIA

SEQ ID NO: 97702 - protein, 413 aa, unidentified
MIVGIDIGSEKHYFRAFNWRGIELTRKPVAFSNSMEGFNSFYNTIVELIQKSELEEALVGIEPTGHYWFDLGQFMGEKNIKFVMVNPHHVHKSKELDDNSPSKNDRKDPRVIAGLVRDGRYFYSYMPTGVYAELRNASNRRFVLVEEQTRAKNRLQKWIAVYFPEYKGIYTRIDAKGGLLVLKQAPTPEEIVRLGVEGIIKIWKDAKLRGNGHKKAMVILNAAMKSIGLKAGLTEARMEIQDLIEDYELQAKRLERVNDLIKELCQQIRYADKLLEIKGIGITTIAGFIAEVGDITRFDSAKELQKLAGLELVADSSGKHNGKTKISKRGRKRLRYLLFEAAISVVGKNEEFKEIHRYYTTREKNPLKKMQSLIAVACKLIRVFHVILTKGIGYDASKMLKDIRHPGEQLKAA

SEQ ID NO: 97703 - protein, 343 aa, unidentified
MGSSIGVDSHKCSLAAAAVDELGRVIGVREFPNDPQGHLALLAWARDHETPRAIGVEGSGNYGAALCRALSSAGEQVLEVPATLTFRERRRKGSQGKSDPVDAVAIARVVARDEALPSPRRAQALADLKLLSDYRDQLLCARTQLANRVHRDLVVLRPGYQRMVPNLVGAKHLSRAASLVKGDSSVRAELVRRRIAELRRVSNEIAETKARLREALAGSGTTLTEVPGIGPLIAAKILGEVGDVDRIRSQAAFAMMAGTAPLVASSGMSSRHRLNRGGNRKLNFALHYMALVRYRSDEETRGYIERRRAEGKTFKEAMRCLKRHLCNVVYRQMISDWRAMQSV

SEQ ID NO: 97704 - protein, 487 aa, unidentified
MWHIPMTQNFHPQPLAPARKADYAHCARFRSPYAAQDKPFASGFKNLHRNGGDIMLKINYMSTLFVGIDVSSKTNSVYAMDFEENKYLSTSFGNNQPGADELVNRIVACMQKHKHLDTLLIVLESTSVYSVHISNFLASSEVLMPYKPYVFCVNPKATANYRKSYIGMEKTDPTDAYLIADFGRVGRTKKLEPWRGGLFIALKRLTRHRMHLSECITREKTYMVSNLYLKFSELQLLEGDDKPFGNLYGATSSAILTEFLSPQEIINMPEEDLLAFLAQKSRNRISDLSKTSELLRKAARDSYRLDKCMYEPLSISLASSFNCIQAYQKEIRLIEQAIDKCIKGMNTNALLILQSIPGIGPVWASGILSEIGDITAFHSSDALAKYAGLYWPKGDSGDFISEDNQMSKAGNPYLRYYLGEAANSVRKHIPEYADFYARKYAEVCKHQHKRALALTSRKLVRLVFGLLAKNQLYTGEKLDTEYNTWSN

SEQ ID NO: 97705 - protein, 334 aa, unidentified
MKKRYFMGIDVAKATFDFCLLSSTESCLWRGQFSNDAHGIARFLAQLPAPRRKPAQIHFALEATGVYGKALVAALHQAGLAVSVLNPAQVKYFAFSVLRRTKNDTVDAEIIARFCRERKPLATRPLRPIEEQLKVLVHERESRVGEQTRERNRAKKDPFQIALPTLISRQRRQRLKQLDKEIAQLDAAIDSLIASDESLSNQSQLLCSIPGIAAVTAAKLLSELAGKEFQSARQLAAYAGLTPAEFRSGYFLYGKTHLSKIGNAFLRKALYLPAAVARRWCKPLKPWIAILESRKLHHLAIRGAIMRKLLHIAFGVLKHQKPFNPLLVFIPKTL

SEQ ID NO: 97706 - protein, 323 aa, unidentified
MGVVEMKAVGLDIHRDFCEVAFMERGELRSAGRVETSPEALEEFAATLGSEDWVALEVSGNAGEIARILERHVARVVVVSPSDTGIRQARAKTDRLDARTLARLLAAGSLDAVWMADERTRVMRRRLQRRSQPIAARTRSKNEIHAVLMRRLIPRPKVSDLFGQAGRRFLTELELPVEERESVDGSLRQVEFLDREIGEVDRLIALDALTSVEIKRLMSVPGVNLVCAATFLAAIGDIGRFKDPRKLVGYLGLDPRIRQSGPGPGTSGHISKQGSASARWALVEACWSAVRQPGPIRAFYERVRARRGHQIAIVEPGRVSRRP

SEQ ID NO: 97707 - protein, 331 aa, unidentified
MKINETIGIDVSKLTIDVCIHSNKSFHVFKNSNEGFKKMVKWVLKKSLFLSSETLYVFEHTGMYSVQLSIFFTNNKIPFTIVPGLEIKRSLGITRGKDDKIDAFKIALYGYRLRDEIKPSTIPTNQIMELKRLFKLRQRLVKQRAGFKSSLKEQKRIFTKKENQCLFDTQEKMIRYLSKQITILDQKMNEIIESNDSLRQIYNLLLTIKSVGKQTALIMIIYTNAFTKFKNARKFASYCGIAPFPNKSGTSLMGRTKISNLANKNIKSILDMSAKSAIQHNTEMKNYYNNRIEKGKNKRSTINIIRNKIVARIFAVVQRKTPYVDFFKYAA

SEQ ID NO: 97708 - protein, 343 aa, unidentified
MYVGLDVHKKYCYYAMVDGRGTVVKKDRFRTTVEELEEFASALPQGDQVAIEASASGCFVYEQLDEQGIAVHLAHPTMVRPFAKKHVKTDKVDAIVLAQLLRMDYLPESYVPDEAMRDLRTLVRHRAGLVRIRTSLKNRVHALLTMEGVQPPAVSDLFGKKGREFLETVKIRESRRLALDNYLKVLDELNERITEVEQFLEEKAESIEEVAWLRTIPGIGLHNALLILSELGEVSRFSRPQGLVCYAGLAPKVAQSGDQVRYGHINRQSNGFLRWAFVQSAWSAVLSSTPNRFQRIYQKVKARRGAKIAIVATARHLAESVYWVLTKQEAYKEPKAQRASSSP

SEQ ID NO: 97709 - protein, 427 aa, unidentified
MYVAIPPDRDAEPVRVFQTFTADLEALADWLIERGITTVAMESTGVYWIPLYQILEDRGLRPCLVDARHMRNVPGRRTDWHECQWLQYLHTSGLLRPAFRPQQDVCAVRTLVRHRHEMVQMACQHIQHMQKALTQMNFQVQHVIDDMTGVTGTAILDAILAGERDPGKLAKLRHGRIKADTDTLRKSLEGDWRTEHLFTLRQSREMYDSYRKQIEACDQELIKYLGDFEAKVDVVQKPLPKRSGPSRKRRTKRTGDYRFDARQQAYRLYGVDVTRIPGIDGMALSLFSELGSNLTTKFPNSGEFSSWLGLCPDNDKTGGKVVWRGVRKIKNRAGQMFRQAASALHRSRSPLGDLLRRMKAKLGPEAGITATAHKIAIIFYTLVTKQVEYDDSAWAERDRQRQQRFAQKLKRQARYLGYQLVPIEASA

SEQ ID NO: 97710 - protein, 343 aa, unidentified
MEQYAGIDVSLESASVCVVDSTGRIMREAKVVCEPEALIAWFTKLGVSMARIGLEAGPLSQWLYARMREAGLSVELLETRHVRDAFKAMPVKTDRTDARGIAQLMRLGWFRPVHCKSLPAQELRAILTARKLVQNKRHDLEMSLRGILRGFGLKVGQTTPRNFEARVRELADGQPTLLVVADAILLARAVLVEQLGKLQKRLVSLARQDTRARLLMSTPGVGVLVALTYVAAIDDPARFRSSKAVGAHFGLTPKKYQSGETDVTGRISKIGDASVRTALYEAANVILTRPVRGSLLKSWAMRVAKRTGMRKAKVALARKLAVILHRMLANGSAFVAGKAAAKA

SEQ ID NO: 97711 - protein, 342 aa, unidentified
MQITTIGLDIAKNVYQVHGIDAAEKVVVRKQLRRSQVLGFFKALPPCLIGLEACATAHYWARELTKLGHQVRLMPAKDVKAYVKRNKNDAADAEAICEAVRRPTMRFVQIKSAEQQGRLMLHRTRDLLMRQRTQVINALRAHLAELGTTSAQGREGLKELLKIVASDGDERLPADARASLVVLAAELQAMQTLIGSIEKRIVTQHRENKASKRLLTIPGIGIIGATAIADTVTDPKAFRSGRDFAAWIGLVPRQDSTGGKQKLGPISKQGDRYLRRILVVGAHSVLRRAKLNPQKHPWLTQLLARRPFKVVAVALANKMARMAWALLAKGGAYRAPALAATA

SEQ ID NO: 97712 - protein, 454 aa, unidentified
MEEPQEVQADGEHERVWERVAAVDVAKASGVACTRVPDEDRPGRRKTHVWTVTATVPAVTELADHLRARQIQVVTLESTSDYWRIWWVVLEAAGLKVQLVNARAVKNVPGRAKTDKKDAVWLAKLTERGLLQPSFVPPPGIRRLREFTRLRAELVHERTRYWARLEKLLERALIKISAVASTLDTDSCRAMIEALIAGQRDPRAIAELAIGKMRPKRAALAEALDGDFQPHHGELSRILLDQIDALTARINQLSDRVTELIAQIPAAWGVDADGVTGPGAGTGPDAVIVPAVARLDEITGCGVIAAQAVIAEIGLDMTVFGTPGRLVSWAKRCPQTRQSGKKTTAGKAGKGNPWLNGILGEIAASASRTHTFLGERYRRIARRRGKRKALAAIARSILVIIFHLLADPAARFRDLGPGYYDTYIDKQRKTRNLIRQLEALGHTVTLAPAQAAAA

SEQ ID NO: 97713 - protein, 353 aa, unidentified
MKRDKYIGMDVHQATTVVAVLDGNGKVIWETIIPTQAGPIIELLESLSGPVHVTFEETTQAEWLYEVVRGHVAEVVVCDPRRNKLLSEGSKADKVDARRLAELLRVGMLRSVYHGNEGARKLKQLAKGYQTLLSDMQRTMARIKAMYRSRGVATPGRGVYQAKQREQWLALLTDPGVRQRTDWLYEQLDQLGPLRRQAKLAMLAEGRKHRAVGLLRTIPQLGPIRSALIVAILDTPHRFRTRRQLWSYSGLAVVTHMSSEYEIKEGRLMRSRKPIATRGLNRNCNRVLKDVFIGAATGGGQREPYRGYLQGLQDRGMRKEMARLTLARKISSIALTVWKKGEAFDPKKLNLAT

SEQ ID NO: 97714 - protein, 391 aa, unidentified
MILVGIDIAKDKHDCFIRTLDGEVLWKPFTITNTISGFDLLYERICATGEDFDNIKVGLEATGHYSYNILGYLLDKGLPTFVINPLHTNLYRKSLSLRKTKTDKVDCTIIAGMLMSDVDLKPYSRALYHSTELKSLTRYRFDKIQQRAKLKISITRLVTILFPELPSLVSKIHIPSIYALLSEYPSAEAIATAHLTKLTGLLEKSSKGKFSKATAILFRDTARTSIGASMPAKSLELKHTIKLIGTICAEIEEIECEINRIMATINSPITTKPGIGRMTGAQILAEIGDFQNFSSPDKILAFAGLSPSTYQSGQLYSSYAKMEKRGSPYLRYALFTATTLVCNWDPTFSAYLAKKRAEGKHYFVAVSHAAKKLVRVIYQLEKTRQPYIKSA

SEQ ID NO: 97715 - protein, 432 aa, unidentified
MSLVQPTQPAAVLVAIDIAKLRHDVLIEAPGWKNRKRLILPNTAAEFRLFADYLHGLKHPVRVVFEATGNYHRPLAHFLQSEDFHLELIASLAVARTREAMHNSWDKNDPKDAQVLLHLLKTGVTRHYHDPLANQIHDFQELSLTYAQISLEKTRTQHRLLTHYLPLYFPEIERYYHASRSEWLLTFLQVFPTPALIAGLSMEDFVQQAWTVVGRKVSKQRLLEDIYRTAKSSIGIPVELDSEAVAMFRVVLGEMIRLCQLRDQLEQRDACHLKDNADFQRLQQIPGIGPILALTVPSWRSRSWPKPATCAASTTIVSSSSSVASISRLSSRDSSGGTTKLSKYGNARLRCAFWMAATVAIRLRENSFRDKFERYLRRDPTSADRKRMAYVAVAAKMARVAHGIIKTGTDFRCFYEAAAPSGRAASPGPSRP

SEQ ID NO: 97716 - protein, 355 aa, unidentified
MRILSLDLSKYKTVGCDYEVETGRHEFATVLTTPKGLHDLIVDREPDRVVIEICSIAGWVCDLVRSLGIEMQVASTNDERWQWRKVKTKNDRRDGLKLAQLSARNELDLVHVPRREMRQWRALIAYRQHLVQRRTKIKNHIRELLLREGQLLPRHRSAWTQDALAALEAMVKPLREVSMDELWRGELEVELAQFKAVQAQLTEVVAKLDALGAANHNVRLLQTASGVGPRLAEAVVTMFDDPRRFRRGAAVSAYIGMVPKQWDSGETERLGKITRHGNRLVRSLLVEVAWCALRHNPWARETYQRISGGKKSRKKIAIVAVGRKLLVRCWAMLRDQTPWHWEGQSAVLTPRAPTA

SEQ ID NO: 97717 - protein, 346 aa, unidentified
MIVIGCDYHPSWQQICWVDTATGETQEKKLEHASGEAERFYRGLPGPALIGMESTGNCQWFVEMATTAGHDVWIGDAAKIRACDVRQQKHDRRDAALILRLLLEGRFPRIWTPSGQEKDLRQLLIHRYKLVRIRAQVKNELQHLAMNQGITKRRKLWSKAGEKVLRELPLKPWASRRREDLFKVRGMLDEQVGLLDQAVVEAAEKNEKARLLMTQPGVGPITSMAFVLTMGDVNRFQRGKQVASYLGLIPREYSSGGHRRYGSISKQGNRFMRMLLVEAAQCAVRCDPQMRSEYLHRCHRKPKGVAKVAAARKLAIRLYWMLRSNTRYPEVVHVESSSRVPLVGAS

SEQ ID NO: 97718 - protein, 391 aa, unidentified
MIFAGIDVSKDKHDCFITNSDGQVLFKAFTIPNNREGFDDLYQKITSVTDDLTNVKVGLEATGHYSYNILGFFLDKGLTTFVINPLHTSLFRKSLSLRKTKTDKVDAHTIATMLMSDVNLKSYSNSSYHNEELKSLTRYRFDKVKERAKLKTSVSRLVSILFPELEKLVPTLHMASVSTLLSEFPGALQIASAHLTRLTNLLYKASKGRYGRDTAILFKETARISVGSNMPAKSLELKHTLKLIGELNSEIDEIEQEIKRIMDDIHSPILTIPGISYRMGSMILAEIGDFSRFDSPDKILAYAGLSPTTYQSGQLESSYSHMEKRGSRYLRYALFNATKFVCNWDPVFASYLAKKRAEGKHYNVAVSHAAKKLVRVIYHLEKSGQAYGKAS

SEQ ID NO: 97719 - protein, 341 aa, unidentified
MSKPNTYIGVDLHKKTCYVTVMNAGGKIRIQREFSTEADRVAKFFKRYPGIPVAVESTMNWIPFYENLESLGCKVLLSNPLQTKAIAHARIKNDKVDSRVLADLLRTNLLPTAHIQPRKIRDLKELVRERSGFAQMRTKIKNKIHSVLFKTNSRHEFTDLYGKAGMKWLAELELCDIYKQQLNRHIETLKHLNEQIDKISDIIESTAKLDFDCKLLMTIPGISYYSALMIKSEIGDISRFKSTAKLCSYAGLIPSTYASADKIRTGRITKRGSKWLRRTLIDAVTSGSRNPNRIGAFYKKLKKSKGTGKAKVAAGRKLCSVIFAMLTDQAPFQNFAPVKQR

SEQ ID NO: 97720 - protein, 392 aa, unidentified
MVVSVGVDVSKDKHDCFILSSEGEVLADVFTIPNNLDGFRFLLQRIRDCTHAQDKIKVGLEATGHYSYNLLGFLLDNGLTTYVLNPLRTNLYRKSLSLRKTKTDRVDARTIASMLLSDVGLKPYTDTAYHNEELKSLTRYRFDKVKERAKLKSSIARLVCILFPELEKLVPTLHMVSVYALLEEFPGAKQIAAAHLTRLKALLETTSKGRYKRDMALEIRGAARNSIGFPMPAKSLELQHTIRHIRELDNEIAEIEEQIQAIMDELNSPITTIPGLGFRMAAMILAEVGDFTRFDSPDKLLAYAGMSPSTYQSGQLKNCYPHMEKRGSRYLRYAIYNATKYVCHWEPTFAAYLAKKRAEGKHYNVALSHAAKKLVRLIFAMEKSRQPYCLVA

SEQ ID NO: 97721 - protein, 345 aa, unidentified
MKHFAGLDVSLEETAICVVDETGTMVREARVSSEPEALVAFFRGLGLVVERIGLEACSLSAWLHESLVAASLPAVCIETRRAKAAMGAMPNKTDRNDARGLAQIIRTGWYRAVHVKSPTCRSWRALLTARRLVLNKMRDLENGLRALLREAGLKLGTPARKEFAARLRELTAADPVLSIMTEPLLTIIAAMTRELAQLTKRVLDIVRDEPVCRRLMGVPGVGPLTALTFRATIDRPERFRRSRDVGAHLGLTPKRYQSGETDVQGGISRCGDELARTALYEAAHSLLIRSRKWSTLRAWGMQVAKRRGMARARIAVARKLAAILHRMWADGTEFRWGEADAAVAT

SEQ ID NO: 97722 - protein, 425 aa, unidentified
MNTVQHDEATQPAFAALVGLDWSDEKHDICLLAEGASKPETSVIAGTPEAIQDWIQLLQKRFGNRPVAICLEQSRGPLIYALMNYAFITLYAINPVQSAKYREAFAPSGAKDDPVDAGLLLDLLRRHRAQLTPWKPDDVQTRTIRGLSEERRHAVDMRTKCIQKLTARLKMYFPQALDWFADDLASPMACDFLLHWSTVAEVKKAKSATLRAFFHGHNCRSEALIAQRLDAIAKAVPLTEDPGIVTPAILTVQTLARVIRDLSSAITKFDQQLAGVFASHPDAPIFNSFPGAGNVMAPRLSAAFGSDRQRWPNAGAIQSFSGIAPVTERSGKSTWIHRRWKCPKFYLQTFFEYAQYSIPYSVWAGAFYRQEIAKGKRRNAVIRALAFKWMRIQMACWQQRVPYDESRYLQSLIQRGAPLAKLIQT

SEQ ID NO: 97723 - protein, 319 aa, unidentified
MEIAPIFIGIDVSKARLDVAMRPSAEKLSVSNDEAGIQALVKRLSELKPVLIVLEATGGLERSVSGTLGSAQLPVVVVNPRQVRDFAKALGQLAKTDRIDAEVLAHFAEVIRPPLRPLPDKVSLELRALIARRRQLIEMMVAEKNRLSAASKAVRKRIEAHIRWLETELDRADKDLDQSIRQSPIWQEHQDLLRSVPGIGPVVSRTLLAELPELGRLNRKQIAALVGIAPLNCDSGTFRGRRGIWGGRATVRAVLYMAALVASRRNSVIRNFYKRLRDKGKAPKVALVACMHKLLTILNAMIKHKTRWSEIIPQTSLDF

SEQ ID NO: 97724 - protein, 409 aa, unidentified
MLFVGDDWAEDHHDVEIVDETGRTLARRRFPEGLEGITRLHALIGEHLPEPSGPGESVPEVVVGIETERGPWAAALVAAGYRVFAINPMSSARYRERHSTSGAKSDAGDAHILAEIVRLDRAHHRQVAGDSALAEAVKLAARTHQSLVWDRTRQILRLRSALREFFPAALKAFDELDAPDSLQLLRLAPDPDTAARLTRRQLVAALAKAQRRAPEAGADRIQAILRAAELRQAPPVQAAFAAIVTAQVAVISTLNEQIDALGEVVAEHFGRHRDAELYTSLPGLGVILAARVLGEFGDDPTRYVDAKARKAYAGTAPITRASGTKKVVLARYARNKRLGDALQQWAFCSMRGSAGGKAYYKSLRARNIGHQAALRQLANRWVGILHGCLKTGHPYDETLAWNHQTEAAA

SEQ ID NO: 97725 - protein, 385 aa, unidentified
MQTPNDLSQSRIVLKQDSTLIAVIEMSLSSWLVAGMVPSVERQPLKKLPIDENALLKLLHRWREEAEKAGRKIERIAVAFEAGRDGFWLARWLRARGIEAHVIHASSVAVSREHRRAKTDRLDTELLKRAFLGWLRGERDHCKMVAIPTIEDEDAKRPNREREGLVGEQTRIINRMKAALSRLGIRGFNPKMKKAAQRLEDLRTPADEPIPPNTLAELRRDMERRRLISEQIRQIENARLELIEHAPRHGPHAMVRVLARVIGVGIETADMLVQEALSRNMRDRRAVARYAGLTGSPDESGTRRREKGLARSGNARVRRGMIQLAWRFLMFQKDSALARWFRARTENARGARKTMIVALARKLLIALWRLVREGVVPDGVVLRPV

SEQ ID NO: 97726 - protein, 458 aa, unidentified
MRKRKAYAVTRSLDGLPQLTPDAAGLDMGAEEIWGWVPAGRDPQPVRAFGTFTPDLHALAQWLTQCGVKTVARESTGVYWIPLYEVLEARGFEVSLITARHLQHVPGRKSDGQDCQWMQRLHSYGLLTASCRPAEDLRIVRAYLRQRAMRLEYRAAHIQHLQKALQQMNGQLTQVVSDITGTTGLQIIRAMVAGARDPQGLAQLRHGRCHASVAEIAKALSGQYGAEHVFALQQALALYDCYPQHVQECDAYIEQHYAAIKPVYAEDTSPPPLGPEPKPKAHAKNAPSFDVRACLYRILGVDLTAVNGLEARTAQTILSEIGTDMSKWPSEKHCASWLGLAPHNDISGGKVLRSKPLKVRNRAAQALRLAAQTLGRTDTALGGYYRRLRARQGPKQALTATAHKLARIVYHLLKHREPYQPLSRETYEHQLRHRELGRLKRKAAQLGFTLLPQATACA

SEQ ID NO: 97727 - protein, 342 aa, unidentified
MEITTVGIDLAKSIFQVHAVDAAGHVVVRKALRRAQVTPFFAKLPRCLIGMEACGTAHHWARELIKLGHDVRLMPPAYVKPYVKRGKTDANDAAAICEAVTRPSMRFVPVKATEQQAALALHRTRDLLVKQRTQLVNMIRGLLAEFGIEMARGLRHALELAARLSAGDAAEVPPLAQRVVTGLADQIGALQIQLTRLEKELLTWHRDSDLSQRLATIPGVGIVSATALAASVSEPERFRSGRQFAASLGLTPLQNCSGGKERLGRISRMGDRYLRRLLVVGMTSLIRRAKTTPTSVDPRLPALLQRKPVRVVTVAAANRTARVAWAIMTRGGTYRAPAATAA

SEQ ID NO: 97728 - protein, 429 aa, unidentified
MEEIDDTDLVVERVAALDLGKAGLDACVRVPHTHHPGRRMQELRSYGTTTAQLLELAAWLRHWHVQRVVMESTSTYWKGVYYLLEAEGFDCWLVNAREVKNVPGRAKTDRADAVWLAKVAERGMCRPSLVHPPDIRRLRDLTRYRRALVQDRTRERQRVEKLLEDAQIKISSVLSDLHGVTGRAMMDALINGQRDPHTLARLAKGSARKKTARLEEALRGFFTDHHAMILQMMLANSDRLSSQIAELDGRIEEAVSPFCAQSARLADIPGVDVMAAAELIAEVGVDMTRFPSAAHLVSWAKFCPQTHQSAGKSKSQGRGKGNPWLAGTLGRVVFANSRSETFLGARYRRLARRRGKQKAIVATGNSLLTVVYHLLLNSDARFCDLGPGYYESRINKHRRARDLATQLQALTGQHIVIRDGKAVITDTAA

SEQ ID NO: 97729 - protein, 370 aa, unidentified
MTSIIYVGMDVHTTNYTLCCYSFENDQIFAMTQMSPDYRNILNYLDRIRKNYDDCHFLCGYEAGCLGYSLWHNLMNNNVECVILAPSTMPETKKKKKIKTDKRDAANIAKCLAFNTYSAVNIPTPTDNAVKEYIRMRDDAKDTLKRYKQRLLSFCTRHGKHFTEGRSYWTQKHMTWLKALDFGNPVLQEAFEEYLVLYNQASDKVDLYDKRIEELAQREEYAEKVKKLSCLVGIKTHTALAIIVETGDFSRFLKAENYASFLGLVPGEDSSGDSVQRTGITKAGNSHIRKLLVESAQSYGRGAVGKKSKTLRARQADNEPKVIAYADKANERLKRKFYRINFKSKRNIAVVAVARELACFVWGMMTDNVA

SEQ ID NO: 97730 - protein, 409 aa, unidentified
MRVVGLDIHRVFAEAVMVENGTVRRLGRIAMTRDHLGAFAKTLTREDHVVVEATGNATAVMEVIRPHVGRVIIANPRQVRLIAEARIKTDVIDATVLARLYAGGFLPEVWIPDEATLSLRRQVTRRTQIVRQRVRLKTMVQSILHAHLVPPCPHADLFGPRGRAWLLAQRLPADEGDAVTRHLREYDRLSEDLKVVERELAREARANKNVMRLMTIPGIDMVVSVGLLAAIGPVARFPSPDRLVAYLGLNPTVHQSGSGKPRHGRITKQGRTHARTMLVEAAWQAVRGPGPLRAFFRRISARRGPHVAAVAVARKLTVIIWHLLTRNEDYAWVRPALHAKKLRDLELRSGEPARRGQRGAAYAYNLTRTRQEERRRIEQAEIAYRRLTEGWSRRGRRRVPTGAAKEERL

SEQ ID NO: 97731 - protein, 313 aa, unidentified
MMIIGADYHPGFQQIAYVDTETGELQERRLEHPEEAEKFYRELATQGKKVRVGMEASGHARWFERLLAELNFELWIGDAAEIRTKRVRKPKTDRQDAQLILKLMLEDRFPRIWVPSWENRDLRQLLWHRHRMVQARTRIMNQLQAVALNEGLRAKKRLWREAGREQLAALRLAPWARRRRQELLELLDQLNPIIGELTKAVEEEAEKCPEAQRLMTHPGVGPLTALAFVLVIGMAERFGCGKQIASYLGLPEEDSSGERRRLGHISKQGNSLLRFLLVEAAQVTVRSNQEWRSKFFHLAMRRGRKIAKVAHGP

SEQ ID NO: 97732 - protein, 332 aa, unidentified
MDLAKNVFELYGVDESGQRVLSKTVRRGQLLATFAQLPPCLVGMEACGSAHYWAREFRKLGHEPRLMAPQFVAPYRKIDKNDRNDAAAICEAVGRPNMRFVPIKEVEQQAVLTLPRARALLVSERTALVNHIRGLLSEYGLVIAQGVAKVRAALPQILEDGDNALPALAREVFADLQERLRGCDERIGEYDRRISALARSSEPAQRLMRVEGVGPLTATALLATAGDGRQFRNARQFAAWLGLVARQRSSGGKARHGRITKRGDVYLRTLLIHGARALMRHLDGRQDRTSQWVLALKARRGFNKAAVALAAKHARILWALLTRGTTYQVAGA

SEQ ID NO: 97733 - protein, 461 aa, unidentified
MTFSPCRSHGLGGGVTGSGGIDRPLIRGMTTGFFRGREALRNVDVAIGAVPGPGEYDPRLHVIDTSDIGAFLGLDVGKGEHHATAVTPTGKKAFDKRLPNSEPKLREVFGKLKAKHGTVLVVVDQPASIGALPIAVARDMGCSVAYLPGLTMRRIADLYPGEAKTDARDAFVIADAARSVPHTLRSIELEEETIAELEMIVGFDDDLAGEATRISNRLRGLLTQIHPHLERVVGPRIQHPAVLKLLDRFGSPARIRKAGRRRLIDLIRPKAPRMAERLIDDIFTVLDGQSVVVPGTDAAALIVPSLANSLQAVLDQRKLLAVRIEELLENHPLSKVLTSMPGIGVRTGARILIDVGDGTAFPSAAHLAAYAGLAPATRSSGSPIRGEQPSRRGNKQLKRAFFLSAFAALADPVSRACYDKKTAQGKHHTQALLCLARRRADVLFAMLRDGTFYDPQPSPTG

SEQ ID NO: 97734 - protein, 413 aa, unidentified
MEVIHTRCAGIDISKRDAKVCVRVQGSGSRATASAVTTWGAMTRQILALKEHLLAEHVNLVVMEATGDYWRPFYYVFEAELQVILVNAHDAKNVPGRKTDVSDAQWLADLGAHGLVRASFVPPPPIRELRDLSRTRTIITRERTKEIQRLEKLLEDAGIKLSSVASDITGVSGRLMLQALIEGQNDPAALADLAKRRMRSKIPELTEALTGRFGAHHRFMTGLYLKRIDAHSADITQIDERIEEAMEPFRGARELLISIPGFSTYVAEVFIAETGADMSVFATAGHLASWAGIAPGSNESAGRVKSTKTRPGNRYLKGALGIAALSVIRSKNTYFSAKYKRIASRRGPSKALVAIEHSMAIAAWHMLTTGELYRDPGADYFTQRTPTKTKARAISQLESLGYHVTVEPLTEAG

SEQ ID NO: 97735 - protein, 354 aa, unidentified
MKRTTKYVALDVHQATTSASVREESGRVIARSVLPTDGAAITEFVRGMRGAVHVALEEGTQAQWLHDLLAPLVDRVVVCDRRGAPRQGNKADQVDADQLSEQLRRGGLRAVYHGSVDRTTLKELTRTYRNLVEDATRVMLRLKALFRARGIPTSGKRVYHPRARAQWLAQLQNPGARLRAEALYAELDVLRTLRPRAKAAMVTEARRDPAWPVLRTIPFFGSVRVALLLATMQTPWRFRTKRNLWAYAGLAVVTRSSADYALVAGQAVRRRRPPLTRGLNRNHNRVLKDVFKGAATAATARPGPLQDFYHSVIARGTREELARLTLTRKLAALTLRLWKKGERYDPTKLTTPAR

SEQ ID NO: 97736 - protein, 355 aa, unidentified
MTSAKYIGMDVHKESISIAVLNSVGKVVMECVIETKASVILQFLNGLSGDLHVTFEEGTAAAWLYDLLKPHVTRLVVCNPRRNALLKVGNKSDRIDAQKLAELLRGNQLQPVYHGEHGLRTLKELVRSYLTVSKDLARVMTRVKALYRSWGIPCSGTQVYSRLYRVTWISKLTEPGVRLRAAFYFQQLDALRTLRQEVRRELLAESKKHKVWKRLCGIPSIGPIRAAVALGILQTPHRFRTKRQLWSISGFAIETRSSADHRHVHGRLQKVKKRVSIRGLNQNHNHDLKNLFKGAAVVASTKPGPFQEFYEALLAKGMRPEMARLTLARKIATIVLIVWKRGVNFDAQYLKPQTV

SEQ ID NO: 97737 - protein, 350 aa, unidentified
MAIVGGFDVHRKQITFDYVDNDGLVQWGQIRPATRKTLRSWLAKHCPEGAGEFALEGCTGWRYVSEELTAAGVGVHLGDPAEIAALRGPKKRAKTDRADARLLRTLLVEGRFPESWIPPAHVAEIRALGRLYCALMEERRGWQQRIHAQLFHQGCPPVKALLSEPGREVLVAAELSAAGRQYVDTALRRIDELTAEIDPLRMQLVRFARRQAGCRVLQRHYGVGWLCAAIIWAEVGDPRRFSSSDQLVRFAGLDVTVYSSDGKRAPGHLSRQGSPELRWAAFEAAKCAARRGSPDYAYYHNLAAKHEGRNGKNPTLAVERKILRRCYHTLRELGDAVLAMPIADAEEVAA

SEQ ID NO: 97738 - protein, 373 aa, unidentified
MPDVSSNQPADVRLWVSLDVHKLSIVAATLPPTGGQPEVQRIETTRVAIRRFIERLGSPEGLAVCYEAGPGGFDLLRVLTELGVACDVIAPSLIPIRAGDRVKTDRRDAKKLVRLYRAGELVYVQPPTPATEGLRDLMRCRDDLRRARTAARHRVSKQLLRHGRIYRDGKSQWTKMHRGWVARQRLDDEFAQAALEQMLIHLDGLDRQLDALDRDLEQIARTGRWAETVQILTRFRGIATRTALGLISEIGDFHRFGHPRELCAWLGIVPTEYSSGDQRHRGHITKTGNHHARRLLIEAAWSYQHRPRRPDRGPEPDARAWQAQIRLHRRYRHLTTERGKRSTVATVAVARELAGFLWAAATNQPFALEAAAA

SEQ ID NO: 97739 - protein, 437 aa, unidentified
MSKSINEINSKAAGIDIGSESHFVAIPSGEVREFSAFTSSLKKIVKWLKESKVETVAMESTGVYWIPLFEILAAEGFDVNLVDARQAKNLPGRKSDVMDCQWIQQLHSFGLLTKAFRPKDEVCSIRSLVRQKSNLVKDSASKILQMQKALDQMNIKLHKVVRYITGVTGMKIIRAILDGERDVYKLAQMKNKGIRSDETTIASALEGNYREEHLFALKQSLDIYDYIQDKIAECDLKIQEKLGSMVLIEEEQKEEKHLGPGRKKKPRVIHEQLQKFTGVDLTKIPGISDETALLIVSEIGNVDQFKSGKHFASWLGLCPGCKISGGRVLSSHSRNVRNRLSTAFRMSANALYRSKSGLGHYLRRMKAKHGSPKAITATAHKLSRIVYVMLKNQIEFIDYDENKYQQNLKKIKEKQLVKLANELGIALPVYDNCAMTS

SEQ ID NO: 97740 - protein, 369 aa, unidentified
MANSSKERTTMTVGLDLGDKHTHVCILDTETGEVMEEGRLRTTPEAFESRFEGSERLTIALEVGTHSPWVSRLLEGSGHEVVVANPRKTRLIYSGSRKTDRIDAEKLARLLRSDPELLYPVSHRGEESQAHPALIHSREALVRSRTRLVNHVRGTVKSFGPRLPSCSSASFHKKAPGHIPPELREALDEVIEAIASLTKKIESHDKRIEALCGEDYPESGRLRQVPGVGPITALAFVLTLEDPSRFKKSRSVGAHLGLAPATEQSGDRDPQRRITKEGDEMLRRLLVGSANYILGPFGGDSDLRRHGEKIASRGGKSAKKRASVAVARKLSVVLHRLWATGEEYEPLRNTHRSKEEARREEVRKEEALA

SEQ ID NO: 97741 - protein, 338 aa, unidentified
MKLYAGIDLHSNNSVLAVIDEEGTLKWRQRMANDLIEIAAALEPYRDALQGIAVESTYNWYWLVDGLMDRGYRVHLVNTAAVPQYEGLKHGDDHSDARHLAQLLRLGILPEGFIYPREDRALRDVLRRRFQLVRQAVLLMHSVQSTAARVNGESFPANAFKQLTPQGRSERFADPWVRRGVEAQCRVWQCAQQQVDALERELLMELKPRTGLVHLRSVPGIGSILGLTILLETGPIERFASPGDYASYCRLVKSERLSNGKKKGEGNRKAGNRYLAWAYIEAANFAIRYSAQVKRWYERKAARGLRVIALKAVAHKLARACFYCLRDGVDFNVQRAFG

SEQ ID NO: 97742 - protein, 409 aa, unidentified
MDIVPIYKRVIGLDVHQSQITGCAIVEQPDGSVTHELREFGGFKRDRKALAEWARAIAPDVVVMESTGIYWKSPYAALEAVGIIAWVVNARHVKAVPGRKTDVADAQWLASLARAGLLRASFIAVADLRSLRHIARHRQKLGGMLASEKNRLHKLLTDAGIRLGVVVSDLHGQSARAMVKALIEGKSVPEVLNLASNRLRASREDIFEALQAEEITPAHRFVLAEIMAHIEELEGRIARFDAELLRSLRDAGYGVSLRLLQTLPGIDLMGAAMLLVEIGSDMSVFGSAQRLASWVGMCPGNNESAGKRKSGRISKGNAWVRRLLCEFAQAAARSRCALKDKFQALNVRKGHKRSIVALGHKMLRTIYAMLSKNTHYVDKTVDYEALMVARNAPRWLQMLVKHGFVPKPA

SEQ ID NO: 97743 - protein, 412 aa, unidentified
MDQLIERCAGLDVHKASVTACVRVPVEGGTRRQQIRTFRTTTAGLVLLRDWLASYQVTVVGMESTGVYWKPCYWLLEDDFACWLLNARHLRNVPGRKTDVADAAWICQLVEHGLVRPSFVPPKPIRELRDLTRYRKALVQERTREAQRLHALLEDAGIKLSSVASDTLGVSGRLMLEALVGGTHDPEVLADLAKGQLRRKLPALREALEGRFGAHHALLLGEMLARIDHTDEAICRLSEEVARRLAPFSPLLALLITIPGVSTRVAEVILAEIGTDMGRFPTAGHVASWAGICPGNNESAGKHFSGQTRKGSKWLRMALVEAAKAASRTKGTYLAAQYARLKGRRGHKRATIAVAHSILVIAYHVLERGEPYSDLGADYFLDRHASQAYKNRLVRQLERLGHKVTLEPADAA

SEQ ID NO: 97744 - protein, 426 aa, unidentified
MTTARKKATPAATWVAIDIAKRSHAVLIEAPDGRQRSFRMNSTQADHQRLVDLLHTCPEPVRVALEPTGDCHRTLAYRLLNEGFEVCLVSSVAGARYREAMFNSWDKNDPKDAGVILALLKQGITQRFVDPLIEGHHGLQELSKTHYQISLARTRLQHSLLTHYLPLYFPEVERYFHTTQAAWLARFLIRFPTAASIRARPFDAFREEAWDLVGRKVNKQTWIRELYDAACASIGLPVTEDSVAIETFRLQLRRYQQLIEQRDSLVEIAHRLLQGRPDYESLCSLPGVGPVIALTILAEAGDLRRFAHHRQFLKYCGLDLAKCQSGQFRGHEKLSKRGNARLRFAFWFAAAIAVRMRENSFREKYERYISPDPLNADRKRKALTAVAAKMARVAYGLVKHQTMYRCYFETSLPRGSIPLCRAVGTS

SEQ ID NO: 97745 - protein, 315 aa, unidentified
MHLGIDVSKNTLDCCLISDGIFYERKFKNDSVGIDKLQKWLDEHGADHTLHCCCEATGTYYEESAKALARRYKMSVVNPRTIKGFSTAVMNRSKTDRQDAKLIARYCQAMKPEQWQPLTSEHRQLQELVRYIVRTKRQRAAEQIKRQTAPDSLKPHIQSTIEHLTELLTRLEQDLKAHYRSHPEHDSRRKRLKTIDGIGENAAAVLCSVITDRFTHAKQLVAYLGLDPKEHQSGTSVRGRTRISKIGKSDIRAALYMPALVAYRMGAFPDFTARLEAKGKPPKVIIVAIMRKLAVIAFNLLKNGEEFDRSRYRKI

SEQ ID NO: 97746 - protein, 400 aa, unidentified
MISVGIDVSKGKSTVCVLKPYGEIVCRPFEMQHVEKDLEAFHNLLQKLDGEIRIVMEATGIYHLPILIFFHNKGYFVSVINPFAMKKYAKDNSIRGAKTDKLDSIMIANYGIEKWFKLQRYEGDEEIYAELKLLGRRYRYYMELHVKALQELTHILDYVMPGIKKLFSSWNEANGKDKLSDFVERFWHFDLITSMSLETFTDEYLVWAKEKKYHRSRSKAETVYELASSGIPTLPSSTPSTKMLVQEAISVLRTVDSSLSLIVTRMQVLAKSLPEYTTVREMGGVGDVLAVKLIAEIGDVRRLHSAKALIAWAGIDPPPYESGQFIGSKRKITKRGSSTLRKIGYEVMRVLKSHPAPKDDAVYNYILKKEGEGKSKKHAKIAGLNKFLRIYYARVIAVYQ

SEQ ID NO: 97747 - protein, 350 aa, unidentified
MSEKISRHTLGACDWKELLKLCERIRTRIARELRKDVELVSCYEAGYDGFWLHRLLEAHGIRNYVIDPASLQVDRRARRAKTDRVDVERLLRSLMAYLRGEPKVWSVVCVPSVAEEDDRRLHRERGRLINERIQHVNRIKGLLAIHGIYDYPPLRHDRMQQLEGLRTADGRTLSPRLKAEILRELQRLELVIGMIKTIEAERDAIASAKIETEHGSAKRIQDLAKIKCIGPEFATTLVGEVFYRSFDNRKQLASYVGLTPAHFQSGETCRDQGISKAGNAKARRVMIELAWLWLRHQPASPLSVWFHDRVGKLKGRIRRITIVAVARKLLIALWRYLETGLAPEGAILKV

SEQ ID NO: 97748 - protein, 359 aa, unidentified
MQRNKISFTGQKIYIGIDVHAKTWEVCVLTESGYKERHPQQASAKTLFDFLKKHFPDGEYHAVYESGFSGFSTYYALKEYGINCVVTHAADVPTTQYEEVMKTDKVDAAKLARSLRSGDIRPIYIREKENIDDRSVIRIRKTIQKQLSGYKARVKHLLHCNGVEIPERFARPGTHWSRAFIKWLKEDVVLLSSSRLSLDLLVKQVETIRQTLLDATKSIRRLAQTDRYRNNYELLMSIPGIGVSVAMCILTEIYDVKRFRNENQFASYLGLIPTCHNSGEKTASGEKTFRGNKHLGPMIIEAAWIAIYRDYGLGMAYARYKQSMKPQEAIVKIARKMSNIIFSVLKNSRKYEPYRWDKE

SEQ ID NO: 97749 - protein, 311 aa, unidentified
MNYIIGIDISKDTLDVHRLADGQHMQVLNGIRGFAELFRWIEPHPTALIIFEATGPYHRQLEQALCVKGIPFVKVNPKQARRFAQASGKLAKTDRVDCEMFAKMGAALQLMPKPISAENLYDLRDLLAARRALIKDRTAAKARNATVTHALVKRQLEKRLRQIKCDIAKIDAAILEMARQDLCMTERLDILSSIPGVGVTTALIILVDRPEIGELDGKQVASLAGLAPMSQSSGKWQGKARIQGGRPNLRHAIFMPALVAIRFNADLKAKYDQLVAAGKEKKVAITAVMRKLLVLANALLRDQRMWSENQG

SEQ ID NO: 97750 - protein, 329 aa, unidentified
MIRPALGIDIAKLKFDVCLLNPQGKRRHKVFPNTAAGFSQLAMWLIKQGVTREEMHACLEATGTYGEALAYHLHEDGHTVSVVNPAAVKAFAGSRLSRTKTDRVDAELIARFCLAQQPLAWTPPAPEVRELQALVRRLEALIEMRVAEENRLEAGSVVAAVRSSVEAHVAYLAAEIKRTEELIRNHIDNHPTLKQQSELLDSIPGVGATTAALLLAEIVDMTQYRSARQVAAYAGLVPRERRSGSSVRGRPRLSKIGNARLRKALYFPAITALRCSPFFKEWAEGLRERGKCKMSVIGAAMRKLVHLAYGVLKTGKPFDPEWAQKEKTA

SEQ ID NO: 97751 - protein, 421 aa, unidentified
MKNSIARKLRQVPEGYGMVGVDPHKRRHAAVVMTQDFVVRSKFKFDNSREGFEGMLQRVKAEMARAGWRGLMFGLETGGHYWRNLAYFLDARGIPFRLISQFTLKRRREGKDLNRRKNDFHDAEVAAQLLSTGEFTDTRLPYDVYAELRAAYSAYRRLVKESGRLINLLKGLLDSLFPEFTQVFKDPAGKTAMSVFSCCPVPGVIAQMGEDDFIRTIRANHQGRLMRERLRHLHRLAQASIGIKEGTEAVSLEVSLVVERLSLTQRQIERLIKLMTRLVDATEEGPHLLSIPGVGYITVAGMLGELGSFKNYQNAKQLIKMAGSNPTEAESGGKRSKRTPMSKKGRPGLRYCGWIGVIPLLRHNMEFRAWARRLKERPVHAHPLKPREIIGAAVNKLLRLSFALVKKKAFYQMPKLAEVAG

SEQ ID NO: 97752 - protein, 434 aa, unidentified
MEEVTDEPLYRDRVCGIDIGKAQMAATIRVPSDSNPARRASETRSFGTTRREVLALADWLRCWQVPAVVMEATSDYRKGPFCRLEAGGFECVLADARQVKNLPGRPKRDPSDSRWLAACFERGAVRPCFVATPEFRIIRLHTRYRRDLTEERTREKQRTEKLLESAGIKLSSVISRLHLVTGRDIMDHLIAGERNPKVLAQLARTAARRKIAELEEALEGAEFFTAEHAALLAMMLARIDRLTAGIDELTTVIERLLAPYEEQLQQAESMPGWQRRAAQDALAETGVDMTRFPTGAHLASWAGRTPVDHQSGTRKGRAKAKKGNRYLAGITGETAVAAGRTQTREGVRHRRLARRRGTAKACVATGNTQLKASQLLAGPGTRYQDLGPDYYERQASIRRQIAHHVGKLGALGFEVTLCRIPEPDPDPAGQTQAA

SEQ ID NO: 97753 - protein, 435 aa, unidentified
MPKRTRVVIGGVDTHGRTHHAAVIDQQGRLLGDREFAATSHGYRQLLGWLGRHGRLDAVGVEGTGSYGAGLTRYLLGQHVAVVEVDRPDRRTRRQRGKSDPIDAEAAARAVLAGTATAPAKRRDGIVEAIRALRVVRSGAIKARTAAINQLKGLLVTAPTPLREDLDQRSVAALVATCARLRPDEAALADPVHAIKAALRAVACRIHQLDEEIGLADERLAKLVGRAAPRLLKLHAIGVDHAGQLLTTAGDNPERLRGEAAFAHLCGTAPVPASSGKTHRHRLHRGGDRHANRALHLAVVVRMRWCPRTRAYAERRTKDGLSKPEIMRCVKRYLAREVYHALVADFEALNATDNLYEHPGVQALLANSSCSVCRRWPSGSMGWLGRDGWRLTMSLRPNGLTQIPAETSRVARAAFPPNRCLAMRARDALGGAVHR

SEQ ID NO: 97754 - protein, 391 aa, unidentified
MKLVGIDVGKNSHHFCVMNKETGEFNVTPSSFSNNKEGFDFLINSLKPYSKKSILLGMEDTGHYHVALLKFLLSNGYTVALINPKTTDLTRKMEGGITKNDKLTICDVLDTPERKKQYRITKVDRFDLYEQRQLTRHHHNLKEELNIYCNRLQKSIDLVFPEFNTLFGSKYGVVYMNLLKTFGSAEAIASTDIRTIRKCFEIKGRGGRISLTAEKLKECAKNSIGISSEVETIQIKHLVSQIMLIKEQIAEIDKKIEEFSIKNNSPILSIPGISHFSGTSILAELGDIGNYSKPSRIIKFAGVAPYHYESSQYNAQHTAITKKGSKYLRKTLYQVILPVINNNPVFKKYYRLKISQGKGHRCAQGHCIRKLLRVIYHLLETGQSFDPALLR

SEQ ID NO: 97755 - protein, 385 aa, unidentified
MNHIGIDISKYKHDCFIATETDHFSFSFENNQEGFLKLLFELKKLSGEIKIGFEITGHYAENLKAFLISHNFPFMEIHAYLVKKFVESQTLRKTKTDKKDARMISNYLQSVDYKTYLQQSYHIGALKELTRLRAKLISERTKYFNLLTKTLDIIFPEYKGFWPNNHFSQTSLYILEKFTTPFKIAKMTDHHYETLRKLSMGKFSYPKFSKLKELAKSTVGIYQEFHIVSLSIYLHNIRLLNTQVGSIENQIKHLMASYPTKIETITGIGTISAAVILAEYGSISNFDNPSQMLSYAGLEPSVSQSGTQTFNGRLVKRGSRILRSTLVQASFYMLKVNPKFYAYYLKKKSEGKHHQVALIHLTRKLIRIIFHLETTQQDFNPKLIK

SEQ ID NO: 97756 - protein, 343 aa, unidentified
MQIRSVGIDLGKTTFHLVALSATGKVLFRKKFTQKQLITFTANMQSCLVGMEACSGAHFLGRALREQGHDVKLIPAQFVKPFVKSNKNDFLDAEAIAEAVDRQNMRFVPIKTDDQLDLQAMHRVRDRLVARRTSVINQLRAFLLERGMVFAKTPFKLKQAMPEILENADANLTPRMRNLVSMLWNEWKDLEHQIVAMNEEVEQIASSDSACQRLRQIPGIGPLVATAIVAAIGNGAAFQKGREFSSWLGLVPRQHSTGGKARLFGISKRGNCYLRKLLVHGARSAVLRVKRERSPFGPWLDALERRSPVKVVITAAANKLARVAWAVLSSGEEYRPPTALMPS

SEQ ID NO: 97757 - protein, 420 aa, unidentified
MRNAGIHAKSLLEVRRMYNAVGIDVSKSKSTVAVLQPGGTVIRKPFDVSHTSQNLNELADYLSSLDGTTKIVMECTGRYHEPMVKALSEAGLFVSIVNPHLIKNFGNNSLRKVKSDPADARKIARYTLDNWTELRQYSGMDNTRTQLKTLNSQFSFFMKQKVSAKANLIALLDNTYPGVNKLFESPTREDGSEKWVDYAYSFWHADCVRKIGLKAFTERYMSFCKKHHYIFQQDKPEKLFNASKELVAVFPKEKTYKLLIQQSIQQLNLASEHVERLRREMNELASTLPEYSTVMGIYGVGKTYGPQLIAEIGDVSRFTHREALTAFAGVDPGVDESGQHKSKSNRASKVGSARLRKTLFQIMTTLLQNAPEADPVYCFLNKKRSQGKPYYVYITAGANKFLRIYYGKVKDCLRNLEQTE

SEQ ID NO: 97758 - protein, 311 aa, unidentified
MVYGAIDLHMRYSQIRIVDAEGRVLRDTRVLTSPDRLIETFTGHGAMRILLETGTESEWVAQALEGAGHEVIVADPNYAPMYGEIRRKVKTDRRDVAALAEANRHGWYRATHRVSAAQREVRQVLRARRQLVQMRSGTVSLLRALLRQSGYRVASGSCERITARLAQLTLPRALTDTLAPLQRAIASVSAEIQTVDARLATYARADAIVTRLQSVPGVGPVVSLTFRAFVDDVTRFQTAGEVSAAIGLVPREDSSAERRHRGHITKAGPRELRSLLVQAAWSCWRSKPAARCGPGSSASPVGAANGLRWWP

SEQ ID NO: 97759 - protein, 418 aa, unidentified
MIIEPTVFVGVDWASAEHQVCLMGPTGPTQRAFLHDASGLGAMVDWLCAQADQPEQIAVAIETPHGPVVEALMDRGINVYAINPKQLDRFRDRFSPAGAKDDRRDALVLASSLATDRHCFRRLEVLDSTLIELREWSRMYDELKEERSRLANRIRQQLWRYYPQAIELVDDPGADWFLDVLAIAPTPEAARKLTEKKLGRVLSLHRIRKISAADALEILKRPALTVAAGTAEAASAHIAAMAERIRLVNRQLKGATKRLDMLVDSLSGSGEEPVEGQAFEQHDAMILRSLPGVGRIVVATLLAEAHHAIRARDYHALRTLTGIAPVTKRSGKSCRVEMRKACSRRLRTSLYHWARVAMQHSPRVRAQYSSLRSRGHSHGRALRGVADRLLAVACAMLKSRTLYDPAKSTALTAASNPP

SEQ ID NO: 97760 - protein, 414 aa, unidentified
MESSYRIAGIDVHKKMLAVVVTDLTQGAEFHFERRKFGALDSDLCALAEWLNEQQVREIVMESTAQYWKPVWRHLEPEYKLYLAQAQSNRAPRGRKRDFTDAERLVRRHVAGELILSFVPDPEQRLWRIATRTKNQLTGDRVRLQNQLEALLEDSRIKLGSCVSDLLGLSSRRMLKALAGGERDAAKLAGMAEPELRASQEQLQDALRAAGTLNDLHGQILRLFLERLELIEQQMAQLDQSIGAALHTHQSAVQRLAAVPGYGVDSAQQVIAEIGPQAATFPSPAQLASWVGVCPGREESAEVSKSNRCPKGNRQMRRILAQVAQAAARTKGSIFQGLYRRLLPRLGHGKAIWALAHRLCRLTWKILHQGVEYKELGQQMNPKLVRQRTNKLTRQLRALGYYVQLTALSPNAQA

SEQ ID NO: 97761 - protein, 312 aa, unidentified
MIASPVHVGADVSKLTIELGCPSLKLPASIANTPVGFALLRKAFAKSPQPVHVVCEATGSYHKPLVAFLHRAGITVSVVNPRLPRDFARSRGQLAKTDKIDARALADFGRTLQPNPTPQPEAHTVLLDDLVTRRRQLVADRTREKNRLPQTLCAEARASINLHLRHLETQIEKILARIVEVVAQTPVLKAQVKILTAVQGVGALTASALLASLPELGTLSDNQVASLAGLAPFNRDSGAFRGSRSIRGGRREVRISLYMAALCATRCNPILKPLYLRLKANGKHHHVALTAVMRRLLVYLNSLLRKHASSPA

SEQ ID NO: 97762 - protein, 398 aa, unidentified
MKACISIDVSKGKSYYQGFKGLNDPVSKAKPIDHDKIGYEELVRFGEKLKTEPGTETYVFESTGIYHRSLQNYLGTRNKEYVILNPLTAAKVRKSKLRSTKTDQKDCQSIALAYYSQEYMPHDQRDARHEALRTRNREYLHQVQLLRQMKVRFRNLLDIVFPKWDEAYPNPYTEIPLALLKKYPHPEDMEKSKEESIAHSLEKTTRHRQATCMIEARKAKQYASRTISGCARNGVETELLQESVIQVEEQMKRLDKCMEAMKSMVCEEQFFRQLKSIPGVGEILAIQLMAELGDLSRFSSSKKLVAYAGIDPIVYQSGKQTGEHLSITKKGNKNLRRLLYLAVASNIRSTKENSILDFYNKKRQQATPLAYRAAVIACANKLLRIIYSMYRSGEDFEF

SEQ ID NO: 97763 - protein, 474 aa, unidentified
MIKSVGIDFHQGKHVVRCLDERAQLCDSFSFQTTPEGLDTFEEHIFRDGSNPVIVFEPAGLTWFMMAICIRARHPDCRLVRAKGQKVAALRRYLRGSSKSDRLDALTLAKMVFIDPEQMDEVYLPPAKIHALQRLARQRKRLESDIAARKTRIGAIVESYVPGVRKAFSNPWSAQARAFLRCQLNPLSVAHDGEKALHSFLVRARHRNKTDKAESHRVFLVCKSAADLYQLSSRAEAVDDEFFSVFQEEIERELRLMEMEEAESEAIAKRMEELYRELHPSDNLRSIPGVGRVTAPMFLATVGDPARFHNQSAFVNWTGVVPRTRQSSEVEAKGLRMTKAGPAIMKWALFQAGDIGRRFDPQLASLYYREMVHHGKNHKQAMGAVMSHLAARIIKVLQDDRPYELRDNEGRAVRPTEAKKLILLNYQVPENIRRERRRRNPVKRGYLKSQGTALLRTNEAAVAPQPVKVTIPEN

SEQ ID NO: 97764 - protein, 367 aa, unidentified
MTIRLVTDHSELMSIGVDIGKDVFHIVGFDTAGEIVLRRKIKRLALTKTFEKLPRCVVGMEACLSAHFVSRSLRGLGFQPRIIPAKYSRPFNKGQKNDYNDAEAIAEAALRPNLKTVPEKSQEQLDLQALHRVRSRLVSRRTATINQIRAFLIEQGITVRSGARSLRNSLLTILEKRSDEISPRMEGVIMGLYEDWLWLDERIESTTDEIEMISKREGNCQRLMTVPGIGPLISTAVVAAIGTGEAFERGRDFGASLPGSGMPAYRERGLGLMPQQFSTGGKPVLGRISKRGCRYLRTLFIQAAHVILMRPQNWQNFSFGPWLEQASQRLHKNKLAAALANKLARIAWSVLRHGKTFDDDRIEATAI

SEQ ID NO: 97765 - protein, 412 aa, unidentified
MDLVYARCAGLDVHKKTVVAGVRVPAPQGGQRRGEVQTFPTTMAGLKALADWLVAHEVTHVAMESTGVYWRPVYAVLEGLMTVLLVNPRHVKMVPGRKTDVKDCEWLAQLLECGLLRSSFVPPRPIRDLRDLTRLRKTLIRERGHHVNRIEKTLELANIKLGSVVTDLMGNTGRAILEALSLGIDDPDKLAACAQGLLRKKQAALREALVGRLTPHYAFLLQQHLSLIDALDAHIATLDARIAEAMAPFADAAALAQTMPGVATRAAQAILAETGVDMAAFPTADNFASWARLCPGNNESAGKRRPATTGQGATWLRATLQEVAWAAAKTKKSYYRALFHRLKARSDSKTAIVAVQHAMLVALWHMLKHRVPHQDLGADYFTRRDTERTRRHHVRRLEKLGYQVLLVKEEAA

SEQ ID NO: 97766 - protein, 363 aa, unidentified
MQFVGIDLHTNRFTCCSRDEGAGEKKTMTFCLNERDIAYFMKTVSPQTHVLIEATITSFAFARLIQPVVKEVIIANTYELKQISLARKNTDKIDADILSRIIKMQVLSGEKAISAVTIPPVEIQELRGLFSTYRLFKKQTTQLKNRIHSLIKEKLYGFTQEEIFSQKRRKMIREIESGAASPLFFQINELFDLLEFQESRIDVLQDKIKEHAEPFMREIEILTSMKGVSVFIAIAIIADIIKVDRFKDSKSFTSYLRSAPKVANSNTSVSVRGTNKKGRKLSSTLITQSLNHVLDSSQKLSNWYEEKTKFKKAGLVRNGLRRRVFAEIYQMLKKGEYHYGRDVKNHQAKTLQYKRFLEKRKKL

SEQ ID NO: 97767 - protein, 325 aa, unidentified
MRNANTAPVPNIVVGLDVSKRHLDVVIHGRRIFRRFNNDPEGINDLLTWLKQKSVEYVVAEATGGLELPALLTVHEAGIMVSRVNPRWIKDYARAQGRYAKTDPLDARIIASYAVTMRPDFWTPWDKDTQTFKDLAVRRRQLISMRTMEKNRSQQTRSAHVYRQHLQMIDMMNYQIEEIEAVLERMIEGREDWSRKAEIIKSVPGLSRMSAIGLIADLPELGACNSKQIAALVGVAPFNHDSGKLKGYRRTGGGRKSIRNILYIVAVGMARGYNPVMERFYKRMRDTGKPAKVALVAVIRKIVVMLNAMMKNDTLWGENKVLSAV

SEQ ID NO: 97768 - protein, 380 aa, unidentified
MNTMTVGIDLAKSIFAICEGDSRGHGSRSSILKSGEFLKWLRTLPTGTVVAMEACSSAHSWGRTMQALGLEPRLIAAEFVRPYRKNQRIKNDARDAEAVLTALHAPGMRFVTIKTEEQQQRLAWHRLREGWKAERTALFNRIRGLLSEFGIVVELGAAKIRRKLAELESDTAYPQSIQLMAQSVRQQVGVLDQRLAECERQIALQSKRDPAVARLRSRPGIGPLTADAIIATVGDARQFKNGRQFAASLGITPRQHGSGGKTHLGAITRRGDAYLRCLLVQGARCVLQAALRLYKNKPDTLNRLQLWMVKLNDRVGYHKAAVAIANKHARQVWAMITRGEAYNADAYKDWEAAHATVRPGDIQEASNDDLSTAALAAASV

SEQ ID NO: 97769 - protein, 369 aa, unidentified
MGDGITYVGLDVHKDGIVVAVAEGGLRSEVRDYGRIANTPAALRRLAHKLDWEGVTLRLCYEAGPCGYGIQRQLSALGQECIVVAPSLIPKRMGDRVKTDRRDAANLARLHRAGELTAVWVPDPGHEAMRDLVRARLDAVRALRRARQQLSGFLLRQGCHYGRPAWTKLHRRWLAGLKFEQAVHHIVLEDYIAAVEAAQDRRDRLTAQIAAMLSDWTLAPVVAALQTMRGMALVNAATLIAELGDLARFANPRQLMAYLGLVPSEHSSGASVKRGSLTKAGNSAARRLLIEAAWTYRFPARISRELRLPQEAQSRAIREIAWKAQLRLCARYRKLARSGKPANVVTAAIARELAGFVWAIARRVPPAVS

SEQ ID NO: 97770 - protein, 370 aa, unidentified
MRFYTTQHPFYCGIDLHARTMDVCILDQAGETLLHRNMTATPEALLKAIAPYHDQIVLAAACLFTWYWLADFCAEHGIPFVLGHALSMKAIHGGKAKNDTIDAHKIAVLLRGGMLPQASVSPAAMRATRDLLRRRMHLARQRGALLAHVHNTNSQYHLPAIGKKIAQKANRDGVAERFADPAVHKSIEVDLALITSDDALLRDVELTIVKTAKHHDANTLSLLQTVPGIGTILSLVRLYDIHDIARFPRVQDVASSCRLVTCARASAGKRSGTSGATIGNAHLTWACSEAAVLCLRDNPAGQPLLTRLEKKPSTGNALTILAHKWARAVYYRRKRQTAFDLETCLQAEGRGVGELTVSLDSHGMHLIRNT

SEQ ID NO: 97771 - protein, 370 aa, unidentified
MNKMSAVNTQTIVVGVDVHKYSHTAVALDCFGSQIGLHEFTNDFLPEYVSWLDAFGNRNNPIVALEDVNGYGVHIVRKLADEGITMRYVPGILTERKRKQSIHREKSDPVDAMRVAKVILTNYEETLPAKESIANREERTTAITLDFFLNERRSLVAEKTILKNQLHAMLHQHMGDHYTDCFSKAFTPKAIGYYLKTVNPKAIHDSEASALVASIRRRLTRLKLLLGQIAEIDKAMKKAAKDSSPVAALKKNISGCGDVTACTLIAEVTSIKRFKTKSQFARYAGIAPVHKSSGNHKRLYTSPYGNRKVNRALHTIALYQISRVDDNNPGRIYFEKKLNEGKTKLWALRCLKRQLSNRVFQTLKHEYNTR

SEQ ID NO: 97772 - protein, 327 aa, unidentified
MLHFGIDVSRDKLDCAVLDEQGRRVKRARTFTNDGPGVAELIHWARGVEVEQSRHFVLEATAAYHELAATRLHGAGLVVSVVNPAQVRALARGLGMLSKTDLIDALLLAQYARLAEPRQWHPTTPYLQQFNAMLMRLDCLEADLRREQNRREQATVRGSAQCVLASIDGCIEFLRGQCKAMGKAINEYVLAHDSLSQRITRLRTIPAVGDKTAKRMAAVLGANDFASAKQVAAFLGLIPVKSESGSSVRGRAHLSKAGNPRVRASLYMAAVVAKKINPDVKALYDRLCAQGKTKMSALGACMRMLVHICYGVLKSERDYMPPEARHS

SEQ ID NO: 97773 - protein, 434 aa, unidentified
MKATTKLSLINPKLLRVPFDIGKDHLYAYTEVPLQANAVECIEQTLPNRNQPILKALEQFKALALKHGYQGLCILCEPTGGFERRLLRLARQAGHFTAYLNAESVRHLRVVQSNDTTKSDLKDPKTMFMLASLGKTLTHRQLTGPWLVLRESHAYYEALDAQNVALRCRIHRLLTQLFCEFSFKKDFLFESDAVVHLVQQFGLNPYRMVAATQGVFYRKMKRHGVRLRTLERLWQDAQGSNLQQLDPGYSDLLEHQLREAFQDLWCCHRRLEAAAQKMIDLLHQLQASGQVRLVAHKGLINEIGLARILAETGPLDDFKSFARLLRYGGMNLCENQSGTMIGRRRISKKGRSLLRKVLSQAVLPRVRRTDLYGPYYHGKKAKGMVGQKAMMAVARKFLKLLWGLNRSAQGYASSRVFCCASQFKAPMPPMAQAA

SEQ ID NO: 97774 - protein, 350 aa, unidentified
MWFVGLDVHKKVTTMCILNQRGVVVKEERLVGPACMIADRLAAVRATRLRLPQLAVCYEASCGYGPLHDQLKSVASRVVVAHPSRLRLIFNSKRKNDRVDAKKLAMLLLLGHVPAIHVPSIQVRAWRQLIEHRHRTVAKRTATKNALRSLLRNHAIPAPHRKGLWTRAGRAWLAALTLPDEAAALQRDLLLAELAQFDQQIKRMDRELNRLAQSHPGVGLLKTIPGVGPRTAEAIVAYIDRPTRFLRTKCVGSYFGLVPCQDQSADRNHLGHITREGPSRARHLLTEAAWRGIRCSDHVRSYFERIQHGDPERKKIALVATAHYLVRVMLAMLRTGEVWRYDTKKKDKAA

SEQ ID NO: 97775 - protein, 344 aa, unidentified
MEHYAGIDVSLESASLCVVDATGRIVREAKVASEPEVLIGWFSRLGFTVTRIGLEAGPLSQWLYAGMRDAGLAVELLETRHVRNAFKAMPVKTDRKDARGIAQLMRLGWFRPVHCKSLPAQETRALLTVRKLLQTKNHDVEMCIRGVLRGFGLKVGPTTPRTFAGRIRHLVANHTTLSTVAEAMLAARDTLFAEWQKLEKRLRSLAREDGRVRRLMSTPGVGTIVALTYVSAVDDPGRFRSSKTVGAHFGLTPKKYQSGETDITGRISKIGDASVRTALYEAANVILTRPVKGSALKSWGMRLAARAGMRKAKVALARKLAVVLHRMLADGTSFLPDKAAAVTR

SEQ ID NO: 97776 - protein, 313 aa, unidentified
MAVLGIDVSKDTLDVVWMDEQRQTQYCQVDNAASGYTKLKHWLRKRPVEAVCLEATGRYSEGVAEYLHAAGYRVSVVNPARIRGYATSQLRRNKTDKLDATLIADFCRTQQPEAWTPPPPEVRQLQALVRHLTTLETAKQQADNRLREATALPDLVVEQLKNQRDLLLAIQDHIDHFPDLRRQRDLMASIPGIGKLTAAKLLAECRSVSRFDDVRQLVAFAGLNPAQHQSGSSIKKKTTISKTGNSAIRAALYMPAVSAKRHNPRLRPFAQRLLARGYCEMEVITAVMRKLLHLVFGVLKSGRPFDPNFPPAP

SEQ ID NO: 97777 - protein, 401 aa, unidentified
MAAQRDIAWVGIDVGKTHHWACVVDAEGKVLLSVKVANDEAAIVALLATAGSLARQLIWAVDIIGAPSAMLLALLARAGQSVRYASGRVVAAMSAAYAGEGKTDAKDAYVIAETARLRRDLSEVDTGTDLVRKLAVLTGHRADLIADRVRMINRLRDLMTSVFPSLERAFDYSSHKGALVLLTGYTTPDRIRRIGHTRLTGWLRNRNVRGSADVAARATAAAKAQTVVLPGQDLTASIITELANGILALDDRLKALDAQIEATFAEHPQAAIIQSMPGFGPFLGASLLVGANDLRAFPSAGYLAAAAGLVPVPNDSGRRTGNLHRPLRYSRPLRHVFYLSAQTSMMRAGPNRGYYLKKRAQGATHSQAVISLARRRIDVLWALLRENRTWTATPPPLAQAA

SEQ ID NO: 97778 - protein, 344 aa, unidentified
MNYHTALDVSLRSVSICIVDDQGTIQFEAKVPSEVNEIVACLRRFSQEISSVGFEAGALTQYLTYGFQAAGYEVICLEARQVSAALSAMRNKTDKNDARGIAQILRTGWYSRVHVKSMESHLIRALLSGRKTILKKCVDLENEIRGLIRLLGIKLPAPLKHGAYDAFVQQAVEEHVCMASTLIPLLDARLVLYKTFLKLDNQVKALVREDTICQRLMTVPGVGAITALTFKVGVDDPRRFKSSRTVAAHFGLTPRRFQSGEVDNPGRISRAGDPDVRSALYLAAHALVTRSEEWSSLKVWGIRLIKTKGRKRAVIAVARKLAVILHRMWLDGTDFRHGSTEAIT

SEQ ID NO: 97779 - protein, 343 aa, unidentified
MKEVSTIGLDLAKNVFQVHGVDGSGETVIRRQLRRGQVLPFFKRLPPCLVGMEACATSHYWAREIIALGHEVRMMPARYVKPYVKRNKNDMADAEAICEAVTRPTMRFVPIKTPAQQSVLMLHRTRELFVRQRIMLINALRAHLAEFGIVAGVGRNGLEKLLEVIADDGDEHVPAEARGCLLALRDQLVLAKRQILEADRRILAWHRASELSRRLDDIPGVGPLIATALVASIPDPQAFRSGRDMSAWIGLVPRQNSTGGKERLGHISKAGNRYLRKLLVIGALSVIRRAKQTGASRHPWLVALMARRSTKVAAIALANKIARIAWAMMVRGTRYQEPLSQAA

SEQ ID NO: 97780 - protein, 455 aa, unidentified
MAKKGKQTKPIPDNMLIIHPHAAGIDVGAEEHWVCVPADRDAQPVQKFSAFTCDLHRLADWLTACRITTVVMESTGVYWIPLFQILEARGFAVALVNARHVKNVPGRPKTDRFDCRWLQKLHTYGLLAPSFRPPEDICQLRSLLRHRENLIRMTVKHIQHMQKSLDQMNLHLHHVISDITGVTGMRIIRAIVAGERDPRTLAQYRDYRIQSSADTIAKALEGDYRAEHVFTLTQSLALYDFTQQQIAACDQEIERVLGTLDSQVDPAEHPLPPPTTTHRQPQRNEPAFDLRTHLYRITGVDLTQVPGFQAPTIHIILAEVGLNMHKWPTDKHFASWLGLCPDNQISGGKVLSTGSRRVQNRASRALRMAAQSLRTSPSYLGAFYRRMRSKLGPAKATTATAHKLAKIIYHMLKEKTPYRAHGAEEYLHKDHERQLRQVRKQAKHLGFDLVPQPTN

SEQ ID NO: 97781 - protein, 339 aa, unidentified
MELYAGMDLHSRNTFVGVIDSSFKRVFEKRVPNDLSLIVDKLEPFGDRLAGIVVESTYNWYWLVDGLMDRGYRVHLANPSAIKQYEGLKHTDDRHDSFWLAHLLALGILPEGYIYPKEDRPVRDLLRKRSFLVKHRTAHILSLQSMLEREKAYKLRGNEIKSLKVDDVERIFCEEHLVLSAQANRASIEFFGHHIKRLEKAVRNRVKLCKSFEYLLTVPGIGDILALTIMLEVGDIARFPRVGNFSSYARCVSSQRLSDGKKKGQGNRKNGNRYLAWAFVEASHHARRYNERLRSYYQRKCAKRNKAVATKAVCNKLARACYYIIRDQVPFREEALFCS

SEQ ID NO: 97782 - protein, 408 aa, unidentified
MNPLFVSIDVSSKSNVAYLMKPDGSKHSSFSVQNNLGGAKLLSERIVSALGSMQLSDVVIGLEATSIYGDSLVYALREDGSLGRFQRKIHVLNPKQVRKFKEAYPDLPKNDWVDAFVIADHLRFGRIAKEVYMDDYRYQALRTLTRARFDVIQSLTREKQRFANYLFLKCSGIAQNKDIQNTSATTIALMERFETVDELANADLNELTAFISEAGRGRFADPDATAKTVQAAAKGSYRLPRTVNDTVNQAMAVSIASMRAMKEQVKVLDKAIEQQFEIIPNTLTSIPGIGKVYSAGIIAEIGDVHRFESQASVAKFAGLVWHKHQSGDFEAEHSQMIKSGNRYLRYYLLEAANSVRRCDSEFRRYYDLKFKEVNKYQHKRALALTARKLVRLVFRLLKDNRLYIPPEG

SEQ ID NO: 97783 - protein, 347 aa, unidentified
MKFYTQTHKHYCGIDLHARCLYVCILDQEGNILIHKNIKANPRALMTLITPYQDDLVIGVECMFSWYWVADLCRQKGIAFILGHALYMRAIHGGKAKNDKIDSHKIAVLMRGGMFPEAYVYPREMRGTRDLMRRRMHLMRKRSELLAHVHNTNSQYNLPEIKKNLRYAFNREGIAERFSDPSVQKSIELDLNLIDFYDKQLSKVEWHIQKHARECDQHSLILLRTVPGIGQILSLVILYEIHTIERFPAVQNFASYCRLIKCKKESAGKSYGTTGRKIGNAYLKWAFSEAAVLFLRQNPEAQAWLERMTNKHNKARALTILAHKIGRAVYFMLKRKTVFDQQRFLNS

SEQ ID NO: 97784 - protein, 369 aa, unidentified
MKKNSKNSREKSRQKALQAKSRKMKLTVGIDLGDEWSHCCFLGEEGEIVEECRVKTTREAMKSRFGELKLAVIAIEVGTHSRWVSQILSEFGHEVIVANARELRAITGSDRKSDRVDAEKLARYARVDRRILRPIKHRGEEAQVDLVVIRARAVLVKTRTQMVNSVRGMVKSFGYRMPNCSTERFVKLNKEVPEKLRERLAPLMEVLEQVQKQIEEYDQRVEKLAKEKYPETTVLRQIWGVGEITSVSYVLTIEDKGRFEKSRDVGPYLGLRPRRSQSSESDPELRITKAGDCFLRSLLVECAQRILSKKGPDTALKQFGLRIEGRGKKKAKKRAIVAVARKLAVLLHKLWVTGEVYEPFPEATKRKAA

SEQ ID NO: 97785 - protein, 358 aa, unidentified
MDKNTQIQAVRVGVDLSKRVIQVHAVDAGGRTLCNRALSRDRFLSWCATLPAGCMVVIEVSSSAHHWARALLAMGLDARIVSAHLAAPYRSEGHVGKNDANDAAAICEAASRPHMRFVPVKSVEQQSLLCVHRLREGIKADRTACINRIRGLLLEFGVAVPNGARALRLVLDELLEDGANEMNGLARMAISRAQAQWRELDEHLAWCDERLAAHERDNADVRRASQLMGIGPVGASAAIATVGDFKQFKTGAQFGAWLGLVPKQHSSGGKSNLGTITKRGDAYLRTLLIQGAKSVVNSAHTRSDPISRWALALKERSGWQKAVVALANKNARILWAVMTRGERFDPHHISVKPGTAPV

SEQ ID NO: 97786 - protein, 401 aa, unidentified
MKRLSGGIDVGSESHHIIILDEEDKVLYNQKVAHKLNEFAESIKLFKQMEKKEGGKISFALEGKNGYSAPFDRILLDEGFTLYNVDNLKLKRFRQAFAGEWRDDQRDALMLSKMLKLKDHINSPREKVFIKIEKPSPVTESLKLLSRHQQTLIEEKVRLINRLRKKLLEVSPQILKLAKLKNKKIIAILAQYPDFSKYKRITLKSLLKIKGIGKRQAPFLLKRLNHLEYMPGQTDIYQTIISSYAKRILELQKEIKDIDRKLDEIGNQSKEVKHLKTLPGVATKLASRLIGEIGDINRFPSEKQVAIYCGIACVDNNSGKVTKARVVYKANKICKQTLITMAGGSIRLSLQCKAYYLKKRAEGKSHNHTLRCLARQLIKVIYKMLTEDRDYMVRKELKKVA

SEQ ID NO: 97787 - protein, 339 aa, unidentified
MSKLLKDFIGIDISKTWFDAAVITADHPAASIHKQFHQTPDGFKKMEAWLGKQGVLLNDETLFCMEYTGVYNTGLVNYLVEQKAMLWVEMPLRIKRSSGFERGGDDKTAAIKIAGYAFRYQDKMQLWQPSNSNIEKIKRLVAQRNRVMKAITQLKVPVKELVSCGCTKEAKELEKVQRKALQALQKTKVAIEQLIAKATSEDVTIASKVQKVQSIKGVGHVTAVSLLVYTKGFTSFDTAKQLACYCGIVPFAKKSGSSIRFKPTVSPHANKKLKKLLHLCALSSIKNDPETKAYFERKVAEGKNKMSVVNAVRNKLVHRVFALIRDDRYYEQNYTRKCA

SEQ ID NO: 97788 - protein, 352 aa, unidentified
MKKKCSTVSFKSQVIYCGIDVHKKSWKVCTRHCGMQLDNFSMDPDPQKLAEYLKRNYPEAEYRSVYEAGFSGFEAHRTLCKLGVNNIVINPADVPTSGRERNYKNDSIDSRKLARELENGSLDGIYIPEPENLVLRNLTRRKEQLTGNITRTKNRIRSHLFFLGLKFRSWSGSSLKIMESDAEKRFDHALSSDLRELRFLREERLRVIRSEHDCLKHLKREEIQKNLESIPGIGFDTAVVLQAELWDMKRFKGKDQLNSYVGLAPHLVGSGEHEEVKSSGNRKKKQLHYRLIESAWRAVRFNREYGAKYGAMIGKGICPQKAISIIAKKLLLSIRAVWLQNREYQVLLPKTR

SEQ ID NO: 97789 - protein, 325 aa, unidentified
MTAYKRIAIDTSKSVFTLHGIDGQDHAVLRTNLRRGQMNAFFRKLPATEIALEACGGSHHWARELTAFGHQVRLVPPQYVKPYVKRGKNDRNDAEAICETAGRPGMHFVPVKTLTQQAQGMVLKVRETLVAQRIRLANTLRGHATEFGVIAAKGLDKIVSLLSAIGQEAAIPAEAKEMFVLLGQEIEQLDVRIEQVDKKLLAAHKANPVSKLLATAPGIGPITALTLAIDINPAVFESGRHLAAWAGLTPKEHSTGGKQRMGGISRAGQQRLRSLLVSGATSVINAAMKPGSKQMTAWLRALLLRKPRKSSPWRSPTRWPASPGR

SEQ ID NO: 97790 - protein, 338 aa, unidentified
MELYGGIDLHSNNSYVGVVNEENRVIYKERHRNELPLILSALAPYKGELKALAVESTFNWYWLVDGLMDAGYPVHLANPAAMKEYKGLKHKDDKKSALWLANLLRLKILPEGYIYPKDERPVRDLLRKRLHLVRHRTSHILSIKNIFSRNLGIVMRGDDIKTLTSGDVERLVSEGCHRLAITASLSTVHHLTGQVDQIEKTILGRVRLRDEFKGLLRVPGIGTTLGLTIMLEVGDIRRFAEVGHYASYCRCVSSIRTSNDKKIGEGNRKNGNKYLSWAYIEAAHMAKRYYPVIRRYYDRKAAQTNDIVAIKAVAHKLARASYYVLRDQAVFDGKRLFG

SEQ ID NO: 97791 - protein, 309 aa, unidentified
MSAYAGIDVSKATLQIALYPQADDLSVANTPDGLASAMDYFKAHDVHHVLMEATGGYEKLAVRLLAGAGFKVQRVNPVRARSYALSMNKRAKTDKIDARILARFAANLDEEPCCQPDADREELTQLVNQRESLVQQRDDNRRRIKQADSAFVQQTYKALEVQLQMLIKSCGKQIAQQTRKINAQLLGQLTAIKGIGPVTIASLFCYLPELGDLSRQQVAALVGVAPYNNDSGTKSGKRSIYGGRAKLRRAAYMSVLVMVRHNPDFKARYEQLCNRGKAKKVALVACMRVLLVRLNAMVREGTPWRDQPV

SEQ ID NO: 97792 - protein, 419 aa, unidentified
MFSDTDLIVGVDVHRRTNVIQVMDGQGDVVDSSHRFANNGTGTSRLAHHLAQLTCSGGFSAIHIAAEATNNYWLPFFCQLSRAAELSSWPLTLYPFNPRVVHGFKKALGDLEKTDSLDATVAAERLRFGKELPRPFCMDELYLPLRALTRYRYHLVRELVRVKSYCLSQVYLKVTNYSDKDQKPFSDVFGATSQAVLQEFATLDTIANMPFDELVEWIDVKGKRRFANPQENARKLQKIAADSYQLPAEWSAVIHDIISLNLRHMNALENLIQRVETAIAEQMHAIPNTLDTIPGIGPVLSAGIIAEVGDLARFDYNEAKVASFAGLKWPRSQSADFDAQDTKMSRSGNRFLRYYLCEAAQMVRMHSPEYRDFYDRKYKEVRKHQHKRAIVLTARKLVRLVVRLLATNEPYRLRRVSSD

SEQ ID NO: 97793 - protein, 374 aa, unidentified
MADYSEVFVGIDTSKLRNAVAIAEGGRNGEVRYLGEIANTEAATSKLVKKLAAQHRRLTFCYEAGPTGYGLHRLIKTLGHECVVVAPSLIPKKPGDRVKTNRRDALNLAKLLRAGELTAVWVPDARHEAMRDLVRAREAAVDDLKSKRQQVLSLLLRLGRHFTGKRTWTRAHMNWLVSQKLAHREQRIAFEEMLLAVRQANERVIRLERAIAAAVPDWSLAEVVKALMAVRGLDLISATIFLAEIGDLSRFASPRQLMAYLGLVPGEESTGDRVWRGGITKAGNHRARRILVECSWSYRHPPRVGKKKLAKVEAAPPAVQEIAWKAQARLTARYRALVRRGKRPTLVVTAIARELSGFIWAVSRAVGAPAAPAM

SEQ ID NO: 97794 - protein, 319 aa, unidentified
MNTIGLDISQKTIDATLHKTDGSTCYIKVGNNRDGFQRLKDWIKANKVRKCVIGMEATGIYYEAAAENLSETHTVYVINPLKIKDYGKSQFNRTKTDKADSNLIAEYTKRHADKIIPYSKPKNRHLQKLINLKQQLKDHQKQIKNRLHSSDDEMIQAIHQDLIQAYQEKIDQTQTAIDAQIEKAETDGHYRNLQTIAGIGKETAAILYAQLTDKTFQTANQFVSYAGLSPQTEQSGTSVNKKGRLSRYGHRRVKRSLYMPALVAYRTGAFPQLVRNLTNAGKPKMVIIVAIMRKLAKLAYYIVKTGKPYDSTRHKAAQA

SEQ ID NO: 97795 - protein, 349 aa, unidentified
MSLYAGLISHIAVSSTFIVLKNKVMQTQTHYTGIDISKLFFDVAVLEAHGYRYYKLDNNEAGFSALLKILPEGSIVVMEASGPYYLPLACYLSAKGIAVSVINPLVIRRFCQMRMSRAKTDKKDARMIAEYGHAERPGLWQVPQEHVIALQQMETLLAGLHKEYTATSNQLESFTSSGMLDKRLEKLIKKELKHKQELIDQLTVEMEELAKKHYARMLADLESIPGMGRKTAMMLIVLSGGFSRFDDYRKLSSYIGLCPRIFESGTSVKGKARICKMGMSRIRAMLYLCSWSAKRCNKACRQLYERLIAKGKAKKLALIAVANKLLKQAFAIATSKTTYNENYIKNICF

SEQ ID NO: 97796 - protein, 338 aa, unidentified
MFYIGIDIAKHNHEVSIIDDNGKALGKSFSISNSQKGVDKFNTYLDSFNITSENCVIGMESTGHYWINLFSFLVNLKFNVFVINPIQSDAFRKMYIRKTKNDSKDSYIIAQIMRFGEYSSSNISDENIFALRQLSRYRTSLVDECSSWKRKIISILDQVFPEYSNLFSDTFGVTSKELLSKYPLPENMLELSTEELTNLLTKASKGRLGNEKAQEIKEFAKNSFGVSFAKQTFSFQIKQIINQISFIESQLKELDNEISNMLKELNSEITTITGIGDVLGACILSEIGDISRFEKASQLVAFAGLDVAVKQSGEFTGTEMRKKLNYLILMSYAHRFIV

SEQ ID NO: 97797 - protein, 412 aa, unidentified
MQDILTCAMGLDIHRDVIVACLAKGELGTDPEIEIRSFSTLIPEMRKLRDWVLEAECRYVAMESTGIYWQPIYEMLEPCFDGQISILVVNARHMKNVPGRKTDMRDAQWIATLLRAGLLKGSFIPDKTFRELRHLTRYRKSIVRDITAQKNRIDKFLQSSGFRFTAFLSDAFGASGRNIIRHLMEYGNISREALDRCLKTQTRKRIDEILIALNGSLSEHQRGFLRMIFGHLEVLEQHRHTVEDAITKEITKHEEALSLLCSIPGIDVTAAAAIIAEIGTDMSAFPDSQHICSWAGLSPGNNESAGKRKSAHINKGNPYLKSMLCEVGWVISGKRSLYLSGWYWRIKQRKGAKRATIALARKLLALIYTMLKTGSPYNEDCFEIRRKQSERKRASRMVNELQKLGYFVVAPG

SEQ ID NO: 97798 - protein, 483 aa, unidentified
MKSQQAQTRKKAGHQRTTLKPWSEMNRKQRREMQRKIQSEDLSLEVVHPDAAGVDIGNEVHYVAVPSNRSSEPVRCFGCTTAELKTMADWLKQCRIRTVAMQSTGVYWIAVYEILEAAGLEVYLVNARETKNLPGRKSDVQESQWLMKLHTYGLLRNSFRPPQEIRTLRTYWRQRNDLIRAAGRHIQRMQKALTQMNIQLANVLSDISGKSGQAIIQAILAGQRDPHELAALCDARVQASEEEVARSLEGNWQDDLLFVLQQEQEGYEFCQKQMAECDRHLQEYLQHRPDRSQGASLPQETRKGRLKKKRGNSPRFDLRADLFRMVGTDLAAIDSIDVMTAMTILSEAGSDMSKWKTENHFVSWLRLCPDNRISGDKIIGKGRLPTNNRVTLALKMAASGLRTSQTYLGAQFRRLRTKLGAPKAIKAMAAKLARLVYRTLRFGMPYIDKGIQFYEAQHRKLQIHHLKRNATRLGLKIVEATAA

SEQ ID NO: 97799 - protein, 364 aa, unidentified
MKTTLKTMYVGMDVHKESVSVAVLGPQGHQARPTLTIANEPRELRRLFTRLKREGEVRACYEAGSCGYEVQRLLASLGIACDVVAPSLIPVRVGDRVKTDRRDAEKLARLFRAGELTSIRVPSEAEESLRDLVRCREDVREDVTRERHRLLKFLLRHGHVFRDGKHWSLAHWAWLRKQHFEDPSAQSVLVEYLSRLESTLGRLKALDELLAAAAQREPYKTPVARLRCLRGIDTVSAVALVAEICDFKRFEHPRALMSFLGLVPSEHSSGGKRRNGSITKTGNAHARRILVEAAWHYRHPPRRSATIVARWSGQPREVIDHAWKAQERLHRRHYRLTCRGKPSQVATVAIARELCGFIWAVARI

SEQ ID NO: 97800 - protein, 341 aa, unidentified
MKVTTVGLDLAKQVFSVHGVDEHGKAVLRKRVSRGKLLELFVQLPPSLVGMEACSGAHHWARELQRLGHRVGMMAPRFVAPYRKSEKNDGNDAEAICEAVGRPSMRFVPTKSAEQQALLVLHRVRQGFTAERTATINQLRGLLAEFGIVLPKGRYQLRAHIEGVLEDAENGIPGLARRAFAELNAHIGDLDQKILAYDRELEALARASEAAQRLQQIPGIGPITATALVASVADAKAFKNGRQFAAWLGLVPRQYTTGGHVRLGRITKRGDVYLRTLLIHGTRAVLSSTKDKPDRLSRWAEAVRARRGTRKAAVALAAKNARIAWVLLARGGDYQRRLAAG

SEQ ID NO: 97801 - protein, 405 aa, unidentified
MVDIMVSDFRKGRYNLMKIYVGIDIAKLNHFAAAISSDGEIILEPFKFTNDADGFQLLVSKLESFDKNSIIIGLESTAHYGDNLVRYFVAEFYQVCVLNPIKTCQMRKNNIRKTKTDKVDTYVIAKTLMMQDDIRFVSFYDLDMMDFKALGRFRQKTIKQRTRLKIQLTTYVDQVFPEIQYFFKSGLHQNAVYALLKEAPSPKEIASMHMTHLANLLKVNSHGHFTKEQVKELRVLAQKSVGANDSAISIQITQTIQQIELLDSQLEKIEAKMTDIMKFNDSVIMTIPGIGYINGGMILGEIGDIHRFSNPNKLLAFAGLDPSVYQSGNFQAKTTRMSKRGSRVLRYALVNAAWNVVRNNATFKAYYDAKRAEGRSHYNALGHCAGKLVRVIWKMLTDKVEFNLE

SEQ ID NO: 97802 - protein, 410 aa, unidentified
MLFVGDDWAEAHHDIEIEDDQGRVLVRRRLPEGVAGLAALHALVGDHLPEGADPEQVLVGIETDRGPWVQALIAAGYTVYPINPLQAARYRERHGVSGAKSDPGDAHVLAEIVRLDRDHHRPAAGDSVLAEQVRLAARAHQSMIWMRQRAANTLRSLLRECYPAALEAFGDDLTGRDALAVLSAAPDPATGRRLTPYRVAVLLRKAGRQRNLDKQAEQIVAALRSEQLPVRVELASVHAASVSALVAVLATMVAQTGVLEEQVRLGFGQHPDATIYLSQPGLGTILGARVLAEMGDDPTRYADARARKNYAGMAPITRASGTKRVVLARYTRNRRLADALYQQAFSALNASPGARACYDRHRAVGATHHQALRTLANRLVGILHGCLRHHQPYNETTAWANQTAPTTIAA

SEQ ID NO: 97803 - protein, 364 aa, unidentified
MNATTKSTRTAASAVMLAIDLAKDVYELAFADAAGQIVERKRLKRGPFAKCLENRTALRIVMEACGSAHAWARRFARLGHDVTLLPAQHVRPYVRRNKTDRADAAGLLEAARCGDIRPVPVKTPEQQGTQGLHRIREHHKAQRTAAINTVRGLLREFGIAIPGGADKVRPATLAALEDGDNDIPMALRHALAALLDQITDQAEAMDAIEIQLADFARRDTRCQRLMAASGVGLITATAMSAGIGDFARFPSGRHFASALGLTPREYSSGGTRKLGRITKQGDVYLRTLLIHGARSALVVAATAKKRDQPLDRTQQWALALAERKGHNKAAVALANKVARRLWAAEHHGTSFDPEHVSRREACAA

SEQ ID NO: 97804 - protein, 274 aa, unidentified
MTTYIGIDVSKDSLSVAMPKPTSGWKVSDHANSPDGIRSLINQLPDQAHCILEATGSYSVLVTYMLTQAKVTISVINPKQSHHFAKMHLSVTKTDPRDAVLLAEYGRVIQPSVYQMSSDSLLLLRQKRTLLRQYQKQRVALFNLRESFQPLPFQDATVQQSLQQMIAHFQAAIAQLKAEINQVCQQDFADQYKRLTSIKGISHQVATALIETTNGFRDFTSAKALAKFIGVAPIIYQSGKVGITRGINRSGGPALWGCSSKRPIIHGQLISHSL

SEQ ID NO: 97805 - protein, 431 aa, unidentified
MNSSLNNDSTQNIYAAFIAIDWADQKHTFSLQVAGQAKKETGTLEQKPEIIGPWVAKLRERFGGRPVAVAVEQSRGALIHALLAYDFLVLYPIHPTTVAKFREAFKFSGAKSDPLDTDQILEILTKHLELLKPLNPDTPETRLLGRLVADRRKTVDLRTSHIQALLASLKEYFPQAIELVSGNLTSRLAGDLLKKWPTLESFQQAKPSAIKRFYYGHNVRSPEVIETALNLAISAQPLTTDSAIIESSRRVSETHSQMIQALNPVIDAYDQRIEKVFHDHPEFPLFSQLPGAGPVMAPRLLAFFGTDRSRYAEAENAQTFCGISPVTKSSGKTRVVYFRRACPKFQRQSFHEFARLSVAKCQWARNYVDYYTGKGKKHNTIVRALAFKWIRILFRCWKDRKPYDDNKYMEILKKRGSIFATLHLEQKNENC

SEQ ID NO: 97806 - protein, 435 aa, unidentified
MIRYVGIDLHKHLIVGHIVDAAGKTVATFRYESVDAATLDHIGRKRLTKDDHVVLEATTHCWAVVRALEPFAARVAVSNPMATKAIAKAKVKTDKVDAAVLAHLLRLSYLPEVWQPDHATRDLREWTARRSRIVGQRTAVINRLRSTLAQRLLDCPYGMTTRAARKWIAGQILDDDTRWLLESDLRLMDSLQAELDAMEKLLAKRGYVDPRVKLLMTLPGVSQHTAQSLLAAIGDINRFRNADVLASYLGLVPITRQSASHCYQGPITKQGRSHTRSLLIQSAQAVRTHPGPLGHFFRRLQKRKPHNVAVVAVAHKLVLLAWHLLTKGEPYRYALPQATQKKLGNLRLQATGEKRRPGLPPGTKKSPARIPGGSKRIKPLPEVYANEQVPPAAPAPAGELRHLAESKLNDFADGLQQAHIVPLRRIQKEDTDESQ

SEQ ID NO: 97807 - protein, 370 aa, unidentified
MKSIIYVGMDVHKASFTLSCFSVTTQETFATVKISPDAKAIKKYLDGVSLSRSEECEFVCGYEAGCLGYTLYHQLTAMNIRCVIMAPTTILRNSKRVKTDRIDAENLARCLAYGGYKSVYIPTAQDEAVRDYLRMRDDHKLMLKKIKQQINAFCLKHNKIYPGNKSKWTQAHVKWLNALEFDGYLQDAFNEYMITYRELADKVERLESQIEQLAELEEYRDKVKKLICIKGIKTLTALSLIVETGDFSRFQSAERYASYIGLVPGEHSSSEDQNRLGITKAGNRHMRMLLTEAAQCYSRGVPAMKSKALKSRQKGASPEVIAYADKASIRLRRKYIRMELVNKKKANVAKTAVARELACFIWGMMTNNIA

SEQ ID NO: 97808 - protein, 371 aa, unidentified
MKSIIYIGMDVHKKTYSLCALLKETGEIIGETKIPADVSLIIKFIENAKKSVDSDDVQIKTGYEAGCLGYSLYWQLAAKGIECDILAPSTMHRSAKNKVVKNDRRDAKNIAANLANGTYKSVYVPTGEDVEIKEYIRMMHDFKIELKKVKQHINAFLLRFGHHYPGKSKWIPAHIKWLKELELSDMYREILDEYLSQLEILSEKIERFKHRLEELSQKETYNEKIGQLRCIKGIDTTAAMTMHAETSDFDRFPTANAFASYCGLTPGEDSSGESYHRLGITKQGNSMIRTTMVEAAQVLVRGTIGKKGKKVKSKQKDQDVKVIDYADKAVVRLQKKYHRMIFRGVKRNIAITAVARELACFVWGIETGHIS

SEQ ID NO: 97809 - protein, 346 aa, unidentified
MNQIIRIGMDTSKHIFQLHGVDAAEQAVLRKRLRRKEVLAFFAKLPPTVIGMEACGAAHYWGRELRKLGHEVKLMAPQHVKAYVKRNKNDGRDAEGLCEAMSRPTMQFVPGKTEEQQAALMLAGVRQQLIARRTQLSNAIRGYAAEFGVTAAKGLDKIEPLLARIAQDESLPALARELFAIEGREYTQVQAELKAIEAKLMAWHRANAASRRLAQIPGVGPIGATALVMKTPDPCAFPSGRHFAAWLGLTPKDHSTAGKTRLGKITRAGDEVLRSLLVAGATAVIQQVRRGRGRPSPWLVALLKRKPPKLAAVALANKIARIAWKLMTTGESYDGARMPGASALAA

SEQ ID NO: 97810 - protein, 344 aa, unidentified
MEQIIRIGMDTSKSVFQLHGVNAAEQPVLRKKFSRKEMMKFFEKSAPTTIALESCGGAHHWARLLSSFGHEVKLIAPQLAKPYVKRGKNDAADAEALCEAMSRPTMRFVPVKSADQQAALMLVGVRERLIRNRTQLANAIRGFAMEFGIVAATGMCRIEPLLERIAADQSLPELARELFAMHGVEYRDLLAETKAVEEKLTALHRSDECSRRLGEIPGVGPVGASLLLMKTPDPKMFKSGRDFAAWIGLTPKDHSTAGKVRLGVITRAGDEMLRSVLVVGATALLQHIRAGRSRHPSRWLIELLQRKKPKLVAVALANKIARIAWKLMVSGETYRRKEGLTQAA

SEQ ID NO: 97811 - protein, 431 aa, unidentified
MEKIREKAAGIDIGAQKVFVAVEGQEVKSFYTFTEDFEKLCEYLLKYGIETVAMEATGVYWNILYEMLEETGIDVWLVDGRQTKQVPGRKTDVKDCQWIQQLHSYGLLKRCFVAEADIKELRIYQRLREDHIRSASMHINHMQKALTEMNIRLKEVLSQVHGASGLAIIKAILNGERDKDALLKLCHQSVIKTKKEEILKALNGRYTKSGLFALKQAFDSYCFYQQQIEQCDQMLQETLKRISGGKEQKGKSRRKPIRHNKPDIDNLGGMMMKIFDGKDATTLSGITDYSWMQLLSETGTDLSRWPTEQHYTSWLGLAPCKDTSGKMKRRKRKMGRPKAGQIFRQIAHSLLNSKRIALGAFGRRLNARKGPYIAIKAVARKLAETYWRIMVKGMEYVELGVKKYEEQILQQKQRSLQRLAKELKVQIIYNE

SEQ ID NO: 97812 - protein, 348 aa, unidentified
MRLATVNTKYYCGIDLHAKTTFVCIMNKPGKVLVHEEIESRFSEVYHLLKPYLPSMSVACECTFNWYWLADGCHKKAIDFYLGHALYMKSIHGTKKKNDKLDSKKIAHLLRSNLLPVAYAYPQEMRTTRDLLRRRHKLVALRSGLFRHLRIFAYAHGIEDFPDRVVAQKKRRHELTSLMKSRDAALTVEIDADLIEYVDKQLPKLEYHILKRAKHHDYHSLVLLQSIKGLGDILALTILYEMHTVERFQTAQRFSSYARVVKLDWESAHKKGVSRNQKIGNPYLRWAFGELVVTAMRCYPEIVEYREKLLKRFSPSKTMTVLAHKFAVAVYYMLKNKEAFDLNKFLGA

SEQ ID NO: 97813 - protein, 429 aa, unidentified
MRWVFSESQDDEQIIERVAALDIGKAEVVCCVRLPAPGPGKRRVQEVTTHTTMVRSLSELANRLVELGVERVVMEATSDYWRPPFYLFEAHGLQPWLVNAKDVKHLPGRPKTDVLDAVWLCKVAERQMLRPSFVPPRDIRRLRDLTRYRVDLVGVRNAEKNRVEKLLEDACIKLSVVASDIFGVSGRAMMAALIAGERDPKVLAEMARSRMRVKIAQLEEAFAGLPTGTFDDHHRFLLARMLSRVDQADADIDALDTEIEAHLAPFGDAAARLDEIPGIGPVAAAIIIAEIGVDMTRFPTPGHLCSWAKFAPGIKSSAGKNKGNGSTGHGNRYLARVLGEAAVAASRTDTFLGARYRRIARRRGKKKAIVAVGRSLLVAIWHVLSDPETRFVDLGADHFDRHIDTATKKRNHIRQLEALGYRVTVEPAA

SEQ ID NO: 97814 - protein, 341 aa, unidentified
MDNHTRIAVDVAKAVFEIVVSQQPGKVHERARVPRHKFLAFFVQRPAATVVMEACGSAHHWGRQLQRLGHQVVLLPAHQVRPYVLRNKTDRTDAKGLLEAFRNDDSHRVPVKSVEQQTLHRLRSAWLAERTAKINTLRGRLRELGFVIPGGAHHVVPRAWGLIEDADSGLPEVLREPFAEVCRELRTLEERIKDIEHQLAALAEQLPVVERLRSIPGVGLLTATAVVALTADIHRFPSGRHFASYLGLTPRERSSGSKRRLGAISKRGAVYLRMLLIHGARATLWHAKCLKEPDRLRAWALRLERSIGHNKAAVALANKLARIIWAVWKYDRRVESAAQAA

SEQ ID NO: 97815 - protein, 327 aa, unidentified
MNKQAIGIDVSKDKLDIAHLRSDKYKQAVFPNNETGLKRLSQWLNKQKAAGVHVCIEATGRYGEKVAHTLHEQGYPVSIVNPARIKSYGDSQLKRNKTDRQDAKLIAHFCATQTPTLWTPPPPEAQELQALTRRLETLKQDRTRELNRKQSGLTSQAVLQDIETHIDFLNQQIKVIQKQIDDLIDNHPHLRQQRDLLTSIPGIGQSTAAHLLAEVPDVGRFDSASQLAAYAGLTPRLHQSGSSIYRPGRLVKTGNIRLRTALFMPALAAMRFNPVIQALVKRLELRGKSRMTIVGAVMRKLVHLAFGVLKHQQPFDPHYAVNRQASP

SEQ ID NO: 97816 - protein, 372 aa, unidentified
MSKIIRIGMDTSKSVFQLHGVDAAEQPVLRKKLRRSHVLTFFGKLEPTLIGLEACGGAHYWARELIALGHEAILLPPQYVKPYVKRNKNDAADAEAICEAMGRPTMRFVPVKTAEQQAALMLEGMRDSLIRRRTQLCNMIRGYAAEFGLAAAKGLDKMEPLLARIASEQTLPALAKELFATHRKEYERLKVEIAKIEAKLLTWHKDNELSRRLVKIPGIGPIGASLMAMKVVDPGAFRSGRDFSAWIGLTPKDHSTAGKKRLGVITRAGDERLRSVLVAGATAVIKLARHGKGQVSPWAIALLKRKPPKLAAVALASKNARVAWKLMVSGEHYNPARYGAVAEGVPGEGLGAALARATRRAPRLTCAAGLGR

SEQ ID NO: 97817 - protein, 328 aa, unidentified
MDLFIGIDVSKATLDVAGCTADGPLAELCSTIANTEAGLATLVPLLVGRAPALVVLEATGGYERLAAATLALAGLPVVVVNPRQVREFAKAVGQLAKTDQLDAALLALFAERIRPAVRERPQLETGPLSEQILRRRQLVDMITAENNRRALVSPTVRRRVDRHITWLERELEHVERDLQHLIEASPLWRARDDLLQSAPGIGPRVAHSLIALLPELGTLNRQHISALVGVAPFNDDSGGRRGVRHIKGGRAAVRTVLYMGALAGVRYNPVLKAFYQRLRAAGKPAKVALVACMRKLLTILNTMVRTNTRWRTDAPLPSRPAALVASPT

SEQ ID NO: 97818 - protein, 394 aa, unidentified
MITSGIDIGKNSHVISVIDQDTGVPLVKPTSFTNNFEGFKKLDKILEPYSEKNLRVGMEDTGHYHFNLLHHLLKEGYSTYLINPSKTDAERKLTGNITKNDQQDSMQIADILAYPARKKLYRKVDMTFFSMDEQKSLTRLHADLTEQLCPIGNKIQKSLDILFPEYNSLFGGHYGKTYMKILMTFKSAANIAEADITDIKEAMKHNGRGRGVSFTAEDLQALARNSVAQANKGEEYALEARLDQYTVVAEQLEKVDKKIEELSKETNSPMLTIPGISHLSCTTILAEIRCIGNFNSAAKLTKFAGVAPKHYESSQFDAKHCSISKKGNKYLRKILYQIITPVINNNKVFKDYYDKKISEGKSHRCAQGHCVRKLLRIIFHILATGEGFDPDKLK

SEQ ID NO: 97819 - protein, 353 aa, unidentified
MRTNPTKTAANISTIGIDIGKTTFHLIGLDERGAIVLQQKLSRSQLERRLVNVPRCLVGMEACSGAHHIGRQLEALGHDVRLIPAQYVKPFLKGHKNDYRDAEAIAEAVQRPTMHFVRIKTPEQMDLLALHKVRSRLVRQRTATINQIRGFLIERGITVRQRPVPLRKALLDILASDAAEISPCILRLLEDIAADWRRLDERIEAVSAEIEALTEEDDSCQRLMTVPGIGPIISSAVVAAIGNGSGFKQGRDFGAWLGLVPRQESTGNRTILGKISKRGNRYVRTLFVQAAHVILVKRPHAAMQGLMPWIDKALKRMHRNLVAIALANKLARIAWAVLARGRTYQPRSLAHAV

SEQ ID NO: 97820 - protein, 339 aa, unidentified
MQKKLFIGVDFSKNKLDVTAMYGIEQKSFLQETFENEEKGYKSLLRWLSRGAKIKREDWQFCGEHTGLYSRGLSNFLFKKKLDMWLENPLQIKRSWGIKRIKNDRIDSLEIARYAMRFADRVVSYKPESKEIASLRLLFSYRNRLVKTRVALEVAAKEMRRVIWRDATSRFIFEDSHGEAERIKKRITALETKMHQLIMDSELRRSYLLVCSIKGVGMITAVALIIHTSNFASFESARQLACYCGCAPFANQSGMMDKGAHISSLANRELKVLLTQCARCAASHNAELRAYYRRKKAEGKKDSVVINNIRNKLVHRIFAVIKSGIPYSENYLYPLTEAA

SEQ ID NO: 97821 - protein, 350 aa, unidentified
MKIVGCDFHPQWQQVAVVDTETGEFEEHKLINANGEAERFYRKLASPARIGIEACGNCEWFLHLMEKMGHQILVGDAAQIRASYVRKQKTDRRDASHILRLLIEDRFPVLWRPSASERNLRQLLIHRHKLVEIRTRVKNGLQHLAMNQGFQKKSGLWSKKGKSFLQELDLEGWSSERRKDLLHLLETLDRQIEVLDTAVEQQAREHARARLLMTQPGVGPITALAFAVTIGDVNRFQTSGQVASYLGLIPSEHSSGGKQKLGAITRQGNRFLRQLLVEAAQTTCRLDEGFRRQYQARCHHKAKAVAKVAAARRLAVRLYWMLRLKVGYPEIVHNESSSGVPLTASTRSRY

SEQ ID NO: 97822 - protein, 356 aa, unidentified
MNDIKYIGMDVHQGSIVIAVLDTSGKLVMESIIETRGETILQFIRGLRGTLHVTFEEGVSADWLHELLVPYVARVLVCDPRKNALLKSGNKNDRIDAHKLAGLLRAGLLTAVYHGESRGRLLKELARSYRALTKDTTRVMNRLKSLYHSQAIRCGGTQVYTQRHRQRWLEQLQETGARRRAERLYQQLDLLQPLRRQARQELVTEACKSVAATRLRGIPFLGPVRVAVLLAIVETPFRFRTKRQFWSYVGLAIETRISGEYQMAGGRVQRTRKRVALRGLNPNHNCELKRLFKSMAVEASTRLGPWHDWFTAKVNQGLRPEMVRLTLARKLAAITLAVWKKGRKYDDGEPLKSQAA

SEQ ID NO: 97823 - protein, 386 aa, unidentified
MQKLNDLSRSLTRLDPDGTLIAVIEMSQSSWLVAGIVPGVERQPLKKLAVDESALLNLLNRWREEAEKAGRKIERIAVAFEAGRDGFWLARWLRARGIEAYVIHASSVAVSREHRRAKTDRLDTELLKRAFLGWLRGERDHCKMVAIPTTKDEDAKRPNRERESLVGEQTRIVNRMKAALIRLGIRGFNPKLKKAAGRLEDLRTPEGEPIPPNTLAELRRDMERRRLVSDQIRQIEDARLERIEQAPGDGPHAMVRLLARVIGVGIETADMLVQEVLARNMRDRRAVARYAGLTGSPDESGTKRREKGLARSGNARVRRGMIQLAWRFLMFQKESALAQWFRARTENARGTRKLMIVALARKLLIALWRLVREGVVPDGVVLRPAQ

SEQ ID NO: 97824 - protein, 354 aa, unidentified
MEKENSSVSVYKDKNIFVGIDVHKKRWVVSIRSYDLELKTFSMEASAEELEKILIRNYKDALFHIVYECCFSGFWIYDHFHERGYDIIVTPTNRIYRDGSIVKTDKIDSRKLAFQHSRGLLREVKVPTMKIREYRSLFRIYDKEKMREGQILRQIRCILECKNHELKWERWNKEFIEKLKLVRFQEEIFNRKFEVLIKEYEFVKEQIRDTEKRIKEIGEEAELSERIKRIEQINGIGIISAVRLVVYLFDRKDRFESGEKVAHYVGLTPGEHSSGEEIVRSRTGLIGSRQLRAIIMQLAWVAVRKDGSLLDKFERVYRNTGCKQKAIVAVARKLMMKVHAITVKEEAYEINKAA

SEQ ID NO: 97825 - protein, 345 aa, unidentified
MHYVGLDVHAKRSSLCILDPCGKVVKRMEVRGSWPKLLEQVTSQVPRPFSVCFEASCGYGYLHEKLSALSERVAVAHPGKLRLIFRSKRKNDRVDAEKQAKLLYLDQVPQVHVPAADVRAWRGLIELRRRLVGRRTAAKSQLRALLRGAGACDAPSGKALWSRKGLKWLGAVGLCEADALRRDLLLEELAQADERVRRVTAELDRRADAHPGVALLRTVPGVGPRTAEAFVAYVDDVRRFARNKQVGCYLGLVPCQDSSAGRDRLGHITGDGPASVRMLLCEAAWQAVRRSPSMKSFFERVTHGEPGRRKIALVAAAHKLARSMAAMLRTGEAWREDEQEQEPVA

SEQ ID NO: 97826 - protein, 387 aa, unidentified
MSRNARVPVPVTMLDQDSTLVVVLELSARSWLVGARVPGIGRMSRYALAPSAEALAAWLGTAKARAGVTGRTVVRVVLAYEAGRDGFWLARYLEARGVEVYVIQPSSVLVDRRARRAKTDALDVEMLMRTLLAWLRGELGVCSMVPIPDVAEEDGRRPVRERQGLIGERLALLNEIDGLLATFGITGYRPLRRDRRAQLAALRTPEGDPLATNAAARIGRILARLELVMQQIAELEQARDAVLAKEAASGEAETMIRGLARLKGIGAELATVLVWEAYVRSFPNRKALGAYAGLTGTPFASGSTTREQGISKAGNRRLRSSLVELAWLWLRYQPDSKLAAWFRGRTGSAGSRMRKVMIVALARKLLVALWRFCRDGVLPEGAALKAT

SEQ ID NO: 97827 - protein, 348 aa, unidentified
MGLYAGIDLHSKSNHLAIIDENRKRVLKKKLANDPDLILGVLAPYQGEIAGIVVESTYNWYWLVDLLQENGYRVHLANPAAIQKYSGQKHVDDTHDAFWLAELLQLHILPEGYIYPKETRALRDLLRKRQQLVRVRTSLILSLQNIVTRNFGIKLSASDLKILTEDRVQPYLQENEDLLLAGSANKSCIDSLTLQIVRIEKAVEKKLKLLPPYIQLLTLPGVGRTLAMTIMLETGPISRFDKVGRYASYCRKVSSKWTSNEKVKGHGNKKNGNRYLAWAFSEAAEHARRHHAGSRNFYQRKLRQKKNMMVAHNALAHKLARAAYWILRDNVPFQEAKMFGQAEAALDN

SEQ ID NO: 97828 - protein, 375 aa, unidentified
MSKHSEAFVALDTSKLRNAVAIADGGRAGEVRFLGEIENSTAATAKLIRKLEAKYERITFCYEAGPTGYELHRQIKALGHECVVVAPSLIPKKRGDRVKTNRRDAVNLAKLLRAGELTAVWVPDRRHEAMRDLTRARETAVIDLRSKRQQVSAFLLRQGRWYPAGKKTWTNAHMNWLASQKFEQPERRIVFEEMMFAIRQGQERVQRLEPAIRAAVPDWSLAKVVTALMALRGIDLISATGLLAELGDLSRFQTAPELMGYLGMGSSESSTGDTIKRGPITKSGNRRARRTLVECAWSYQHPPRVGIAKQQKVAAAPPKVREIAWKAQCRLNRRYRALIRRGKLKTVAITAVARELAGFVWAIAREAGSAEPAAK

SEQ ID NO: 97829 - protein, 355 aa, unidentified
MNQEKYIGMDVHDATISAAVKNAQGKLLMECVLETKAATILEFIQGLRGTLALTFEEGILAAWLHDLLKPHVSRLVVCDPRKNALMRDGNQNDRADARNLAELLRTNQVKAVYHGKHGTRALKELGRSYLTLTKDSTRVMNRIKSVYRSWAIPCGGTSVYSRRHRAEWLAKLVEPAVRIRAEHLYQQLDSLEPVRQAARGELLRESRKHAAVNLLRQIPSIGPIRSALLVAILQTPHRFRTKRQLWAYGGFAVQTYDSGEYRMVRGKLQRNRERITVRGLNRNHNHDLKNLLKGAAISAIERPGPLQDFYAALVEKGMRTSMARLTLARKIAAIILTMWKKGVSFDPKQLQRQAA

SEQ ID NO: 97830 - protein, 314 aa, unidentified
MTNANRASGVNIGVDVGKFQLDIFILERDRHFTVTNDQQGIRKALTIIQRYTVSRIVLEATGRYEMAFATAAFEKALPVCIVRPVLVRQFARAADQRAKTDRIDAQIIARFGAVMAPRPSRAKSKNLLLIKDLVTRRKQLIGMRTQELNRQKMLEGPVARSCGRVIRSLNKDIEWTEERLAKMVEQEATWAEKRKLLGTVPGVGDTLIFTLLSELPELGELNQKEIASLAGLAPINRDSGRFRGKRRIQGGRSNVRTTLYMATLSATRCNPVIGGFYRHLVKQGKHKKVALTAAMRKFLVILNAMMRDNVAWAY

SEQ ID NO: 97831 - protein, 375 aa, unidentified
MDQLSKIHVGLDVHKDSISIGVAEPGRGAGRVVGKIAHDVGKLTKLLSRIGPPGQLHLVYEAGPTGYGLQRSLAARDYSCEVIAPAQMPRRAGDRIKTDGRDCVQLAECSRAGQLRAVWIPDPADEAIRDLSRAREDAVNSRTQARHQLKGFLLRHGLRFAGKTSWTKAYHAWLGSLSFDAQPAQTAFTEYWLAVQALDARVQRLTQALRDSISGWRFEPVVKALQALRGVDLVTAVGLIAEIGDLRRFEHPRKLMGYLGLVPSEASSGERVRRGSITKTGNAHARRLLTEAAWHYRFKARIGSHAQRRQQDLSQRVREIGWNGQLRLNKRFALLQARGVQVNKACVAVARELAGFVWAIGRQSMIESADWPHAR

SEQ ID NO: 97832 - protein, 370 aa, unidentified
MKKSTKKKSEQLSEKTMKDGVAAIGIDLSDRTGRFYAVDDEAKKIADGTIALRTPELEKWALSIAPTVIAIEAGTHSPWVSRLLTRCGHEVIVANPVKVALITKNVQKSDPVDAEFLARLARVDRGLLFPIQHRAEQAQIDLQVIRTRDMAVKVRSTLITHVRGAVKSFGGRLSKCSTEAFVNTTRKEVPEALKTALDPVFGQIDQLTKTINRYEREVLKLVEERYPEVERVAQIKGVGALTGLAFVLVLEDARRFASSRSVGAFLGLTSKKDQSGASDPQRGITKAGNRLLRRLLVQSAHYIQGPFGVDSDLRRHGEKIAARGGKRAKKRATIAVARKLSVLMHRLWTSGEPYEPLRNSFNTAEVTKAA

SEQ ID NO: 97833 - protein, 322 aa, unidentified
MSVFLGLDVAKSKVDAALLLENDKFKTKVFANTSQGFAALRDWLALHDAAQAPACMEATGAYHETLATYLFDAGHKVSIINPQRIKSFGASQGIRTKNDQIDARLIARFCKVMQPQPWQPEPLKIRELRALGRRRDALIEMRIQESNRTGLNIPSVEESIKSMLVSIDHEIEEIERKIAEHIDQHPDLKKQRDLLQSIPGIGAVCAEAIISETGNFARFTRAKEVVAFLGLSPQERSSGSSVHGKAHISKKGNRRLRSLMYMPSIIAKRCNPLVHALALRLEEKGKPAKVIICACMKKLMQIAFGVLKHTQPFNPNYAQNCA

SEQ ID NO: 97834 - protein, 359 aa, unidentified
MMVLGIDPHKKSHTVVAVVAATGELAGELTVPATERGHECLLAWARALTPERRFALEDCRHVSGRLERFLITHGEACVRVSPKLMAGTRRSARRRGKSDAIDAAAVARAALREPDLPSARLAGPERELKLLADHRDDLVGERTRIQSRLRWHLHDLALTLEVPPKALRSACWLARLEDELAGLEGVQARLARELTARCRALSAEIGALEREIERLTAALAPELIALPGCGALTAASLVGQTAGAARFASAARFAMHAGVAPLPASSGQVERHRLNRRGNRQLNCALHRIAVTQIRSHEPAKLFLARKRAEGKSTREALRCLKRHLARTVWLALQAAEARREAMLGDTTTSTSPALTLAS

SEQ ID NO: 97835 - protein, 448 aa, unidentified
MVRRGKPAGLPIINPRAGAIDIGSRFHVVAVPPDVTDEPVQTFQAFTGDLQRMAQWLKSIDVTTVAMESTGVYWVPVYEVLESAGIEVVVANARDARSVPGRKSDVNDAQWLQRLHACGLLRPSFRPDREIAALRAYLRLRERHLDYAAAHIQHVQKALTFMNLQLHHVVTDVSGVTGMKIVRAIVAGERDAKALAAMRDVRCKATAETIEGALQGNYQPEHVFALKQALELHDFYQRQVEQCDVQIEAALTRLKANKGTPSEPLPAPRHKTKAPNAVAFDVRPSLYQIAGTDLTQIHGIGPYLALRLVSECGTDLSRWPTVKHFTSWLSLSPGCKISGGKVLSSRTRKTANPMAAHLRLAAVTVGRTSTALGAFYRRLAARIGKAKAVTATARKIAVLFYNTMRFGIDYRDPGADYYETAYRERVVKQLHRRAATFGFRLETIEGVS

SEQ ID NO: 97836 - protein, 339 aa, unidentified
MTELKLIAIDTSKHIFTLHGVNERGDPVLRRELRRAQLEPFFRKLAPTDIVLEACGGSHHWGRMLTALGHQVRLIPAQYVKPFVKRGKNDRIDAAAICEAALRPSMHVVPVKPLEAQAAAMVLTVRETLVKQRTQLINTIRGHAGEYGVIAAKGTAHITALLERIAADPAIPAAAQAMFVVLGRQLDSVSEEIATLDRRLAAQHRADPVSRQLAEVPGVGPLGALTLSLTVDAAQFRSGRHFAAWLGLTPKQNSTGGKPRLGGISRQGNERLRQLLVLGATAVIRQARPGSRLASAWLMGLLQRRPKKLVAVALANKMARVVWAMMTRGEAYRPTAAAA

SEQ ID NO: 97837 - protein, 449 aa, unidentified
MMEPQEIEDGEYEQILERVAAVDVAKASGMVCTRVPREDQPGKRRTRVWQVDAATSAILELADHLVGEGIGKVTLESTSGYWRIWFYLLESAGLSVQLVRAQDVKQAPGRPKSDKLDAVWLAKLTERGMLRPSFVPPVEIRQLRDYTRLRTDLTRERTRHYCRLEKLLEDALIKVSAVASKLDTLSVRDMLEALIGGERDPQVLAGLARGRMRAKHDRLVQALTGKFDDHHAELARMLLDQVDALSAQIGKLTARIEELIAAIPAAQGVDADGTTGPTAGLGARAPVLPAVDRLDEVTGIGREAAQAIVAEAGLHMSVFPTPAHLVSWAKISPRTVQSGARSRAGRTGKGNPYLKGILGEAAAAAGKTDTFLGERYRRLARRRGKLKALVAVARSILVIVWHLLADRTTRYHDLGTGYYTSRIDKNRKTRNHIRQLEALGYTVTLAQAA

SEQ ID NO: 97838 - protein, 343 aa, unidentified
MEYYAGIDVSLESSSLCVVDATGRIVREAKVASEPEILITWFQSLGFALSRIGLEAGPMSQWLYAAMKQAGLAVELLETRHVRNAFKIMPVKTDRKDARGIAQLMRLGWFRPVHCKSLPAQETRSLLGARKLLQGKLHDIELSLRGTLRGFGLKIGKTTPKTFEGRVRTLIADHPTLTTIAEALLRARAVLLDEFLNLDKKVHTLARHDPRARLLTTAPGVGSMVALTYAAAIDDPARFKSSKTVGALFGLTPKRYQSGETDVTGRISKIGDAAVRTALYEAANIILERPVKGGWLKAWALGVAKRAGMRKAKVALARKLAVVLHRMLVDGTPFNMEKAAAKA

SEQ ID NO: 97839 - protein, 342 aa, unidentified
MKFYNNTHPYYCGIDLHARSLYVCIIDQAGETCVHKEISANPDKLAKLLEPYLGQVVVGVECMHCWYWVADFCDDLGTDFILGHALYMKAIHGGKAKNDRIDSYKIAKLIKGGNFPVAYVYPKEMRATRDLLRRRMKIVRHGADLKAHVANTTSQYNLPPSKVNLKNKSAREHIRSAFPDPVVQRNMDLNMTILECYAKERSKLEWFIETQARQHNPVHLHLLHSVYGIGRILALTIIYEIGDMSRFESVQNFASYSRLVKCKAESAGKSYGTQGNKIGNAHLKWAFSEAAVLYWRGNEKAQKYLQRLQKRMSKAKALSALAHKLGRCVYFMLKNETEPPPV

SEQ ID NO: 97840 - protein, 428 aa, unidentified
MNYNTQNAKIASITEKTLIVGIDVGSETHYARAFDWRNYEYTKKPLEFSNTEAGFQTFKAWMEDMAEKHGKTAVIPGMEPTGHYWFALGKFLQDNGMKPVHVNPHHVKKSKELDDNNPNKNDRKDPKTIAALVNEGRFSYPYMPVGIYAEIRSLSNLRFQTQEELTRIKNRLARWFAIYFPEYKDVYGDYKAVSGRMVLKEAPLPEDIRKLGVEGVNRIWRDAKLRGAGMKRAKTLVTAAEHSVGSKEAPEAARMELKNLLDDMDVYTARQEGLLRNIEEKLKEIPYIDNLLAIKGIGMVTVSGFIAEVGDIGRFDNPKQLQKLAGYAIVANDSGKHNGESRISYRGRKRLRYVLYEAAISLVGKNAEFREIHEYYRTRKENPLKKMQSVVAVACKILRIFYAILTKGVEYDPKKLLGDIKRPQVQAA

SEQ ID NO: 97841 - protein, 346 aa, unidentified
MQNDTLVAVDIAKEVFEVGISDRPGRVARRRRLARHEFLEFFAQLQQAPVVMEACGSAHFWARRIEELGHVVVLLPPQYVRPYVVRNKTDRTDVNGLLEAFRNEQIRPVPIKTVTQQVFGTLHRLRSGWLADRTRAINSLRGLLRELGFFIPDGRKHVLPDAWEIIQDPKRGLPDALKPSLSSLCQEILSHSTRIEEVEAQLEALAKQVPVVARLRSVPGIGLLTATALYAFIGDAARFPSGRHMASFLGLTPREYSSGLRRRLGRISKRGDTYLRMLLIHGARSILWHAKRMKNRDRLRAWALRLERKLGHNKAAVALANKLVRITWAVWKHDRSFESVPDLQAA

SEQ ID NO: 97842 - protein, 469 aa, unidentified
MEECPVKTAGRMRKRVCTSRPLLERVCPDAAGIDCGSAEHYVAVPRDRDPEPVRCFSTFTEDLHRLADWLVACRIKTVAMEATGVYWIPIYEILEARGLVVFLVNARHVKNVPGRKSDVSDCEWLQELHSVGLLKGSFRPAAEIAALRSYVRHRETLVQSAATTVNRMQKALVEMNLHLRVVISDIAGVTGLRIIRDIVKGQTDPRELAKHRDPRCKASEDEIAAALTGHYRPEQLFVLSQNLDLFDAYQRQIEACDGRIEAHLAGLVQRAALPATPLPAARSRRRARANEPNPDVRALLHRLTGIDLSQIDGIGISHALSLVSEIGTDMSRWPSPDHFASWLSLAPDNRVSGGRLLSSRTPTSANRAAVVLRLAAVSAGKTETALGAFYRRLAFRIGKAKAITATARKLAILVYRSLKGDIVYQDPGAAAYDIRHRRSVLRRLRQRASALGFTLLNTQTGEILEAGVS

SEQ ID NO: 97843 - protein, 276 aa, unidentified
MRFDTHPHPFYCGIDLHARSMYVCILSHDGDIVLHRNMKAAPEAFLKALAPYRQGRVVAVECIFTWYWLADLCAQEGIPFVLGHALYRKAIHGGKAKHDKIDSQKIAALLRGGILPQAYVYPAERRVTRDLLRRRTHLMRQRAELLAHVQNTNSQYNLPEIGKKIAYKANREGVAERFDDAAVQKTIEVDLALITYDDELLKDLELYILNTAKQHDAHTLYLLQTVPGIGKILSLVLLYEIHDIRRFPSVQNFASYSPLVKCSKESGGKRLGTSGS

SEQ ID NO: 97844 - protein, 382 aa, unidentified
MRFYTQQHPFYCGIDLHARTMYLCILDQAGETLLHRNMPATPEALLKAIAPYREQIVLAAECLFTWYWLADLCADHGIPFVLGHALSMKAIHGGKAKNDKIDAHKIAVLLRGGMLPQASVSPAEMRATRDLLRRRMHLARKRGELLAHVQNTNSQYNLPAIGKKIAYKANRDGVAERFADPAVQKSIEVDLALSTYYDELLRDVERTIVTTAKHHDAQTLYLLQTVPGIGKILRLVLLYEIHDLARFPRVQDFASSCRLGKCARESAGKRSGTSGSKIGNAHLKWAFSEAAVLCLRDNPAAQKLLARFEKKHGKGKALTILAHQLARAVYDMWQRQTAFALDTCLHGEGRGVGALNAELDSHGMHLLRHARYGVHHCVAARS

SEQ ID NO: 97845 - protein, 325 aa, unidentified
MNVPGKTVLKPLTFSNNKAGFELLDLSFRQLNQDCLIALEDTGHYAFNLLNFLHEQGYKVYTYNPLLIKEFAKSLSLRKTKTDKKDAHGIALKLLSDPNREQFQHDNRQVELKILARHIHRLKKKQSDWKVQYTRCLDIIFPELDKIVGKHSEYTYQLLTCYPNPQKRLEAGFDKLIEIKRLTASKIQDILSVAPRSIGTTSPAREFEIIEIIKHYKRLIDKAETCVNDLMAEFNSVITTVTGIGGRLGAVILAEIRNIHAFDNPAQLQAFAGLDSSIYQSGQIDLAGRMIKRGSPHLRWALIQAAKACARFSPAFKAYLKTKLE

SEQ ID NO: 97846 - protein, 318 aa, unidentified
MRTRTIPLFVGIDVSKANLDVFVHPSGESFRAANVTDGIADLTARMRKIKPVMVVLEATAGFERKAARALASAGIRVAVVNPRQVRDFAKAMGELAKTDAIDSAVIAQFAEAIKPKPRPLPDEQAQNRDALETRRRQLVGLLAMERNHLATSPPELRDAVTKHIRHLQELIKDVEAQLHELIAADPELSAKATLLQSVKGIGEVTSTALIVNLPELGSLDRRGIAKLAGVGPLNDDSGKRTGKRSCWGGRRDVRTAMYMPTLSAVKYNPVIKPFYDSLVARGKPHKVAMVACIRKLLTILNAMVRNNSPWTPELAFPR

SEQ ID NO: 97847 - protein, 408 aa, unidentified
MADKIAGIDVHKKVLMVVVMDARKPESKPERRRFTTMPGELRRLSTWLKELDVEEAVMESTAQYWRSVWLELEPHMCLYLAQAFSNRAPRGRKHDFKDAERLVRRLIAKELILSFVPGGEQRIWRNLTRMKLQLIRDRVRMQSQVECLLEEMRIKLSVVVSDLFGSSGLRILHALANGETDAKSLALLGDGRLKCTEEQLVEALTGRSHPMHRQMLALQLDRLRLLDEQIAKLNSLIVLAMNSNQDVVVRLAEVPGLGIDSAQQIIAEVGVTASTFSSAAEFTSWVGTCPGKEESAEENSSSRSAKGNKYMRRVLNQAAHAAARSKGTHFQAVFRRLLPRLGYKSSIWAIAHRLCRLVWKILHEGIHYIEQGVQSEPDLLIHRAKSLARQLRKFGYNVQITAENSAPS

SEQ ID NO: 97848 - protein, 399 aa, unidentified
MLAVGIDISKSKSVAAILNQDGSMHTSPFEFHHTQPELDAFIKYILNSNQSATILMENTGHYHYPVLKAFQEAGLPVCIVNAYQIKKFGDMDLRKAKTDKKDAVRIARYALEKSYSLVPYTSMEQKYEDLRFLARQYNQRMLTLKTNKVFLLNLLDETMPGITNILPLTTRTPETSLSVLFINRFKSYDRIKKMGKNRFLDAFEKIARKSRNRQTKTYGLAIYEAALRNITTRGENEYILAAQDQCLELVCESQKAADSIILKMQTLAETLPEYAVLRSMAGVGDRLGPLILAEIGDIRRFHSGKALNAYAGNDPPPYQSGTFESHNRHISKRGNAALRKYCFEVMQALKLTQPQDDPVYLFLLKKEQEGKPYNVAKMAGVNKFLRIYYARAMETLKQQ

SEQ ID NO: 97849 - protein, 416 aa, unidentified
MSRVVDIVRPVCCGIDVHKSFLVACIATTDARNHTTHQIRRFSTFKGDLQRLADWLLANNCKDVCMESTGKYWIPVFNVLEKTLNVCLTHPKYVKAIKGKKTDKKDAKWIAELFKCDLVRSSFIPPPLTRHLRELCRYHAKLTYMNSSEKNRGQNCLTVCNFKLDDVFSDVYGTSATRVIDKLIELGHSDFDVAPLLDRRCKATPEQVKAAIDGELSTAQAQNLALVREHMRQLENLQSTLESSVSKLAAPYQPQIDLLMSVPGIGSEFTAIRILAEIGVDMSVFETAKQLTSWAGLTPGNNESANKKKTTRIARAGAFLKPLLVQCTLAAVSSNKHPWLKDKYQALKKRRGHKKAVIAIARKLLAAIWNMLAKNQPYNHELHQKSDPPPQNRVLTPEQAFALLRKHGYQIAEPAA

SEQ ID NO: 97850 - protein, 376 aa, unidentified
MTQTDVQYPTIHLAIELSRSAWLVAARMPGVEKPSLHRIEGGDTAALLALAAALRARAAARLGTPVRVACCFEAGRDGFWLHRLLTAEGIAAYVLEPTSILVNRRARRAKTDRLDALGMLRVLAAYLGGDRQACSMVRVPTPEEEDAKRPHREREELVRERVRLENRIAALLATQGVRERPSLRSWERDLAALRTGDGRPLPPHLRAELDRLRRRLVLTLGLIRELEAERDAALAAGPRDAAGRKIAALCRLRGVGANFAAVLAREVFYRAFANRRQLAGYVGLAPVPHQSGEADRDRRISRAGNARARTTLIQLAWLWLRYQPDSAPARWFRDRVGALRGRTRRIAIVAMARKLLVALWRYVETGLAPEGVEVGA

SEQ ID NO: 97851 - protein, 411 aa, unidentified
MNRKLTLLYIGVDLHKNHHTAIMMNCLHEKLGELKFENKPSAFPVFLKEVNKIAKKEGLTPVFGLEDVGGYGRGLAMYLIENKYEVKAVNPALTVSMRRSSPNNKKTDAWDAECVARILISNLDTLPDANPLDLYYAISQLVTRRANIVSVLTGLKLQLHQQLGYHYPSYKKFFSQVDGKTALAFWRKYPSPSCLKGVGVEKLAEFLRKKSNYCLSTKKAEEILSLVEQDGDTSKDYQEANDFLVKDVVRDIIIREHQLDQIDAELKKHLALLDYKLETMHGISTVTAAELIAEIGDISRFSNADKLANFAGIAPVQHSSGNKQKAKKSKLGNRSLYDIFYNLAIRMLGVSRGEKKPNHPMYHAYYEKKLAEGKTKWQAIICVMRKLVNVIYSMMKYKTEYKMPVLTEQAA

SEQ ID NO: 97852 - protein, 407 aa, unidentified
MIFVGDDWAEDHHDVHIMNVDGKRLASRRLPEGLAGISIFHDLVAAHAADPREVVIGIETDRGLWVDALATSGYQVYAINPLAVARYRDRHHVSGAKSDAGDAKLLADLVRTDRHNHRPIAGDSPEAEAIKVLARGHQNLIWARNRHTNALRSALREYFPAALEAFDDLACRDALAVLGRAPSPAEGARLSMSAIQATLKRAGRQRNIEQRAQQIQAALRTEHLHTTDAITTAFAATTRAAVGIITEINTAISELETALASHFETHPDAGIYLSLPGLGVILGARVLGEFGDDPNRYTTAKSRKNYAGTSPLTIASGRKRAVLARHVRNRRLYDAIDAWAFCTLQNSPGARTYYDQRRTAGDLHHQALRALGNRLVGILHGCLRHHTPYNEQTAWAHRQTNRNTEAA

SEQ ID NO: 97853 - protein, 338 aa, unidentified
MSLYAAIDLHSSNSVLAVMDGDGKPVLRCRRPNDLPRLLSDLAPYRDDLVGVAVESTYNWYWLVDGLMDHGYVVHLVNTTAIPQYDGLKHGDDDSDALHLAQLMRLGLLPEGYIYPREQRGTRDLLRRRFSLVRQAVRLMLSIQSSFSRSTGKQLSANKLRQLSPSQLVDLFPELSTRYGVLIQFKLWMTVQDQIKALETWIRKDLARPDLLARLQSVPGIGPILGMTILLESGAIERFESVGDYASYCRMVESVRLSNGKRKGHGNRKCGNRYLCWAFMEAANYAVRYDPLIRRWYERKRARKHRVVAIKAVAHKLARACYHMLHEGTTFDLTRAFG

SEQ ID NO: 97854 - protein, 395 aa, unidentified
MSAEGEAIRSNDYRKDTTVKAPSTRPAAVLGLDVGKSSHWACLIDRGGEVLASAPVRNREGALDALFSSAPAGTLVVVDQFRNIGSLAVRRARAEGMEVAQQPGLAARRADGQVDGEAKTDERDAEVIARTALGVPDSLSGVPGRGEALEAARALSSQRDHVVACATRDKNRLRAVLLESCPALEAAVDLSDRRWLELLAGFGGAWGIARSGAGGPRAEAAGEAAAASTAPPPALVEAENRQVRFLAARISEALDEAGALEAETAALLEGDETYACLLTVPGIGPRTAAQLAVSVDIARFPDHDHLASYRGIAPRVRSSGTSVRSVRASRRGDARLKSLLIFSCNSLVRSSGRYGEYCRACRARGMGHGRALKAVARKRLRAIYAVMRDRVPYRE

SEQ ID NO: 97855 - protein, 336 aa, unidentified
MKKFKLFIGIDVSKATLDIALTLDGDKGNMAHLKISNNEKGLERMIRWIKEQVTIDQADWLFGLEHTGVYIIRLCEFLEHKGFDYLIESALRLKNSLGIKRAKSDKTDAKDIAEYIYLRREKLTVSKLPDGNLMELQALYAQRRLLVKHKVSLSNSTKERSRFVSAQYAQTLLESTAPIIEMIEQNIKTLESRMKEIIQNDPTLKQQYKLITSVKGIGLINAVLFLVQTGKFTAFTNPRKYATHAGVAPFRQQSGTTLNRQPKVSYMANKHLKAMLTQAANTAVQHDRELKQYYHRKLEQGKNKFSVLNAVKNKLIHRVFAVVKRGTPYVELSTFT

SEQ ID NO: 97856 - protein, 364 aa, unidentified
MDAPRRHLRARVEVFTHHSREASVGEVSTVGLDIAKSIFQAHGADAAGEVVFRKKLGRSRLLAFFSGLPPCVVAMEACAGAHHWGRELTRLGHTVRLIPPAYVKPFVKRQKNDAADAEAICEAAQRPNMRFTPVKDEAQQASGVVFRARDLLVRQRTQTINALRGHLAEYGLAIPRGVPHVARMLDRIEDPEEALPEAARAILRVLAESLWSLQAQIAVLDAEIGRRAKADPIARRLMTIPGVGPITATAIIDLAPAPETFRAGRHFAAWVGLTPRQNSTGGKQRLGAITRMGERTLRRLLTIGASAVVKQAALRGAPAGSWLAQMLARKPRMLVTVALANKTARIVWALLARGGVYRAPLAVA

SEQ ID NO: 97857 - protein, 323 aa, unidentified
MTTIYLGLDISKDKIDAVTAQTPHITVSNDAAGYRALLDYLHGHQINPSQIHACCESTNIYYLGIAQYLYRHHIKISVVNPIAIKAYAKMQLRRVKTDKQDAKLIADYCRIEQPQAWQPESDGKRQLKNIHRRIEQLTAICVQEQNRLQVADECVRPSIEQLIGTLQAQIDQCRRQMQQVIDNTQDLRQKQQRLETIPGVGRSTAQILLSVLIDLDKFQTAKHLVSYLGLSPVIRDSGKYSGLQRVSKMGNRSVRTSLYMPARAACTRSKLWRGWFDYQVGRGKHPKQVYVMMMCKILRYAYVCLKTDKPFDATLHQKALKNG

SEQ ID NO: 97858 - protein, 451 aa, unidentified
MALAQRLLRGWQEPPDIAVARLGSRRQHKNNSYPMNIPNTLFIGIDRSDKQLDFTVLDGAGGLIERGKVSTDPAALHPWIEGWRNRGAANTRVVIAFEQPAPNLVVFFGQFEGIVIYPLNPATVRSYCRSFAVSNAHSDRTDAAMIARYTFHYHGELRALEQASGPMRHLRSLVEHRRTLIDERTVLTNRLQALLKLYFPQALKLLSEDLWRPMDCDFLLRWPSLQALRKARPSTLDAFWAAHGSRSEKRLRERLDLLAGARALTEDADTIAPFVLRVESLVRQLQVLAHSLEVVERRIEELAPTFVDYAFFRALPGAGRAFAPRLLAAYGEDRSRWTSASALQCYCGIAPITRQSGNTRCVIRRLHCPNFLRQSFHEWSAESWKHSRWARAFVRYHQSHGKSFHTIIRMLAYKWIKILTRAWHDRELYDEERYLQCLSRRGSPICKYLGE

SEQ ID NO: 97859 - protein, 443 aa, unidentified
MTPGWILICESVDAPVSWVLPNRLTQKFSQKEGDKVNQLFVGIDVGSRENAVHIMLPDGSKHSSFAVQNNLGGAQTLSKRVVSALTDRGLTAVIIGVEATGIYGDNLMMFLREDGALARFERKLHILNPKQVKKFKDAYSDLPKTDGVDAFVVADSLRFGRINTAVYTDDYRYKALQTLTRARFYAVQNLTREKVRFMNYLFLKCSGLAQEKVFSDNYGATALAFFEEFATPDDIADMDTEQLAAFIAEKGKNRSPRPGEIAKELQTAARNSYRLPKTVNNSINQVLSISVSSMRVMQAQIKTLDKEIERQFVNIPNTLTSIRGIGSVFSAGIIAEVGDINRFSGQAKLAKYAGLAWTRYQSGMFEGQNTQLIKSGNRFLKYYLCEAANSLVRCDTGDFRHYYDLKFKEVNKYQHKRALVLTARKLVRLVFRLLKDNRLYKSA

SEQ ID NO: 97860 - protein, 409 aa, unidentified
MERVIERGCGLDVHKKSIAACVRVPGDTGQRVQEVRTFGTTAGELLALRDWLEAHGITHVAMESTGVYWKPIFYVLEEAFTCVLVNPVHMAQVPGRKTDVQDCVWIAQLLEHGLLRGSFVPPAPIRELRDLTRYRKTIVQERSRALNRLHKVLEDADIKLASVATDVLGVSGRAMLEALIGGTTDPDTLAELARGALRKKLPALRQALRGRFRPHHAFIVSQILAHVDYLEETIEAVGQQLDVVIAPFTDALERLSTIPGVKKRTAEVIVAEIGTDMGVFPSAAHLASWAALCPGNNESAGKHRSGKTRKGNLWLRTALTEAALGAIRHGRGGLAARYRRIMRHRGHKKAVIAVAHAMLVVVWHLLARQTTYHDLGDDYYDRRYADRAKRRALDTLERQGYRVILEPAA

SEQ ID NO: 97861 - protein, 343 aa, unidentified
MQVNTIGVDLAKNVFQIHGVDSAGKVVITRQLRRKQVLEFFSKLPGCLVGMEACGTGHHWAREISKLGHTVRLMPPSYVKGYVKRSKSDAADAAAICEAVTRPSMRFVPIKSTDQQALLMLHRTRDLLIRQRTQLINALRAHLAEFGLVAETGREGLAQLGAIITDESNRGSLPAAMKQALQAIVDQLAALELQVGALDRAIHAHHRANDMSCRLETVPGIGVIGATAIASTVTDPSGFKSGRDFAAWIGLVPRQHSTGGKERLGGISKQGDRYLRRLLVIGATAVVRHARQHPQKHPWIMRLLAKKPAKLVAVAVANKMARIAWAIMAKGGCYRAPELAAAA

SEQ ID NO: 97862 - protein, 327 aa, unidentified
MNVAEYKVVYCGIDISKLTFDTFISGKSNAFKNNLKGFKKFIELLPEHAHCVMEATGPYYLKLAVYLQSNGLQVSVVNPLVIKRFSQMRMIKAKTDKADAMLIALYAEKESPKLWIAPKSVLLKIQQEQAVLEGMKKQVRSLNNQMESIQVQPSQSQEALKVLAAMVDIAQKQIDLLEASILDKAQKAFPKELELITSIPGIGIKTAIALLVSTDAFSKFKNGKQVASYIGICPRIYQSGSSINGKGHITKMGDPRARTLLYMGACSAKKHNLACQQLYDRLVKNGKAKKLALIAVANKLVKQAYAVVTQESMYNPEYYSVLNRSLS

SEQ ID NO: 97863 - protein, 372 aa, unidentified
MGHHTEVFVGIDTSKSRNAIAIADGGRGGEVRYLGEIPATEAAIRKLVAKLAAKCCHLTFCYEAGPTGYGLYRLLKSLGHDCLVVAPSLVPKKAGDRVKTNRRDAVSLAKLLRAGELTAVWVPDERHEAMRDLSRARQAVKKDLQGKRQQISSLMLRLGRIYPGKTTWGPAHMRWLMSQKLEHREQRIAFEELLEGIRQESERMERLEDAIREVVPEWSLAEVVAALQAMRGIDLIAAVGVLAEIGDLSRFQNPRELMGYLGLVPSEDSTGDRVKRGGITKAGNGRARRILVEAAWSYRYPPRVSRDKQPKVEAAPRRAREIAWKAQTRLCGRFRSLERKGKRRTVIVTAIARELSAFIWAINRELMAPRQA

SEQ ID NO: 97864 - protein, 348 aa, unidentified
MRFYTGQHRFYCGIDLHTRTVSLCVLDPAGAIALEATLPPEPDRLLAALAPYRDGLVVGCECLFAWYWLADLCAAEGIPFVLGHALYLKAIHGGKTKTDTIDAQKLARLLRGGTFAEAYVYPKAMRATRDLLRRRTYLVRKRAELLAHLQMTFLQYNFTPPAQKLCYAANRAGLDLNVFPDPSTRSMLAADLAIVTALDQQIKRLEADLVRTAKVHDPQAFHRLRTVPGIGPVLALILLYEVHAIGRFADEGRFLSYARLVGGVRESAGKKKGTGGRKIGNAHLKWAFSEATCLLLRESPKAKSWLARKERRIGKKRALGALAARLARTVFHLWRKKEAFDESKFLAS

SEQ ID NO: 97865 - protein, 371 aa, unidentified
MYIVGIDIGKNHHEASIVSPEGKQIGRSLRFATTHKGADSLMSFIFKNIGNSPCVFGMEATGHYWYPIYSFLKAKGYTIYVINPIQSDSLRKMYIRQTKNDSIDSFLIAEVIRFGQFGTTSMADENILAMRQLCRYRDSVISSRTEIKLRIGTIMEQIFPEYEKQFSSLWVSTSMGILEKYLTPENIENAPIDELFEIIKDKSHNRLTKAKAISIKEAAADTFGIKIAQDAFSFQLKQLIDRMNFLDKQIEALDCQILEYYKNFDCYLHTIPGTGMIAAATILAEIGDINRFKSSSALVAFAGIDPTVRQSGEFSSTHNHMSKRGSPYLRHAIFLAATARSFHNSPLNAYYKKKRDQGKHHLTATGAVARL

SEQ ID NO: 97866 - protein, 420 aa, unidentified
MAYRIAGIDVHKKMLAVVVADVEVQGEYQFERIRYGSNPEPLRLLAAWLIEHEVEEVVMESTAQYWKPVWGALERYWKPSCQKREGAGPMSGTLHLAQARSNRGRRGRKKDFPDAERLVKRLVADELVLSFVPDAEQRLWRTVTRRKYQLTRNKVRLQNQLEALLEEAHIKLSSLVSDLLGVSARRMLKAIADGGTDPAALADKKLRATPAQLCDALGACAELQPIYRRLLKMFLEGLQLIEQQIGQLDQEMAALLSQHPDCVQRLSEIPGLGVDSAQQIIAEVGATAATFPSGKHLSSWVGACPGDEESAEVSRSHRSPKGNRHMRRILNQCANAAVKSKGTIFEIVYRRLVSRLGHNQTIGAIAHRLCHLIWIILHRGVRYEERGPSVNTKSRRQRTSRMIRELRNLGYRVEPLGTPA

SEQ ID NO: 97867 - protein, 347 aa, unidentified
MCKVVGLDISLQKTAVCVLDHDGELVWEGKVDSEPGPLIDKLQLWRDQIDVVGLEACPLSEWLHRHLVAAGLNAVWVETRHAQRFLSTRRPVKTDRNDARGIAEMMRVGHYRPVHVKSAEARLIRTTLQARRQIVATLLQIQGSIRGLLRMHGLKVGEIHRNRFDKRVRELLEEMPLLNVAIEPLLRVMEQLVSERKAMDNRLGQAARRDAVCLRLMTIPGVGPITSLAFRVTVDDPARFDSSKAVGAHIGLTPRVYQSGETDRSGQIGKAGDHMLRHPPYEAASPLMTRCRKPSKLRAWGVAVARRRGAKRARVAVARKLAVIMHRMWVSGSRFETRVEITRLATA

SEQ ID NO: 97868 - protein, 354 aa, unidentified
MIVIGIDAHKRSHTMVAIDGTGTVLGEKTVPTVSSGHLDGLRWATSRYGAELLWAVEDSRGYTRLLEHDLLSAHQRVVRVPTLLMAHSRKSARTWGKSDPIDATAVARAALREQNLPVACHDQATWELKLLLDRREDLVGQRVAVVNRLLGRLHLIDPAAPQPKGLHRSPPREALHVFLLNQAGLNSELAQEELADIDRFSHNIDMLTHRIANRVHELGSTLPELRGCGELTAARLICGAANMTRFRNEAAFARYVGVAPVPAWSGSTRGRVRLTRSGNRDMNSALHTIAIVQIRLDGPGKEYYRRRIREGDTKVGARRCLKRRICRVVYSHLVADEKRRRAAMPTAATANDKR

SEQ ID NO: 97869 - protein, 440 aa, unidentified
MAMRKRDDEVFPNAAGIDIGASSHWVAVPRHLADDAVREFGAMTDDLNALADWLIACGVDTVALESTGVYWIPVYEVLEQRGLKVWLVDARQMKYVPGRKSDVQDCQWLQKLMSLGLLRAAWRPDGEVCVVRAVARQREVLITEQASWVQRMQKSLVQMNIQLTEVLTDVMGMTGQAIIRAIVAGERDPLVLARHRHSRVKASAQEITKALTGNWREEHLFVLRQALAMYDDIAKHLVECDAKLQALLDQRSQTQVALGKAPKAGSKSRVEFDVRQALANWAGVDLTRINGLGVTVVMKLLTEIGPDVSRFASVKHFCSWLCLCPGTKISGGKVLSSGTKRSANRARQALKMAAMNLSHSDSALGAFYRRLCGRMDKPRANTATAHKLARMVYFMLTRGEAFVDQGQQRYDEQQRQRSIAALKRRAASLGFRINPLEAVA

SEQ ID NO: 97870 - protein, 457 aa, unidentified
MYRELLPLRQALSAELKANLPPAGPGIDSEHLLQSYLDRLTLYVGCDVADQLLTFFAVDAAGEELGHLSAANDPPGFDQIWDWLESLRSQHSLRIILLAMEATGVYYWACWDFMANRANLARVLYNPRTTEHMTEVLSKKVRTELVDAYALAEQVRLGATPEAVITEDADLLTARFCSRAARDLAQQINRKKNQLRSLLRAYNPALSQVFRGAKFHHQAVYALLQQYLFPDECVDAGVDAITAVLTAHCRTAFDRQYAQRLVDLCRRTLSRQIGREQIRQRVHHLIDDITTCQQRKEYFNKTGYCLIEKRPETQLLRGATGAGVSNTLALVSEVGDVQRFQSGQHLASFLGLTTSKHISGTTVFVSQHITKQGSPNGRYAAVNVAQHMSQRVPKYQQMYQRIKNRKPPRKGHFVALVAIARDFVTNVLYDMWRYQRPFFREVEDYRAYRRKNPRSDE

SEQ ID NO: 97871 - protein, 459 aa, unidentified
MKHTQRSSSLDTLALIHPNAAGLDIGSREIWVSVPNERDPEPVRMFGTFTPDLKRLVAWLVQCRIDAVAMESTGVYWIPVFELLEAAGLNAQLVEPRQLKRVPGRKSDYLDCQWTQKLHSLGLLTASFRPDAEMRKLRSYLRHRAELLQHCAPHTRSVHMQEALQQMNLQLHHVLSDVTGVTGLKILRAIVAGERDPLKLAQLRNPACKSSTETIVQALTGTWEAEHLFAVRQSLELYDFYTQKVAECDTAIEKQYAAMKPGWEGEPPTALPPLKPDSHSKNQPSLRTRAELYRLTGVDIVAVHGISASLAQTILTETGADMTKWPTEKHFGSWLGLAPHNDISGGKVLRSRTLKTDHRAGQAFRQAAASVSRSQCAFGAYYRRKKAHLGPMAALVATAHKIARTVYYMLKHHVQYRDIGAEAYEKKQAERELVYLKKKAAKLGFTLVQHDPAPVATPV

SEQ ID NO: 97872 - protein, 349 aa, unidentified
MRYFQPPANTRFYAGVDLHARALYLIVLDPQGQIRYARNLPANPASFRKAIAPFREGLIVGCECMHCWYWLADTCRDENIPFVLGHAWGMKAVHGSKTKCDRKDAEAIARLLKGGNFPLAYAYPKERRGLRDLLRARLRLVRQRAELYGHIHTARRQLNLPPISNDVKYKSKRASATADIDDACVRRRVEADLSLLEPLDTTIRRLEKDIEVAARQHYATELAVLQSTPGVGIVIALTILLEIDTLERFDSRQQFCSYARLCGARQESAGKTVGQGNAKQGNAWLKWAFSEAAVLSAQKDERLGKYLDKLASRLGKAKALSALAHKLGRAFYHMLQKKEVFDIDKFLRH

SEQ ID NO: 97873 - protein, 447 aa, unidentified
MIANSTTPQSCTFVAIEVAKSVHEVLVEPPSGHWQRWRLRNCQPDYEAFRDRLRAFQRPVLIGFEATGNYHRPLAYYLGQCGFELRLISSLAVARTRDALYNSWDKNDPKDTHVVLHLLKTGVFQRYHDPLVHRMNDLQELAQTHYQISLRKVQVQHSIMTHYLPLYFPEAERYYTNSRAQWFTQLLHRFPCPAAITRYSPEAFEHEAWTVVGRKVNKRGFLADLYTTAAHSIGLAVAEDSEAIQMFRVMLAEHQHLCATRAAIEQRADQVLQSHPDYQRLRTLPGVGPILALTILAEAGDLRRFPHHRQFLKFCGFDLSTQQSGQFRGMSRLSKHGNARLRYAFWMAANGAVRMRQNTFREKYARYIKADPQSPDRKRKALCAVAAKVARVAHGLIKTGTEYRPYFEALPPSGALRSPGPSRQRLTSSIMLGASTGAACWVSTVKA

SEQ ID NO: 97874 - protein, 349 aa, unidentified
MTMVGGFDVHRKQITFDFVDDDGLVRFGQIRPATRKTLRGWLVEHCPAGDAEFALEGCTGWRYVSEELAAAGVGVHVGDPAEIAALRGPKKRAKTDRADARLLRTLVLEGRFPESWIPPAHVLEIRTLGRLYCTLMDERRAWQQRIHAQLFHQGCPPITALLSAAGRDALASAELSAAGRQYVDTALRRIDELTAGIDPLRTQLVNFARRQAGCRALQARQYGIGWLCAAIIWAEIGDARRFARSDQLVRFAGMDVTVYSSAGKRSPGHLSRQGSPELRWATFEAAKCAARRGSPDYTYYHKVAARPDSGKNPTLAVERKILRRCYHTLRELGDAALAMPDTGPQEVAA

SEQ ID NO: 97875 - protein, 377 aa, unidentified
MSSSIIWIGMDVHKDTVMVAVYTDDAREPEIVQQLPNDPRKLKRFFQRWGRRGEIRSCYEASGAGYVLQREITEWGHDCEIVAPSLIPIRPGERQKHDRKDATQLARLYRAGELVTIRIPSAAEERVRDLVRCRQCFQREILRSRHYVTKFLARRGLVYREGTNWTRRHRSWLQSLFQQGGLEPEDRSVFSEYLALLDYKVSRREDLDGQIEKLAFSPAYKPKIDRLRCFRGIDTLAAMTLVTEIGDWRRFERPGQLMAYLGLVPSEYSSGDREHRGPITKAGNSRCRHVLVQAAWKYKHRPAVSVDLKKRQSGQLPQAIAHAWKAQHHLHKLFHRIAARKSSRIAVVAVARELVGFLWAVMQELETEQAVTLSTAA

SEQ ID NO: 97876 - protein, 412 aa, unidentified
MERIIERGCGIDVHKATLSACVRGGDSSGEVSQEIRSFGTTSDELLALHEWLTSLAVTHVAIEATGVYWKPVYYVLEDAFRMVLVNPAEVKQLPGRKTDVSDCAWLAQLLEHGLLRPSFVPPPEIRELRDLVRYRTSLKGDHTRLANRLHKVLQDADLKLSSVMSDILGVSGRQILGQLAVGHRDPAALAELARGRLRNKLPVLRQALSGRFSAHHAFMLSRLLADLDNVEDSMTEVSKRIEEQLRPLAQTLERLCTIPGVKRVTATAMLAEIGTDMSRFASPSHLASWAGMCPGNNQSAGKRRKAKARSGDRWLRTALVESGHAASRARNTALAAIFRRNVVRHGPKHAAFVVGRHILTIAYHLLARNTVYQEIGPAYFEQRRAEQVKRRCLAQLQRLGFQATLTPLPTAA

SEQ ID NO: 97877 - protein, 481 aa, unidentified
MKIKSIYPARNSSQLREVLGKYSPGELLYAPIDVAKYNHKACAVNFFGDILTPAFEFSNNAHGVKFFISKITEAARNAKAKKIFIGLEATGHYHQNLTLHLKSLGYEVAVINPFDSWKERLNKSSKTDKIDLGSIAKSLISRKFSSSTVPEGVYYNLQRATRTRRKFVNRRTSSKNIITGLLDNLFPGLWDKEDTIFSDRWGKASLSVLEHYPTPQMILRLGEKRLTRFLKKGTTKLGEKTARKIISAAKVALTRSPYEQTMDILALRSHLQAYRLYEEIIFHLEKEIAYLLVQTPGTYLLSVPGISVTYAAEVTAEIGDISRFAYANQIISLAGTCSKKDQTGEHDPQNLPISKKGNKFLRTVLNQAELSLNTWCPDFNAYYSRKVEEKKGRCGIARTATGNKFARLAFALMKHESLYHPHSFNTLVQDPGNYYLSVYGEILKKLRAFSSEKILPQSNYLEKIKQKLEKEYAINLSEVKG

SEQ ID NO: 97878 - protein, 344 aa, unidentified
MKQIIRIGMDTSKHIFQLHGVDAAEQVVLRKRLGRRQMVEFFAKLPPTVIGMEACGASHHWGRALERLGHEVKLIAPQHVKPYVLRNKNDGRDAEGVCEAMSRPRMRFVPVKNAEQQAALMLAGLREQMVARRTQLSNTIRGYAAEFGITAAKGLDKIEPLLAQIAQDESVPTIAHDLFTMQGRDYAQLQVELKAIEARLRAWHRTNADSRRLAKIPGVGPIGATALVMKTPDPRAFPSGRHFAAWLGLTPKDHSSGGKTRLGKITRAGDERLRSVLVAGATAVIQQAKHGRGHPSPWVVALLKRKPPKLAAVALANKIARIAWKLMATGESYDRARVPSALAA

SEQ ID NO: 97879 - protein, 343 aa, unidentified
MKLSYVGVDLAKNVFQLHGVDRSGKAVWRRRLRRHQWIRVLRETVEPGCTIGMEACTGAHHWARELQSHGYTVRLIPPQFVKPYVKSNKNDANDAEAICEAMSRPHMRFVTVKSIEQQDIQATHRIRTELKDHRNAKANQIRGLVAEYGLVAPTTLLALRRAIPCWLEDADNGLTDYFRSLLHGLWDDLLSLEDRIKELDKEITRLANSNEVTKRLQQLRGVGPMVATALVATVGTGEQYRKGRQMAAALGLTPRQSSSGDKYRLLGISKRGDAYLRTLLIHGARAVVSQAKHRDDPLSRWATDIAKRKHTNVAAVALANKTARMAWAMLRNDTDYDPNLAVG

SEQ ID NO: 97880 - protein, 347 aa, unidentified
MKFYTKQHNHYCGIDLHARTMYVCIIDAMGQVVFHKNMKANPHTLATAIEPFQDDICIAVECMFTWYWVADFCEDNNLPFVLGHALYMKAIHGGKAKNDKIDSYKIASLLRGGTFPMAYVYPRPMRSTRDLLRRRMHLMRKRAELPAHIHNTNSQYNLPEIGKNLRYKSNRSLVENRFDDQSVQKSVDLDIELINFYDTQLSSVEWYIHKHARAHDYHSHMLLKSFPGIGDIISLVILYEIHDINRFPTVQDFASYARLVKCKTESAGKTYGTSGAKIGNPHLKWAFSEAAVLFLRCNPKAKAYLEKLAKKHGKGKALSILAHKIGRAVYFILKRKKPFNPELFLAA

SEQ ID NO: 97881 - protein, 416 aa, unidentified
MNAVGIDVSSRKSTVAVLRPLGEVVCLPFDVTHDIAGLASLAEKLKALDGETRVVMEHTGRYYEAVAKALHEAGLFVCAVNPLLIKEYGANSLRRVKTDKADAVKIARYALDNWADLRDFTPMDAIRYDLKTLNRQFQLASKQRTASANNLIALLEQSFPGIRKCFDSPVRSDGTQKWVDFAHSFWHVDCVRKQPFPAFCERYRKWCKLHAYFFKLRNAEKVYALAKSAIVLTPKSKVVKVLVQEAANQLSSISRSVEVYRAEMDRLAAMLPEYPVVMAMYGVGKSYGPQLMAEIGDVRRFERKQALVAFAGIDPMPNQSGDKNVRSNKSSKRGSPYLRKTLFNVIRTYLQCAPQDEPVFQFLNRKRAEGKPFYVYMLAAANKFLRRYYAKLRDYFASLDTLQPVAPIPTILKAAL

SEQ ID NO: 97882 - protein, 370 aa, unidentified
MSQSNTLFIGMDVHKETIAVAYVAQDHGAEVTALGTIGTRQCDIDHLVRKMQSKATHLIFVYEAGPCGYWLYRYLMKKGYDCWVVAPSLIPKKPGDRVKTDRRDAIQLARLARSGDLTTVYVPKVEDEAIRDLTRAREDAISDLKDAKLRLKAFLLRHDIRYVGRANWGPAHLRWLSEVVCPTPAQQIVFQEYVRAVQEHTARLQRLEQELHEHVKAWRLSPVIDALQALRGVQFTVAVTLVAAMGDLTRFDSPRELMKYLGLIPSEYSSGAQRRQGSITKAGNTHARRVLVEGAWAYRYPAKVSRHLQLRLEKQPKVIQDISWKAQVRLCKRYRRLVARGKHANVVTVAIARELIGFMWAIAQEVPIVA

SEQ ID NO: 97883 - protein, 365 aa, unidentified
MPILAHPDAVFLGLDVHKDSISAAILNPDLAAPDVEKIFHDEESIRRLVGRLGDPSLVWACYEAGPTGYDLHRLLTSMGVHCSVVAPSLIPKAPGDKVKTDKRDCRRLARLHRAGELVAIRVPSPLEEAVRDLCRTRGDMVADLTRARNRLSKFLLRHGRVWRDGSAWTHKHESWLAAQSFDEPALAATYSHYRAVLTTRDAQLAAVEADLVGWFDREPFADGVRRLGAYRGVTHMGALALQAEVCDWRRFARAASLMGFVGLTPSEYSSGGYTHRGHITKAGNAHVRAQLVEGAWQYQHRPYVGSVIASRQEGVGPETVARAWAAQLRLCGRFRHLAARKNTKSVVAAAVARELAGFLWAEMTA

SEQ ID NO: 97884 - protein, 341 aa, unidentified
MYYIGLDVHKKTISYCVKDVSGHVQQRGTMAATRTELDNWMKTLPQPWTVAMEASIFTGWVYDHLLPHAAQVKVAHPLMLRAIAVAKKKNDRIDASKIADCLRCDFLPECHMVSTAIRDRRRTLRYRHLLVRQMVQMKNRVSGLLLETGVSHNKERLHQVKYFQELLTDKEVTESIRPLLRLSHETIRRLDKTETALIRSLERDPVLAERINNLKTIPGIGVITALTWALEMDDVSRFPSVKQAISYCGLCGDERSSADKVLRTPISKQRNKHIQSVLVEAAKFAPQQNHELALVYEKEKQKGNSNRATLAVARKLVAYLLAVDRERRPFKPAEEFGSAVA

SEQ ID NO: 97885 - protein, 323 aa, unidentified
MNIAIDLGKRMSYVVIEDDDKVVKEGYVETKKESFQDFFGNVSNPKIIVEASSTSNWIANMFDGYDITVAHPAKVRLIAQSVKKTDKIDAHTVMDLYKKDYLPKSHLPEKDVREARDLCRDRSLIIRQRVATINKIKYHAFCNGINVSRLSKKTMKILSKEPKLELLIKQLENTDAIIKIYNEKIEQIVRNGNSRISHYARLIDTIPGFGPHSSFIIAAEIDNINRFSDEFRLFSYAGVVPRVYQSGDKEWKGHVTKGNTFLKTILLQCANIHVIFSKNSVVTYWYDNNKYRIGKKKAKVAVMKRLLRIIYWMLKRDEEYHDL

SEQ ID NO: 97886 - protein, 369 aa, unidentified
MNASVIYVGLDVHKDSIVIAVAREGREPAAKWKTIPYDGVRLRKTLKMLAKLGETLKVCYEAGPTGFGLCRRLQEAGMDCIVVAPSLVPGKPGDRVKTDRRDACKLAHFLRSGDLTEVYVPDEAAEAIRDLERARDDAKCAERVARHQLSKFLLRHDRHWDGTTWTRRHLDWVRGQKFAFPAQQRVLEDYLKMVEDLAERVERLTAQMEELVQETALAPLVKALQAFRGISVVSAVTIAAEAGDLGRFATASQFMSYVGLVPSEDSSGKRRRQGAITRCGNGHLRRILVEAAWHYQHFPLMSKELRRRNQGVAEGVRRIAWEAQKRLNSRMFHLIKAGKCKQKLVVAMARELAGFIWAVGQEETLLEAA

SEQ ID NO: 97887 - protein, 458 aa, unidentified
MPRKRVSKSKNVTLPVLNPDAAGIDIGATEIYVAVPGDRDQEPVRMFGSFTQDLNQLADWLQQCHIRTVAMESTGVYWIPLMQILETRGLEVYLVNAKHAKNVPGRRTDVSDCQWLQYLHSVGLLRASFRPPQDVCAIRSLLRHRDSLVEMATCHVQHIQKALDQMNLQLHHVISDITGTTGLAILDAILEGNRDVNALAMLRDPRVRASHETIAKSLVGDYRQKHLFTLRQSVAFYREYQKRIVDCEKEMQELMKSLGTKADLSVPLPEAKDSVRKCKVMQPARALALREEAYRILGVDLTTIPGISVLHVQTIVAELGGDISKFRSAGAFSSWMGLCPDNDISGGKVLWTGTRKVKNRVATTLRMAAQSLQRSESALGEFYRRMRAKLGPPKAITAAAHKLARVVFHLLKTRQAYDDSVFAAAEQRYRRRTENRLKAQAQALGYLLIPAQLQQPQP

SEQ ID NO: 97888 - protein, 433 aa, unidentified
MNGKSKEAKNQVNQANIFEREELVKKADAIMQDLKAHTWHELETKGKFDKNAKLSFINDEMLIIGCDIGSEMHYARAIDTRGRELSRKAFAFSNTAEGFASAKAWMLELAAANDKKQIVLGLESTGHYWFCLTAWLVANGISVVQVNPYAVKQTKELEDNSQLKDDRKDPKLIANLVKDGNYGMPYLPEKVYADMRRLSMFRDQLTEDRIRCLNRLHRELTICFPEYKDALGKVDGAFAMELLKAAPFPEDLKEIGAEGIREIWKGAKLRGRGYSRAGESLRYAEQSVGLKDGAGISKEAVKWFAEKILELDRKLSDVEAELSDRCRAVPAAENLLEIPGIGRNILSGILSEIGDISRFDDAKEIQKLSGLGLVACSSGKHKGETKISHRGRKRLRYWLFQAAKSAVVHAEEFRRLHEYYTTRRDSPLRKCSR

SEQ ID NO: 97889 - protein, 359 aa, unidentified
MQTQSNKLDFTGQNIYVGFDVHLKSWKVTVMTEKMVYKTFSQSPSPKALHEYLINHFPGGSYHSAYEAGFCGYWIHNQLKSFGINSIVVNPSDIPTTNKEKVQKEDMRDSRKIARCLRGGELTAIYVPSEKTLEDRAFIRTRKMLTKDLSRYKNRIKSFLHFHGIDLPPAFSNPKSHWSKRFMNWLESIPMKQDSGSKSLQALINESKHLRQSLLNINRHMRTLSLTEEYREQVALLQSVPGIGITTTMTLLTELETMDRFKNIDNLCGLIGLVPSTNSSGDSEKIGDITPRGHQVLRSALIESAWVAARIDPALLKSFQSYCKRMEPNQAIVRIAKKLLSRIRYVLKNKQPYVCAVVK

SEQ ID NO: 97890 - protein, 346 aa, unidentified
MMIIGCDFHPSWQQVSWLDTETGECGEQKLVHATGDGKRFYQQLATPALIGMEATGNSQWFIELVQDLGHEIWIGDAAQIRASYVRKQKTDKRDAAHILKLVVESRFPRLWTPDQEQRDLRQLVLHRHKLVGIRSRVKNELQHLSLNKGMQKKRTLWSQAGQKLLLELPLKPWASCRREDLLGLLGMLNEQIGKLDEAVQLAADQHPQAKLLMTQPGVGPNTALAYVLTIGDASRFPRGKQVASYLGLIPREESSGGRQKLGAITKQGNRLVRSLLVEAAQIAVRFDPGFRKQYLHRCHQKPKGVAKVAAARKLAVRLYWMLRTHVAYPEIVRIESSPRVPLVGAS

SEQ ID NO: 97891 - protein, 346 aa, unidentified
MGAVCRIGLDIAKNFFQAHGVDKHGKEVFNKKLKRADVLPFFANLPSCLIGLEACGGAHYWARELARLDAGHTVRLISPRHIKPFIINNKTDAADAKAICEVVGRPSTRFVNVKTVEQQDMAGWHRIRERKVKERTALVNQIRALLHEQGLVLPQGITHVRKQLPHIVEDLDNGLSLCARDYLSELYGELVDCDAMVTKYEARIKTFAMNNEDCKRLQKIPGVGPLTATAIVAHVGTAKHFKNGRAFAACIGLTPREHSSGGKQKLLGITKRGNSHIRQLLIQGARIITRYSLSKLPEQAEQRIRWVQELVERRGKHVAAVALANKTARIIWALLARGEEYRPSLA

SEQ ID NO: 97892 - protein, 334 aa, unidentified
MLYVGVDAHKRSSRLTVMDDRGQVLKRQEIPSTRVGVQAALGRYRRPLKAVLEASYSWGSMYDWLGEVASEVVLAHPLKVRAIAEARIKTDAIDSETLAHLLRADLIPPAHAPSKETRAVKRVLRQRLFLVRVRGMLKNRVHALLAQHQVERPSLSDLFGVKGMRWLRGLSLPMPDGALLVEQVDLLEAVREKIRSTDQLISDLARGDRTVGYLETVPGIGDFFSVLVRYEVDEMGRFRSAKKFASYTGLVPSTYASGDRMVHGRITKQGNKWLRWALVEAVTPAIGHSPWLRRYYQRIKVRRGAKDARTATARKLAEIIWTVWTEQRPYEERV

SEQ ID NO: 97893 - protein, 423 aa, unidentified
MMRLVYPICCGLDVHKNVIVATIVTTDKNGISEYNQKSFSTINSDIQKFHDWLIKNDCFYVCMESTGKYWIPIFNYLENDINVCLTHPKYVKAIKGKKTDKKDSRWIADLYKFDLVRCSFIPPKNFRQLRELARYRFKLVCMKSSEKNRIQNCMTVSNIGIASILSDPFGKTATEIMTYLLSNTTDTINDKAVRKLIKKNAKVKSDDIIEAIKGYNIETDQAKKLELARGHLDYLDDMITQTEVELYIRIKPYYEFVEYISSLPGITEISATIILAEIGIDMSIFDDAKHLCSWCGLSPSNNESAGKKKSVRIAKAGAYLKPMMVQCALAAIKSKKQPYFAIKYGRIKKRRGHKKAIIAIARMMMVCIYHMISEKQPFNPTDYEELMDPHYSTSMVTLNDENVFAYLEAKGYDLSLLVKCNDN

SEQ ID NO: 97894 - protein, 342 aa, unidentified
MDTIGLDLHKRESQLCIGADDGRMEERRIATSRERFTSVLGARAGARILLEASTESEWVARHLESLGHEVIVADPNFAAMYATRVRRTKTDRRDARTLMEACRLGAYRPAHRLSDARRHVRAELAVREALVRTRTRYIALAKALVRRDGLRVPASEAHLVARRIAALELSTTLAAELAPLFALLAPLNEQIAAADQRITALMQADAAVALLTSAPSVGPITAAAIVATIDDVTRFRSAHQFEAFLGLVPGERSSGEQRRIGRITKAGNVRARYLLVEAGWRILRSRDAALQALRGWALSIAARRGKRIAVVALARRLAGILYAMWRDGRPYDATRLRVPRAA

SEQ ID NO: 97895 - protein, 337 aa, unidentified
MKQYVALDCSLKQISVCVMTEQRRIVKEAVIAADAGSIAEFVWSQVPDPELIGLESGPSSAWLFHALRAEGLPVVVIDARHARAVLSLRINKTDRNDAVGLAGWYKPVTVKSLESHRVRTVLTNRALLVGIRQDLENQVRSVLKTFGFVLGKGRGSFADRVSEILAGKRLLLRLVRPLLKAWAAIREQLLSVDKEALAIAAQDDTCRRLMSVPGVGAITALAFKTTIDNPWRFSSSDKVGAYLGLTPRRYASGETDRAGRISKCGDGLVRTYLVEAAGVLLTRSKATSDLKDWGLRLAKRASAAKARVGVARKLSVILLRLWTDNSVFQPRVSVTAG

SEQ ID NO: 97896 - protein, 346 aa, unidentified
MMIIGCDFHPSWQQVSWLDTETGETGEQKLVTAAGDAERFYRQVPGPALIGMEATGNCHWLVDLLAEIGHELWVGDAAQIRASYVRQQKTDRRDAEHIRKLLVEGRFPRIWMPSAEVRDLRQLLLHRYKLVIIRARVKNELQHLCLNKGVQRKHKLWSKVGQQVLRELPLKMWAARRREDLLQLLAMLDQQIAPLDEAVKAEAQRDQMALLLETQPGVGAITALAYVLTMGDVSRFPRGKQVASYLGLIPREHSSGGRQQLGAITKQGNRMLRMLLVEAAQSAVRLDPAFRKEYLHRCHSKPKAVAKVAAARKLAVRLYWMLRTRTAYPEVVRIESSPRVPLVGAS

SEQ ID NO: 97897 - protein, 465 aa, unidentified
MPNHPKPPSKQRKSTRKMDPTEGLPPLNLNAAGIDVGSAEHHVAVPGDRDAEPVQSFGSFTADLHRMARWLKDCRIQTVVMQATGVYWTALYDVLESCGLEVNVAHAQHTKTLPGRKTDVQECQWLQKLHTFGLLNKAFRPAEEIRVLRSYLRQRENLVAAAATCVQHMQKALTEMNIQLANVISDISGTTGMAILRDIVQGERDSEKLARHKHALIRATHKEIARSLEGTWRPELLFVLEQSLDLYDTYQDKIHSCDQRIDEHLGSMEAKVDPLREPIPQPPRRGKGARPHQPRFDLRGHLYRITGVDLTQIDSIDVKIAQTVISEVGLDMSRWKTEKHFASWLGLCPDHRISGGKILKRGTRRVINRAATALRLAAWSLIRSQSALGAKFRRLRSKLGAPKAITAMAHTLARLIYRMLKFGRQYADRGIEYYEAKYRQQQLYWVAKKAATLNMQLVPIPDAAN

SEQ ID NO: 97898 - protein, 368 aa, unidentified
MMGWMAPLRHLGAKMPVGQKPPANREPSMNEITTVGLDLAKNVFQVHGVDAEGTRVLRKQLRRAQVLAFFSRLPRCLVGMEACATAHYWARELRALGHEVRLMPAQYVKAYVKRNKNDAADAEAICEAVVRPTMRFVPAKTAEQQAAVLLHRGRERLVRQRTMLVNALRGHLAEFGVIAPQGLRNVGRLIAIIRDEEDARLPGLARQVLQVLAVQIEQLEAAIAALEKQLMGWHKSNPVSQRLATIPGIGPIIATAIAAMVAEPSGFRSGREFAAWLGLVPRQNSTGGKNRLGGISKRGNQYLRRLLINGASANLLRSKATNADPWVIGLRRRRPSLVVAVALANKTARIAWAVMHRQENYQRMATAA

SEQ ID NO: 97899 - protein, 398 aa, unidentified
MHVGWDWASQNHDVTVIDDTGTIHARFAIDHDEASLRTVLRDLALLAAPADLPVAIERPDGIVVERLLAAGHVVVPVHPNAFHAARLRWGAGRAKSDPADSYMLADYLRTDGHRLRRLRPLDSVTRQLQALVRMRDDHVAARTAATNQLHALLEAHWPGANAIFSRLGSTIALAFLNDYPTPESAARLGEARLAMFCRRHSYRGGRPPAELLQRLRTAAIAPVGVDPVVLTELVRAQTTLIESALATIAQLDAAIGALLLAHPKAGLLAPLPRIGEINLAQIIAEIGPLLDRCDNADQAAAACGVAPITRQSGKSRNVQFRFSSNARARVALTCFADNSRHSSRWAGHLYTTARQRGIRHPHAIRIVARAWLRVVWACWHTNTIYDPTHHAGEARHAA

SEQ ID NO: 97900 - protein, 399 aa, unidentified
MTASRAVVIGADTHLDTVHHAALTDTGQPLADAEFPTRPAGYYLAVKWAQSFGAVLRAGVEGTSSYGAGLTRALQDAGIEVAEINRSDRAGRRRQGKSDPLNAYAAARATLAGHGLAVPKDEHTTALRALLTARRGAVKARTAAINQIKSMLITAPVDLRERYRRHTTTTLIRALARCRPSVHEEPTTAAVLSGLKAMAQRVEFLEDQDRTVTADLDRLVTAINPGLRAAYGVGPDTAAQLIITAGTNPHRLRNEAAFAMLCGTAPIPASSGKTNRHRLSRGGDRAANNALHRTALVRMSSDERTRAYVTAQLTKGRSKLDILRLLKRAIAREVFRLLTQPCAVDDYSDLRPTRQAKNITLSVVADHFGIWPNDISRLERGLKRDDTLAANYRSWLTAA

SEQ ID NO: 97901 - protein, 316 aa, unidentified
MLGVKSFPADGAGFEELLGWLVGFGAVTRVGVEGTGSWGVGLARFLADADVEVVEVDRPNRQQRRKVGKSDPTDAVAAARAALSGAASGVPKTRNGPVEQMRVLLVAKRSARAQRIQTLNQLRHLVFTGPESIRVRFKDRYKTGLITEAAAMRPRPGSDPVLFTTNVVIRGLARRIQGLNDEIRSLDAMLGELVAATAPSLLELYGVGVDAAASLLVTAGDNPARLRSEASWAHLCGVTPVPASSGKTIRYRLNRGGDRQANSALYRIVLTRMSSHEETRRYVARRRGEGLSSLEVIRCLKRYVARQVFKELPMAA

SEQ ID NO: 97902 - protein, 429 aa, unidentified
MNYNTQNAKIASITEKTLIVGIEVGSETHYARAFGWRNYEYSKKPFAFSNDEAGFSSFKDWMDDIAEKHGMEAVIPGMEPTGHYWLNLGAYLQEQGMKPVHVNPHHVKKSKELDDNNPSKNDRKDPKTIAGLVNEGRFSYPYIPTGIYAEIRNLSNLRIQTQEEITRIKNRIARWFSIYFPEIKDVYRNPDAVSGLMIIKQVPLPCDIKELGVEGVNKIWRDARLKGAGIKRATTLVTVAEHGIGNIEAPKSARKESQNLLNDYEVYKKRMEELMEEIEEILSEIPYVDKLLEISGGGIKTVNCFIAEVGDIGRFDNPKQVQKLAGYAIVADSSGKHNGESRISHRGRKRLRYALYEAAISVIGKNKEFKEIHCYYRTREKNPLKKMQSVIAVACKLIRIFYTILTKGIEYDGQKMLSDIVRPKMQPAA

SEQ ID NO: 97903 - protein, 452 aa, unidentified
MEEQEISMEIVNPHAAGIDVGSRSHWVAVGQQEKDIREFGVFNQDLFGMADWLKEKNVRTVAMESTGTYWQNLYAVLISKGFHVILCNGKFTKNIKGKKTDVKDCQWIQKLHSLGLLSSSFLPDGKTEQLRTYCRHRANLLHSAASTSKKMQKYLRLLNLRLDVVVKDVCGLTGLAIIRAICLGESNPAKLASLRHGNCHKSEAEIAAALQSNGRKDFLFALQQELDTYDHLQKKIAECDVMIDQMLNEIIDNDDNKKQHYIDPKSYKRINKNTPKDIDLNLKSYQMFEGTDLLAIEGMSYSTVLVLMSEVGIEGIRKFSSAKHFASWLRLAPNNKISGGKILSSKVPKGSNRLKIALRNAANAIGNLKDSTPLRDFFQRINFRKGRISAISATARKLAVIIWTIVVKGMPYNNPEGYLFLDQKRKMGIVKRIQKQMVKFALTNEDLQFANR

SEQ ID NO: 97904 - protein, 343 aa, unidentified
MNITTIGIDLAKSVFQVHGVDERGRVVLRKAVKRADLTKVFAQLPACLIGMEACGSAHYWARRLTELGHTVKLMAPQFVKPYVKTNKNDARDAEAICEAVSRPNMRFVPAKSVEQQTVLAVHRARQGFVVERTAQANQIRGLLYELGIVIPKGIRHLEQRLPEILEDAENGLPGASRELFARLFEHFRELGGHVRELENQIKAWHRENEASQRLEAIPGIGALTASALVASIADAKAFRNGRQLAAWLGLVPRQASSGGKEQLLGISKRGDTYLRTLLIHGARAVMFHRIRGGAEADSWLMKLLARRNRNVAAVALANKNARIVWALLAHQREYCATPLAAAA

SEQ ID NO: 97905 - protein, 354 aa, unidentified
MNTTQNSTKSKIVKVIGVDLAKDHCDVIGYDENGKICLRLDGCSYAKLREILSNLPQAVVLMEACKGSMFHARSIADLGHEVRLVKGADVKALRNINHKNDLRDAAYIAKLYFVPGTTYVYIKSQQQQSLQFLQNEYKSLQELRIQAGNQIHAGLEEFGCPVRKSSKFIKTRMVAHLEKHAELIPEDVMASFKRRREIWLNLPQQEEEAKRRLEQVAATDANAKRIMTVPCVGPQTAVGLLVHVGVDFGRFKNSRQFAASLGLVPKQNSTGGNNTLNHITKCGPKRLRSNLVQCAQLVLMYAEKWKGNFGDWVRKMRDSGKKHGVIVCAIAAKLARIIYRLMKDKVDYTPVLSC

SEQ ID NO: 97906 - protein, 516 aa, unidentified
MAPVLAIASLVANAVDTTRLFDPVGEIFKPFVTGPNWIVVCPARRTAMAAEKKLWNRKERKELARQLQSANPGLEIVHPHAAGIDVGNQTHYVAVRPDRDPEPVRRFECFTADLYRLADWLKNCGVKTVAMQSTGVYWIPLYDILEERGFEVYLVNARHTKNLPGRKSDVQESQWLLKLHTYGLLNNSFQPSSEIRTLRTYWRQRAEHVAGATTCIQRMQKALTQMNLQLANVISDLSGLTGQRIVRAIIAGERDAQRLAGFRDPRVQASQEEIAKSLEGNWRPELIFLLQQEMAMYDTYQQRIAECDQQLHKHLTSFADHAHQVRSQSAQGKAEGKKAKKPAAKNAPRFDLSSELERITGVDLTRIDGIDVMGSQTILSEIGLDMGRWKTEAHFASWLGLCPDNRTSGDKVLRRGTRHVVNRAALALRMAANSLLRSQSYLGAQYRRLRTKLGAPKAITAMAHRLARLVYRMLKYGQQFVDKGMEYYEQRYRNQQVQLLQKKAAKLGLQLVQAQT

SEQ ID NO: 97907 - protein, 367 aa, unidentified
MEKHNTARKSSCGGKRTTGKLTIGLDLGDRSSRYCLLDEQGEVIEEGSLPTTRKGLDRVFGAAGRCRLAMEVGTHSPWVSRYLARLGYEVIVANARRVRLISESSRKDDKLDAKTLARLARIDPELLSPIRHRGVQAQADLMMIRARAVLVQTRTALINAARGLTKSYGERLPSCATYQMGKDQAELLSPAIRAALEPLLAEVETVTERIREYDKQLEQLCQTRYPETKLLKQVHGVGTLIALAFVLTVEDPHRFRKSRAVGCYVGLRPKRRQSGQSRPQLGISKEGDVYLRTLLVQGAHHVLGPFGKDSDLRRWGLKLAAQGGKNAKKRAVVAVARKLAVLLHKLWVSGETYEPLRLANRAQTVAA

SEQ ID NO: 97908 - protein, 346 aa, unidentified
MQITTIGIDLAKMVFAIHGVDQRGKTVLQKQLKRGAMKQFFANLEPCLIGMEACGSAHYWARELEAFGHSVKLMAAQFVKPYVKSNKNDLADAEAICEAVRRPNMRFVARKTVEQQAILSVHRARQGFVRARTAQANQIRGLLAEFGIVLPQGVASITRRVPEVLEDGENGLPSLLRQLIERLLMNLKEMDRQVKELEQQIQQWHRENEASQRLARIPGMGPITASAIVATVGDAREFKNGRQLAAWLGLVPRQYSSGGKSTLLGISKRGDTYLRSLLIHGARSVIRYAEPKAAPDSWLRRLLARRHRNVATVALANKNARVIWALLASGEEFQPDYTIATPAAVA

SEQ ID NO: 97909 - protein, 368 aa, unidentified
MKIIGCDFHPSFQQIAMLDTETGEMVERRLLHADGEAQRFYESLSGEVWVGMESSGNTLWFERLLARLQHKLLVGDATRIRAAAPRQQKCDRRDARHLLQLLLEKRFPTIWVPSMEERDLRQLLKHRHTLVTMRTRAKNQLQHIALNQGLQKKSKLWTKAGLEQFRSLVLEPWTQRRRDDLLQLLARLDADITGLNKVVEAEAQRWPKAVLLMSHPGVGPIVSLATVVTLGDVSRFAEGKQVASYVGLIPRESSSGAHRRLGAISKQGNSFMRFLLVQAALGAAKGDAELGRAYKRLCQRKHHGVAKVAIARKLVVRLYWMLRTNRRYPEVVRMRGSSSHPVAAVMADPMSGRPASRQPEQKDGPGKP

SEQ ID NO: 97910 - protein, 349 aa, unidentified
MEKLIRIGMDTSKQVFQLHGVNEAEEPVLRKKLRRKEMVAFFQRQAPTVIGIEACGGAHHWGRVLEGMGHQVKLLPPQYVKAYVKRGKNDAADAEALCEAMSRPTMRFVGVKTAEQQAAQMLAGVRDRLVRRRTQLSNAIRGYATEFGLIAARGVDKLEALLARLQAEETETLPALARELFASQGKEYAQLQAQLKEIEAKLMTWHRQNETSRRLVKIPSIGPIGATLLVIKVPHPEGFRSGRHFAAWIGLTPKDHSTAGKVRLGVITRAGDEMLRSVLVVGATAVIRQARRGRGHPSPWLLELLKRKPPKLAAVALANKMARIAWKLMVSGQSYNPALARAISADKAA

SEQ ID NO: 97911 - protein, 412 aa, unidentified
MEVVYPCCCGLDVHKKSITACVLWAEAKGKSRKEKKRFGTFTHDLLQLADWLEQCGVTHAAMESTGVYWKPVWNILAEQFEVLLVNAQHIKAVPGRKTDQKDSEWIADLLQHGLLRGSFVPPQPIRELRDLTRYRVSLVQEINRIANRIQKVLEDANIKLASVATDALGASGRAILEAMLAGEEDAARLAELSKGLLRKKIPELKFALEGRMTAHHRFLLRQLFDHLRFTESKLREIEQEIDKRMGPFEDKVTRLCTIPGVDRVTAWGMLAEIGMNMNQFPSSGHLASWACLCPGSFESAGKRLSGKMRKGNVSLRRCLSQAAWAISMMKNNYLSALYRRIAARRGAKRAIMAVAHALLVIAYHMLKRKEDYRELGADHFDRIDVNRTRRSLVRRLERLGHKVTLESLAQTA

SEQ ID NO: 97912 - protein, 343 aa, unidentified
MATKYIGADVHVTTTELAVDRSGKVLDRYRVPTTIPSLRGVLVQISGSCVLVIEEGPMAGWLYRNLREHVEKMIVCDPRRNHHIARDGDKDDPIDAAKLAALARGGYLREVYHTDDESREAFKQWVSLYHDRIGDRVRQANKIHGRARLYGARIPAVVLKQPQRREPFLSSLRHPELASQLRVLWMGYDTTVAQAAEALKQFRRRSRSYPIVQYWRELPGVGPVRAATLLAYLDTPWRFRRKNRLWKYCGLGLQRTASGSDRHGRPNPAHLHLAWQVNRRLKDAIVGATMNAIVGDNVFGHQYRRLLDHGLIPSNARHTVARTMLTVMWGMWKRTARFDASLL

SEQ ID NO: 97913 - protein, 342 aa, unidentified
MSTIKVIGIDLGKSSFHLVAHDYSGREQFRKHLSRAKLIEFLAQTPATIIAMESCGGSHWLARKCQSFGHEVKLIPPQYVKPYVKPYVKTNKNDYIDADAIAEASTRPSMRFVGVKTETAQVISVIQRIRSSYVKERTACMSRIGAILLEFGMSFPKGHSKMKSLFQWLAYSKESIPQMLMQELIEHHEYYLQLNERIAGQDNKLKQLVEQNEDAQLLKSIPGVGNLTASQCLADISDVGHFKNGRQLAAWIGLVPHQYSTGGKTTLLGISKRGNKALRTLFIHGARSILSRPEVAVAVFGEWILELRARKPFNVAVVALANKLVRIAWSVLSTKQAFEVRV

SEQ ID NO: 97914 - protein, 360 aa, unidentified
MSSERSFVGLDVHAWSVTGHGLDAATGEIWQRKLTPDPTEIESWLRTLPQPVAVTYEAGPTGFGLARHLRGAGLRCLVAAPSKLQRPYGDRVKTDARDAELLARLLKLDEIVEVVVPTEDQEAARDLVRAREDVRGDLMRARHRVSKLLLRNGIVWTGGQAWTGRHDVWLRSQRFDQPSRQLALDAAYETMLLTGQRRDRLDQAITAMAADCEYTDLVHRLGCLRGISTLTGFGLAVEIGDWYRFSGNSIGAFVGLVPTEYSSGQSRSQGSITKTGNSHARRLLIEAAWHHRKTYHHPGLTMRARWELAPAAARARGHAGNRRLNQRWQTFTARRKRPVVANVAIARELAGWAWSLAVLE

SEQ ID NO: 97915 - protein, 440 aa, unidentified
MGTQSAAALTENWGVPAPSGLHYLGIDIGRRHHLAAAISEARMWDGSWERAPVRKVDTTGLGFRELTSWLAELGIPPDQIRIGMEPTGGWYGRTVAAWLERHGYRVDWLQNFALHDRRQLMIGKQTKTDALDSRLIARLLFERERLGLKGGFLQRPPRNADALRMLVRNRARLVEQRTRCRNQLTAIEDVLFPELKDFFKKSVTSSSARLLLESFPTPNHVAAADPADLHRVVVCQGRARGHAARLMDLQVAAADSAGLVTDTDAIVQTQEWLLYQLRLIDGQVQQVEAAINAVLEGWSAQERAVLASFPVMTIVRQAVLLASIGDISCFRDDRQLRKLLGWYPEARESGTSLSKHRLGRSGNRTARRELWLWTLELISPLRPATPFSDYYHRLRGRGMAGHVAMGHVAGKLVSVLFHCLRSGTLYDPQHHARDLGIVDA

SEQ ID NO: 97916 - protein, 355 aa, unidentified
MNSEKYIGLDVHQATIVIAVTDSTGKLIMESILETEAATILQFFAGLRGTLYVTFEEGTWSAWLYDLLHPHVDKLVVCNPRKNALLKDGNKSDRIDARKLAELLRGNQLKPVYHGETGVRMLRELSRSYLTIVKDLSRVMNRLKAVYRSWAIPCAGRDVYYPRNRAQWLAKIPQAGVRPRAERLYEQLDMLRHLRQQARRELLVESRKHAITAKLRQIPYLGPIRSALAVALIQTPHRFRTKRQLWAYSGLALETHISAEYRFVEGQVRRSKKVLSIRGLNKDHNHDLKGLFKGAATMASVRPGPFQDFYQTALAKGIKPTMARLTLARKIAAITLTLWKKGESFDAEKLKSQAA

SEQ ID NO: 97917 - protein, 412 aa, unidentified
MEVVYTHSGALDVHKKTVLAAVIVPNPEGGLLKVERTFGTMTADLLALSDWLLGYGVTHVAMESTGEYWKPVFNILENSLEVILVNAQHVKAVPGRKTDLNDAEWLADLLRHGLLRPSFIPPEGQRDLRELTRYRSTFVRERATLVNRVQKVLESASIKLASVATNVMGISGRAMLEAIVANQTSAQEMAELAKGRLREKREALAKALEGRVKPHHRFVLTELLCQIDSLDETIARFNAEIEAYCRPFEETVALLDTIPGVARATAEIIVAEVGVDMSRFPSAHHLAAWAGVAPGNHESAGKRRSGKTRQGNKPLGAALNQAAHAAARTKNCYLASQYHRLAARRGVKKAIVAVAHSILVIAYHLIQRHEPYRELGADYFDKRRPEATAKRLVKRLEQLGYQVALQQQSAAA

SEQ ID NO: 97918 - protein, 402 aa, unidentified
MIFINCLGIDVSKSESVVAHYKDEVLVKELVIQNNQNGYRHLENYIKHLDSLFILFESTGIYSRGMKRFCAVHKIDYLEMNPLEAKFKMSSLRSWKTDKSDAHKLALLAFRMKDSKVQRQSEEIYFELRERARFHLEMETNQNRLKVELVETLHQTFPGLEKLFTNRYSKIALNIAKTFPHPDYVSMLSDDELVEKVLHSTDKGISVNKAHKYAQKLIEIKNNSFPNVDKSSFLIKKVQYLCDKLLIAIEEKKVFDQEMIDLAKKTTEFENIISIPGIGELTAALLIGELGDIRNFKTNKQLNAFVGIDIKRYQSGTSKSRDTINKRGNKKARRLLYLIIMNIIRGRNHYQSHIVDYYYKLREQPHGKPHKTAVIASINRLLKTIHYLIVNDKLYDYQKAPH

SEQ ID NO: 97919 - protein, 385 aa, unidentified
MDVHSSNFTLCSFEPGYGVTEDKIFGQVQFKEDFINNTEKYISNLKKQRKDIEVVCGYEAGCLGYVPQRELAKKGIKCIILAPTTMAVQKGGKKVKNDYRDSIDIARCLANGSYRPVYIPDTEDEDVRDYIRMRDDHNIALKHIKQQLNAFCLRHGFKFEGKSKWTQKHFKWIKELTCTEKQREIINEYLATFESLNNKIDALDVRIEDFSKQERYAETVKKLTCIKGIKTHTALSFTTEVSDFNRFESAEKFASYIGLTPGEKSSGDNERKTKITKAGNRHLRRLAVEAAWTYMRGNIGIKSAELKKRQKDMPSNVITYADKASTRCQRKYYRLTKMGKESNKAITAVARELCCFIWGMATSHFDSSDAGTIKCDSELSMSSLD

SEQ ID NO: 97920 - protein, 359 aa, unidentified
MKTQRNEISFKGQSIYVGIDVHLKSWSVAVLSQTSVMKKFRMDPNPEGLKTYLTNNFPEADYYSVYEAGFCGFWIHDRLTSLGINNIVVNPADVPTTGGEKLRKTDAVDSVKLARSLRANELKGIYTPDAASLEIRSLIRLKNSITKDMTRQKNRIKSTLRYLGVEIPKEYTEPFSNWSKRFILWLHEVQMNTPSGRDALNLQIEQLEALRKQKLMMTRKLRALGRSDKFKDDLDLIMSVPGIGMTTGMALLAEICDVSRFTDGAHLAAYIGMTPMCHSSGEKDGTGDITLRKNAIMRCNLVEAAWVAIRQDAAMNLFYTECCRRMVASKAIVKVARKLVNRIFYVLKRRKKYVNNVVS

SEQ ID NO: 97921 - protein, 453 aa, unidentified
MVPRNARVSCQPGKSRATLTITHPNAAGIDIGSASHFVAVPPDRDDEPVREFASFTVDLNAIADWLAVCGVDTVAMESTGVYWIPLFELLESRGFTVLLVNARHVKNVSGRKSDVLDCQWLQQLMTYGLLSGAFRPAEQVCVLRSLWRQRGMLLKSQARHVQHMQKALTQMNIQLTNVLSDVVGETGQKILRAIVAGERDGQVLGAMKNARIHASVDEIAKSLHGNWRAEHLFALKQALDGFDFIGTQLAECDQEIEAQLQRLQAHDGEPAKGKKRGRARNAPKFDLRTQLFKMCGVDLTRIDGIDVTTALAVISETGADMSRFPTDAHFASWMGLCPGTKITGGKVMSGKTKRCANRAAQALRLAAAALRTSQSALGAYFRRMCSRMDKPKAVTAAAHKLARLIYTMLTKGEEYTDQGQDYYEERYRQRVLHNLSKRAQQLGMKIVAIEQPA

SEQ ID NO: 97922 - protein, 420 aa, unidentified
MDRAVADVMYAVACGLDVHLAVVVACLVRSGPKGGPVYEERSFATTLRGLRELRDWLLAAGCEAVGMEATGVYWLPVYSVLEGHVQMVVGNPNHMQNLRGHKTDRKDAKWISGLIRHGLIRPSYVPKLEFRESRELTRCRRQLINARTSVRNEISRLLAHQGIPLGSDGLLSNIFGRSGMAILEALAEGRSVLEELPKLLHRSVKHKVGILAAALEAGLGEVSRQLLAMHLGRLEAVEEDIQKVEALIAKQLEPHKDKLKLLMTIPGVSYISACVILAELGVDMTQWPSEKHLSAWGGVAPGCRESAGKHRKAATRKGNPYVCTTMVECAGAAVLKKECHLGQKYKHLCARTGSKMKARMAIARKLLVIVYHVMSNLEPYREPEAKQPSPRNKQKSIQRHLRELQKLGLNVQITEFEPAT

SEQ ID NO: 97923 - protein, 387 aa, unidentified
MIYYVGIDISKYKHDFCIISSASELIVENFSFQNNKIGFQSLLDQLKPYNKSEIHIAFEATGHYSLNLELFLVNNGYSFMKVNPLIIHQFLKTRSLRRTKTDKADSLTIAKYLMSAPYKPNSDLLYTIFTLKSLCRARENLIKERSKFAILLTNELDKSFPELKPFFNNMISTTLLYILEKYTNTKHIATMKDYESIRKLSHGKFTYAKFAQLKELAKNSVGFSNENTDLLISTYISIYNDFNNKIDPINKQISTIIKELNPRMLTIPGIGEISAATILSEYGDIKNFSNSNKMLAFAGLDPSINQSGTLEYNGKMVKHGSGHLRYAIMNSAMAVLRFSPKFYDYYLKKRSEGKCHRVALSHVCKKLIRVIYSLEKNDIDFNPSLLK

SEQ ID NO: 97924 - protein, 359 aa, unidentified
MATRVKRNKINFKGKKVSIGIDIHKKSWRITALVEEEIVMAITLSRPNYDSFRKVLARFKGNHVRIAYEAGPCGFDLYDRLTGDGIECIVTPPSLIPTESGNKVKTDKKDSLKLAQLLEKNMLKEVWVLSPEERAHRQLARTRRQIVNHRSDVMRQIKSLLLFNSIEIPFKSSQHWTGPFMKWLRELDLGSEYLNRSLKALVDLYEYLNAEKKTLTNDVLKLAEEEKYAQRVSLLTTIPGIGTLTAIEILVEIQDITRFKTVDELAAFLGVTPSQYSTGEHIRMGHITHAGNDRVRTNLVESSWTLIGKDPGLRSKYDRIKQRRGGKRAIVAVARSLSARIRRILLDEVPYELDFQKAA

SEQ ID NO: 97925 - protein, 338 aa, unidentified
MNTVTLLGIDIGKNTFHLHGQDARGNQLMRKKLNRCQLLPYLAQLPSCKIAMESCGGSQWLARQIEGLGHRVQLIAAQHVKAYVTGNKNDFIDAEAICEAASRPRTRSVPVKTLKQQILSTEHKLRKSWVDNRTRIINQMHGVLLELRIIFPIGHAALEQVPALMERHELPIRLRNAVERMLLDIQRLTRDIKGIDVEIKQQLSEDAAGMRLLSIPGIGPLTTSALVADVGDASTYKRSRDFAASLGLVPRQYSSGGKTSLLGISKRGDKYLRCLLVQGAHALMIRIDKRDDALGAWVRNLLARKPPNKVACALANKTTRIVWAVLARGGSYNVKQMA

SEQ ID NO: 97926 - protein, 426 aa, unidentified
MRVMYERVAGIDVHKDMIKVGIRGPGHRAWTRTSEVLEYRTFYGVLQTMARELRKRGITHVVMEASGVYTEPVYYALMEQDFEQVAVINPAHAKALKGHKTDAKDALRLAELFECGLLRGSYIPSQALKDLRDLTRYRAKTVQARTSEIQRLAKALESAGIKLDSVVSDLTGKSAGLMIESLIDGERRGQVLADLAIGRMRTAGKLADLSQALTGRFTEHHAALCRLHRDRIALFSAAVEDLEARIAVKATPCQRELELLKSIPGFGDAVAQAWLAEIGPAPHEYFASHERLASWVTLCPGNHMSAGKRRHGRTGDAGTYIKPMLVQAAWSAIKSPGRLQARYHKLVRRFGGPKNPAAVKKAIVAIAHTLLKIAYQVLKSGKPYEDLGADFYTQRESPEQRRAYLLRQLEKLSPGCTITITPAEAA

SEQ ID NO: 97927 - protein, 408 aa, unidentified
MKTLLRRCAGLDVHKVEIVACLRLVEKGKVARRVRRFPTTTQGLLELVEWLEGAGCSHVAMEATGVYWKPVWHILDGHFALILANAMHVKAVPGRKSDVNDATWLADLLAHGLIRASFVPPTPIQELRDLTRTRKQLTREIVQHVQRIQAVLEEANVKLSSVISDIMGPSGRRILTAIIAGETDAEKLAALGSERLGCGRAALSEALRGRIREHHRFLFAQHLRTIEQLEESVAAFDARIAGALAPFRDVVERLNEVPGLGRIAIETIIAEIGTDMSRFPTAGHLVSWAGLAPRLDESAGKRRSTRIRNGAPWLKPALVQAGWAATRKKNTYLQAQFLRLKSRRGPKKALIAVAASILTIVYHMLRDGTFYRDLGPEYFARRSPAKLAANLANRIRNLGYHVEISAAT

SEQ ID NO: 97928 - protein, 343 aa, unidentified
MNEIRVLGVDLGKDICSVVGMDGSGKVLLRRRMRRDSVLKLAAGMPTCIVAMEACCGAHHLGRHLRDQGHNVRLMSPEYVRPYVKAQKNDDRDAEAIAEAATRPTMRFVDLKSDAQLDMQTLHRARDRLVGERTTLINQLRAILLERGIVVAKGRRKLEFRLDQLLADEIAISSRIRGLIEDMRAEWRALDTRIGAFDAEFTNLAREDASMKLLSTIPGIGPLNATAFVASVGKAETFGRGRDLAAWLGLVPRQMTTGGKPKLLGISKRGNGYLRKMLIHGARAALPSLAKGKTLLGEWLRGLLSRTHMNTAVVALAAKMARIIWAVLRSGRPFELAATPSAG

SEQ ID NO: 97929 - protein, 369 aa, unidentified
MADRITYVGLDVHKEGIVVALATGGLRGEAREYGRIANTPTALDRLLRKLGGDGITLRFCYEAGPCGYGIQRQIMASGHECVVVAPSLIPRRAGERVKTDRRDAASLARLHRAGELTAVWVPDTRHEAMRDLVRARLDAVHSLRRARQQLSGFLLRHGCHYGRPAWTKLHRRWLAGLKFEQAVHHVVLEDYIAAVEAAETRRDRLTAQIEAMLPDWALARVVAALQTMRGMALVNAATLIAELGDLSRFANPRQLMAYLGLVPSEHSSGASIRRGGITKAGNGAARRLLIEAAWSYRFPARISRELLLRQENQPKPIRDIAWKGQVRLCARYRKLARTGKPANVVTTAIARELTGFVWAIARQVRVTPN

SEQ ID NO: 97930 - protein, 483 aa, unidentified
MIDDVLDKLNVENGAEVMPLYDYGVGIDTHKNFIQVCVLVRQGGMIKRYESEHTMAWKSMVNAGEWARRVIKEKSVPTIEPDPLRYTIESTSTYHLPVLMAFQGKPSVVNPVLAGSSRRKTDRLDARLLSYQSLTGLWPESFVVSSAVQEFRLLVKQREYHLRECTAITNRINNYILRFGHTLGSYKSVRSIENRALLEDMCGEDYVCADGCLDTEAGRFVCPDGLPAEVKKIILKMYSEYDQHNEQANYYQKQAVGYAKKLLWETDGGYVKGDTLIKNLLTVPSVGEATALLWLSEIVTPLRFKTAPQLAAYCGCDPSLKISAGKVTSQTRRKGNAKLHNQLMIVAGACINRHTEPFGQWGYALSKKHVKGGYKKASGAVARRIAVSMYYVHKQNEPFSYDKYNFYKVDVPDIKLSDMALSKRVYNLLNDNGLTNSKTITEMYLVGKIYEIRGFGKKAAQEINSWIQSNKFHNNSNRRLIDG

SEQ ID NO: 97931 - protein, 339 aa, unidentified
MKYIGLDLHKKSIFATVLGEDGKILSRTKIGPNTRDICYYLKSQGKRDELSVAVEASYNWPYYYRAADTIVLAHPLKTRIIGEAKIKTDKIDSKVLAYMLKADMLPRAYVPRRDTMESKMLLRARISLVRIRTQIKNKIHVIVDRDRDNYSGLENLSDIFGKTGKHILRDTKICPTDHKILTGYLDLMDEIDKKIKDIESQIDKRSLKDRDIELLKTIPGIGTFTAFLVKSEIDDISRFASKGKLSSYAGLIPSTHGSGERLYHGRIVKQGNKFLRWALTEAAQTSIRCSEYFRYHYSKVRSRKNANSATIAVARRMLEVIYVMLKEGREYIEKPVDIK

SEQ ID NO: 97932 - protein, 406 aa, unidentified
MSVQGVVTGESPVVVAVDVGKRTVALSVTDAARHRLLGPVDFEMTGRGLDGILTLIKSRLAGMDVPVRVGIEAAGHYHRPLLTPSVWPADWQVLELNPAHVAEQRRVQGRRRIKTDALDLEAITELVLSGRGLPVTAREAVIGELGAWAAHRTRRVQARTATKNQLLGQLDRAFPGLTLVLPDVLGTKVGRLIAAEFTDPKRLAALGTARFIRFAAVRGLHVRQPLAERLVRAARDALTTADAAVARQVLAADLDLLTELTAQIDASEAEFARLLPLSPFATLTTTPGWGVVRAGNYGGALGDPHRWPGPSQIYRASGLSPTQYESAGKRRDGSISREGNVALRRALIDLGMGLWFNDAPSRTYAAALRTRGKHGGVIACAMAHRASRIAYAMVRDQATYDPGRWK

SEQ ID NO: 97933 - protein, 341 aa, unidentified
MTIGIDLGDVWSHYCTLNEDGEVVDRGRFRTTPSGVEKWFTDVPRARVAMETGTHSIWVSEQLREMGHEVIVANVRELRAISHSNRKSDTVDAEKIARYARVDPEILRPVSHRTVAQQEALTLIRARNLRVRLRTAAVNSVRGLAKPCGYRLPASSTLCFAKRCMAVLPPGLARALGPVLEQIAAMTVKIQQYDRTIKQLTETEYPETQALLQVYGVGQLTALTYVLTLGGKERFKRSRDVGCYLGLRPRRSQSGDRDPQLGITKAGNIYLRSLLVECANHVLGPHGRDSTLRQWGLHLASRGGKQSRNRAIVAVARKLAVLLHRIWITQELYIPFYAVAA

SEQ ID NO: 97934 - protein, 370 aa, unidentified
MKKDNRKTNEEGRQSAAKVAKGLPEITIGIDVGDEHSHFCWLDADGEIVKRGRVASTQAGLEKEFGKIGPARVALETGTHCHWMCEVLSGLGHAVVVADARELKSISGSHRKNDARDAEQLARLARADVRLLHPVSLRKRKTQQDRSVLKARDALVAARTQMICAIRGMVKADGSRLAGCSTEAFPEQVGASIPAGMRRALAPLMETLDVLNEKIRYYDQLVAHIAREEYPETSLLTQVAGVGPVTALYYRLTIEDAERFAHSRDVGAYFGLVPKQQDSGESTPQLRISKAGDEGARRLLVGCAHYILGPFGPDSDLRRWGLKLAARGGKNAKKRAVVAVARKLAVLLHRLLVSGEVYEPLRNSQASQAA

SEQ ID NO: 97935 - protein, 352 aa, unidentified
MVYVGIDLHRRTSHVAALDEEGLELLSRRVTNDPEALRALFAELGGEARVALEAAFGWEWLADLLEREGIELHLAHPRHTKAIAAARVKTDAVDARTLAHLLRADLLPEAYVAPPELRELRELLRHHIGLTRLRTTLKNRVHALLARQGVQRGRAELFGPSGRRFLGELSLPESTRRRLESLLALIADFDRELAAVKREIHARAKDEPRVSVLTRIPGVGVFIALLVLAEVGDVTRFPSARHLASWAGLTPRVSNSGERVRLGSITHQGSAHLHWGLVQAAQTAVRADGPLKATYERIKHRRGSKVAKVAVAREILTLCYYGLRDGEIRRLEAAAARANSSLAMASAGRPTG

SEQ ID NO: 97936 - protein, 402 aa, unidentified
MAEGPTRFFGLDIHKEYFVAVGVDAQREVVFGPQRVSNYQLDYWVSRVLVRQDGVALEMTANTYLFYDTLLPHVHSVIAVHPPNVPLITNAQVKTDKKAALALAQLHAAGMLTGVWIPPHEVRDLRALIARREKMVRLSTMAKNRLHSILHRNHLVLPEKPFSPEQRSWWESLSLSAAEQFLVRSDLDTLEFAQKQVAQAEECLQKESAQDERIPLLVQLPGVAMLTAITILAAIGDITRFPNAKKLVGYAGLGTRVHNSGMTHNSGRITKAGRKDLRRAMVNAANHAIEHHPHWKKVFERLEPHLGRSKAVVAIARKLLVAVWHVLNEKSADRFADSASVARSFFAHAYRVGVRNLPEGQSALAFTREQLDRLGIGQDLQEIPWGSKHHKLPPSKLLPEKK

SEQ ID NO: 97937 - protein, 459 aa, unidentified
MELLHPRWAGIDISKRDGKVCVRIAGSGRRRAAETVTTWSSMTNQVLALRDHLTRERVTCVVLEAASDYWDSFYYLLEDASFEVMLVNPRHVKNLPGRKDVSDAAWLAQLGAHGLVRASFVPPEPIRHLRDLTRTRSAITRERAREVQRLEKLLEDSGIKLSSVASEIMGVSGRAMLEELIDGQRDPAQLAELAKRRLRSKIPALTEALTGRFSTHHAFLARMHLDLIDKHTEAIEQLTTRIEVVIEPFRWFRELVCTIPGISTGVADVLTAETGADMSRFPTPGHLASWAGTCPGSNESAGRVKSTKTRPANPYLKAALGTAALSVSQSKGTYLAARYRRIASRRAPIKAVVAIEHTMLTTIWHMAATGALYDDPGGDFYPAPRSQDADRKAATKTTTTDDQPARSFTSLLEHLATLTRNDLRVAGHDQSGFDLLAIPTPTQRRAFELLHAPIPLTLK

SEQ ID NO: 97938 - protein, 310 aa, unidentified
MDAVYVGIDVSKDRLDVCVRPSGEAFVVARDGRGLEELVERLHALAPRLIAVEATGGFETIAAAAIAGAGLPLVVVNPAQVRHFAQAVGRRAKTDPIDAAVIAHFVEAVKPELRAIPDEAQRLLAELVGRRRQIIEMLVAERQRERRASIARVRKSLSRHIKVLEKELPEIDDDIGTLVRDTPAWREKEDLLVSFPGIGPTLARTLLAELPELGALDRRSVASLVGVAPYTRTSGRWKGKSMIAGGRAYARSAIFLAALVASRHNPMLKIFYQRLLAAGKPKMVAIIAVARKLLTILNAMLRDKKRWQFA

SEQ ID NO: 97939 - protein, 343 aa, unidentified
MTKILKQVAGIDVAQNELVVSLGRVDESLCKEVYAYKTFANKPSGFSALLVWIKKHTDNQVNFLYVMEATGVYHEKVAYHLTDQGFEVSIVLPNKISSYMKTLDIKTITDKTASEAICRFGLERSLKAWQKPKKIFRDLKQLTRERDQIVADRTMSKNQLHAEQAEAFSNDRSLYRTNQRIKLLNEQEREIKREIAELVKMDEELHRKINLIMSIPGVGGLTAVIAIAETNGFELIRNKKQIVSFGGLDVIVKNSGTSVKGKPRISKRGNRHLRKAMHMPALTAIRHDERFKAIFVRLVSKHGIKMKAAVAVQRKILEMIYTIWTTEKKYDKEYLQKENAATA

SEQ ID NO: 97940 - protein, 316 aa, unidentified
MGAVVIGMDPHKRSATIEVMAGDEAVLGGGRYGTDAAGYEVMLAHARRFPERTWAIEGCQGIGRHIANRLIADGEHVVDVPPKLSARARVFATGQGRKTDATDAHSIALVGTRMRGLRPVVDDEKLTVLRILVDRRRSLGEDHTRMVSQLHRLLLELIPGGAKKDLSAAQAKQLLAKVRPRDVAGRARRRVAAELICDLERIHARKKAADKELTVLLDASGTTLTDLHGIGPSGAARLLVEVGDITRFPPKAHFASWNGTAPIDASSCEQVRHRLSRAGNRQINRVLHIMATVQLRNPTEGRAYYDRRKTDGKTSM

SEQ ID NO: 97941 - protein, 408 aa, unidentified
MQVLYPRCAGLDVHKDTVVACVRCVSEPEHHETRSFATTTRELLALGEWIASHGCSHVALEATGVYWRPVWHVLEGQVELVLANAHHIKNVPGRKTDVNDAMWIADLLAHGLIRSSFVPPQPIQELRDLTRTRKQVVREISQHSLRIQKVLEDANIKLGSVLSEVLGVSGRAMLGAIIEGERDPHKLADLAHGTARHKHDALVEALHGHIRPHHCTLLKLHLNLIIALEHTVAEVDAAVGKCLDPIRQRARLLTTMPGVRDTVAEVIVAEIGIDMTRFPTPGHLLSWATMCPRNDASAGKRRSTRLLKGNNWLKTALVTAAWAAVRTKTSYLRAQFLRLKARRGAKKAIIAVAASMLTAAYFILRDGVPYRDLGPNHFDRQQRGKTVRRLLRRLHDLGYNLPPQHQPV

SEQ ID NO: 97942 - protein, 363 aa, unidentified
MSKLLYVGMDVDKEKIVAAKLTSSAKVSDECVIANAPQAVEKYFAALTKEGEVMAAYEAGCFGFGLYHQLTDLGVAAVVAAPGLIPRKPSDRLKTDRRDARTLAFTLRAGQLTAVHVPTKQDESVRDYLRMCEDMRDDLRKCKQRILHLLLRRGIRYERGGPWTVKHKDWLATLDLGSELDRQTLDSYLARLQELESTCSPLAAEVESIAQGDRYREPVRTLSAFKGIKTLIALSFITEIGDFRRFSSAAQFMAFLGLVPSEHSSGPKHRQGGITKAGNSHLRRLLVEAAWHYRSYHPTSRVLVERRRGVDPRIISYVNRAGRRLNRKYLHLLLRGKRSQLAVTAVSRELAGFIWGAMVGQVA

SEQ ID NO: 97943 - protein, 515 aa, unidentified
MAAVFAAAARPDKVAVVAIDYAKKEHRAMIVNGAGEVLRQPFTVVNDAEGVAFLLEAVRVTIKRHAIKPAQVIYGGEDEPSYVTNFLAALAAKKALVVRVNAAEAKKQREGFTASTDDLDLLGIAKCILTRRVTMASPARLADEESRRVLALRELVRGRRRMVFSLTAVKNQIHTLADRLFPGFLDEKKSGVIPFGEASLTLMEAAFSSPAVARRKSAALTTLLCRGGCGEARAREKAAKLQECARAALAPEGSQVAALQESLGSSVRLLRSTMEVIENLTAAMAQELSRLPAAFFTTLPGVGVVLAAALAAELGPHLHTASFSRQCAYAGIVPRTSQTGGPGQPATQGAPLRRCNRILKDYLVQAASKQQQWGPPEFKAAYAQLHSAGQHADYIIARRVLRTLRALHRQHGPWLPPELRDETYTKTKAGRAARSAYYHDLLDKLTGKWRRGPRWTEYFGADRVLGASLRTANSLFGFGLRFPERNAAASSQPAISADTSLSSACNPDTADDEPG

SEQ ID NO: 97944 - protein, 341 aa, unidentified
MEEISVVGIDLAKHVFQIHAIDGAGRVVIRRSVRRHELSGMVASLPACLVAMEACAGAHHWARQFQAMGHQVRLIPPSRVKPYVGRQKNDAADAAAICEAVQRPAMRFAAVKTEQQQALLLDHRTRDLLIRQRTMMVNALRGHLAEFGVIAAKGPAGAQAVLAAVEAEAGPPGVPPVALPALRVLAAGVRGLSEQIEAIEKRLKAARAEDPQVRRLMSIPGVGLIGATAIAATVPDATLFRSGRDFAAWVGLVPRQHSTGGKTRLGAITKMGDRTIRRLLISGALSAIYRCKRGADFAATWLGRMLARKPVRLVAVALANKMARIAWALMVRGETYRPASA

SEQ ID NO: 97945 - protein, 430 aa, unidentified
MQEKQTDTTQEPNYAALIGIDWSDEKHDVHLRVCETGQEESKVIKGTPEALDEWIQQLRERFEGRPVAICLEQSRGMLVYMLMAHDFITLYPINPAMSAKYRQAFTPSHAKDDPTDARLMMELLLYHRDRLIAWKPDNVQTRTLARLCEERRAAVNLRTKLVQKLNAKLKIYYPQALTLTGENLSSTLACDFLLKWPSLAKAKKVKPAKVRAFYYGHNCRSESLIQERIKLLATAKSATTDEAILIPLVASVKMLARLIRDLYPAIKDFDEQIKALFAQHPDAHIFNSLPGAGEALAPRLLVSFGSDRNRYSSAAEVQQFSGIAPVTERSGKQTWIHRRWQCPKFTLQSFHEFAQHSIGWSAWANAYYQFYKSKGKKHHVIVRALAFKWIRIIFACWKNHRSYDEAKYLETLHRRGSPLCEYLGKPALVA

SEQ ID NO: 97946 - protein, 355 aa, unidentified
MSNEKYIGLDVHQATISVAVMDSQGKVVMESILETKASTLLEFFAGLRGSLFVTFEEGTWAAWLYDLLKPHVTEVLVCNPRKIPLLKQGNKSDKIDARKLAERLRLHDLKPVYHGETGIRMLRELARSYLTVVKDLSRVMNRLKALYRSWAIPCAGRDVYYRRHRSEWLEKIPEAGTRRRAEQLYQQLDLLQHLRQQARRELLAESRKHAITAKLRKIPSLGPIRSALAVALIQTPHRFRSKRQLWTYSGLGLETRDSGEYHFVKGQPRRRKKQATIRGLNKDYNHDLKGLFKGAATRASVKPGPFQEFYQRSLAKGIKPTMVRLTLARKIAAITLTLWKKGEDFDINKLNSQAA

SEQ ID NO: 97947 - protein, 338 aa, unidentified
MGKKHATGPTLVAIDVSAKSLQVAIETPGEAARDGEFENTAEGHRALLRHVTKGGGLVRVCLEATGSYSLDVALHLSSHARVEVMVLNPKAARRFAEAQMRRAKTDLVDARSLLEFLRRMPFTPWAQPGPKRLELRGITRRIAALGHDRVAEKNRLEAALATKETPKAVTDDLRDSIASLERRIEALIDLALALVHADPELSLALECLSSVKGIADRSGITLLGELLLLPEDMSPDEVVAHCGLDPRPKQSGVRDGPRSISKIGNSVVRGALFMPALCAARFEPSVRAFYEQLLARKKVKFVAIVAVMRRLLRALWVMLLRKTTFDGALFAPKSAAAA

SEQ ID NO: 97948 - protein, 557 aa, unidentified
MVQLSPIRSVVPSSVRRTVVNSLEALGRLIPIKRVPSRVRNLAVAWSGEENGNMSRQPEKPSKANAKQRSNRKTRKKRMGLDNRPVLEPNAAGIDIGAREMFVAVPPGRNSHPVQVFDTFTEDLHRLANWLQACGVTTVAMESTGVYWIPLYDILEERGLKPCLVNARHMKNVPGRRTDWHECQWLQYLHSVGLLRGAFRPEADVCAMRVLVRHRSELVQAASQHVQHMHKALTQMNVQIQHVISDITGRTGLAIVEAILAGQRDPAELAKLRDSRIRATEDTIRKSLVGNWRREHLFTLKQSLQLYRTYQQQMVECDQEIEKLLGNFEPRVDPTEKPLPPDRKRNRSEQKRRKKAGHPETGFDLRTEVYRLYGVDVTQIPGVETIALPLFSEVGRDLSRFPTPAHFASWLGLCPDNDISGGRVLWTGTRKVKNRAGQMFRLAAHSLHRNLTPLGNYLRRMKAKLGPTAATTATAHKIALIFYTMITKQVEYDDTIWATRDADRQKRFEAKLKRQAQLLGYQLVPIDKRPAAYRVPQKRGTRGGGPKLMRNWASILP

SEQ ID NO: 97949 - protein, 351 aa, unidentified
MTTSSLAQEVIVGVDTHKDVHVAVAIDVNGRRLGEHLVPTTERGCVELHRWALGLAPRVCYGVEGTGSYGAGLSRYLQAQGSPVTEIRGPNRKLRRDRGKSDTIDAEAAARAVLAGTSTISPKAGNDWVEQLRILRVARRSAVQARTQAINQMHAVVVGAPQELRDSLQQLPRHELILRAARFRVAGATDAQSTVRFTLRLLALRYKALSDEVAAIDQAIAPLLQKHAARLLALTGVGPEVAGALLVVAGDNPQRLRSEASFAALCGVTPLPASSGKTSRHRLNQGGDRQGNCALWRIAMTRMSCDQRTQAYACRRTAEGLSKREIIRCLKRYIARDVFRALPEASALDRT

SEQ ID NO: 97950 - protein, 377 aa, unidentified
MDAPFLKWHLGAKVVIAPSPRNQKGVSIMKITTIGIDLAKTVFQIHGVDEHGKVILRKRLNRSEMAVFFAKLSPCLIGMEACGSAHHWARKLSQFGHVVKLMAPQFVKPYVKTNKNDMADAEAICEAVARPNMRYVAVKNIEQQGVLSIHRARAGFVKSRTALANQIRGLLAEFGIVIPQGIRSIMKKMPSILEDEENGLPGVMRNLMRGLTEHLKGLDTLVAELEIQIQRWHRESDASRKLESIPGIGPITASAIVATIGNAREFNNGRQLAAWLGLVPRQHSSGGKPTLLGISKRGDAYLRTLLIHGARSVIRVAETRMDGDNWLRKLLARRNRNVASVALANKNARIIWALLVREQSFQPGYVTTGNWAVTSSD

SEQ ID NO: 97951 - protein, 343 aa, unidentified
MDQYVALDVSLQKTAVCVLNASGSVVIEAELPSEPAALTAFIQIHAPRAARVGLESGPTSPWLWHSLKAAGLPVVCMDARHAHAALSVRPSKSDRNDARGLAEMVRMGWYREVQVKSLAAHERMALLGVRRQLVDMRVEIDGQIRGILKTFGMVVGSGNKGAFAQRARMLVQDHPVLSALVDKLIEVRAVAVAKVAALDKEIRRFVRDDPTLRRFMTVPGVGPVTALAFRSTIDEPDRFKRARDVGPYLGLTPRRYQSGETDRQGRISKCGDRFTRTCLYEAANVLLTKVQRWSPLKAWGTRLARRIGSKKARVAIARKIAVILQCIWTDGTEFWWTKEPATA

SEQ ID NO: 97952 - protein, 429 aa, unidentified
MNFRPIAGIDVGKFFSEMAILSPSNEIVSRMKIHHDSNADVERAIELLNKMEKDFASRPFVVMESTGHYHKIIFHSLCKAGFEVSVTNPIQTDSIKNIGVRKVKNDKVDARKIALLYRFQELRTTNIPNEDIECLRNLCRQYYKLSDELTAYKNRLTGVVDQLMLNFKDVFSNIFSKAAIAVLEEYPTPTHILKANRNKLISLIQKKSRKSLKWSTSKYDLLVAKAREFAPLSIHNSSNIAMLAVYISMIKTLEENLEKVLKAIHQLLAQDMQKDMPMLALTLELLQSLPGIGLLTAATILAEIGDFSAFSKSGKLVVYFGIDPSVMQSGEFTGTRNKMSKRGSRLLRRVLFTTALANIRTKRNMMACNPVMLEFYKTKCQSKPKKVALGAVMRKLVCIIFAVLRDRKPYELRYPQEHAQMLAAKRSAA

SEQ ID NO: 97953 - protein, 403 aa, unidentified
MAKVFIGVDPHKLSATIEVVDGRERVMATGRFGTDKAGYAAMRKHVSSYPDRVWAVEGSNGTGRPLAQRLLADGEHVVDVPAKLSARARLLDTGHNRKTDAHDAHAVAVVAVRTKNLRVLSYDADLEVLRMLVDRRDELSKSKVQAVNRLHRLLSELVPGQSKKDITALQAKAILASVRPRDSVGKTRKRLALEQLAEMVAIEKKMKASSKELKTLVIARGSHLMDLTGVGPVVAARILADVGDVARFTDRNRFASWTGTAPLDASSGEQIRHRLSRAGNRKANHVIHIAAVNQIRLDTPGRAYYRRKLAAGKTRMEAIRCLKRRISDALYRQLRADAHTTPAADQNAGPGGHRGASQISSAAGFHPHTGTSDQPLPGPAPSTLPAPKVTRKSPTSRPLEPAP

SEQ ID NO: 97954 - protein, 350 aa, unidentified
MGKLYHIGVDLHKKNLQVAVLDNAGEILDMRRLGNNDKEGLKEYFSSFPEETPVVVEATTGWEWLSDLLEEEELEVKLANPHKVKLIAEATIKTDKIDARTLAQLERANFLPLSYLAPREVRERRELLRHRMILVRLRTSLKSRIHSILNKKGIIIEETTDLFGKKGREILKEVDLPEIYREETDTYLDLIDRLDDHIKVKEKQISKIVREEELARLLMSIPGISYFSGLLILSEIGDINRFNSAKKLCSYAGLAPTTSQSDEAVYHGHLKKDSNKYIKWVLIEAVEHIIKKDPQLAYKYEKILSKKGKNKARVAVAQKLCISIYYMLKNRQPYKTRERKRNRVLFRVSP

SEQ ID NO: 97955 - protein, 337 aa, unidentified
MKIAVGIDVSKSTLDVAVLEPGGKTAQFQVPNTPAGHGALLDRARKAARPAGSALHFCMEVTASYHHGLALFLVEAGELVSVENPRRVRHFAVADGQVHKTDRADAKGIARYALAMEPPPWRLSEPHLRELVALDRRVTELKAMRNQETNRLEAPCLPRLVEEGVAASVGAFDAQVLLLEGRIEEILSENEVLAAQVELLESVPGIARRSAVGLLAEAGDLAAYETAQDLAARLGLNPVQRRSGTSLNGRSRISKAGNAHARSRMYMPTVVAIRVNPPVRAFYERLVAAHKPKKSALLAAERKLVMVCYGVLKSGKPFDPHHDPKKEAAPKEKGLTP

SEQ ID NO: 97956 - protein, 403 aa, unidentified
MEGPLISLDVSKGKSNYRFFENGTDRKGKKGVIRHDIQGFDSIRDEAEKMEERLRIKPSVIFESTGVYSDVVEKYFTDKGFDVYVISPLLSASMRKEGVRPAKNDSLDTLSIAKVFYSRDDLRKCSENDKKAERLREMSYELDMMNRRIRPMKCQFLRLLDKVWPCLDEVSDYSSRFMLDFIIAFGHPENIKTVKGVLSVIRKSEMGTAGRKDKIAQDLFDYCHTHLSAVSKDSSYVELLKRMAIELKAMAKKKSELIDRMAEEARNKDEFARLLTIPAVAKTTALKIMARVGDISRFRNAEALVAYCGLDPRVYQSGKMTGEHRTITKKGDCILRSTLFLAVKLMVMLYPDTKVARFVAAKAKNGLSYKQAVVAGSAKLARIIYSMLTHHENYVEFNADIVA

SEQ ID NO: 97957 - protein, 394 aa, unidentified
MKLIGIDIEKNKHFFCVMDQQTGEIISQPVSFSNDKEGFDFLVQEIKSYPKDSILIGMEDTGHYHFALLKYLLDLQYTVALINPKTTDFNRKMQGGITKNDKLDTINICDVLDTPERKKQYRITKVNSFDLYEQKQLTRHHHNLKEEENVYKNRLQKCIDIVFPEFNKLFNSKYGIVYMNILKMFGSAENIANTDIRTIRKCFEIEGRGNRISLTPERLKECAISSIGISSSAEVIQIKHLTAQIELIEEQLTEIDKKIEEFSIQNNSPILSIPGISHFSGTSILAELGDISNYSKPSQIIKFAGVAPLHYESSQFNAQHTAITKKGSKYLRKTLYQIILPVIRHNPVFNKYYQLKISQGKGHRCAQGHCVRKLLRIIYHLLKTNQQFDPQLLR

SEQ ID NO: 97958 - protein, 458 aa, unidentified
MKVKEVSALRERGLHLAERDAEPQVVGLAPQTTNERKADTMKKYILRETQTVEPQKSPRPPRPEPGLTALVDVICGRPVPPPPPLAGLVLFIGLDVHNDSIAVSIAPSDSTEVRRYGIIGGEHDDVLKLVKKLQAVHPGATLKFCYEAGPRGFALCRCLRSHGLDCILVCPSKVPRKPGERVKTDRRDADQLARLFRAGELTGIYVPEPEDEAMRDLIRARFQVGKAQHRARQQLKMYLLRHNLRYGGQTSWSAAHLRYLAQIKMPFPVQQIVFQEMLEVISEATARLERYDQEIERAVPGWRWEPVVRSLMSLRGMALLHAATLVAELGDFHRFEHAGQLMGYLGLVPSEHTTGTDRQQGGITKMGNGPARRALIEAAWQYAVPARISPHLKKRQEGLPKAITDIAWKAQLRLHHRYQHLTRVGKKKSQVAVTAVARELAGFVWAIARQVEPRPAKP

SEQ ID NO: 97959 - protein, 379 aa, unidentified
MFENITYVALDDHKRKHQVAVLLPGVERDDAVTWRVENTPAGIRKMVRKVLKMAPEDVRFCYEAGPNGYVLQRQISKFDRVTCVVMAPSRTPRRPGERVKTDRRDARKLVGLFRAGELESIVPPMEEEEATRDLVRCRRIAQMRATASRHQLDKFLTRNGYIYRDGKNWTRRYWDWLRSLKFDDWRRERTFQAYVFGIEQDEDRVKRLDLEIVRAAEEEPYRTLVGFVRCFLGLDTLSAMILTTELYAVGRFTTAPSLMGFVGMVPSEDTTSWNPHRGPITKAGNGHVRRILVEAAKHYRHPARVSKALAQRRKGQPDWVIAIADKAQTRLHQKYWKLVLGKGKHPNVATIAVARELVGFIWAVLIQAATTQKIDELVA

SEQ ID NO: 97960 - protein, 356 aa, unidentified
MSGLKHQRRSATIKHYAGSDVSVKETSVCIIDEAGKTTREVKVASEPEAILAILMNEALTIERVGLEAGPLSQWLYSGLAETGLPVICVETRHMKAALSAQLNKSDRNDARGIAHMMRVGLYRPVHVKTLASQKRRMLLTSRQLLQAKALDIENDLRGTLRNFGLKVGMVGVAKFEARIRDLVVDHPDLAAITEPLLIARRVLREQLGVLHRRLLAVVRQDEVCRRLMTVPGVGPVVALTFRATVDVAARFKNSKAVGAVFGLTPRRHQSGEIDRMGSISKSGDAMVRTVLFGAAQVMLTRTIRWSWLKAWGMKIARHRGMKRAIVAVARRMAVIMHRMWADGSEFGWTNPSTPAA

SEQ ID NO: 97961 - protein, 324 aa, unidentified
MAKRITICAGIDTGKRKLDVAIDGSSLQLQVENTAEGHEVLLVWLRRHKVKRIGIEASGGYELPVVTKLRRKRFVVVVFQPAQVRAYAKFHLQLAKNDKIDAALIAACTAAVKKIHAAPDPRLQPFAEHLTLIDQIGEDIQLHKNRLETCRDPRIQKLWEEEISRLAKRQRVELKALAAAIRQHPDLAQRLNLIYSVSGAGMSTAVAILVRMPEIGTLNREQVAALAGLAPYDDDSGERSGARHIDGGRKRLRRALYTAALPASFFWNPHLIALYKRLKAAGNGHKSALIACARKLLIFVNTVVARGTPWQEQQPARATNPAAA

SEQ ID NO: 97962 - protein, 417 aa, unidentified
MKKHSNSLKQSEAPAKRRKLGVVVERKPQEVMAELVVKLAGQLDVEIVPAVEGKKDGRDAVRPNLNRLTVGVDLGDQWSNYCILGLGGETLVEGQFRTRKQEVAEFFQALAMSRVVVEVGTHSAWVREIMAGFGHEVLVANPRLMEGSKRRRRKSDRIDAEKLARLGRMDPKSLHPIEHRSTEVREDLVILRARDALVKSRTELINSVRGQVKSMGGRVTGCSSVAFSQKAIAEIPEEVHETLQPLLRLIATLSEEIKTFDQRIEKLAAEKYMQTQLLRQVSGVGPVTALAFVLTLETPLRFARSRDVGPYLGLVPKQEDSGDIQPQLGISKAGDRMLRKLLVGSAHYILGPFGPDTDLRRFGMRLCERGGKNAKKRAAVAVARKLAVLLHRLWASGEVYEPLGHGSVTRPAQAVAA

SEQ ID NO: 97963 - protein, 337 aa, unidentified
MKYSGIDLHSNNSVVTVTDEEDRVVAEKRLPNDLAKILGLLMPWREEMAGVVVESTFNWYWLVDGLQAAGFKVHLANTTAIKKYAGLKHSGDETDARHLAHLLRLGILPTGSILPPAQRAVRDLARKRMQLVRSRTTHILAIENITARQHGARISSNQVKRLTAEIVDQMALPEDVALAIKTNVAVITTLSAQIDLLEKRLQERIGERAEYGLLTSVPGVGQVLATTILLETGPIERFAAAGNFASYARCVDSVRTSNGKKKGEGNTRNGNKYLAWAFVEAANFALRYCAEAKRFYERKRAKTNNVVAIKALAHKLARACFHILNERKPFDVTRCFA

SEQ ID NO: 97964 - protein, 345 aa, unidentified
MTDLNIKKNNHEAKLSLQAGIDVGSEELILVIRKNSKSFNPQKFSNTPADRARLVKKLVKLPGIIVCLEATGIYHFDLSIALHDAGVSLMVVNPKASHNFAKVLMRNSKTDTVDANTLAEYAERMDFVAWTRPSDEKIALRCFSRRINALTHQKAAAKNHLHALTATQATPKAVLRDAKLAITHLQKRIDRLKAEALVLIGKHSELERVLELLTGINGIAETSAIALMGELLLLPPDLSHREWVKFAGLDPRAFDSGKSVHKKTRIAKAGNRYIRAALYMPALSAHQHDPHVGAYFQHLVVDNGKEKMQALCAVMRKLLHAIHGMLKHDKPFDNTRFYAIPAVVG

SEQ ID NO: 97965 - protein, 353 aa, unidentified
MQIVSALDVHRRQITYKTLELGSGEVRRGRVSPATRESVREWLERFAGCDAEFALEGTTGWRFVVEEIERAGHHAHLADPAETAAKRGRKRRAKTDNADCDLQLKLLLAGELPGSWIPPAHILELRTRVRMRKTLVDQRTAWQQRLLAQLFHQGIPAGLKPRTRAGREALAQAELSAAGRELVALALRMLDTIDRELVPLDQALRAFARRQPGCRALIAKLYGVGAITATAILAELGDARRFTSSDDAVRHSGLDVTVYQSDDKRAPGHLSHEGPELLRWALFEAAQSACRPSSPDHAYYLQVAERIDHNRACLSVARKLCRRAYHILRELGEEALAPVEYAQQAEEAIAAAA

SEQ ID NO: 97966 - protein, 341 aa, unidentified
MSSVSVIGLDIAKNVFQVHGVDEQGEVVDRRQIRRGQMMVYFSKLPPCLIGIEACATAHYWGRELRSLGHEVRLIPPQYVKPYVKRNKTDAADAEAICEAVTRPSMRFVGVKSADQQAVLVLHRSRDLLVRQRTMLSNAIRGHMAEFGVVEKLGMAGTMRLAKVIDDRNDERIPDLARRALAEMFKQLYAVLQRIDELKRDIIVWHKQNAVSQLLEGIPGIGPIAATAIAATVPDASVFSSGRQFSAWLGLVPGQHSTGGRQRLGKISKRGDGYLRRLLVIGATAALERSKSVRMRPWVQAMLKRHPKKLVAVALANKMARTAWALMNTGEVYRAPKSAVA

SEQ ID NO: 97967 - protein, 400 aa, unidentified
MLSIGIDVSKGKSTVCGMKPGGEIVYAPFEVQHTREGMSELVSLLRSSGEEVRVVLESTGSYHCPVVAALLENGIFVSVINSLRMKRFCSQSIRKVKTDRIDAMQIALYGLAYWQELQPTRLPEDTYRELQLLARQYYQMTSLLIKAKVDFNALCDPILPGMQELMSDHAGRHKLSDFVLRYRHTTHILEMGETRFRKDYCKWAEKKGYRNCERMAVLIFATAQNGIPVLPNAPSTQIVITEAIRVLHTVEASRDAILTQMQALAKTLLEYSLVREMPCIGDTLAPRLIAEIGDVRRFHSKRALIAYAGIDAPPYQSGKFCANNRHISKRGNRYLRKTGYEVMQSYVMHKPANDPIFTFIEKKRGEGKSGKLAMVAGLNKFLRVYYGKVTELYRSLPTIE

SEQ ID NO: 97968 - protein, 341 aa, unidentified
MDIHTIGVDLGKTIFHLVGLDWRGEVVVRKKFSRAQLLRFTANRHVQLIGMEACGGSHFLGKALQEQGHEVRLIPPQYVKPLVKTNKNDFIDAEAIAEAVGRPSMRFVPIKSDDQLDLQSVHRVRERWVTRRTAVVNQIRGLLLERGITVPKGRCHLEAALLPILTGAEAKLSGTIRLLVSQLKLELDQLTVRLEETDALIQQTAQENDACRRLDAIPGIGPVTATALLAAIGNGIAFHKGREFAAWVGLVPREHSTGGKQKLLGISKRGNSYLRKLFVQGARAVLQFREKQSPGLKAWLAKLSSRTHYNVVGVALANKLARMAWAVLARGDVYRPPVLPC

SEQ ID NO: 97969 - protein, 326 aa, unidentified
MLPTLGIDISKDSFHLELSINEKLRHRKFANRKEGFGELCAWLAKHKAIYVHACLEATGPYSEALAIYLHEQGHIVSVVNPVQIKAFGQSELLRNKDDRPDAGLIRRFCEKQRPAPWTPPPPHLRELQALTRHLENLIETRQQQINRLEATNTKNVAKSLRKLVAHLDTEIKRTEQQIDDHVDRHPDLKQQSELLDSIPGVGKRTAAKLLAEIPDIAQYKSARQVAAHAGLTPRNNRSGTIRGKTRLSKTGNARVRKALFFPAIVAKRHNPIVRAFCQRLARNGKNKMQVVGAAMRKLLHIAFGVLKSGKMFDPNHELLINLSIDF

SEQ ID NO: 97970 - protein, 334 aa, unidentified
MELFRERVCGIDIGKATVVACVRIDKGVGVKAEMTTRTFATTTAGLLLLLGWLRQKRVQLVGMESTGVYWKRPFYLIEGDFEVWLLNPKHVKIVPGRKSDVKDSQWLAELTAHGLVPASFVPPRPIRGLRETTRYRTALVRERTREVQRLHKVLEEAGIKLSLVASDINGASGTAMLQALIDGQNDPRQLADLAKGSLRLKIPQLIEALTGDYTRLHGLMAQRMMQRIRELDRAIADIEIQIQVQLLLYAEQAHRLMTIPGVGEHVAPVIIAEMGIDMSQFPSAAHVASWAGLCPGINQSAGRNKSSATRQGSPHLRGALGDAAWAASRTSFNR

SEQ ID NO: 97971 - protein, 461 aa, unidentified
MRKVRKVAGRGGKKRVDVTANLEILHPNAAGIDVGNAEHYAAVPVGRAPQAVQTFGSFTADLHRLGQWLRACEIDTVVMQATGVYWMALYEVLESYGFKVYVVNAKHTKTLPGRKSDVLECQWLQKLHTFGLLNNSFLPPEEIRVLRTYLRQRENLVAGAGTCIQQMQKVLTQMNVQLANVLSDLSGKSGMEILKAILSGERDPYRLAALADPRVQASRKEIAQSLEGHWQEDLLFVLRQVHDLYFFHLDNIAECDRRIEAHLQTLQSKVDLATQPLPQPTSLPRRKHIPQTNLQEELYRITGVDLTRIDGLQVQTAQVVLSEIGVDMTRWPDEHHLASWLGLSPNHQITGGKVIRRGTKKVLNRAATALRLAAQTLHHSQSYLGAKYRRLRAKLGAPKAITAMAHHLARLIYRLLRFGTEYHDKGMQHYERQYRKNQIEWLKKQAAQLNMQLIPNTGVTQ

SEQ ID NO: 97972 - protein, 403 aa, unidentified
MFHLGIDVSKKAARYFILDESGSKLKAFTLDNDKESLESLPGRFESFSIAAGNLLIGIEATGSFWENIFSFLKNKGFNIVLLNPYYTNKFREALAKKAKTDDIDALVIAQLLRTGEYVQSQVAEEDIQALRELTNLRYEFVKERKNLQRQVYSLLSIVFPEYEKTVIAKPFSQASMAILMKFPTAKHLADAKPKKIEKIVRKIVGNNFNIQEIQSLIDTARNSIYSGRAKDARATTLKMLLGHIENLSSSIEELEAQMKAILSPSDEDDDFPGHNLLSIKGVGDKTLAAIISYLGSDGSNFPDSKSAVGYVGFYPRIYESGQTRRDNKISKRGPKVLRWALYMSAVASLRHNKEMRTLYHKKLSQGKTEKQALICVGKKLLQIALSMLKSGETYNPARVFVSN

SEQ ID NO: 97973 - protein, 386 aa, unidentified
MHDGTNLPVPERTGIPGDCATLFVSLELSRSTWVATSLAPGSKKMSKHTLVGGNGRELLDLLARLKTRAEQRIAAPVKVVAIHEVGLDGFWIHRLLEANAVESHVVDPASIAVPRRHRRAKTDAIDGETLLRTLMAWQRGEPRVCAMTVPPSPSEEDCRRVSRERATLLRERIQHTNRIRGLLFGQGITNYNPLHKNRRECLEELRTGDGRSLPTHVKAEILREIDRLELVLRQIGEVEAERDEMLRPAEASSPAALLMRLKGIGAEFATVLYFEGLFRHFENRRQLAAYAGLAPSPWKSGSIDHEQGISKAGNPRLRTTMVELAWMWVRYQPDSALSGWFRQRVGSERGRTRRISIVALARKLLIALSRYVTHGEIPAGAVMKPV

SEQ ID NO: 97974 - protein, 389 aa, unidentified
MYFCGIDIAKKKHDAVIVDGEGNTQVKPFTILNTATGFEELITRLQSPDQNVLIGLEATGHYWLALYERLSDAGFKIVVLNPLQIAAYRRSGIRKVKNDRKDAWWIADYLRIANLQPTDRKLPILLKLRELTRFRYALMDQVGDVKRKVLSILDRVFPEYETLFSDIFIKSSRALLKEAVSAEEIANFNLSELTTILKTNSQGRFGQEKASRIQDLARESVGIGFLTDAVYLEMHCLLEQLDLLLSQIEMLENSIDEIMDQIPQYITSIPGVGKVTGSAILAEIGDINRFESSEKLVAFAGIDPTVYETGQFVAKKTRMSKRGSPHLRYALWQAASMAIQYDPELKAYYQAKRAEGKHHGTALGAVCNKLISRIYIILKEQRPYVVRET

SEQ ID NO: 97975 - protein, 355 aa, unidentified
MRQEKYIGMDVHQATISVAVMDAGGKLIMECLLETKAATIVEFIRGLHGTLSLTFEEGTSAAWLHDLLQPHVSRLVVCDPRKAALLKEGNKSDRIDARKLAELLRTNQLKAVYHEEHGIRALKELGRSYLTITKDVTRVMNRIKALYRSWGIPCSGTRVYAPRHRAEWLAKIVEPGVRVRAEHSYQQLDSLQPLRLQARRELLRESSPHPAVKLLRQIPSIGPIRAALLVALLQTPHRFRTKRQLWAYSGFAVETHDSGEYRYVRGKLQRNRERITVRGLNDNHNKDVKSLFKSAAISASTRPGPLYDCYVARVEKGMRPTMARLTLARKIAAITLTIWKKGVSFDPKHLHRQAA

SEQ ID NO: 97976 - protein, 357 aa, unidentified
MGKSIRNLTAVTRVGLDLAKNAFQVHAVDATGAIVVARKLTRGRLVPFFAELAPCVVAMEACASAHHWGRALIELGHEVRLIPPAHVKPYVRRNKSDQVDAAAIYEAMSRPGQRFVPVRSIDNQAELMRHRARELLAGQRTAALNALRGHLAEIGLIAPQGAHHAYGLKRMAADGFNENGEIVVPDCVRGALRSLVGQIDALDEAIGAIDRELAASVKADETAKRLMTIPGVGPVTASAIMATIQDASAFASGREFAAFLGLTPRQNSTGGKTRLGRITKMGDRYLRKLLVVGACATLRHRRGHSDALRLWASGMLERKTIKYKFNLTAVALANKVARIVFVLMTRGGQYDDRPVAA

SEQ ID NO: 97977 - protein, 372 aa, unidentified
MRQDSKIYVGLDTSKLKISVAVAEAGRDGDVRFTGEIDSAPDAVERLVTKLAKRHRDLAFCYEAGPTGYGLHRQITRLGYDCIVVAPSLIPKRPGERVKTNRRDALTLAKLHRAGELTAVWVPDPEHEAVRELVRAREAAMEDLRRARQHLQSFLLRHGRVFTGRQGWTRAHTRWLCEQRFEHPAQYLVLAEYRQAIEAAEIRLKRLDEQVAEAVSSWSMAPVIAAYQALRGVAFLTAVTFVTEIGDVRRFDSPRQLMAYLGLVPCENSTGERIRRGGITKAGNGRARRVLIEGAWTYRFPARMSRLLQERQAGLTKAVCDIAWKAQVRLCARYRKLMARGKRQAVVTVAIAREMAAFLWAIGREVEPHSAT

SEQ ID NO: 97978 - protein, 326 aa, unidentified
MSKQVLYAGIDVGCEELWLSVPRRKPRRFEHSKRGIRSLYNWAAKEAGDEQLHFCMEATGVYSISVASHMVSQYQAQVSMVNPARISAYGHVQMKRSKTDQLDAEVIRSFAESQKPAVWKPAPGPLRRLSALVTQADAVKDCLGQWHNRHHAQKFIRDLPDEVKKTQRAIERSLTTQLRKIERTIANLCAQESTLAQQVALLCTIPGVADQSAVKLLAYGQNWLTERSAKALTAHAGLAPHHHQSGSSVRGMSRIDKRGNSKLRSTLFMPALVAVHHNPILIKFYKRLLSNGKPKKLALVAAMRKLLLISRAILINGKPFNPQIPY

SEQ ID NO: 97979 - protein, 406 aa, unidentified
MQVTYERCCGLDVHKKTVVACVITPEGQEIRTFGATTGRLHELAGWLTERGVSHVAMESTGVFWEPIYNVLENYPFALLVINAQHIKAVPGRKTDVKDAAWIADLLRHGLVRASFIPDRAQRELREAVRYRQALVQNRSQVINRIQKVLEGANIKLSSVASNVAGVAGRAILEALVRGEDDPQALADLAKGRLHAKRQELEEALFGVVGPHQRLLLASHLRQVDFLDGEIAKLDAEVQQRTAPFEEALTRLDTIPGVGRRTAEMLAAEMGVDMTRFPTAAHLASWARVCPGNNESAGKRKSGSTGHGNRWLRSGLVESARAAARSRQTYLSAQYHRIAARRGAKRAAMAVAHSILVIAYRLLKDGTTYHDLGPNYFDERQERNVVNRAIQRIERLGYHVTLQPRAA

SEQ ID NO: 97980 - protein, 458 aa, unidentified
MAKRRKKAKSRRFKQTVLPAELQHINLNAAGIDVGSERHMVAVPEGRDEISVREFGTFTADLEALATWLKKCGVTTVAMESTGVYWIPLFELLERRGFEVKLVDARHVKNVSGRKSDILDCQWIQKLHTYGLLASAFRPPDEICVLRSYLRQREMLRQTAAMHIQHMQKALQQMNVLLHNIVSDITGVTGMKIIKVILAGERDPRVLARNRDGRCKHSSATIAKSLVGNYREEHLFALCQAVDLYEIYQAKIADCDEAIIKQMESQPDVSDDGPPSPDKPIQARDRVRSGVDVRELLYKKSGVDLFAIPGLAADTLLTLASEVGFDMTPWKTEKHFASWLGLCPGTKRSGGKVLDAKTKRNPNRAAQAFRVAASSLYRSLTALGAFYRRIKARSGGQQAVTATAHKIARIYYAMLTKGTRYVELGHRAYEQRYKQRRIDHLNRQAKSLGFQLVPSTAP

SEQ ID NO: 97981 - protein, 347 aa, unidentified
MNIIWIGCDFHPGFQSIAILDTETGESVERELDHGSDQAVQFYEGLRGRRVVIGMEACGNSGWFERRMAEMGHELWLGDAGTIRSLAVRKQKTNREDARHLLKLLLQERFPRIWVPSAQMRDSRQLLLHRHKLVQMRTRVKNELQHLMLNQGVQLKRKLWAQTGRKQLEALPLTGWTGQRRTDLLQLLDELEGKIAHLDEAAKQEAAQYADTALLRTQPGVGPITALAFVLTIGPVERFARSKQVASYLGLIPAEHSSGRQQKLGRISKQGNTFLRTLLVEAGQSAARHDAELKRAYQRLAHRKHRALAKVMVARKLAVRLYWMLRTGKPYTPAHMQDSPSHPVVVS

SEQ ID NO: 97982 - protein, 348 aa, unidentified
MEEISTVGIDLAKSVFQVHAIDPVGNVIVRRQLRRQQMLKFFEQLKPCLIGMEACGTAHYWARELSALGHDVRLMPPAYVKPYVKRQKNDAADAEAICEAVTRPTMRFVPIKSVEQQSAAMLHRSRALLVKQRTMLLHSIRSHLAELGISTGAGISQIARIVRELARGERTDLPELARFVLEELARLVCDLADRLQAIEKKLVSWHYRNDLSNRLETIPGVGFVTASALASIVPEPEVFRSGRHFAAWLGLVPRQNSSGGKSRLGRISKQGNRYIRQLLILGATSVLRHIRKDGGEGSGWVGGLLRRRPPKVVAVALANKMARIAWSIMKRGGEYEEINELRAIQQAS

SEQ ID NO: 97983 - protein, 388 aa, unidentified
MSKPFDLSKSLTALDQDSTLIVVIEMSQSSWLVAARAPGLARDPLKKLPPDPEQLFKLIDRWREESRRAGRVVRRVCVAFEAGRDGFWLARLLRQHDIEAYVIHPTSIPVKRDHRRAKTDRLDTELLMRAFLGWLRGEADHCSMAAIPTLAEEDAKRPTRERESRVNARSRLVNRMKGALARLGIRGFNPKLRKAAEKLEELRTGAGEPLPPNTLAELRRDMAQLRFVADQIKQIEKAREARLEKAPREGAHPMVLMLASIKGVGLETAEMLVAEVLSRKLRDRRAVARYGGLTGSPDESGSRSREKGLARSGNARVRRGMIQLAWRFLMFQKESALAKWFEARTANGPRGVRKTMIVALARKLLIDLWRFVEDGTVPVGVELFDSRA

SEQ ID NO: 97984 - protein, 345 aa, unidentified
MERYLGLDVHAASCTFAVRDAAGKRIRRDVVETNGRALIGYLKQQPGRLHLCLEESEWAHWLWEILSPHVAEMVVVHGERTRGSKSDAIDADGLAERIQTGRVNRPVFKAPRRYAKLRELARVYRAVLGDVTRTKNRLKSCYRRRGVACPSTAIYDPKTRGVRIGALPPAMRPAVELFGGELDALEQLKTQARAALVKESHRYRISRILETAPGLGEIRVAQLLPIVVTPHRFRTKRQFWSYSGFGIVTRTSADWIHLGDRWARSHVAQTRGLNLNHNHVMKAIFKGAAITVIDRRAKPTRFRETYERLCDQGTKPNLAKLTVARQIAATVLAMWKSEEVYDPTR

SEQ ID NO: 97985 - protein, 407 aa, unidentified
MEVLHAHCAGLDVHKESVVACVRHMANSKVTTVVKTFKTTTQELMALSNWLSAEGATHIAMEATGVYWKPVWHILSDGEFELILANAAHVKNVPGRKTDVNDATWLADLMAHGLIRASFVPDEPTQRMRDLLRTRKQMVRERSSHIQKTLEDANIKLDSVVTDILGLSGRRIIEALIAGQTMPQALASLAHRRIHASADELEAALRGRVTRHHRFLLKLHLDQIDALDAALTRIDEEVSANVEPFRTAIEMLSSIPGISTLSAEVIVAEIGIDMSRFQTAGHLISGAGLCPKNDESAGKRRSNRMKKGAPWLKTTLIQCAWAACRKKDSYLQAQYLRIRSRRAAKKAIGAVAASMLAAAYNMLKDGTLYQDLGPNHFDNRAKGKNVLRLVNRLQNLGFDVQITPIAA

SEQ ID NO: 97986 - protein, 325 aa, unidentified
MEKTFIGIDVSSNQLDICVFTLGGKHSFVIKNTIPAITQFFKQYDSETVFVAMENTGRYNWSLYDALSSFKGHIYVVSALHLKRSMGLIRGKNDKVDAIRIVDFIQKNYDQLTEWRPASAAIKQLKILLSERNLRVAQKKQLDQQLGYYTLMKSSGLDKELLKLNRQLIKALKGQIVTLEKKIDEIINSDENLSIQAKLITSVPGVGKVLTWALLSATEGFQKITEPRKLACFCGVVPFEHQSGTSVRGRTRVSSFADKRLKSILHMAAMRAVRLKNELQVYYHRKVNEGKNKMAVLNAVRNKIIHRVFAVIKQQRPYQMDLVLS

SEQ ID NO: 97987 - protein, 358 aa, unidentified
MIESTTLTPIATIGIDLGDRTSQACVLDNASGDVISRFGFESTVSGLERRFTKMDRGLVVLEAGGHSPWASRAFTRLGFRVIVANPRKVRAIATSERKSDRVDAETLARLGRADERLLHPIQHRDARHQEHIGVLRARDQVVHVRTAMINHVRGRAKSAGMRLPDASAEAFADKAAPALPDALRPALEPVLDLIRQATATIRTFDKQVAKLGEDTYPETQVLQQVHGVGPVTSLAFVLVLGDRDRFRHSRDVGAYLGLCPRVHQSGDINPQLSITKAGDRFLRRLLVGSAHYILGPFGPDCTLRRLGKRLMERGAGNAKKRAVVAVARQLAVLLHHLWKTGEVYEPLRGSPPLPPNPT

SEQ ID NO: 97988 - protein, 373 aa, unidentified
MSNVRFIGLDVHAETIAVAVAEPDGEVRSLGGIPNRPESIQKLVKKLGPTKQLRVCYEAGPTGYVVYWQLTALGVRCEVVAPTLVPVKAGDRVKTDRRDALKLARSYRAGDLTPVWVPDTAHEALRDLVRAREAAKKDQLRARHRLGKFLLRQGRRPPTAMQAWTQKHLRWVKTVHFEHAAQEATLLDYLHEVEHMADRIGRLEGAIDEAVKTAPERMRTVIDALQALRGIALVSAVTIAAEVGELSRFAKPRQLMGYSGAVSSEDSTGRRIRRGAITKTGNAHLRRVVIEAAWAYRYRPAVGAPLRKRQASVSDEVKAIAWKAQHRLHARYRHLTAQGKCKQQTVTAIGRELLGFIWAIGVHVESRMGRAAA

SEQ ID NO: 97989 - protein, 345 aa, unidentified
MKITTIGLDLAKNIFQVHGVDEQGHVVLKKSLKRTKVLPFFANLEPCRIGMEACGGAHYWARQFERFGHTVKLMAPQFVKPYVKTNKNDAADAEAICEAVTRPSMRFVPIKPPEQQAVLALHRARQGFVKARTAQANQIRGLLTEYGLVIPQGIGQIAKRLPVVLEDGENALPEVFRALLQRLGEHLKTLNRQVEELDEQIQRWHREQAASRKLAAIPGIGPLTASALVATLGDARQFENGRQLAAWLGLVPKQHSSGGKPTLLGIGKRGDTYLRTLLIHGARAVIRVAKRPSNHAGNWLAQLLHRRNPNVAAVALANKNARRVWALLAHDREFQPDYAPAAIGV

SEQ ID NO: 97990 - protein, 424 aa, unidentified
MKITIASEKVKHAGSLVVGFDVGQSKLNALSRVEVDGRLVQLEDELRNRTDTIRRCLLKYSEHAAAYGLGNVHVVCEPTGGCERKLLRTARQLGFTTEYVSGQAVHRCTTVESNDTGKSDRKDPGTIHTLAMLGRTLRVRDLSGPYLELRRLNEFYEDEDRTVVNIRTHLYAVVQELFVDWPLPPQFLYTGPGRALVEHYGCSPYRIVADGRDRFVERMRAAGPGFRIATAAKLWKAAETSVLHRHEEAVERRLADRVQALRADWERHEGRRESIKQELVRIYEQLPEAKAFSSLPKQVGRHLLARVIAETGPLRDFGHVRQLWRFAGLNLRERSSGTFKGQLKISKKGRALLRKVIYQIAFGNLIAKGGMYATWHGRKKREQANGMKSIVAVMRHFLKCLHAIACSGQPFSAERLFLSEAMAA

SEQ ID NO: 97991 - protein, 343 aa, unidentified
MDHFSGLDVSVKETSVCIVDDTGRIVREVKVASEPEALLRVLTNPAYHFKRIGLEAGPLSQWLFSAIAEAGLPVICVETRHMRAALKAQINKTDRNDARGIAQMMRVGLYRPVHVKTLRSQKLRMLLTHRRLLQSKAIAVENDLRATLRNFGLKVGMVGTVKFEARIQELVENLPDLVVLVEPLLIVRRGLRQQIGILHRRVLAIVRDDDVCRRLMSIPGVGPLVALTYRVTVDVPARFRNSKAVGAVFGLTPSKYQSGEINRTGAISRCGDDMMRMMLYEAAQSMLTRTIKWSWLKAWAMKIAKHRGMKKAIVALARRLAVIMHRIWVDGTEFRWSREVEPA

SEQ ID NO: 97992 - protein, 415 aa, unidentified
MNTHCQLRHFGGLDWAKQHHQVCILDGQGQIVERLQFEHSGPGWAQFRATIQKYPALGMAIETSQGTVVEQLLASGVTVYPVHPKAAKSYRQRQAPSGTKDDELDSWSLADALRTDGQGWRALSEQDPLIAELRLLCRDEEELITQRTALVNQLQAALQEYYPAALEAFDDWTAPYAWAFVARFPTAGELVEAGAHRWRAFLHRHRLWQPELAQRRLEIFGRADQLCGGEALTRAKSRLALSLVKLLQALQGQLDDYRAAIEKLFAEHPDRDVFGSLPGIGPKLGPRLMGSLGDNRGEYPEAQGLQCVAGSAPVSFQSGQMRRVKIRWHCDRFLRHTVHLWADGSRKTCAWAAAYYAAKRAQGKSHACALRCLAQRWLKILWKMWQTHRPYDPEFHARNQQRHGSWVLQLNPKGA

SEQ ID NO: 97993 - protein, 317 aa, unidentified
MAMQVGKLIVGADVAKAELVIHHDDRDEIIRLKNSKLEIRRWLKQQSLNTAIAVEATNVYHLDLVELAHSLGFEVYVIDGFQLSNYRKSVGGRVKTDPSDARLLSRFLKNEGEDLRPWSPPPAVYGKLQSLLRRRAALVTARTAMTQSWANESLLKAAFETFVKSIDRLDQLIQKKIKEVLREAGLQEQVARCQAVEGIGFLTAAALVMAFTRGEFKSSDSYIAFLGMDLRVSDSGQKNGRRRLTKRGCSEIRRLLHNAAMAASRTAAWKGLYEQHRSSGKATTQVLVILARKLARVAFALMKNQDEYVTKDGKLAC

SEQ ID NO: 97994 - protein, 451 aa, unidentified
MTKKKMEMDIVNPNCAGIDVGSKSHYVAVGQALEDVKEFGVYADDLTTICLHLKEYGITSVAMESTGNYWQNLYVELEQHGMQVTLCNGKFTKHAKGKKTDVKDCRWIQKLHALGLLTGSFLPDQTTEQLRTYCRQRTNMIDLAAEASNKMQKYLKLLNFRLDVVVNDICGLTGLSIIADICKGNLDPEKLSELRHGNCRTSQKEIAKALKGNNRTDFLFGLKQEYESYLFYQKKIDDCDKQINTFLKNQINTNPEKKKLKTDDKKHKRINKNAIKGIDLNQASYQYFGGVDLMKIEGLSHSTILTIMSEVGPDGFEKFKSAKEFTSWLRLAPNNKISGGKILSSKTPKGSNRLKIALRHSANAIGNLKDTHLSDFFRRVAYRKGRATAVSATARKLGVIIWIMISKKVAYKQPTEYLFLDQKRKMKLVERIKKNIVKFELKPEEVGFAMT

SEQ ID NO: 97995 - protein, 416 aa, unidentified
MDRATVKAFVGIDWATEEHAVCVVDPQGVILGERRVAHSGDGLHTLCQWLTDLTGARPDEIVVAIEVPHGAVVETLLERSFGVHSINPKQLDRFRDRFTVAGAKDDRRDAYVLADALRTDGHWFRQLQLEDPLVIELRECSRLADDLQQERVRLGNRVRDQLLRCFPQMLQVMPHVGKLAFAAIWRRIPTPSAAQRIRVTTLTQVLRRARVRRLNAEDMLTTLRETPVHVGPGTIAAATAHIRCAIDRLEVVNAQLREAHREVRRLLDALAEHERAAHHVELDDVTILRSIPGLGPTVLGALLGEAAQPVETRDRDALRALAGVAPVTKNSGKRSGKRSFVVMRTACNPRLREATHHWARVAMQRDPKSRQAYAALRARGHSHGRALRSIGDRLLAMACAMLKSRTLFDPSRRIVA

SEQ ID NO: 97996 - protein, 320 aa, unidentified
MTDSKKKSHIGIDVSKHQLEIAVYDSDYVYRCANKQSAFTELIAKLVALRPARIVLEATGGLELPLVNALHAAGLPVVVINPRQVRDFAKALGLLAKTDRLDAQVLARFAAVIQPALRPIKSAEEQELDALTGRRGQLVEILAGEKNRLKSANSPTVREEIKAHVEWLEGRITALDRQLEKLLKTSALWQRRNHIFQSVPGIGPVVSLSLLAELPELGTLNRHQISKLVGVAPLNRDSGKQRGARHIFGGRARVRSMLYMAAFNAIRSNPVIKAFYQQLRARHKLYKVAITACMRKLITILNVMVRDNTTWKVERKTLSA

SEQ ID NO: 97997 - protein, 375 aa, unidentified
MSNHSEAFVAFDSSKLRNAVAIADSGRTGEIRFLGEIENSTTATAKLVRKLASKYERLTFCYEAGPTGYELYRQIKSLGQECIVVAPSLIPKRPGDRVKTNRRDAVSLAKLLRAGELTAVWVPDRHHEAMRDLTRARDTAVNDLRSKRQQISAFLLRKGLHYCAGKKTWSQAHLNWLMSQRFEYPEHRLVFEEMMMAMRQAQERLERLEQAMRAAVPDWSLAHLVTALMAMRGIDLISAATFLAEIGDLSRFQSPCELMAYLGLVPSEDSTGDRIKRGPITKAGNRRARRTLVECSWSYQHPPRVGKDKQAKVAAAPQAVRESAGKAQSRLNRRYRALVRRGKLKTVAITAVAREFAGFIWAVAREATAARAAAK

SEQ ID NO: 97998 - protein, 373 aa, unidentified
MNTIYIGVDFHARQQTICYLKTETGELVTCELKHQDKQALRAFYAQFRGQVIVGLEASGYSPWFERLLEELDCEVWLGHATEIRRRARWRQKNDRRDAELILDLMLHDEFPRLHRPAVQSREVLRMLRYRQKLIKIRTMSKNSLQALALQSGLAKGSRLFTKDGQQQLGTAEMSPVMQWQREHWLQLLEPLNQQLLETMAWFKAQSKGDICISRLRTHPGIGLLTSLCLMHTLQPVSRFRNSRKVAAYAGFDPVERSSAERKCFLGISKAGSRVLRYLLVEAAHTAIRKDEDLKRFYKRLADRRGRPKAKVAAARKLLIRAYIMMRDEIDYAEFRHRAVAARLARRGQGPAGPEVLIGQPASAECRDQLTSQH

SEQ ID NO: 97999 - protein, 379 aa, unidentified
MSSNVCHQIIYLAIELSSSSWVIAYRLPANDKAKVHRLEGGDGAGLLAFIASLRHRLDPSDDASTLDASTLVVSCFEAGRDGFWLHRLLSAHGVISHVVEPTSILVTRGARRAKTDRLDAFGLLRVLAAKFAGDPDACRIVVVPTVEEEDAKRPHREREFLVQERVRIENRIAALLATQGVRGRPSLRSWDADLRALRTGDGHPLLTHLVAELNRLRRRLSLTLEMIRELDAVREQALEAQHDSASRTVKALCTIRGIGVNFASVLTREVFYRTFDNRRQIASYLGLAPTPFQSGGMDRDRRINRAGNSRARKTLVQLAWLWLRYQPESSLAAWFRDRVGSLQGRTRRVAIVALARKLLIAIWRFVTLGLAPEGAIIAA

SEQ ID NO: 98000 - protein, 339 aa, unidentified
MNRIVVGVDIAKRIFQLHWVEPETGEIVALQLRREKFLEHFANRSSCVIGMEACGGSQHWARLLQKLGHEVKLLSARMVKPFVCGNKNDAADARAIWTAVQQPGIKVVAIKSEGQQAVLALHRMREQLVKFRTAQINGLRGLLTEYGEVMPQGRAGIKRDIPGALGRLSDRLPAMVIETLREQYARLGEIDEQMAQIEQRLRQWQREDCATQRIAAIPGVGLLSATAAIATMGDAKAFKSGRAFAAWLGLVPGQTGTGGRVRLLGISKRGDKYLRTLLIHGARSVLTHSKSPPEWLTELVKRRPKNVAVVAMANKMARTIWALTAHERAYQQGYVSRPA

SEQ ID NO: 98001 - protein, 398 aa, unidentified
MTESSDYESVQVFIGVDVGKDTHHAVAINRSGKRLFDKALPNDENKLRSLISDLKQHGQILLVVDQPATIGALPVAVARSEGVLVGYLPGLAMRRIADLHAGEAKTDARDAAIIAEAARTLPHALRTLKLADEQIAELSMLCGFDDDLAAQTTQASNRIRGLLTQIHPALERVLGPRLDHPAVLDLLQRYPSPEKLASLGEKKLAAQLCKLAPRLGKRLAADIAQALAEQTVVVPGTNAAAVVLPRLALQLITLRKQRDEVALAVEQRVLAHPLYPVLSSMPGVGVRTAARLLTEVACRAFASVAHLAAYAGLAPVTRRSGSSIRGEHPSRRGNNALKQTLFLSAFAALRDPLSRAYSTRKMSQGKRHNQALIALARRRCDVLFAMMRDGTFYTPQAS

SEQ ID NO: 98002 - protein, 408 aa, unidentified
MQTLHKRCAGLDVHKKEVVACLRLVVRNKVTHQVRRFATTTKGLIEQADWLEAAQCTHVAMEARGVYWKPVWHMLEGRFRLILANAAHIKGVPGRKSDVNDATWIADLLAHGLIRPSFVPPQPIQELRDLTRTRKQLTREIVQHTQRIQAVLEEANVKLSSAITDILGQSGRRILTAIVGGESDPDTLSALGSPRLAASRSELSDALHGRIREHHRFLIGQHLKTIEQLEATITAFDARIEAALAPFRDTIDRLKVIPGLSETSVQILLSEIGADMTPFPTAGHLLSWAGLVPRLDESAGKRRSTRVKKGAPWLKPVLVQCAWAAARKKNSYFQAQFLRLKARCGPKKTAVAVAASILETAYHMLADGTCYQDLGADHFTRRNLAREADKLVKRIRSLGFDVDIRAAA

SEQ ID NO: 98003 - protein, 352 aa, unidentified
MTTITTIGLDLAKKVFQVHGVDAEGKVVVARKLRRKEVLAFFAKLPPCLIGMEACGSAHYWAREIIKLGHTVKLMPPKYVKAYVKRGKTDAGDAAAICEAVTRPNMSFVPVKGLEQQGLSMLHSARSQLIGQRTQLINGVRGHLSELGVIAARGLLGFAELAAIVRDKSDRRLPMTARAALMVLVRQIEMISTEIAALDSTLRKENKASELGPRLETIPSVGPVIASAFRARVTDPALFKNGRHLSAWIGVVPENDSTGGKVKQKGLSKKGDRYLRSLLVNGAMAVVRQAQRRPDKHPLVAKLLGRMSAKQVAIAIANKTARIAWAIMVHGGVYEAGHRAPQYRAQACAAAG

SEQ ID NO: 98004 - protein, 347 aa, unidentified
MNFYTQQHKHYCGIDLHARAMYVCILDQHCTKLVHKNLPTTPEAFLRLIAPYREDLVVGVECMFTWYWLADLCSQEGIAFVLGHALYMKAIHGGKAKNDKIEAHKIAVLLRGGMFPQAYVYPSEMRATRDLLRRRCHLARKRAELLAHIHNTNSQYNLPEIGKRLANKSNREDVAEHFPDPSVRKAIEVDVALIDQYDQLLGEVELDLTRSAKAPDVQPFARLQSVPGIGQILALVILYEIQDIARFPRVQDFVSYCRLVKCAKESNGKRFGTSGKKIGNVHLRWAFAEAAVLFIRQSQPGKEYFAKLEHKHGKAKALTVLAHKLGRAVYYMLSREHAFDLKRFVTA

SEQ ID NO: 98005 - protein, 331 aa, unidentified
MEVKEVVGIDVGKEENEGRIHSSQEVLTFENNKKGFKQLLSWVSKNTTLDSQQILYAFEHTGLYSFPLALFLTENNYHFVLLPGLELKRSMGITRGKSDKIDAKRIARYTYEKRESITPYQMPIEEVVQLKRLLTLRERLIKQCSGYKASLGEYKHFLTKKDNSALFEVQESMIKALKKQIDKIDKELDNIIKGNGRLKKMYDLILSIKGVGPQTALFMIAYTNGFSRFEKWRKFASYCGIAPFPYTSGTSIRGRTKVNNLANKKIKSLLDLCAKSSIQYNMEMKKYYEKRLEEGKNKMSTINIIRNKILSRIFAVVQRETPYVNTLAYAG

SEQ ID NO: 98006 - protein, 327 aa, unidentified
MKITTIGLDIAKNVFHMVEISRSGRVLNRKMLRRAQLLAFFANHDDCVVVMETCSGANHWARQFTSMGHQVKLISPKYVKPFLRGNKNDFNDAEAIAEASQRDNMRFAPVKTVEQEDIQALHRQRERMKKSRLALINQIRGLLAEYGIVMNRGIATARRLLPEILEDAQNGLSAMSRDMFAELRDELLDLDQRMTRCERVIKAVNKSNPHCQRLDAIVGIGELTATATYAAIGDGREFKNGRHFSAWLGVVPAQHSSGGKTQLLGISKRGNTYLRTCFIHGARSVLLASAGKTDALSVWAQSVKARRGHNKACVAHWLTNWRVLPGW

SEQ ID NO: 98007 - protein, 324 aa, unidentified
MSSKTNMYLGVDVAKDTLAVCLMDAHKTVQLRATYANTPPGFRQLWRALGGMDPAALHIGMEATGIYWEALAQWAHAQRAVVFVLNPARVKAFSRAEGQRQKTDPVDAGVIARFILAQALHPWTPPAPALRELTALVRRLDGISAMLRVEKNRAATATLPVVRASLRRTSAALKKEYAVLAHAGERILAATPALAHDLALLMTIPGVSRITARRLLVFLRRTPYETARQAGAASGLTPTHCLSGTSIHKKPHISRLGDAALRQALFSPAVCARRYNPRMVPWAQALTQRGKCNKVVICAIARKLVHCAFGVLKHQTPFQPPQAA

SEQ ID NO: 98008 - protein, 342 aa, unidentified
MKTKFIHFVGIDVSKGKIDVCLIVNFEKSELFFSEFEQNKKGFAAFKKWLKEHAGKDLSQVFVCVENTGLYDDAVLYYLANNEISVCLENAATAKAAKRDQRQKNDKLDAKGIALYALRYHDEMELWDKPREVVEKIKQLLSCRSRLIMHLTALKQAQNEADSVKWSGVKLIKNNEAGIRGLQKDIEKIEADIWKLIENDATLLKMFQLLLSIPAIGKITAWHFICYTNEFKRVKSGKQLSAYCGVVPFKEKSGTSINKPARLPKRANFILKKLLHLCALTAIKMKGEFAAVYQQKLEEGKHVLKAINVIKNKLALRIAAVIRNEEPYKENYVYKLTVNRAK

SEQ ID NO: 98009 - protein, 409 aa, unidentified
MRITCGIDWSERHHDVALMDEAGQVVGRARIGDDLAGFTQLIELLAEQTGQEEPTRIDIAIETDKGLLVASLVAAGFRVFAINPRAVARYRERHGQAGGKSDPGDAAVLADILRIDRHRHRSLPADTALVRGIKAVARQHKEAIWARQQTVSRLRSLLRDFYPAALQAFPILTHAAALTVLRAAPTPKAAARLTPARVATLLRRAGRRNDPGLAERVASQLRQDAMRQPAEVEQALGVAAAGLLDIITAMTSAIKALEEQLSDFFARHRQAEIITSIPGLGTVLGARILGEIGDDPARFSDIAGLRGFAGTAPITRASGKSKIVSARHIRNDRLADACHWWAFAAITKSLGARAHYDRRRAAGDTHNAALRNLANKLIAKLWHCLHNNVPYNETTAWPTPPAHASPQAA

SEQ ID NO: 98010 - protein, 339 aa, unidentified
MNRTAVGVDIAKSVFQVHYVDPETGEIVNKPIKRAKFMEFFANRARCLIGMEACGGAQHWARQLMKMGHEIRLMPAEFVKAFNIRNKNDAADARAIWLAVQQPGKPVAVKTEMQQAMLALHRMRRQLVAFRTMQINGLRGLLTEYGEVMGRGREALDKAIPEVLRRVAERLPAVVIDTLREQWNGLTKLDEQVACIERRMREWKKEDKAVKAISEIPGVGLLTATAAVAMMGDAKAFSSGREFAAWAGLVPKQTGSGGKVNLHGISRRGDTYLRTLLIHGARSVLTHAKDPGPWVEQMKKRRPLNVVIVALANKIARTIWAVLAHDRPYKTGYVSVKPA

SEQ ID NO: 98011 - protein, 346 aa, unidentified
MEHIGIDVHKNQSQICILTSDGELIEKRLATERKRFAAVLGSRPGARILIEASTESEWVARCLEALGHEVIVGDPNYSPMYGQRTRRVKTDRRDARALAEACRSGTYRAAHRTSDERRHLRGRLAVREALVRTRARYISLVRALLRREGLRVRSGAAEKFLERLAEVDVPALLRQELKPLLTVMNSLGTQIARAERKMAALAKQNGEIRRLCTAPGVGPVTATSLVATLDTAARFRGAHQVEAYLGLVPCERSSGEKQYKGRITKTGNNRTRWLLVEAAWVLLVKAKSAQAQPLQAWAHRIAARRGKRVAVVALARRLAGILYAMMRDGTEFDAGRFVTDRASATA

SEQ ID NO: 98012 - protein, 362 aa, unidentified
MYIGVDTHKKAHVLVAIDDQGQTGGTHTMANTPSGWAAALSWAHDRDAECIWGIENSGSLGKGFAQFLLIQGESDVHEIVPHRTAQYRRRGRSQDKTDAADALAMARLLRAETEFLPTVARDDVSTELRLMSDHRDNLVAERTRLINQLHAQMLQIDPCYEENSGALTSLAGVRSCRALEIPHAEGVVRTRLLIVRQLVGQVLQLAEAIETVETALKQRIQASETPLVQLCGVGTIIAARLIGELGCVPRVHSAAALAALAGIAPVAVSSGGKHGHRLNRGGNRRLNKAFHMIALSQLRCEPLARAYYAKKRAEGKTARAALRCLKRRLVDVVYRLWCKGEGERVGNVPAHKADLALCRSAA

SEQ ID NO: 98013 - protein, 311 aa, unidentified
MPANAIPHYVGLDIAKDQLDYCMSDTAEGSFPNTAAARANFIEQLLLLRTARIVCEASGGYEKIVVAELLGAGLEVCVVQPGRVRAFAYAEGLLAKTDRIDARLLRRYGEKITLRLAVPADPSATVLRELLEHRRQLTTQLSEVEGRRALAGPTLGPLLQRQKTFLQEQIAAVEAMIRAHIDHDPDLRAKSARLQQIKGVGPVLSATVLAYVPELGQIEDAQLSALMGVAPYPKDSGTTHAPRHIRGGRSQVRHVLYMAAVATARCNPILAAFYQRLRAHGKPAKVCLVAVMRKLVCLMNRLIQNPDFALA

SEQ ID NO: 98014 - protein, 412 aa, unidentified
MYYVGIDIAKITNVTSIINDKDVFIKKSFKFNNDEKGFKEFTNLLSSIDKNIDNFIIAMEATGLLFENLYLYLKGKGYNVILLNPYQTSKFREMDTMKKVKNDNIDAIMIASLIKSGRYSKAYVSEEVYASLRALHRHRASLEEELKKHKRQVSSLLAVVFPEFEQVVKNPFSVSGLALLEKYPTAKHYTYTSPQRILKVFRNIKGNNFNIQKAEKLLALAESSIYSGNAYDERAFVIQSHIRMIKTLQKEIESIDNEMLKLFNASPSFTKEEEQEVTDIIDNLRSIPGVSDKTLFTIMGECGNLDRFKNINAFIGYLGLYPTLEQSGNKTSYGKLAKRGSKLAKKALYQAAVAAIRHNDEMKKLYCDKVSQGKAKKEALVIVARKLAAIILAIYKNNTPYNSKRVFNQNTA

SEQ ID NO: 98015 - protein, 461 aa, unidentified
MRNNRKSGDRPGSTRPIAGLPIVRAKVAGIDIGSERHWVCAPGLEGSGREVAEFGATTPELVRMAEWLKERKIESVAMESTGVYWIAPHEVLEKDFEVLLVDTRQLARVPGRNKKTDPSDCEWIQRLHSCGLLNGSFRPQEQVCMLRTLVRDKANLVAESADWVRRMQKSLDQMNVRVHRAVSDLNGVTGMAIVRAIAAGERDAQKLAQLRDRRCRQSEQEIAEQLSGHWREDHLFSLRQSLQMYDAIAERITAYEQEILRKLATMEIGEYPGGVVPPVKNLEKGKAIKKRGQEPKRQALYRMSGVDVTQIDAIGVETVEVVLSEYGPDLSRFPTEKQFVSHATLAPRVPKSGGKPLKHKKRNSASTRVAAALRMAALSLRHSATALGAYYRRLARRIGGDVAVFATARKLATLIYRLLRWGQPYVDEGAEAFEQRYRQQHIKGLALRAKELGYQLMPTTT

SEQ ID NO: 98016 - protein, 418 aa, unidentified
MNAVGIDVSKRKSTVTIRKPGDVVIMAPRDFCHTQSSINELIATIKGLEGETKVCMEHTGRYYEPVASYLSAAGIYVSAVNPWLIKDFGNESLRTPKTDKSDAKKIARFALDRWTKLPQYSRMDELRNQLKTMNRQFGFYMDQKTAMKNNLIALLDQSFPGANNFFDSPARSDGSQKWVDFVYTYWHVDCVRSKSQAAFAEHYKNWCKRKGYNFSASKAKEVYLAAADLIAVFPKDDSTKMLIRQAVSMLNAISETVETFRIKMNEAASQLPEYPVVMGMDGVGPTLGPQLIAEIGDVTRFSHRGALAAYAGVDPRQKESGDYARRSNPTTKKGSPHLRKTLFQIMDGLIQRSPADNPVYAFMDKKRAQGKPYYVYMTAGANKFLRIYYGKVKEYLSPKNETVTGEVSGEASEESAET

SEQ ID NO: 98017 - protein, 304 aa, unidentified
MTYIGIDISKNSFVAAFPKVSGYQIQTYPNTVKGIKKFIGSLSVTEHHCVMEATGNYSFLLLYLLDRQGIAASMVNPKQIKHFSRMMMTVTKTDPKDACMIAMYGEKMNPPVYKMPSETVMLLKQKKTIIRQLKKQLTASKNLKSSLVVLPFQDKNGMKALDKTISFLASQIESLESELADLASSEFDRQVKLLTSIKGIGITLATALIVATGGFSYFDNAKQISRFIGICPTYQQSGTSVHIKGGINRNGDVSLRSLLYVASWSALRGNTTCKECYTRLKANGNLPRWLLLLLQTSSSGKHLP

SEQ ID NO: 98018 - protein, 486 aa, unidentified
MHPQMTNIQASAQDAFEHIFASAGALVFVNEYSGSAAPPAPYNAFAEHKLACPLAQRYHTLGRSHMQPEAPEAFAAFVGLDWADAKHDVCLQAAGSAQREHRSLDHTPEAIDAWVCSLQKRCEGQPIAIGLELNKGPIVFALRTYHVLVLFPVNPLTLARYREAFTPSRAKDDPTDAALQLALLRTHRDKLPPLTPQSPTLRALAQLVEHRRRVVGDTVRITHRLTSTLKNYFPQALQWFQDKDPVIFCDVLSRWPTLKAAQLARRSPLETFFREHHVRSADVIAQRINAIKAAIPLTTDESIITPNVLLVQALVSQLRATLQAIQDFDNAIAQHAQRHPDFPLFQTLPGAGPVFAPRLLVAFGAQRERSASAAELQRCAGIAPVTERSGKKCWVHWRFQCPTFLRHTCVEWAAESIRHSFWARVYSQQQRDAGKAHQAAVRALAFTWIRLLFRCGQDRTPYDESVYLHALNRRGSSLIHNLAKES

SEQ ID NO: 98019 - protein, 406 aa, unidentified
MSAVMIGIDPHKGSHTAVALDGVEAKLGEIRVSSSVTQVERLLEWAKGWPERTWAIEGAKGLGRLLAEQLVTAGERVVDVQPKLAARVRLLNTGAVNKNDPNDARSVAVAALRSPSLKEIGPESHAAVMKIWAGRHRDLSRTRNRIACRLHAVLCELVPGGFAKEISAVQAARVLENIEAHGASAAARMELAGELLEDLRRIDGQLRDAKRRLAKIVKESKTTLTEIYGVGPIVAATVIGDVAEISRFSSKDRFAAYNGTAPIEASSGNNKVHRLSRRGNRRMNHAIHMAAVTQISHRGTEGRAYYDRKISEGMAHKSALRALKRRISDALYGRMIADARSAAAAIEEGPGGQLGNDSISSVAGSHPQTPTLRSSHSRARSNPRSLRSAANIGNPPRRAKATRRAS

SEQ ID NO: 98020 - protein, 353 aa, unidentified
MSRGSRRQPLKKIAADQTALLHLLHRWRDEAIRAGRAIGRIAVAYEAGRDGLWLARWLRQRGIEAYVIHPTSVVVSREHRRAKSDRLDTEQLKRAFLGWLRGGPRHGSMARVPTLEEEDARRPNRERENLVSERTRMVNRMKSALARLAFAASSRPCARCPSSWRDCSLPRVPSCRQNTLAELQRDMARLRFIMEQIREIEAARLARLEQHPEQANPEMILLLARIIGVGIETADMPVHEILSRNLPDRKAVARYGGLTGAPDESGARRREKGLARTGNARVRRGVSQLAWRFLMLQTQSGLAQWYRRQTIDGRGGTRKTMIVALARKLLIALWRLVTTGEVPEGVVLRRPVT

SEQ ID NO: 98021 - protein, 338 aa, unidentified
MQTYAAIDLHSNNGVLTVIDETDKILRQKKLPNRLTEFVRELEPFRATLQGVAVESTFNWYWLVDGLVEHRFPAVLVNTAAIQQYEGLKHSDDQYDAWWLAHMMRLGILPTGHIYPREERAVRDLLRKRATLVHQRTANILSVQNLEQRNRGVKISSKEVKKLTTARIAELYSNEDLALALSTTTKIIEACTEQIKRLERAVLAKARLREEFKLLLTVWGIGEVLGLTIMYEAGTMDRFAGPGNFASYCRCVDAQRLSNGKKKADNNGKNGNKYLAWAFVEAAHYAVHYYPEAKSFYDRKAAKTKAVVAIKAIAHKLARAAYHVLHDRQPFDPKKAFS

SEQ ID NO: 98022 - protein, 346 aa, unidentified
MRFYNRQHTYYCGIDLHVKTMYVCILDGAGQALVHRNVPSTPAAFLEAVAPYREGLVVAAECMFTWYWVADVCAAEGITFVLGHALAMKAIHGGKAKNDRVDSHKIAVLLRGGMLPQAYVYPAAMRSTRDLIRRRLHLVRKRGQLLAHIQNTRAQYNLPVFGRKLAYRTNRDGVVEHFPDPSVQKSIAVDLALIDQYDALVIDLDLTIVREAKRHNADAFHRLRSVPGIGKVLALTILYEIHDITRFDRVQEFASYARLVKCQKQSGGKTLGTGGAKMGNVHLKWAFSEAAVLFLRHTEGKKLIARIAKQHGKGKALSILAHKIGRAVFYMLSRGTVFSMEKFLAA

SEQ ID NO: 98023 - protein, 355 aa, unidentified
MKNRYDYTGKTIFTGIDVHKKTYSVVTVCDGEIIKRDTMPAYPDRLVAYLLKFFPGAKIKSAYEAGFSGFYLHRILLKKGIENMVVHAASIEISSRDRVKTDKRDAAKIAVQLSTNRLKGIFVPPPEMEDKRELTRYRTNLVKDRNRIAARLKHKAHQYGLVGPDDIQTVCSQWFKQFEKKKMNPNLRYVFDALIEEWNHNKRKIKEVDNLLKIQATEDKDCETVYRSVKGVGPAASRVLANELGNMQQFSSERALFSYTGLTPSEHSSGEHQRKGHISRQGKSILRCMLVQCSWVAIRYDKNLRDQYDRIAARAGGKRAIVAIARRLIGRIRSCFRQGVLYNNQPLEDAKRHVA

SEQ ID NO: 98024 - protein, 404 aa, unidentified
MIFVGDDWSEDHHDVCLMDQAGKRLASRRLPEGLTGIRQLHELNAEHAEEPDQVVIGIETDRGLWAGALAAAGYQVFAVNPLAVARYRDRHHVSGGKSDASDAKLLADLVRTDRHNHRPIAGDSLDAEAIKVLARAHQSLIWARTRHTNAMRSALREYYPAALLAFEDLAHGDALGVLGRAPTPEQGAHLDLPAIQSALKRGGRKRNIAARARQIRAALRSEQLAAPAPVAAAFGATTRAAVGIIVELNRQIAELEAELATHFEAHPDADIYRSLPGLGVILGARVLGEFGDDPNRYTTAKSRRNYAGTSPLTVASGKKRAVLARHVRNRRLYDAIDHWALCALTSSPGARAYYDHHRAAGDVHHQALRALGNRLVGILHGCLRHHTTYSEHTAWAHRQITQAA

SEQ ID NO: 98025 - protein, 337 aa, unidentified
MLFCGIDLHSNNSFVVISDENDKVLYAKRHPNSLKEICLTLSPYRAEMFGVVVESTFNWYWLVDGLQDAGYSVHLANTTAIKQYDGLKHRGDESDARHLAHILRLGLLPEGHIMPKEQRAVRDLARKRMQLVQQRTVQILSIETMFDQQRGAHLSSNGIKKLIADDIDNMGLGHMESLAMKANLAVMHALQAQIDAIEKELATYCRKNPAFSLLKSVAGIGDVLATVILLETGSIERFADVGNYASYCRCVNSVHESNGKKKGEGNTKNGNRYLAWAYVEAANFAIRYNDAAKKFYQRKKAKRNSVVAIKAVAHKLARACFHMLKTGEEFSVERCFT

SEQ ID NO: 98026 - protein, 338 aa, unidentified
MEFKRISIDTSKHIFTLHGVDEHDRVILRRELRRAQVEAFFTKVPPTEVALEACAGAHHWGRVLGAMGHRVKLIPPQYVKPFVKRSKNDRNDAEAISEAASRPSMRSVSVKSVDEQAATIVVKHREMLVGQRTQAINALRGHAAEFGVIAAKGIGNIDVLLSALADHPAIPDMAKAMFEQMGRHVDDLDMKIQAVERQLLEQHKANEVSQRLAAIPGIGPITAITMALSVNPESFESGRHFAAWLGLTPREHSTGGKHRLGRISKAGNERLRQLLVVGAMAVLRFAKPGSKSASAWLLQLLERRPRKVAAVALANKVARVVWAMMARGEAYRRQPVAA

SEQ ID NO: 98027 - protein, 337 aa, unidentified
MNVTLIGIDLAKTIFQVCGVNQAGKPVFNRTVKRKDLLAFLMNYPDTTIAMEACSGSNYWGRTLEGMGFKVLLIPPIHVKPFVKGNKNDRNDAFAITEAARRPNMRFVSPRNLEQTDMMMLHKIRVRRVSARTDLINQLRGVLSEYGIVLRQGKSVLKASIDDLLEDADNGLTIPIRHLIQGIQQEWKVLDNDIEKLDKHIKSEALENSDTKRLMSIRGVAEKTATAVVAFAGKGQAYKNGRHFSANLGLVPKEHSSGGKQQLGGITKRGNGYLRRLLIQGAWTIIRHMENNDERISRWARTIVARRGKHKAVVAVANKMARIIWSVLYHQTEYKAA

SEQ ID NO: 98028 - protein, 341 aa, unidentified
MKQEMTVLGIDIAKRVFHAVGMDDRGNIIYRKRLSRHDLMPCVAKLPPVLIGIEACGGAHYWARRFREHGHEVKLMAPQFVKPYVKSNKNDSRDAEAIAEAVTRPTMRFVPIKDVAQQDIQALHRVRERLIGERTALVNEVHGLMQEYGIVIPKGVAKFRQAVVGKLESEKDKLTPLSQEMFWKLVEEFAAVEKQLAYYQEKLEALATTHPACQRLMTIPGIGPLSATALVAAVSDASAFKNGRQFAAWLGLVPRQHSTGGKERLLGISKRGDSYVRKLLIHGARVTLRWVGLKTDRRSQWMRQLLERRGKNRTAVAVANKNARIVWALLTSHQEYQPVQG

SEQ ID NO: 98029 - protein, 427 aa, unidentified
MPHRIAGIDVHKRMLAVVVSDVEVADEYQFERRQFGSNPAQLRALAEWLLEQQVQEVVMESTAQYWQPVWGALEQYWKPPCQKSEGARPRSGSLPLAQAQSNRARRGRKRDFLDAERLVRRFVANELVLSFVPDPEQRLWRTLMRRKYQMTRNRVQLQNQLEALLEEAHLKLSSLVSDLLGASARRMLRALADGETNAVALAALADYRLQATPAQLQDALGACAGLDPTYRRLLSMALEELQLLEKQIGQLEQEMADRLRPHQDAVQRLAEVPGLGADSAPQILAEVGATAATFPSEGDLASWVGACPGDEESAGRSYSHRSPKGNRQMRRLLNPAANAAVKLKGSIFALLYRRYVTRLGHNVTIGIIAHRLCRLIWKILHQGIRYEERGPAASEQSKRQRARRMIRELRSLGYRVELPNPQPAVPA

SEQ ID NO: 98030 - protein, 346 aa, unidentified
MLHAGLDLSRRKIDVCLISEAGEVVDEWASPPDADGLCGLARRAGMHALSVRGVIESMNGARFVHDTLEELGWEVLIADAQKVKGLAPLACKTDRIDARVLAQLSLHDLVPAIWLPDPAVRRERELARFRLHLVRHRTSLKNRIHGTLITFGKPCPVSDLFGHAGRELLDRLQIPDPWRGNVDVSLRLIDDLELQIAQLTVQLKRMGADHRYIPLLVTAPGFGWINAFTVASEIGDIERFASPAKLCGYTGLCPRVKQSGATDRRGPISKHGPKYLRWALFEAAMNACKHPLYAERYQHTKRRLGRQRGPKVAQIELSRKLTEAIWHMLTRNQPFAPAGAPFRLAA

SEQ ID NO: 98031 - protein, 346 aa, unidentified
MEQYVGLDVSLKMTAICIVDRTGKIEREGMVASDPAAIAAFVRLHAPHVARIGLETGATSTWMWTELNKMGLPVICIDARHAKAALKMQINKSDRNDAVGIARIMQCGWYKEVRVKGLDSHAIKAVLVSRALLVKIKRDLENQIRGLLKNLGLVIGRAKMNMFVVRAAELIEDRPELGAAVEPLLKAREAVEKQIADLDRKVMRLARNDVQVRRFMTAPGIGPITALCYLATIDDPTRFKRSRSVGAYVGLTSRRYASGEVDWTGRISKCGDPMLRSYLYEAAGVLLTRVAKWSVLKAWGMRVAKRSGLRKAKVAVARKLAVILHRMWIDGTEFKWSSKEDATQPA

SEQ ID NO: 98032 - protein, 403 aa, unidentified
MNAVGIDVSKGKSMVAILRPFGEIVYSPFEIKHTSHDINSLVDLIHSVDGESRVVMEHTGRYYEVLAHQLSEADIFVSTINPKLIKDFDNDSLRKVKSDKADAVKIARYALDKWQNLKQYSLMDELRNQLKTMNRQFGFYMKHKTAMKNNLIGILDQTYPGVNTYFDSPARSDGSQKWVDFASIYWHVDCVRKMSLNAFTDHYQKWCKRKKYNFSKSKAEEIYGKAKGLVPVLPKDEITKRIIKQAVEQLNSASSTVEELRTLMNDTASKLPEYPIVMAMNGVGPSLGPQLIAEIGDVTRFTHKGAITAFAGVDPGVNESGTFSQKSVPTSKRGSADLRKTLFLVMDVLIKTMPQDDPVYQFLDKKRSQGKPYYVYMTAGANKFLRIYYGRVKEYLASLPQSE

SEQ ID NO: 98033 - protein, 419 aa, unidentified
MATNPCMLTKQRNSGLIYVVNQPSQDAARRLRKRRGGDRATLGVSEPEAQRDPAAPMVISPNSRQSRGRMHAAKAVPQAVSSYSQGRDQTMTDSHASPSPSSSKTYVGIDVSKKTWDVYVSPGAQSLKCDADDAGWARLHAALKPHGRCFVVLESTGGLERRLVADLIDAGHDVAVVNPRRVRQFAQSLGRLAKTDRIDAETLALFGERMQPRTTEKLSEKQAELDMLVTRRRQLLQLQTMEKNHLGQATLKAAHKNVEGVVKFLDRQIAAVERAIARLIESDDDWRAKSELLQSVPGVGDVTSATLIAELPELGKLNRQQIAALVGLAPFADDSGQHRGTRRISGGRSSVRTTLYMATLSASRCNPLIHHYKLKLLQRGKAFKVAMTACMRKLLTLLNTLAQTGIPWDEARLALGSSG

SEQ ID NO: 98034 - protein, 314 aa, unidentified
MSTEYFVGIDVSKDTLDVCVYPTQELFRVPNSAQGLDELIKRLKPIEPRLIVCEATGGYETLAVSSLAAAGLPVVVVNPRQIRDFAKSIGQLAKTDSIDAGVIARFASAVRPELRPVKDSPSQALSGLVTRRRQIVEMIVAETNRLQAATRRNRRDIQTHIGWLQKRLKQIDDEIKRDIKNGPLWRTTDHILQSTPGVGPATSAMLISCVPELGQLNRKKIACLIGVAPLNRDSGRYKGRRTIWGGRAQVRSVLYMSALSAIQFNPIIRQFYQRLREAGKCFKVAIVACMRKLLIILNAMVRNQTKWRHCEINR

SEQ ID NO: 98035 - protein, 442 aa, unidentified
MKKLEMSVVHAHACGIDIGSRSHFVAVGQNDDQVKEFGISHSSHLEIVAYLKANQVETIAMESTGSYWQSLFLVLIEAGFDVLLVPGTQTKAFRKTDVKDARHIQQLHTLGLLNSCFLPDTFTAKVRELCRHRKSLVQDSSKYVNRMQKCLRMMNIRLDVAVSDIMGVSGRKIIGAILDGEKDPQVLASFANARIKKTPEQLADSLHGNYKEELMYELRDNFEIFILLQERIKGLDFEIEKYYSEHLASVAMPKDLKLASKQLKGKNQPRFKVQEIGYKLYGVDISAINGVSVNTILSLISEIGTSLDRFPNAKAFVSWLRLAPNNRISGGNVLSGRTPKGKNALSIAFRDAANVIGNQKEGPLTSFFRKMGLKKGRLVAITATARKLATIIYNMIMKKQPYNPELPKNIQDKIEQKKLSHAIKTLQKYQLYAVDDQGVIFS

SEQ ID NO: 98036 - protein, 314 aa, unidentified
MSTEYFVGIDVSKDTLDVCVYPTQDTFRVPNSPDGLDELMKRLKPIEPRLIVFEATGGYETLAVSSLAVAGLPVVVVNPRQIRDFAKSIGRLAKTDVIDAGVIARFASAVRPELRPLKDSPSQELTGLVTRRRQIVDMIVAETNRLNAATRRNRRDIQAHIRWLQKRQDQIDDEIKRNIKNSPLWRTTDQILQSASGVGPATSAMLISCVPELGQLNRKKIACLIGVAPLNRDSGRFKGRRMIWGGRAQVRAVLYMSTLSAIRFNPIIRQFYQRLRGAGKCFKVAMVACMRKLLIILNAMVRNQTKWRNCENNP

SEQ ID NO: 98037 - protein, 354 aa, unidentified
MNYVGVDIHKRYSVLVAVDERGRELARGRISGNSVHAFAQFFEALQGPGRVVLEACWNWGRIYDVLSEIEQVEEVVLAHPLKTRLIAEAQIKTDSLDALALATLLRGNLIARAHVPSKATRARKELLRQRLYWARLRTRVRNRVHAVLDRQRELEMPQCSDLFGRKGLNALSKLRLAEPDATLLSEELDLLKLIDSQIKAQEGRIVAFNANEQATQYLQSLPGMGKILAAVAAAEIDAIERFDGAAKLCAYAGLVPTTYGSGGKVHQGHLLKSRNKWLQWAFIEAAWVAVGCSSYFGGIYRYHRARGKKANIAITIVARRMCRIAFTLLKERRNFQEQHRTFPGRSAVRLTAAA

SEQ ID NO: 98038 - protein, 410 aa, unidentified
MELLHRRCCGLDVHKETVVACLRLVSDGKVTTEVRTFQTTTADLLHLSEWLAANGCTHVAMEATGVYWKPVWHILDDGEFGLVLANAAHVKNVPGRKTDVNDAMWLAELLAHGLIRASFVPDTQTQEMRNLLRTRKQLVREQSSHVLRVQKTLEDANIKLDSVLTDLMGKSGRAMIEALIAGETNPTKLASLADRRAKASHEEFREALRGRVTKHHRFLLRLHLNQIDALNAAMATLDAQVEENLGPFRTAVGLIISIPGIKNLGAHVIVSEIGIDMSRFPSHAHLISWAGICPRNDESAGKRRSTRVRKGAPWLKTTLVQCAWAAVKKKDSYLQTQFNRIKARRGPKKAIMAVAASILTAIYHMLKDGTTYKDLGRDHFDRRSTDKQKQRLVKRLAELGYVVEIKPLAA

SEQ ID NO: 98039 - protein, 338 aa, unidentified
MKRYLGVDLHRNCFTVYTRQEDGSGESLEWSIRSLKVFAKAVTVNDAVAVEATGNTRLFCEALKGRGCRIVVVNPHQFQVISRSVKKTDEHDAKVLAEFLAKDMLPEVRMKDEVHAQVASLAQTRDKLVKLRTTLKNKVNNLLAARGILIRKESLASEKGLAEVLAAPVSELVRLELEILVGEIRHLNESVKKLEGLLQDQGPKLPGWENLTSIKGIGATGASVLLSTIGKIEDFADEGKLAAYFGIVPRVSNSNETERSGRITKRGCKLGRTTLVQCALIAARYSPYLQAYYRRIAAHRGTGKAIIALARKFLGIIYKTLKNNWVFEDFPNFVLVKI

SEQ ID NO: 98040 - protein, 360 aa, unidentified
MDQITRVGVDLAKRVIQVHAVNTAGRVVSAKALTRDKFVVWCVQLPPGCLIAMEACSGGHHWARKLRALGLDARLIAGHFVGAYRMQGKRGKNDANDAAAICEAAGRPHMRFVPVKTVEQQAQLAVHRLREGYKEERTACINRIRGLLAEFGLVFPQSPDALRRALPEALEDADNELPGVARLALQQAQLQWVELDCHIAWCDERIAAHVRSDEQAQAALQLCGIGPVTASALAASVGDFRQFKTAAQFGAWLGLVPSQNSSGGKASLGGITKRGDEYLRTLLVQGAKSAVMTAHKRSDRISQWMVQLTARVGWQKAVVALANKNARILWAVLAKGRRFDPNHVSIKPPGPATVVPTLAG

SEQ ID NO: 98041 - protein, 347 aa, unidentified
MRFYTNQHRYYCGIDLHARSMYVCILDAQGEILLHRNMPCAPELFLKAVAPYREDMAVAVECIFTWYWLADLCSQQNIPFILGHALYMKAIHGGKAKNDKIDAHKIAVLLRGGMLPMAYVYPPEMRATRDLLRRRMYLMRKRAELLAHVQNTNSQYNLPEIGKKIAYKANRQGVAERFSDPSVQRSIDLDLKLLDHYDQLLNEVELYIMRSAKQHDAQAFYRLRSVPGIGKILALVILYEIHDIERFPTVQDFVSYSRLVKCAKESAGKRHGTSGKKIGNVHLKWAFSEASVLFLRANPKGQRFVEKLSSKHGKAKALSILAHKLGRAVYYMLKRKQAFDMNKFFSS

SEQ ID NO: 98042 - protein, 347 aa, unidentified
MNFYNTTHLHYCGIDLHARSLYVCIIDHDGKTLLHKEISANPESLYRLIEPYIDDLVVGVECMHCWYWVADFCEDHGIHFILGHALYMKAIHGGKTKNDRIDSYKIAKLMRGGNFPLAYVYPREMRATRDLLRRRTRIVRHGADLKAHIVNTTSQYNLPPNKVNLKNVGARDQLKSTFQNPEAQFNIDLDLNILECYHRELSKLEWHLEQQAKHHNPVCFSLLRSIPGVGRILALTILYEIGDIQRFESVQNFASYSRLVKCKAESAGKTYGTQGNKIGNAHLKWAFSEAAVLFLRGNPDAQKYLQRLQKRMNKAKALSALAHKLGRAVYFMLKQEKVFDENKFLAG

SEQ ID NO: 98043 - protein, 413 aa, unidentified
MSQKAYLGIDLAKGNSKVAAIDEDGDEIVSPFSISNSREGVEKLMSKLYSYKKNNIVCAMEVSSNYWENMYSYLNQKDISCILLNPYQVKKYRQALGSKIKTDSIDAAAIANLVRAKKYDSLCVSDEAVLELRELVRMKHSFGRRVKDLKRSVLALLYLTFPEYTKIISYPFSKVSMQILSKYPTSFHMAKDGTVGRLVKVFRRYQGCNFGADKAKELIAVAKDSFYSGKAARSRGMSICMQIEEIASLSLKIQEIESEIKSILNPDDPKDGLHQDFDILNSIKGVGIGTIAAFIAAVGDVNRFSSSDKLVSFIGFYPKIFESGKYKKKNPTIVKAGPKDLRYMLYMSSVAAVKHNTHLKKYYYDMVSAGMPVKKALIKVAVKITRMMYSMLKHKQYYDPCRVFLQQAPAVAA

SEQ ID NO: 98044 - protein, 390 aa, unidentified
MDARTVNNLPPAATHDGATRCLIAIELSKRSWVVAANTPLSEKISRYTLKACDAKGLLELIEKIRTRIARELKQPGEVICCYEAGYDGFWLHRLLEAHGIRNYVIDPASLQVDRRARRTKTDGVDVERLLRSLMAYLRGEPRVWSVVRVPSVAEEDDRRLHRERDRMINERTQHVNRIKALCALHGIYDYEPLRSDRMRRLEQLRTGDGRQLPPRVGAEIRRELQRLELVLQMIKAIEKERNAIASGKAASSHPYANKIQGLVKIKSIGSEIATVLAGEVFYRSFDNRKQLGSYVGLTPTHFQSGPMCRDQGISKAGNPKARTIMIELAWSWLRFQPDSRLSIWFRERVGSAKGRIRRITIVAVARKLLIALWRYLENGLVPEGAILKTK

SEQ ID NO: 98045 - protein, 338 aa, unidentified
MKLYGGMDLHSTNVVTQLIDEHDRVVYRNKQGCDLVDILRGLEPFQDSIEGLAVESTYNWYWLVDGLMEAGYRVHLVNTAAVQQYEGLKYTDDDTDAFWLAHLLRLGVLPTGTIYPKESRAVRDLLRKRSQLVRQRTAHIVSIENLYARNTGSRLNSNAVKRLTQEQVQQHFADPNLALAVESNRVILMTLSEQIEVLESAILTQAQLDSRYRYLLSISGIGQVLALTIMLETGGIERFRQVGNFASYCRCVDSEKLSNGKKKGRGNTKNGNKYLAWAFIEAANFAIRYNDRAKRFYQRKAAKCNRVVALKAVAHKLARASYFVMRDHVPFDDTKCFV

SEQ ID NO: 98046 - protein, 327 aa, unidentified
MEHELHYIGIDTAKEKLDVDVLRPDGRHRTKKFANTTKGHDELVSWLKGHKIDHAHICIEATGTYMEPVAESLYDAGYIVSVINPALGKAFAQSEGLRNKTDTVDARMLAEFCRQKRPAAWEAPHPLERALRALVVRHQALTDMHTQELNRTETAREVQRPSIDAHLLWLEAELKRLEKQIKDLTDDDPDMKHRRKLLESIPGIGEEKHLRLLLAYIGLKDRFAHARQFAAFAGLTPRRYESGSSVRGASRMSKAGHVSLRRALYMPAMVATSKTEWGRAFRDRLAANGKKGKVILGAMMRKLAQVAYGVLKSGVPFDASRHNPVAA

SEQ ID NO: 98047 - protein, 297 aa, unidentified
MEKNLFVGIDVSKDILDVGIIPTEEVKRFTNDDNGCRELVSWLGEFSPSLIVLESTGGLEMQAVGVLSSAGLPVVIVNPRQVRNFARALGKLAKTDTIDSLVIAKFSQAVQPKVRPLKDDQTLELKALVTRRKQLSDMLVAEQNRLKGSHHRVKKSIAATISWLKSQIEDTDRDISESISNNDIWRDKEEILTSVKGVGPVLSASLLCLLPELGTLCRKKISALVGVCPYNRDSGHYKGKRSISGGRADIRSVLYMATLSATRYNPIIKAFFERLKTAGKPPKVAIVACMRKTAGQP

SEQ ID NO: 98048 - protein, 340 aa, unidentified
MSLYTAFDLHSKNNYAAIVDAVGQKVAGKKLTNDPGVILNFLEPYREEVQGIVVESTFNWYWLVDILMDSGYKVHLANTTAIQKYNGLKHSGDKEDAFWLAELLRLNVLPQGYIYPKSERPIRDLLRKRAHLVQLRTSLILSLQNIVERNCGRQIRANDIKRIREDRVTPYFEGNDDLSLTGKVSKEAIDFFTTKILQIERFVEDKLEMRQPYRYLLSVPGIGKILGLTIMLETGPVERFTKVGNYVSYCRKVSTRWTSNDKTKGKGNKKNGNKYLAWAFSEAAEFARRYNEQAKAYYNRKMQKSNFMVAHNALAHKLARAAYHIMKDQMPFMPDKLFSS

SEQ ID NO: 98049 - protein, 393 aa, unidentified
MGVVIGVDPHKGSHTAVAIDEHEQQLARIQVRSGPRQLEQLLAWAAEFSERVWAVESAGGLGYLLAQQLVGANERVLDVPATLASRVRVLATSKSHKTDPHDALSIAIAALRARDLRPVERADHAVVLRLLAKRHRDLGRARNRTACRLHALLIELVPGGISKEITVNAAQQLLDRVAPTDPVARIRHDLACEHLDDLRHLDAQMRASKRRLETAVRASNTTVTDIFGVGPVVAAMVIGHARNIDRFADRDHFAAYAGTAPIEFASGGRSIRRLSLRGNRQLNHAIHIAAITQIRHRHSPGRAFYDRKLAAGKTKKEALRALKRRITDAIYRQLRTDATRKHTGPGGQAGTTRQSSVAGFEPRTPTLRKNHSRTRPNARTRPTPTPSAAATTP

SEQ ID NO: 98050 - protein, 345 aa, unidentified
MTAKDRLYVGLDVHKEFCQACVMDAEGTIRSNDRIPSTVEDLDAFLDGFEDASFVLESTGIWEFVYETIERHGFEAVLAHPLKVRAIAEAKVKTDKVDARILAHLLRADLVPRSYIPSKDMRDLRQLVRQRAYLVQRSTSFKNRIHAELLRRGIRRPKELVKPFTQKSTHWMRSLAIPTVNSSLDCLEVIQTQVEQLNEQLLQEFDRRREAQLIATIPGIGFYGALLIWAEIADVHRFPDPEHLCSYAGLTPTVSQSASKSHYGGVSKEGSKHLRWILTESALIHVWNCPDSRLSRFHARVARRRGKQKATSATARKLLHVIYWMLIKDEEYHGQGFNPESKPAA

SEQ ID NO: 98051 - protein, 377 aa, unidentified
MTTIGAERPETTEVAVILGVDTHLDFHTAVAVDHLGRRLGELSVPATVKGYKELLRWAAGFGTMRCAGVEGTSSYGAGLARHLRARGIEVLEVERPERRRRSSHRNREKSDPSDAEAAARVVLAGEASGVPKSGDGRVEMIRALRAARRSAIKARTQAANQLQGLRVTAPEQLRRRLRGLSTKELVSVAAHFRPGNDPEDVEAATRFALRSVARRYQVLSREIAELEEHLDRLVAQAALELVSLPGIGTDSAATLLIVAGDNPQRLRSEAAFASLCGVAPIEASSGKVVRHRLNRGGNREANRALYMICLARMRRDQRTKEYVARRTAEGKSKREIIRCLKRYIAREVYRVLVSYDARSSPIGPNDEAHIAAGSSAA

SEQ ID NO: 98052 - protein, 340 aa, unidentified
MTITTVGIDLAKNVFAVHCVDQNGKTVLVKSRVTRAALPGLIAGLPPCVIGMEACSGAHYWARLFRQYGHEPRLMAAKLVSPYRMAGKSGKNDAADAQAICEAVRRPHMRFVPVKDESQQAMQCLHRTRQGFIEEKTATYNRLRGLISEFGVIAPQSTDALRHIVFEQKNSLPLQVQQCVDDLLEHVARIEDNIAEYDRILSRMAKTDHRSQRLMELKGVGPTTACALVASIGNAHDFKNGRQLAAWLGLTPSQYSSGGKSKLGRITKAGDSYLRTLLVQGARSVLIGAEKRTDLFSRWVCSLVERRGYWRAVVAIAAKNARLCWASLHYGDDFRLYSAS

SEQ ID NO: 98053 - protein, 392 aa, unidentified
MRISVGIDIAKEVHWVTAVSSDGEILIDRKLLNTPNDLAQLVGELGRLGGTVRIGLDVLGGIGGLAEAMLAEAGFTLVHVPGLAVNRARRGTVGGENKSDPRDARTIAEQVRIRTDLRPIEPATELDLEIRLLVGRRRDLVAAQTQRLSRLHDLLVGIFPGLERTLDLTAQGPLHLLTRFVTPAELRAAGKRRLVRHLQAAGGLPNVDALADRVLTAAADQTRSVPGETMTARLIRELAAEALLSRTRLIELDRELEALLDRHPDAALIRSLPGMGAVLTAEFIAQAGNLARFRSADALASAAGIAPILHQSGRTRFLRRATGGHKGLKRVFYQSAFCSLTHADSRAFYDRKKCEEKRHFQAVIALARRRVNVLWAILQTRTPFRAGFKAAA

SEQ ID NO: 98054 - protein, 393 aa, unidentified
MFIVGIDIAKRSHEAIVLEDSGKVAHKAFSFKNDVSGFKRLLDILLSLSADPDHFVVGMESTGHYWLALYSALRKQGFSVCVLNPIQSNALRNLYIRQVKTDQRDCLIIADVLRFGRYQQGNVPPSELYELRELCRARSFLVDTTADLKHKVIALLDQAFPEYETLFTNIFGLTSSELLLNCSTPEEILAIDTDKLAKILETPSRKRFGRAKAEQIKETAANSFGVILEFGSAGFLIKQYMEHIRYTESQIAQLEEKIAELFSHFDTQLTTIPGIGPTLGATIFSEIGDISRFPSPAKLAAFAGIDPSVKQSGEFQSSHTHMSKRGSPYLRRAIWQAAVIAAMHDPAIRAYFEKKRSQGKSYMVAIGHVTRKMSNIIFAVLRDNKPYYSSLDS

SEQ ID NO: 98055 - protein, 406 aa, unidentified
MAVVFLGVDWAEEHHDVCLLDERGKVLGRARVANSLEGVSRIHALVADHAEEPDAVVVGIETDRGLLVQALLATGYQIYAINPLAVDRYRDRHSVSGAKSDAADAKVLADLVRTDRNNHRLVAGDSQQVEAVKLLARAHQALVQTRQRQVNQLRSTLREFYPAALEAFKDDLGGRDAIAILDYAPTPIQGKSVSQAKLTSALRKAGRERNLEARATELQSILRQPHLEQPATLVAAYGVIVKSCVRMIRELNAQMTALEEELTKSFELHPDAELYLSLPGLGFVLGARVIGEFGDDPNRYLDAKGRRAYSGMAPITKASGTRHVVLARYARNRHLADACYLWAFASLNGSAGAHQYYRALRRRGKSHHQALRALGNRWVSILHGCLRHRSPYSEQVAWTVPIAVAA

SEQ ID NO: 98056 - protein, 381 aa, unidentified
MFEKERFASTTTRLRELAAWLAERQVELVAIEATGVYWKPVYYALESSFTVWLCNARNVKKVPGRKTDMTDAEWLADVAAHGMIRPSFVPPPPIRELRELTRYRKTQSDARAAEIQRLEKVLQDAGIKLTSVASRVLTQSGRAMIEALIAGERDGAKLAELALGKMRPKVPALTEALTGHFGSHHAVACGRILGHLDFLNESIAALTEQVDQRTAAFAPVYTSLLPVPGFDRLSIDVIIAETGADMSRFPTPGDLASWVGVCPGSHESAGKRRRVGTTKGNPWLRRALIESARAAARTKGSYFGAQYRQIARRRGPNKAAMAVAHSLIELVWHLLSTGEIYKDLGEDYFTSRQDPERRAHRLVAQLEELGFTVTLEEAAAA

SEQ ID NO: 98057 - protein, 388 aa, unidentified
MSAAERPVAYLGIDVGKSSHSACALDAGGDVAFRAELANRPDDIDRLLERAGSGALVVVDQKRNIGALVLARAHAHGNPCAYLPGYAEKQARGMFPGTAKTDAIDAEVIARTALGVPRALRPAPEEPEGTASLRILSSQREFASSARTRAKNRLRATLLEADPALEGAVDPSSRWQMSMLAEFGGAAGCSAAGWRRFSNAARRAGAPAAGARRLWEALLASSRSGRRLPAGEDVAVRMLAREIASLDADIEELDSLVADSLAGDEVYECLLTVPGIGPKTAAALVTSIDISAFRGHDELASYCGVAPSDRRSGSSIRSTSPQRGGNRQLKNLLIFSCNSLIGTDNRFGRYYGECRARGMRHSKALKAVARKRLKVIYAIMRDAVPYAA

SEQ ID NO: 98058 - protein, 332 aa, unidentified
MSVFTNTIGIDISKDKLDAHDYKLRKHEIFKNDLEGYKKLLAWVQTKHGKELESILFCFEHTGIYSLCLSVFMEENQLIYSVIAGLEIKRSMGITRGKSDKIDCFKIAQYAYLRREQLQPTTMASASLIELKELLTIREKMVKHRGAYQSHLKGLATFYKPDKAPLLFQGQEKLVKELTKQIKVIEEAMEKLIGEDPSIKKNYQLATSVKGVGLIVGATMLAYTNNFTSFENWRKFSSYAGIAPFEHESGSSIKKYKRVSCIAHKGIKALLSNAAASSIQYNPEMRIYYQKRVKEGKNKKLVQNIISNKVVARVFAAVKRGTPYVNTLNYAA

SEQ ID NO: 98059 - protein, 390 aa, unidentified
MSQSFDASKSLTAFEQDSTLVAVIEMSQSKWLVAAVVPGIARQPLKKLDADAGALLKVLQRWREEARKAGREVKRIVCAYEAGRDGFWLVRWLQARTIEAYVIHAASIAVSREHRRAKTDRIDTELLMRSFLGWLRGEKRHCSMVAIPTMVEEDARRPSRERESLVAEQTRTVNRVKAALALFGIGGFNPRLRKAAQKLETLRTVEGTPLPENVHAELRRDLERLRLVHDQIRTIESERLRRLAQAPAAATGPHAMVRLIAKVLGVGIETADMLVNEVLARNLRDRRAVARYAGLTGAPDESGKRRREKGLARAGNGRVRRGMIQLAWRSLIFQKESRLVRWFRARTADGRSTTRKTMIVALARKLLIALWRLVTTGEMTEGLKLRPAGT

SEQ ID NO: 98060 - protein, 337 aa, unidentified
MDYFAGLDISMDETRICVLDREGAVVYEGKSASTAEAIADELAKAPSCRRTVFETGRMAPILFHSLSQLGLPVVCVESRQAYQALKSLATHKTDRNDARGLAHLARTGFFKPVHVKSLSAHAVRSLIIARKKLVGQRVTLENQIRGLAVVFGVRLPRALTTAFIDQALKASEGVAGLSAAMRGLIAARTAVMTAVAAIDADIRRMTGASEACRRLMTIPGVGQLTALAFVAAIDDPSRIRRSRDVGAYLGLVPKRYQSGEVDYVGGISKRGDRWVRTLLYEAANVMLTRTKGQLKLKDWAFAIARRSSMRKARVALARRLAIIMHAMLRDGTEFVAA

SEQ ID NO: 98061 - protein, 428 aa, unidentified
MKPKPDLRQCAVLIGLDWADEKHDVALRVPGSPTLQLSTFAHTPEAIAAWVAALRQRFGQGPIALCLEQSRGALLNALSAHDLLLYPINPQMLAKFRAALHPSGKKDDPIDATLLLQLLEHFGDQLTPWQPDDATTRQLALLVEARRGFVDHCTGLANQLQAVLKSYFPQALELAGEDLGSRMATDFLKKWSTLAAVQAAKPSALRAFYYGHNSRSQDLLTQRLALVKSAVALTSDSAIISAQSLAAGSLAGALAALRPVITRYDGAIARLFATHPDAPIFSSLDGAGAVLAPRLLVAFGTDRDRFADADAMPRYSGTAPVTEKSGKQKWVHRRWAKPVFVHQSFLEFAGCSVRFSGWAKRCYEGLLQKGKGHWAALRVLAVKWQRIMWRCWRDRTPYDEATYVRSLHKRGLKLYADLAVEGAQTHGE

SEQ ID NO: 98062 - protein, 355 aa, unidentified
MSSVPVFVGLDYHQDAVQACVLNADGKALLNRSVVNDSATVAELARRHGQPMRIAIEACCGAADMAEELILRQGLPVELAHPGYVARLKRSPDKTDLGDAQLLADLARVNYLPTVWLAPESTRQLRRLVRHRAQLVARRKDVQLRIRGLLRENRVRCTQAHAWTKAWMAWLQFEAPLSESDRWVLEDHLQELASLKARISAVETRITGVTANDPLVQQLLTLPGVGLVTAVTMRAVIGRFDRFRTGKQLARFCGVTPRNASSGARQADAGLIKAGNPELRTVLIELAHRLIHRIQGRWAELAAGMLRRGKPKNVVVAAVANRWVRWLHHELRRQQLGSGSTKGVPPLPSPPSPRP

SEQ ID NO: 98063 - protein, 430 aa, unidentified
MSSANSANEKPIAAFVGIDWADQKHDIVLCAATGNAQADHRSISSDPDALAEWALEMQGRFGSQGRILICLEQSRGALIYFLMGYECFDLYPINPKQLSSYRVAFRPSGAKDDPVDGKLLCQLICLHHQSLRPWRPDDEATRKLALLCEKRRKAVDTRTALSNQLKSELKLFFPLALTILDNDLTTALAGDFLLAWPNFDSLKKASVNKLRKFFYAHQSRSEQKIQERLKCIEAAQPLTRDSAIIETSTIAVRMLAQQLKDLVPFIALYDRLISELFDSHPDSALFNNLPGAGKQLAPRLLTAFGSHRERFQCSLEALTFFGLAPVTEQSGKSKRVHFRWACPKFLRQSFHEFAAQSVRSSPWAASFYQHQRAHGKGHHAAVRALAYKWIRILYRCWKTRQPYNPELYLTALLQRGSPYASPVNNSTKKI

SEQ ID NO: 98064 - protein, 344 aa, unidentified
MQITTVGLDLAKNVFHLIGLNQAQKEVIRKRLRRAHVKRYFANLPPCRVAMKACGSAHYWGRELRQLGHEVKLIPAQAVKAYVQGNKNDYNDALAIAEAANRPKMRFVRIKTTEQQDTQALHRLRDGAVSHRNKVCNRIRGLLAEYGIVMARGVVTLRKAIPGLLGDGDHGLSDNFRRLLQQAYRQLQELDAHIHTYDHAVKQQARENEAAKRLMSIPGYRLVVSSVYLSAAGDGSAFRRGREVSAYIGLVPRQHSTGDKSVLLGIRKRGHRQLRTLLIHGARAVVRYAPEKDDALSRWVTTLVVRRGKHKATVALANKLARIGWAVLTRGEVYQPTRGSASSA

SEQ ID NO: 98065 - protein, 356 aa, unidentified
MNIRRIQDFVVKGKEVFVGLEDSKKTWKLAVRSERMIIHQASMEAKYPVLIQYLRHKFPDCTIHLIYEAGFKGFNLFDRLTEDGVDCVVIPPHLVTEEKVKRVKTDKRDARRLAYVLENHDFKEGCHVPDRERREDRQISRTLIAVQKDIVRTRNRIRKLLDFHGIEVSFSDRWGRKEYRALKELTLSEPLKTSIDILLALLEQLWAHQTALRAYLRNLCRKERYRKAFEIARSLPGIGWFTAIRLILEFGEDLSHFATGKKIAGFVGLTSREHSSGESDKKGRITGMGPGFIRSALVESSWVAIKKDPVLLSKFMRIWKGRGSKKKAVVAVARTLIVRLRSCLITGTPYVIGTAR

SEQ ID NO: 98066 - protein, 286 aa, unidentified
MTGEKYIGLDVHQATISVAVMDSKGKVVMESILETKATTILEFLAGLRRTLSLTFEEGTWAAWLYDLLQPHVANLVVCNARQNALLKHGNKSDKIDARKLANLLRLNDLEPVYHGENGVRMLRELARSYLTIVKDVSRVVTRLKAIYRSWAIPCAGRDVYYTRHRSEWLGKIPEAGSRHRAEQLYQQLDMLQPLRQQARRELLAESRKHSITAKLRQIPSLGPIRSALAVALIQTPHRFRTKRQLWTYSGLGLETRDSGEYHYVEGQVRRRKKAGVHSRFEQRSQP

SEQ ID NO: 98067 - protein, 358 aa, unidentified
MAGKVTETAVVGGVDTHKDLHVAAVVDQNNKVLGTQFFSTTRQGYRQMLAWMTSFGALKRIGVECTGTYGSGLLRYLQNAGLDVLEVTAPDRMERRKRGKSDTIDAECAAHAAFSGIRTVTPKTRNGMIESLRVLKTCRKTAISARRVALQIIHSNIISAPDELREQLRNMTRMQLIRTLGSWRPDASEYRNVTNVYRISLKSLARRYLELHDEIADLDVMIAAIVDEMAPELIKRNAIGYESASQLLITAGDNPQRLRSESGFAALCGVSPVPVSSGKTNRYRLNRGGDRAANSALHIIAIGRLRTDDKTKEYVARRVAEGHTKMEAIRCLKRYISREVYTLLRNQNRQINSIPITA

SEQ ID NO: 98068 - protein, 452 aa, unidentified
MELKMGKSAGLSLECIELNAAGIDVGATEIYVAVPPDRDPQPVRRFATFTADLRAMAAWLVQCRVTTVAMESTGVYWIPPYEILEQAGIRVCLVNSKHVKHVPGRKSDVQDCQWLQYLHAVGLLHASFRPDERICAIRSLSRHRASLIENAAGHVQHMQKALTQMNLQIHHVLSDITGLSGMAILEAIVAGERDAAKLAALCHTRVRSDQQTVIKSLVGNYRSEHLFTLKQSLTAYKHYRELMAECDREIERLTRQLNSRIDPPQKEPMPPADLRFRKRSKNQFHCDMSSELTRVLGVDLTTIPGISALTAHTLLSEIGSDLSPFPNAAAFASWLALCPANKKSGGKVLSSRTRQTNSRASRALRLAAQTLARNRSHLGNFYRSMRARLGAPPAITATAHKLARIIYHLLTTGQPYDESVFLQEGKKQAQRNEKRLRKQAKALGFQLVPIAA

SEQ ID NO: 98069 - protein, 417 aa, unidentified
MACDMITTNIHHEVGAALAVSGNMYQSTPSVIKLGVDVHQGSYTVVAQEDHATLQPAQRFAPAAFVPWVARLVARGHRVFVVYEACGFGFGLQRALVAVGAECYVVAPCRLDERGQRVKTDDRDATALCQRLSRFVDGNRKELAIIRVPTEEEERLRAEHRQRETIVRARTRLAAQGRALVVNHSGESHRTAPIPARWWRAAGWKALAGTLPAWLRERLEMLRPVLAILDTQIAALTGTLEDAAPEGLPAGQGKMTSVILTREVCDWQRFNNRRQVSSYTGLCPGEYSSGGKRVTGSVTKHGNPRLRAALVELGWRMVRFQPGYPPVAKRIHILGKGAKATGAARKKAIVAVARQLAVDLWRLNTGRCTAAQLGLRVTGGEPTQAPEEVVDSGGTVPREAALPPRGFTPPPAPEAAP

SEQ ID NO: 98070 - protein, 315 aa, unidentified
MHQHTEQSRAVAGIDVSKNELHVAMGNEVVTLPRTPQGLRKLTKHVAHAKLVVMEASGGWEQSVFKALHAQGIAVAVINPRQAREFAKALGRLAKTDRVDAKMLAAFAERMDPRQTALKSKELEHLCDLLTRRQQLLDMRTAEKSRLGHGRWDESIGAHLGWLEEQLQQLSGDLEQCTQQTHAIRQRVGRMQTIPCVGPILSMELTGFAPELGTLSGKQISALVGVAPMSCDSGTRQGKRRIWGGRARVRRVLYMAAVVGTRFNPVLKIFYQRLLAAGKPKKLAIVACMRRLLVWINAMERDQCDWNPALFSAPV

SEQ ID NO: 98071 - protein, 311 aa, unidentified
MAAPRSLGLDVAKATVELASEPAGLTGQFATDAAGLRALVAQCQAEPVTLIVLEATGGYEAPVAAALATAGLPVAIVNPRHVRAFAQALGRLAKTDRLDAQVLALFAAHIRPTPRPLPDEATQELEALLARRRQLLEMLHAERQRLPRARGREVRRNLRTHIRWLEQSVIDADAGLETLIQASPLWRVQDALLQSVPGVGPTLARTLLGLVPELGHLDRHQIAALVGVAPLARDSGTLRGRRTCWGGRPAVRTVLYMAALTAARYNPVLRTFYQRLRTAGKPAKVALTAVARKLVVLLNAMLRDQRPWRYA

SEQ ID NO: 98072 - protein, 345 aa, unidentified
MNATTVAVDLAKNVFALAVADGHWKIIERARLTRGQFERWFDNRKVDLVVMEACGSAHHWARTLRAREIEVRLLPAKYVRAYVKRNKTDAADAAALLEAARASDIQPVAVKSIEQQALQALHRTRSAWMSTRTQRINTLRGFCREFGLVVLEGAATGLACMARYLADEHSGLPELLRPSMRLMIEEIRLLEALIGQLERDLAQIAKQSPACQVLQSVPGIGLLTSTAMVAAVSDPKNFVSGRRYSSFFGLTPREFSSGNSRYLGRISKRGDRYIRMLLTHGARSVLRAATVARRAGRPLDRLKRWALEVQARTNHNKAACALANKLARIAWAVWVKQQKYQSAQP

SEQ ID NO: 98073 - protein, 343 aa, unidentified
MQVSTIGVDLAKNVFQVHGVDSVGKVVISRQLRRKQVIDFFSKIPPCLVGMEACGTAHHWAREVSKLGHTVRLMPPSYVKGYVKRSKNDAADAAAICEAVTRPSMRFVPIKSADQQALLMLHRTRDLLIRQRTQLINALRAHLAEFGLVAETGREGLAQLAGIITDESNREALPSAMKQALQAIVDQLAALELHIATLDRAIHAHHRANDMSCRLETVPGIGVIGATAIASTVTDPSAFKSGRDFAAWIGLVPRQHSTGGKERLGGISKQGDRYLRRLLVIGATAVVRHARQHPQKHPWVMRLLAKKPAKLVAVAVANKMARIAWAIMAKGGYYRAPELAAAA

SEQ ID NO: 98074 - protein, 353 aa, unidentified
MIVLGADMHKSSHTIAAVGATSGELVGDETIAVGDRGFVAALDWARGLEDERVWALEDCRHVSGAFERFLVVHGERVVRVATRLMAGERRGGRDRGKSDLIDALAVARAALREGVDRLPVAELAGVELDIRLLVDHRERLVRMRTALYNDLLWHLHDLWPEQTFPGCALLSKKWTTRIARRLGRAEQTARVRIARDELCHLRELSMTVDALEAEIADLVAEVAPQLLAEPGFGPLTAGKLIGEIAGAQRFSSDAKLARAGGIAPIPVSSGKTNRHRLDRGGNRQINTAIHRVAITRARCHPETKAYIERKRAEGKTNRDAIRCLKRHLARRTWHLLQPPPPNPINSPNTNLLT

SEQ ID NO: 98075 - protein, 346 aa, unidentified
MKILALDLGKYKTVGCDYESESGAHQFKRGCTTPTGLAKMVQEVKPDRVVLEVCSIAGWVCDLLWSMGIEVQVANTNDDAWRWRKVKQKDDRRDALKAARLSAVNQLREVYIPAIEVRQWRALITYRQQVIRRRTKLKNHIRDLLLREGQILGRGSSCWSQVGLAALAAQARPFSECGPAELWRGELQLELEQLREIQRQLATVTAQLDKIGAGDARVQLLRTIPGVGPRLAEAIVALLDQPRRFRKASQVSGYIGMVPKAMDSGETERRGHITRQGSRLVRSLLVEVAWAGLRHNAWVRQTYQRLSGGKQARKKIAIVAVGRKLLVKCWAMLRDNRAWDWQPQIT

SEQ ID NO: 98076 - protein, 349 aa, unidentified
MEHIGIDLGAAHSHLVIMNERGTELERRRIQTNKLPRWLAAREPSRVVMEACTQSPVMAAASMEAGHETFVVPGQIVRALGVGARGIKTDDRDAEVLARALVRNELLPSVHLRSQRSRELRALLAARERLIGARTPLAQHIKSWLRARLIQLRGRANGPAFTKAVRTRLLESPDGLPLGLEVLLDSYDQLSEQLARLDSQIEELAEQDDTCRRLRTLPGVGIQTSLAFIAQVDDPHRFGTSDELGSYLALTPGECTTGGKVKRTGTIKAGPRHLKALLVQCAWSAWRSRPNDPMVLWARQIAERRGKRIAIVALARKIATILWRLWKDGSHYDPALASGIRVEQVTNAA

SEQ ID NO: 98077 - protein, 352 aa, unidentified
MQTISVGCDAHKHYSQLELQDTGGQVLNRVRIDHSPGAISSFFSRLPGGTPVALESVGNWYWIADEIEAAGCLPLLTNPAKAKLMMGHVNKTDKLDANGLATLLRIGSLPTVWLPPAALRDQRELPRTRMALTARRTSIKNRIHSLLAKYNLSPENGAQLFSKKGRAWLESSLSHLPPETGRCLAQQLELLDFLSLQIATLEERIHTLIALTPTMQLLKSLPGVGDMLAIVIEREVGTISRFPSAAQFSSYCGTTPRVSSSGGKTRYGKLRTESNQYLKWAFIEAANAISAHHAQRGWTARHVSKLYLRIRSRKGSSVAIGAVARHLAESTFWVLSKNEPYREPLRFSPRQG

SEQ ID NO: 98078 - protein, 455 aa, unidentified
MGMNQLSFNIVNPQAAGIDVGSRTHLVAIDQNKDNVREFGVYTKDHQQMIDHLHQHGVTTIAMESTGSYWQTLFNALQQAGFDVLLVGGNQTKNVKGRKTDVIDCIWIQKLHSLGLLSGSLLLSDTFQQLRTYYYHHLHLVEQSARYSNKMQKALRLMNIRLDVVLNDITGQSGMAVIEAILAGQREPDHLVSLVSFRVKKSRQEIIDALQGWWREELLFELQASLDFYRLYERKIKECDQVIETFLVKYAPAIEVSMEEKQQLKTNRKRAGKHAPGFNLSHLAYQYFHTDLFAISGISHNAVLCLLTSLGHDIHKFPTAKSFACWLGLVPNNKISGGKVISNRTPSGKNYIAKALRHAANSVGNQKDHELTPFFKRIAFKKGRLAAIIATARKLAVIIWHMIVKAEPYHKQRVEINDQKQKAMKLRHLDKKLQALQLTKEELEKLFLKHSFSVT

SEQ ID NO: 98079 - protein, 347 aa, unidentified
MRFYSVQHQHTCGVDLHGRNLYLCILDQQGQVRLHKKLRCDPDLFLEAIAPYRDDLVVGAECIFCWYWLADLCADQGIPFILGHALYMKAIHGGKAKNDRIDSRKIAVLLRSGAFPYAYVYPPLMRSTRDLLRRRLHFARKRAELLTHIQNTFTQYNLPRPVGRLTCPANRQDLPEHFDDPAIRATLKADLSLIDHYDGLIPELESTVIEQARIHDPDNFGRLRSIRGVGKILGLTLLYEIGDIARFPTVQTFSSYARLIKCGKESDGKKTGTSGHKIGNVHLKWAFSEAAVCFLHHNPAGQNYLQRLRRKHSKGKSLSVLAAKLGRATYFILKQQTTFNMNRFIAN

SEQ ID NO: 98080 - protein, 411 aa, unidentified
MHNRQNYLYVGVDLHKEHHTAVIINCWQEKLGEIQFDNKPSAFSKFLLEVETYVSAGITVVFGLEDVGGYGRALAKYLVDHEQVVKEGNPALSFLERKSHVTTQKSDSWDAECVARILINKLNQLPDAKPNDLFWSIQQLVSTRNALVKAQSALKNQLHIQLNHHYPSYKKFFSELDGKTALAFWQQYPSPFCLEGANIKQLTAFLLDVSNNTCSVKKASDILKLVKEDGQTMKEYQETRDFLVRIIVRDIEFKKKEMKYIERELKRLVNLLDYQLETMPGIELVTASALIAEIGDVRRFPNANKLARFAGIAPVYFGSGGKGKTHKSKQGNRALHALFYNLAVQQVQVAKGSKLPRNPVFHAYYQKKLKEGKTKGQALVCIMRRLVNIVYGMMKYKTAYELPVVEEKEVV

SEQ ID NO: 98081 - protein, 339 aa, unidentified
MKPMPVGVDIAKSIIQVHYVDEETGEVVNKAIKRAKFLEFFANRTPCLVGMEASGGAHHWARRLMAMGHEVKLMPGEFVKAFNIRNKNDMADAHAIWRAVQQPSKAVAVKTEMQQAMLALHRMRSQLMKFRLMQTNALRGLLAEYGEVMGTGAASLAKAMPEILARLTERLPTVLIDSLREQFSEIDTVNQRIDALERRIRELSKNNPAVKAISEIPGVGLLTATAAVASMGDASAFRSAREFAAWAGLAPRQVGSGGKINLHGISKRGDRYLRTLLVNGAHSVLLHAKKPSAWVTQLRERKPINVVAVALANKMARTIWAVLAHGQPYDSEHVCVKTA

SEQ ID NO: 98082 - protein, 398 aa, unidentified
MTESSDYESVQVFIGVDVGKDTHHAVAINRSGKRLFDKALPNDENKLRSLISDLKQHGQILLVVDQPATIGALPVAVARSEGVLVGYLPGLAMRRIADLHAGEAKTDARDAAIIAEAARTLPHALRTLKLADEQIAELSMLCGFDDDLAAQTTQASNRIRGLLTQIHPALERVLGPRLDHPAVLDLLQRYPSPEKLASLGEKKLAAQLCKLAPRLGKRLAADIAQALAEQPVVVPGTNAAAVVLPRLALQLITLRKQRDEVALEVEQRVLAHPLYPVLTSMPGVGVRTAARLLTEVACRAFASAAHLAAYAGLAPVTRRSGSSIRGEHPSRRGNKALKRALFLSAFAALRDPLSRAYYTRKMSQGKRHNQALIALARRRCDVLFAMMRDGTFYTPQAS

SEQ ID NO: 98083 - protein, 389 aa, unidentified
MIYVGIDVAAEKHACCILTESGKVLKQFTFSNDMPGFEKLHKALLTPSETKIGLESTGVYGNNLAEFLRRNGYETHIFNPLLVKKSIQATTLRKTKTDKSDAKHIAQYTKEHSQPNLEPSYHISELKSLSRGRFSLVRERSKVKTQAKSLLVQLFPEFSQAFSDVFGAAASAVLRQLPSARMIAQCPVDVLTDLLRTVSHGRLGKVKAELLIDLAEHSVGIQSMALELQMQMFLQQIDLFTLQINRYEVEIKSEMEKIQSPITTIPGIGSVLGAVILSEIGDIRRFATPAKLQAYAGVDPSVGESGTSVSTPGRMVKHGSHYLRWALCQAARCVSLYDPIFAAYMKAKRDEGKHYGVACSHVAKKLTRVIYSILKNNTAYSLTYSQIGA

SEQ ID NO: 98084 - protein, 482 aa, unidentified
MTGILPSRSPAEHGPRFIGLDLAKEETQLALLNEAGQLIHSRRFASTREHFQQLASELGPADCVALEVTTNAFSIARLLLPSGARVTLSDPMRTRIIAESKFKNDKIDARKLAELDRVDYLPTVWLPDPETETLRHLLSQRQSLVDRRTEQKNRIHSLLHRYLLRFPGTDLYGAAGRSFLNSLLQPETLALYDAFELHASLQEIDRLDAQLQEFEQLLADFMVARPSLLLQLDHLLSVTGVSLVVGAGLLAAIGEVSRFPKAQRLASYFGLVPSTYQSGDSRAYHGRITKRGRAQARWLTIEAAEHLRKSPGPLRSFYQRLAKKRGHNIAVVAVARKLTELCWHLLTKGEDFIYALPRLTDEKRTRVRFLARQWQAQLQQQPVSKAKGGGALVSPLYATGLSGRSLKTQVARKAATQAEAQYEKLLAARAAAVAHASAAPLATTTGFNPLRPRLPDWQRVLEQVAAQLKPATAKKRRVKTSG

SEQ ID NO: 98085 - protein, 464 aa, unidentified
MTAGKQLWRNRKEKKEWARRLQSEDPGLEVVHPHAAGIDVGNSTHYVAVRPDRDPEPVRRFECFTADLHRLADWLQSCGVKTVAMQSTGVYWIPLYEILEEHGLEVYLVNARHTKNLPGRKSDVQESQWLLKLHTYGLLNNSFQPVSEIRVLRTYWRQRGEHVRGAATCIQRMQKALTQMNVQLANVISDISGLTGQAIIRAMVAGERNPPKLAMLSDPRVHASHEEIAKSLEGNWRPELLFVLHQEVDMYDTYQKRIAECDQRLQKQLASFTRPLPIQPPTQKLKTKKPAAKNAPRFDLSSELQRVTGVDLTRIDGIDVMAAQTLLSEVGLDMSRWITESHFASWLGLCPDNRISGDKVLSRGTRRVVNRAATALRQAANTLMRSRSYLGAQYRRLRTKLGAPKAITAMAHRLARLVYRMLKYGQTYVDKGTEYYEERFRQQQIQLLRKRAAKLGLQVAEIHA

SEQ ID NO: 98086 - protein, 340 aa, unidentified
MTITTIGLDLAKSVFQAHCVDETGAAVLMKKLHRKQMLPFFSKLPPCLIGVEACGTAHYWARTLAAMGHEVRLIPPSYVKAYVKRGKSDALDAEAICEAVQRPTMRFVPVKTIEQQGILMTHRARSLLVRQRTMLTNALRAHLAELGHVANPGIGNLAKLAEQVIADRNALPSYARTALEILIRQIMAVGAEIAELDQQLATWHTESEASRRLAAIPGLGVITATAIAATVTDAEQFSSGRQFAAWLGLTPQQHSTGGKTRLSGISKQGDRYLRRLLVVGATAVMRHVKDKPTPMADWIRKLSEKKPFRLVSVALANKLARIAWVVLTRKEAYHPYAHLT

SEQ ID NO: 98087 - protein, 317 aa, unidentified
MKNTCRPKPLNPIDAGVDVSKATLDFSVDGNLFQIANSAAEIRQKLSELSHKYGEALRVSCESTGRYGHTLIAICLELGIQICQLNPSEVREFAKSQKLLAKTDRIDAKVIARFSAYSNPRPLGAEWKGRQEAACIHSRMRALVAIVAAQKASLDHFPDKSVRREILSTIHTLELKIARYEKRLLEIVAENTASQELYNTLIKEPGVGPRTALALLVHLPELGRLDRGEATALAGIAPMNRDSGKFRGKRYIQGGRKLLRCALYSAAVVAARFNPLFKPFYQRLRESGKPAKVAYIAVARKLLIRLNTLAKNQLCGI

SEQ ID NO: 98088 - protein, 385 aa, unidentified
MRSVGLDLGARHIAFCEVAEGQVVRRGSVRRLGELEALLGRQTSAAQVAFEASREGWHVHDVLVGWGKQPVMLDTTRVQQIGVGQHGRKNDALDAQAMAVALDRGRVPVAHVLSPERRALRAQLSVRGELVEMRARQVTLLRGLARAAGVLVASSSTDNFLQKLQEAPIDPATRTRMAPLVATLTIAQEQLAAVDREIAQVAKGDPIIRLCATAPGVALIVSATFVSVIDEAKRFRNAHAVSAYLGLVPGENTTGGKRRLGSITKHGNTHARSMLVQSAWQILRAGDADDPLRRWADALAKTRGKKIAAVALARRLAGVLWAMWRDGTVYDPGLQARESARGLKTHAQSQGLRAQAMARVAKKIQRRERTPSATSRAKTSRASAM

SEQ ID NO: 98089 - protein, 346 aa, unidentified
MEVHTIGIDLGKTLFHLVGVDSSGTVVVRKRCSRAQLLAYTAKIQVHRIGMEACSGSHFLGRALREQGHDVRLLPAQYVKPYVKTNKSDYIDAEAIAEAVERPNMRFVPIKTEEQLDLQAVHRVRERWVMRRTAVVNQMRGLLLERGLTLPKGRRHLEQAIPGILTNAESKLSESFFVLLGQLNRELEQLSTRIDEMDKLIERTAADYEACQRLTTIPGVGPVTATALIAAIGNGAAFRKGRDLAAWIGMVPQEHSTGGRQKLLSISKRGNSYLRRLFVQGARAVMQHRHRQPNSLGRWLAQLMARTHQNVAIVALANKLVRVAWAVLHSNQPYRCPELVASDASD

SEQ ID NO: 98090 - protein, 366 aa, unidentified
MKQVTTFVGIDAHKKDLFVAMLAGDRATPVTWQLANEPAAVRRLVRKLEREAPGPVHVFYEAGPCGYALQRQIATARVACDVIAPALMPRKPGERVKTNRRDARKLAELGRAGLLTVVQPPTPADEAVRDLARARDDAREDLQRSRHRLGKLLLRRGLHYAGRNWTQAHRRWVNSLTWTHAAERAVVDDYLLAIDHTEARVLELDTRLAEIAEQEPYRTPVGWLRCFRGIDTLTAMLILAELHDFRRFGSARALMAFLGLVPGEDSSGEKHRRGRITKMGNALVRRILVEASWHYQHRPGSGRALQARRTGQPARVIAIADKAQQRLCRRFRRMLAEHKPAPKVAVAVARELAGFIWAALQRPVVA

SEQ ID NO: 98091 - protein, 339 aa, unidentified
MNEVTLIGIDLGKHSFHLHAQDATGRMVFRKKLSRQQLLRTLANVPSCRVVMEACAGSHWLARQLAGMGHEPRLISPQFVRPFVAGNKNDFGDAQAICEAACRPSMRFVSPRNETQQTVSAMHRLRERLVRERPATVNQIHGFLLEFGISLPRGAALMSRLPTVLDHETLPPRLVALVVRLRAQVHYLEEQIRQVEQDLTAALREDDKSRRLLEIPGIGPITASALAVELGDARQFANARQFSASIGLVPRQYSTGGKPTLLGISKRGDRNLRRLLVQCARAVMQHTDSRTDALSLWVKTLSTRRHSNVVACALANKLARIAWAVLARGTHYKARALTT

SEQ ID NO: 98092 - protein, 427 aa, unidentified
MAYRIAAVDVHKKMLAVVIADVEGEGEYHFERRKFGASPEQLQVLAQWLVEQEVEEVVMESTAQYWKPVWGTLELSWKPARQQRDGATKMSGKLHLCQAKSNRGPRGRKNDFADGERMIKRLVAQELVLSFVPDPEQRLWRTVTRRKQQLTRAKVRFKNQLESLLEQAHIKLSSFVSDLLGLSARRMLQAIAEGETDPAVVAALADCRLRATPEQLRDALGACTELNGVYRRLLLMALEELKLMEEQMEQLDREAWNLLQEHQDAVQRVAEVPGFGVDSATQMIAEVGAEAAAFESAKDLSSWVGVCPGDEETAGKSKSTRSPKGNSTMRRLLNQAAQSAVKVKGSIFEITFRKLEPRLGYQQAIWAIAHRLCRLLWMILHKKIRYEERGPAVSAKSQRARTGRMIKALQKLGYRIEGGPLSVGSPA

SEQ ID NO: 98093 - protein, 346 aa, unidentified
MMIIGCDFHPSWQQVCWLDSETGETGERKLVHAEGDAERFYRQVPAPALVGMEATGNSHWLVDMLAEIGHELWVGDAAQIRASYVRQQKTDKRDAAHIMKLLAEGRFPRIWMPSSEVRDLRQLLLHRYKLVIIRTRVKNELQHLCLNQGVQRKRKLWSQAGQKLLRELPLRPWAARRRDDLLRLMAMLNQQIEPLDAAVKAEALRDKMALLLQSQPGVGAITALAYVLTMGDVSRFPRGKQVASYLGLIPREHSSGGRQKLGAITKQGNRMLRMLLVEAAQTTVRLDPGFRKQYLHRCHQKPKGVAKVAAARKLAVRLYWMLRTQTGYPEIVRIESSPRVPLVGAS

SEQ ID NO: 98094 - protein, 321 aa, unidentified
MTYVGIDVSKATFVVAYSSAKGSRTNSFKNTVKGIHEFIQTISVAEHHCVLEATGNYSALLVYLLSEAGIAVSLENPLKIKNFARVMLSVTKTDEIDARLIAMYGEKMQPTSYKLRNDTILILKQKRTVIRQLKKQLVATGNLKGSMEVLPFFDPKCKKTIEKTIIFLEKQIKGLEEELASLAQSEYKKQMDLLTSIKGIGVTLAAALIMATGGFTYFDNAKQLTRYLGLSPTYQQSGTSVNVKGHINQNGDSSLRSQLYVAAFASLRCNTECKACFDRLRSNGKPGKVALIAVANKLIRQAFAVVTQEKLYVDGFKSEKP

SEQ ID NO: 98095 - protein, 342 aa, unidentified
MEQITRIGMDRSKHVFQLHGLNSAEEPVLRKKLRRKEMVDFFGKLPPTVVAIEAWGGSHYWARALQSLGHEVKMLPPQYVKPYVKRGKNDAADAEALCEAMSRPTMRSVPVKTAEQQAALMLVGMRDRLVRNRTQLANAIRGHAVEFGLTAAKGTRHIVPLLERIAVDETLPEMARDLFALHAQEFSQMQSEIEKVEMRLMAWHRGDECSRRLAQIPGVGPIGAWLLMMKTPAPELFRSGRDFAAWLGLTPRDHSTGGKARPGTITRAGDAALRSTLVQGATALLRQVRMGRGNNASSWLVELLKRKPPKLVAVALANKVARIAWKMMVTGEPYKSRSAATA

SEQ ID NO: 98096 - protein, 361 aa, unidentified
MRIIGCDLHARQQTLAMLDTETGEVLNLTLMHEGNQVREFYSQLPRPVLVGIEATGSMHWFLNLMEELGIECRVGHPATIRAAEPRKQKHDRRDADLILKLLAENRFPAIWLPTKELLDLRALVLHRHQWVRIRTRIQNALQAMALANGLRRGPSLWSYDGQAKIAFLPMMPHASYRRSALQALYRRMEEEIDNLTQQVAEQAEQRSGARRLMTHPGVGPVTALATDVFLGDPKRFLDGKALASYVGMIPREYSSGGKQRFGGVTKQGSPLLRFLWCEAGTHAVRRDPDLKRFYRRKLVQKGLGKARVAVARKLGIRLWIMLRDEIDYEEFCRRGQKQQSGAACAGMLEVGNGANRYRPVD

SEQ ID NO: 98097 - protein, 390 aa, unidentified
MPTVADRAEAPTAIQTNLAAIFTSLELSRSIWLITSLSPGCGEKMSKHSVPAGDIAALLARFSELKQKALARTGKSFPIVAVQEAGLDGFWLHRVLEKEGIESHVVDPASIATSRRRRRAKTDRIDGETLLRALLAYKRGEPRVCAMVRTPTPEEEDRRRLCRERKVLIAERVEHVNRIKGLLFAQGISGYEPLRRNRRQRLDELMTGDGRPLPTHLKTQISRELDRLELLLDQIKAAEAERDALLAAQQAAAPAPVGKMLLEFKGIGAEFAAVLWLEAMFRFDNRRQLASYAGLAPTPWQSGSVDREQGVSKAGNPRLRATLIELAWLWLRHQPQSALALWFKERVSRNGGRMKKTTIVALARKLLVALWKYVTAGVVIEGAVMKAEFA

SEQ ID NO: 98098 - protein, 363 aa, unidentified
MRYSIGIDVAKDAHWVTAIDDQGQVVLDQRVENTPPALSVLSDQLAQLGGERRVGLDVLGGIASLLTALLLAAGERLVQVPGLAVNRAREGTRGGDHKSDPRDARIIADQVRTRPHLRPVEAPDAVTVELRLLGGRRRDLVAEQTRRLARLHELLLSVHPGLERRLDLTTKPALYLLTRYVTPAELRRAGRARLLRFLSRLPHARGVAQEALATRAPLSALDAELAATLARHPDGALITSLPGMGVVLASECLVEAGPLGRFPSGDALASAAGLTPVVRQSGRVHFLRRRHRGNRVLQRVFSQSAFGSLRDPASRAFYDRKRREGKRHHQAVLALARRRVNVLWAMLTHRTQYEPRIRTPTAA

SEQ ID NO: 98099 - protein, 353 aa, unidentified
MTNNIIETIGCDLGDKRSEICVLDGEGNVKLRTSVRTTRDWMRAFFTRAAAHVVIEVGSQSRWVSELLRQLGHRVTVANPRRVKLISASDTKTDRHDAELLARLGRADVKLLAPVEHRSTEAQTDLAVAKARDVLVAMRTKLVNHVRGTVKSLGDRLPSCAASSFVRKTRPLVPDDLKSALDPLYEVLSRLDGQIKEYDQLIERIAARCPDVNVVSQISGVGALTGLAFVRTIEDKSRFAKSRMAGAFFGLRPRKSKSGDSDPQLRITKAGDPFVRRLLVNAANYILGPFGPDSTLRQWGLKLAQRGGKNAKKRATVAVARKLAILMHRLWVTGEVYEPIGYQSRREETTAAA

SEQ ID NO: 98100 - protein, 397 aa, unidentified
MSAVVGIDVGAYRHVAAVCTESASEAERKVFRFTSNRAGFRQLDDWLGGQGEVARVVVEASGHYYWPLASHLHRGGYPVAVVNPLKAKYFAKSRMQRSKSDPADARTLAVLGMRDQPRTQDPLLGAEAREAARFWGNLVREQGQIRQRLQRLVEIGFPELKECFDDPTCETALAVLREAPTARSAVRRHLSSLAGAMRPGGKRRLGIGRAGKLQAMAAETVAPPELDQQVAFEVKLLIQQHDLLAKQIELAEHRVAAVLDSELARRLQTIPGVGAALAATFISEIGDIWRFDDFDQLAAYAGVHPMEKSSGRKGQNPETSWHMAKTGNAYLRSAAYVLAVVGIQHNPIIKAHYQRKRDQGKKPMVAVGHCMSKALAIVWGVWRSGADFDPTKGGLGS

SEQ ID NO: 98101 - protein, 355 aa, unidentified
MNGTKYVAMDVHTATISVAVLNFDGKLIMESVIEAKGITVIQFIQGLRGELFLTFEEGTWSSWLYDLLTPYVTKIVVCDPRRNALLKQGSANDRIDARKLAELLRLNSLRSVYHGENGLRTLKELARAYLTISKDIVRVMNRVKAIYRSWGIPCAGQSVYNPRHREEWLRKITQASVRRRAELFYEQLDALVPLRKQARQELLAESKKHPAWKLLRSIPALGPIRAAVLMAILQTPHRFRTKRMLWKYSGFGVVTQTSADHQYVNGQLQRSKKPAFVRGLDPAHNHHLKDVFKSAAIQASTRKGPFRDFYEALVAKGMRPEMARLTLARKIATISWMAWRKGVAFDAKYLKPQTA

SEQ ID NO: 98102 - protein, 432 aa, unidentified
MRSTKMAKQNEETIGAYIGLDWADSEHEVTMLVVESGEVESRKLKQESEALAAWVQSLRERFSGRKVAIAIEQRKGALIYALMCYDFLILYPVNPKTLARFREAFYTSGAKSDPGDSGLLLDLIRLHRDKLRPWIPEDADTRLLQMLVEERRALVDEGTRLTNRLKSTLKQYFPQALEWAGELDSRQALDFLTRWPTLESIRKAGAVAVEKFYRRHSIRNQDKIEQRVKAIKEARALTTDRAVLGASKMKALAIVRQLRALGKSIAEMEARIQELFEQHRDHEVFSSFPCAKKVLGPRLLAAFGGDRTRYESALELQTFSGIAPVTRSSGKSKTIHKRMACPKFLRQTFHEYAAQSIKKAGWARVYYRRHRDKGVKHHAAVRALAYKWIRIMFRCWQEQEPYDEAKYIASLKRRSSPLVSGLPPAPGSPVEV

SEQ ID NO: 98103 - protein, 357 aa, unidentified
MSKQAKYIGMDVHKAMTVIAVLDSAGKTRAEATIETKASTLVQFLRGLEGSLHVTLEESPYSAWLYDVLLPHAAQVVICDPRKNAAYIRSGNKSDKIDAHKLADLLRTNLVSAVYHGNASVRALRELARAYGCLVEDATRVMSRLKAIYRGLGIPSGGTRVYSVEHRGTWLEQLREAGARRRAELLYQQLDLLLPLRRQAKDALLAESRKHAVEKLLRTIPAIGPLRAALLIALIQTPHRFRSKRQLWAYGGLAVVTQDSAEYGLVGGHIQRIKKRALVRGLNRNHNPKLKEVFKGAAATGSACSPLWQQFYQTRLAQGMKPELAQLTVARKMATIVLELWKKGERFDPQHLNAQAA

SEQ ID NO: 98104 - protein, 338 aa, unidentified
MDEVTTIGLDLAKTYFQVHGVDERGRTVVQRRLRRSEVLVFFRKLSPCLVGMEACATAHHWARELLELGHDVRLMPPAYVKAYVKRGKTDAADAEAICEAVTRPSMRFVAVKTVDQQGVLMLHKTRDLLVRQRTMPVNALRGHLAEFGLVTAKGAAGVKAAIAAFVTARDMLPAEARATLGVIAAQLRGLEGEIEQLEGKIVAWHRANETSRRLATIPGIGPITASAIAAAVPDGSMFRSGRQFAARLGLTPRAHSSGGRVRKLGISKQGDGYLRRLLVVGATAVMRMARQPTKAESWAGRLLERKPAKLAAVAQANKTARIAWAVMTRGTVYAATAA

SEQ ID NO: 98105 - protein, 405 aa, unidentified
MSMNAVGIDVSKGKSTVAVLQPGGTVIRKPFDVSHTSQNLNELADYLSSLDGTTKIVMECTGRYHEPMVKALSEAGLFVSIVNPHLIKNFGNNSLRKVKSDPADARKIARYTLDNWTELRQYSGMDNTRTQLKTLNSQFSFFMKQKVAAKANLIALLDNTYPGVNKLFDSPTREDGSEKWVDYAYSFWHADCVRKIGLKAFTERYKSFCKKHHYIFQQDKPEKLFNASKELVAVFPKEKSYKLLIQQSIQQLNLASEHVERLRREMNELASTLPEYSTVMGIYGVGKTYGPQLIAEIGDVSRFTHREALTAFAGVDPGVDESGQHKSKSNRASKVGSARLRKTLFQIMTTLLQNAPEADPVYRFLDKKRSQGKPYYVYMTAGANKFLRIYYGKVKECLRNLEQTE

SEQ ID NO: 98106 - protein, 343 aa, unidentified
MEDIYIIGVDLAKNVFQLHGASADGAVLFRKKLSRPQFARFMGEHPPCIVAMEACAGAHHWAREMTRHGHETRLIAPHYVKPFVKRQKNDVADAEAIVEAALRPTMRFVEPKTAEQQARAVVFRTREQLLKQRTEAINALRAHLYEFGHVAPVGIGYLPRLAEVIDDPKSDLPGLARDICRLALEQIAYVTARIDALKAKISTMSKEATMPRQLQTMPGVGPIGALAVETFAPPMNQFRRGRDFAAWLGLVPRQHSSGGKQRLGKTSKMGQRDIRRLLITGAMSVIRWALRRGASVNPWLARMLERKPPMVVAVALANKMARGIWAMLTRGEDYRDPAIAGAA

SEQ ID NO: 98107 - protein, 344 aa, unidentified
MQPMYYIGLDVHKRKISYCVKDGSGRIHAEGSISATRLELDHWMRSLPQPWSAAMEATMFTGWIYDHLQPHAAVLKVAHPLMLRAIAVAKKKNDRIDASKICDCLRCDFLPESYMASTAIRERRRTLRYRNLLVRQMVQMKIKISALLMEAGVSYNKQRLHKAGYFRELLATNPDIDEGLCSLLRLCRETVVRLGKNESALVRSLERDSLLVERIERLMTIPAVGPITALTWALEVGDVQRFSSIKKAISYCGLCGAEKSSGNTVQRTPLSKQRNKHLQTTLIEAAKMAPRNSPELAMLYDKEKQKGNANRATLAVARKLVAYLMAVDRSQRNFRVAETSNIAA

SEQ ID NO: 98108 - protein, 346 aa, unidentified
MEYIALDVHKKYTWARVENTEGQRLYESRLAHVHGNIKNFVHRWSAGSPVAVETVGNWYWVVDEIEAGGGKPQLVNARLAKVMMGMVNKSDKLDAKGMNRLQRTGTLPTVWIPSSSVRDARELPRTRMVLSEQRTQLKNRVHATLGKYGYVVEGVSDAFGKRGREIVMELMGKLPPHTQQALQRVLDQLDHVAENLKGIEAEMIEVFAPCPQTTLLKTVPGVGEILAVVIWTEIGSIERFSRAEQLASYCGLVPREHSSGGKFHYGSVRRDVNVYLKWAFVEAANSSILNRERCGYDHVSRLYQGIRARRGHNKAKVAVARHFSEASFWMLKKGEPYREPMSSTQR

SEQ ID NO: 98109 - protein, 305 aa, unidentified
MAAVMIGVDPRKAWHPAVAISAAEEPLGELRVRACAAQAERLRAWAAAWPRRAWAVEGAGGLGHLLARQLAAAGERVLDVPPGLGARVRLLAAGDVNKNDPDDARPAAVPALRLAGVREVWPDDHAAVLTIWSTRYRDLGRTRTQVACRLHAVLCEPVPGGLSRPIYASCAARILQQVTPPDAVAAARWELAAAFLDDLRRIDTQPRETRKKLAAAVRAAGTCLTGLFGAGPVIAAAVIGDVRDVSRFPGRDHVAAYNGTAPIEVSSGPHKTYRLSRRGNRRLNHAIHRAAITPIHHRHGQGRAC

SEQ ID NO: 98110 - protein, 384 aa, unidentified
MEQSSTLFVGLDVHKDSIDIATADAPREGEVRHVGSIGGDLVSLDKSLRRLISRGHRLHVVYEAGPCGFVIWRHLTAQGLHCEVVAPSSIPRPPGERVKTDRRDAMLLAKLARNNDLKAVRVPDAVDEAVRDLVRAREDAVRECRNARHRLKALLLRNGIGYSGRSAWTAAHLRWLAKVTLVHAAQQIAFQEYLHAITEATARIARLEQALRDALPEWGLTPVVQALQALRGVQLIAAMTLVAELQDFLRFESPRQLMAYVGLVPSEHSSGPKRRQGAITKAGNSAARRVLVEVAWHYQHNARVSPIIAMRHDGLPQTVTDIAWKAQLRLTAKFKRLLARRVMKTKAIVAVARELAGFIWAIGREVQTSGWRGNKAPSASGAPA

SEQ ID NO: 98111 - protein, 315 aa, unidentified
MTSTQVFVGVDISKAQLDLALRPEGQFSVPNNEAGFAQVLEHLNAVHPTLVVLEATGGLELPLTGVLAAAGVPVVVVNPRQVRDFAKATGRLAKTDALDAQMLAHFAEVMRPEPRPLPDEQTQALAAILARRRQLVEMLTAEKNRLGTAGKPVRKSLRTHIAWLERELSHTDRGLAQTIRESPVWREKEALVRSTPGVGPVVTTTLLATLPELGTLTGKQIAALVGVAPLNRDSGTWRGKRTVWGGRAQIRAVLYMAALVAARFNPVIRAFYQRLCAAGKAKKVVLTACMRKLLIVLNAMLKHRTPWRAELVQCA

SEQ ID NO: 98112 - protein, 414 aa, unidentified
MADETHVWFAGIDWGSQKHQVCVLDAQGTIIGEQEFPHSGKGLAELSDWVLSITGTAEAVAVGIEVPHGPVVDALLDRGFAVYSINPKQLDRLRDRFSVAGAKDDRRDAYVSADCLRTDQHLFRRVQVSDPRLTELRAWSRLTEELQEERVRLSNRIHQQLWRYYPQMLELTDDVSATWFLELWTKAPTPANARSLRKSTVERLLKQYRIRRVDANTVIRTLRQTAIKVPDAVVEAAGIHMRSLIARLHVVNSELRHGERKLDELCTAIGETSPAPGQGIERHDVAILKSLPGIGRINLATLLAEASGPLSRRDYQGLRTLSGVAPVTKRSGKSHIVVMRNAAHVRLRNTVYHWARVATQHDHKSRIRYAALRKRGHSHGRALRGVADRLLALTCILLARQTVFDPHFDQAVAS

SEQ ID NO: 98113 - protein, 433 aa, unidentified
MKVLYERVAGIDVHKEMVKVAIRSPGEKPWTRKTEILEFRTFYGVLQEMARELRRRGVTHVVMEASGVYTEPVYYALCEQDFTGVAVINPAHAKALKGHKTDAKDCARLAELFECGLLRGSYIPPAELKEVRDLTRYRMKTVQARTSEIQRLGKALESAGIKLGSVASSITGKSSTAMVEALIDGERRGQVLADLAIGRMRSAGKLADLSMALAGRFTEHHALLCRLHLDRIAVFDDAVDGLDEQIAGKAARWQREAGLLTSLPGFGDVVAQAWLGEIGPAPHLHFATHEKLASWVTLCPGNNISARKRKHGRTGDAGTYIKPMLVQAAWAAIRVRGRLQARYNRLVRRFGGDKNPAAKKKAITAIAHTLLKIAYQVLKTGTPYDEPGADFYTQRESPEHKQAWLERQMQKLHPGCTITITIGPPEAALPPGG

SEQ ID NO: 98114 - protein, 354 aa, unidentified
MKTPKPSSSFTGHDIYVGIDVHLRQWSVTIRTAHVSLRTFSMNPSPEELATHLQDNYPGATYHSVYEAGFCGFWIHRALVRLGIDNIVVNPADVPTTHKEKVQKRDKRDSRKLARELAHGSLEPIYILSEEAQALRTLGRRLLQISKSQRRVKTRIKHFLHTQGIALPSHSEIYHWSAQFISWVRAQTFSYDNYRFYLDTLLTELAFFRQQRLELYRQIRQQIKGNEVIKNLRTIPGVGFVVAFTFYTEVIDIFRFRTWDQLLSFLGLVPAVHASDEKEHILGLCSRGNKYLRYLLIEAAWIAIRFDPALTFAFEAQLKTKIRKKAIIRIAKKLVNRMRYVWKNNEQYVIAVIE

SEQ ID NO: 98115 - protein, 357 aa, unidentified
MGQVNELDFSGTTIFCGIDVHKKSWRVNIQDGEFELEDFSQNADVVLLHKHLKRKYPGASFKLCYEAGFSGFSAQRWFSSQGMSCLVVNAADVASNDKERRRKSDKIDARKLCEHLQSKKVKSIHIPALHWEHGRCLVRARSRIVSNQTRSKNRIWQLLHFSGLPLPQDYDARQYWSKRFVKELKETDCGSKELKATLDLYIKDYEQTKTLLLEATREVRKMCRQVEYQSQISLLRTIPGIGEINAAVLLFELQEVSRFKHLDHLCSYAGLVPDTADSGESKINKGITNRNNHYLRTALVESSWSVIRKDPALLMKYKGYCRKMEKNKAIIRIAKHLLSRINYVLKTTKEYVTCVVG

SEQ ID NO: 98116 - protein, 338 aa, unidentified
MWCTTVGIDIAKNVVCIHGVDAHGHVVVQKRLARQKVLPFMAQLPPCLLGMEASGGAHYWAREFTQLGHTVKLMSPQFVKPYVQSQKNDPNDAAGICEAVERPRMRGVPVKSITQQDVQALHRIRERQITARTALINQIRGLLTEYGIVIPQRASQVRHKLPLVLEDAENGLTATAREWLHALAEELQALDQRIAATDQQIERVFEADEACQRLAQLPGIGPLTATALVAAVGDATAFKNGRQFAAWLGLVPRQHSTGGKTTLLGMTKRGNCYLRTLLIHGARAVLRVVDRKTDARSRWLQGVKARRGMNCASVAQANKTARVAWALLAKGDRYRHAA

SEQ ID NO: 98117 - protein, 367 aa, unidentified
MNATTVTTRLATIVGIDLAKSVFQLAVANAAWQVVATHRLTRTQFERWFDNRTVDLVVMEACGSAHHWARWLNGRGIEVRLLPAAYVRAYVRRNKTDAADACALLEAARCADIVPVRIKSVEQQALQALHRTRSLWMGTRTARINALRGFCREFGVVIAQGSRLGVEQIGRVLADPHAPVPAMLRGSMTLLVEEIRLLEVRIAQLERELTALARQSPACSTLLSIPGVGLLTATAMVAATSGQVGHFRDARHFASWFGLTPKEHSSGTTRRLGRISKQGDRYLRMLLTHGARAVLRAASAAVGKGKTVDGLRQWALAVQQRSNHNKATCALANKLARICYATLRDGEPYVGVQRQQKASRTAFALPA

SEQ ID NO: 98118 - protein, 338 aa, unidentified
MKVYAGIDLHSSNNYIGIIDEQDHRLYQKRLPNELTHIKQALEPFKNSLEGVVVESTYNWYWMVDGLQEDGYKVHLANPSAIKQYEGLKHTDDKWDSFWLAHMKRLNILPEGYIYPKEERPVRDALRRRLLYVRHRTSHILSLQSAITRNLGYKMSGREIKKLNESDADKLFDEPFLILSATNSISTIHFLGEKIKEIEKAVKSYSHLKPEFKHLLTMPGIGDILGLTIMLEAGDISRFPTVGKYSSYCRCVKSERLSNKKKKGEGNRKNGNKYLSWAYVEAANFAIRSYPEFQSFYNRKKAKTNGIVAIKALSNKLARASYYVMRDQVSYDASKLFR

SEQ ID NO: 98119 - protein, 430 aa, unidentified
MSYRIAAVDVHKKMLAVVVTDVAGEGEYQFERRKFGAAPEELKRLAQWLDQQEVEEVVMESTAQYWKPVWATLERYWKPARQQREGAGKVSGTLHLCQAKSNHGPRGRKNDFADGERMIKRLVAQELVLSYVPDPEQRLWRTVTRRKHQLTRAKVSFKNQLESLLEQAHIKLSSFVSDLLGVSARRMLKALAEGETDPAVLAAMADYRLQATAEQLRDALGACAQMSGVYRRLLKMALEELQVIETHIEQLDREAMGLMQEHQEVVRRVAEVPGFGLDSAMQMIAEVGPQAASFRAAKKLSSWVGVCPGNEESAGESQSTRSPKGNRHMRRLLNQAAQSAVKAKGSIFEVTFHRLLPQLGYKQAIWAIAHRLCRLLWLILHEGVRYEERGPAVSAKSKRTRTARMIRELKKLGYRVEGGPLPTVTPSMIG

SEQ ID NO: 98120 - protein, 422 aa, unidentified
MAVYCGIDWAEGHHDIALVGDHGKLIAKRRINESVDGVAELTGMLAAAGDNEHDPIPVAIETPRGLLVAVLRASGRPIYPINPLAVARYRQRTSVSGKKSDHVDAMALANILRTDRHLHRMLPDDSALARSITVLARGYQDAVWRRTKLVQELRAKLREYYPGFLAAFAAGSGSGRGLSTTQLASGDARAVLAIAPSPAEAATVSKARIETALRRGGRQRRITTLAARVFAVLRVPRLRQDPAVEQAMRTQTLALLGVLNAVCDCVDQLAAALTAAFAQHPDYEIITSFPGLADISGAIMLAEIGDDRERFTDDRALQAFAGSAPVTRASGKSRTVTRRRTKNNRLAGIGYSWAFTAAARPSPAREHYLRRRERGDGHPAALRHLFNRMLGQLHHCLQTGQTYDPARAFPHATPANAEPVAA

SEQ ID NO: 98121 - protein, 320 aa, unidentified
MICGVDISSASLAARIGHEGAAASFPNTASGIGALAAFCQAHQVELVAMEATGGYEKQSFALLSEQGLPVAIVNPRAVRQFAWSMGRSEKTDAIDAGMIAWFAEVKKSRPLCLSPASQQHLRALVTRLRQLTEVRTAQLNQQRLITEPVVEASFKDLLSLIAKQVRDLEQKIAALIEADPLWRQLDQAFRTIKGVADRTVARLMAEMPEIGTLSNKTISKLAGVAPLANDSGKHQGKRRVRGGRATVREILFIVASVVARHEPDFIAFQQRLKAAGKPPKVIRIALAHKLLVRLNAKAREVRTKFQTSKPNHTIQEPITA

SEQ ID NO: 98122 - protein, 336 aa, unidentified
MPMYQLGIDVSKNTLDLCLLREGIKGRIKTRKLKNTADAAKVVAEWLKKQSCELGEVHIIMEATGVYHEPLAYGLHFAGARISLANPHRTREFARGMNILTKNDKVDAWMLACYGSLKEPEAWTPPPESVRYLRALLRRRDALVADSTREKNRLEKSVFTDSPDAVRASIENMLQELSNEIEHLDVLIQEHIKTHPELNQDFRLLTSIKSIGYLLGLNMLAILKSHSFESAEQAAAFLGVVPVERRSGTSVKGKPKLSKIGPPEIRTKLYLAALCGLRFNPVMKQMYTKLCQRGKSKMCAIGALMRKLVHWCYGVLKTQLPFDAEYNQQSYYKTIC

SEQ ID NO: 98123 - protein, 339 aa, unidentified
MNEHSVIGLDIAKSVFQVHSVDTTTGQIERTKLRRKQVLAFFAKQPPQRVALEACGSAHWWARQLASLGHRVTLLPPRLVRPFVLRNKTDAADAQAIWSAAQQPGIKVVAVKSPLQQSILALHRIRAQLLKMRIMQSNAVRGLLYEFGIILPQSDRAMSQQLPAQWAALERQVPAFLLESLREQWQRVCEFNHQLAAIDRRLEHIRQQDPHCEAVSAIPGVGVLTATAAVAAMGDPRTFRSGREFAAWLGLVPRQSGTGGRVRQLGISKRGDAYLRTLLMHAARSIIIRRPNSTWLIELLKRRPFNVAVAALANKLARTIWAVLAHGRPYEPLLHGEFT

SEQ ID NO: 98124 - protein, 320 aa, unidentified
MESKNTVIYAGVDVAKATLQVHLLGRQNELANTPAGLRQLLKEMQKVPGVHVICEATGGYEQAMVKVLHGAQIPVSVANPARVRAAAQAQGQRAKSDPIDAGGLTDYGQRFQPEATPPTSATQEQLVALTQWLQQLIHGQAMAKTQAEHHQDPFVRRQHAKLMVHLQSQIKAVEKQIVALLEQDAVLQQRVNCLDDIAGVGARTAWMVLAHMPELGQLNRQQVASLAGLAPWTRDSGTMKGKRCIGGGRPEVRVALYMASLSAARSNPVLCVLYKRLRTKGKLGKVALTAVMRRLLIYMNHQLKDLASKATIEKIDEAKK

SEQ ID NO: 98125 - protein, 447 aa, unidentified
MFEASPLSRGAKRRNDRLTRFREIVGRDYAVVAIDLAAKKQVIVVADHDSRILARKTFTFTPWKLGPAIAWARTQAEVAGFAGIVLACEPTGHRWKVVADLAAAVGAQMVCVQPMVVARARETEDFTRDKSDDKDALLIARLTTQLHIYLPEHADQHWARLRHLGVRRTEQLTRRAAARQQIRDLLDSAWPQVLDSAAQPLDSATWLATMTIIGCDPRTITAYRSPARARTRLRARLHRELPRWGAHRIHGPILTAIITSAFATTMPPERTGALERAHYGLNDFHHATVECRQVESHMLAVLDELQLTALASSIPGVTAVSVAAILAETGDLSRFDSARAVVKHAGLCPRENSSGSYQGTTTISGRGRPRLRTAAWRAAFGALRHNPVYAARYQHLTTRTHNRLQPNQAYVAIAAALLRQLHVVITTATPWDPTLAGAPQSAEVSAA

SEQ ID NO: 98126 - protein, 374 aa, unidentified
MPRHLRYWVGLDAGHLETAVCLVDAEGNVFFEAMTETRAAPIRDILRRFGVEPVQSITIEAGVGTQMVRDLRSFGFPVQVADVRKSSKFLAIRRQKTDANDAKGLAELGRLAQSFGPHVFIKPVEHQDIRIMINIRRTLLKHRARTDALLQSIFRLHGASIKLLNGRGSLAAEVANQLRLLSTNGVTIRVDLDPLVRMGEDLRSHIWDMDRKMRTMAASIPVCARFQTIPGVGTITALSFYSAVGDPYRFRSNRDVGPYLGLTPNLYQSGATARRGRISRYGNKLTRSHLITAATVLLRTIKTESSLRTWGLRLATKIGFLKARVAVARKLAVIMMAMWKTSASFDPDKSKPRFLQPEEAGLDPVRISGSTIPL

SEQ ID NO: 98127 - protein, 339 aa, unidentified
MQQQGQYVGIDLHRRRSVIVRMTPEGEKLEVVRIENDPVALSLEVAKAGENPEVILEATYGWYWAADVLEACGARVHLAHPLGNNWGNRRVKNDERDAGDLADLLRLGRLAEGWIAPPELRELRELVRYRAKLVALRSGLKAQVHAVLAKEGVRVPMSDLFGVGGQALLDQCALGDAYVVRVESLRDLIEVYDREVKMLEGRIGNRLDGHAGYQAIQAIHGVGPVLGAVFTAEIGDVTRFSRPDQLACWAGLTPRHRESDTTVKRGPITKQGSKLVRWAAIEAISRNQGGTVLQQRFHRIAERRNNRNIGRVAAARKLLHLVFYGLRDGEIRCLARDAG

SEQ ID NO: 98128 - protein, 483 aa, unidentified
MPKQKMSTFERLQHGKLNRKQRRELYRKMNSEDPGLEVVHPDAAGIDIGNKSHFVAIPPDRDTAPIREFGSWTADLHEMAGWLKEHGIRTVALQSTGVYWIAVQEVLEQAGLEVYLVNARGTKNLPGRKSDVQECDWLRKLHAYGLLRNSFRPPEEIRAVRTIWRQRDRWVKECGRAIQQMQKALTTMNVQLANTISDISGVTGQAILRAIVAGERDPWALAKLRDPHIAASEEEIAHSLQGNWRADVLFELRQTLETYDFYQIQMTDCDRELAKYMSAVPARHMIEKQNLPENTSPLPASKQQARRSKGRRKDQPAFDLSSELQRTLGVDLTRIDGIDVITAQVIFSEIGPDFSAFPDENQFASWLSLAPKQDISGGKVIRHIPAAGRNRVANALRMAAQSLSRSDSYLGARYRRLRARLEGPVAVKAMARYLACLIYRMVTKGQAYVDRGAIHYENKRKERESIALKRKAAALGFKLVPAA

SEQ ID NO: 98129 - protein, 489 aa, unidentified
MIKSVGIDLSRTGRHQVRILDEQARPCDSLSFENTLEGLETMEKHIFSDGANPTIVFEPTGLAWLPMAIYLRARHPGCHLVKARLQKVAALRRYLRSYVKSDRIDGVTLAKMPFIDSEQLDEVYLPPVEFHALQRLTRQRERLLKSITVRKNRIGSIIDGYLPGLQRVFSDQWSRHARAFYHRRLNPFTVVHDGQDALNSFLGNVEAKGALSESYRVYQACQDLAEFYERSRPAGMVNEQFFDDLQEEIACELRLMEAEEAEADRVSRRIEELYHRLHPNDHLRTIPGVGERTAPVFLATVGDPHRFRSQSAFANWTGVVPGAKQSSEVEGKGLRMTKAGPVMIKRALYQAGDIARQYDPQLAYLYYREMVHHGKTHLQAVGAVMSHLGARILTVLRENRPYELRDAQGKPISKEKARKLILSEYKVPEGIRQQRRRRNPKKRTLSKRVKGEGRFGIPRTTEAATTPQSGCAPTFPNMSVYVTGAEKSR

SEQ ID NO: 98130 - protein, 367 aa, unidentified
MKKVSTRAVAQSRNISQQKLTIGLDLGDRNSWYCVLDETGQIQLEQRIRTNTKALQEVFAAMPHSRIALEIGTHSPWISRLLRELGHEVIVANARKVRLIGESRKKDDRLDAQTLARLARIDPQLLYPVKHRSVQAQADLMTIRARAGLVRARTALVNTARGLAKSYGERLRGCNVRNMNPEKAEGLSPELQAALEPLLNAIESLSERIVEYNERIEQLAQQSYPKVALLKQIKGVGTLIALTYMLTLEDPHRFRKSRDVGCYVGLQPGRRNSGQSEPQLHISKEGDPYLRTLLVQGAQHILGPFGVDCDLRRWGLKLAERGGRNGKKRAIVATARKLAVLLHHLWVSGDVYEPLHNSNQRAMPAAA

SEQ ID NO: 98131 - protein, 371 aa, unidentified
MGESSKTLFVGLDVHKDTIAVAYAPEDRGADVVALGTIGTRQCDIDKLIRKLEGKGATLVLAYEAGPCGYWLYRYLTRRGLSCSVVAPSLIPRKPGDRVKTDRRDAVTLARLLRSGDLSSIYVPTVDDEAVRDLSRAREDAMRDLKRSKVRLKAFLLRQDIRYEGRANWNAAHLRWLAQVVCPTPAQQIVFQEYVHAVTEQTERLRRLEAELHTAAKTWRLHPVVEAVQALRGVDFTGAVTLIAEVGDLTRFETPKKLMSYLGLTPSEYSSGAHRRQGGITKAGNGHARRALVEGAWAYRYPAKVSRHLQLRLENVPPEVRTIAWKAQLRLCKRYRLLSARGKHVNQVVVAIAREMAAFAWAIARTVPVAL

SEQ ID NO: 98132 - protein, 395 aa, unidentified
MFIVGIDIAKRSHEAIIITEDGQVVRKAFSFRNNCTGYNLLLEQVRRLTLVKSQIVFAMESTAHYWLALYARLLKDGYAVMVLNPIQSHSLRELYIRKAKTDARDSVIIADLVRFGRCKASNVPQDKILALRELCRSRAYLVDMAADLKRKLIALLDRIFPEYESLFDSVFSKASIAVLSKYSTPQKVKNANLRKLTDILMESSNGHFGEWKAHQLKEAACSSFGIDDSGGVYSTLLEMFLEQILSLTAQADSLKKQISVFFQEFNNPLTSIPGVGTVLAATILSEIGDITRFSSADKLLAYAGLDPSVKQSGEFKSNQNRMAKRGSPYLRRAIWLASTVAVHRDPMFQTYYEKKISEGLHYMNVIGHVSRKMTAVIFAVLRDGQPYQPILQSAG

SEQ ID NO: 98133 - protein, 277 aa, unidentified
MKQQAIQYLALDVHQATSVATVREAGGTIRMRATVPTEAKAIVGLVKGLGRPVHVTFEEGTHAQWLHDLLQPHAERVVVCNVRGRSETSNKSDRIDADWLSEQLRLNALKSVHHGSTGVAALKELVRCYTNLVDDATRVMLRVKAIYRGRAVAASGKAIYRPSQRKAWLAKLENRGARARAASLLEQLDPLLVLRTKARATMIAEARRQSGWKILRSIPFLGPVRAAQLLAVIGTPHRFRTKRQLWPYAGLAVVTRSSADQEIVEGKLRRRKRAPLI

SEQ ID NO: 98134 - protein, 341 aa, unidentified
MKKTVIVGIDFSKRTLDVSYFIIGAMKDCYYKQFANTSQGCQEMISWIKQKHRLTSEWLFCGEYTGIYSMTAATVLNDNDLDLWLENPNQIKLSSGMNREKNDKVDSYQIALYAARFIDRVKLYKPRSKVFLQVRELVRFKDRLTKMKTQLSVPASELKSVRKDWQETEYICDSSKALVDQIDFQIADIEKKMLKLLKTDPELKQLYKLITSVVGVGMQTAIYLLIHTWGFKAFENPRQLACYCGIAPFSKCSGTSLKGRPHVSHLANKKLKTLLHMCALNAVKYDPYLKLYYQRKIEEGKHKMNVLNNVRNKLIHRICAVINSGQEYDKNYYILNMMTAA

SEQ ID NO: 98135 - protein, 344 aa, unidentified
MDHFAGLDVSVKETSVCIVDDTGRIVKEVKVASEPQTLLKVLGNPAYRFKRIGLEAGPLSQWLFNGLAEAGLPVVCVETRHMQAVLKAQINKTDRNDARGIAQMIRVGLYRPVHVKTLRSQKLRMLLTHRKLLQSKAIAIENDLRGTLRNFGLKVGMVGKVRFEARIQELVENQPDLAVLVEPLLIVRRVLREQIVILHRRLLAIVREDDVCRRLMTTPGVGPVVALTYRATVDVPARFRKSKSVGPVFGLTCSRYQSGEIDWSGKISRCGDEMMRTMLYEAAQSMMHSKKWSWLKAWAMQIARRRGMKKAIVALARRLAVIMHRIWVDGTEFRWTREQAAAAA

SEQ ID NO: 98136 - protein, 351 aa, unidentified
MSRQPTSSAIATIGIDIGKYTFHLVCFDRRGAIVQQLKTSREQLGRRLANLPRCLIGMEACSGAHHIGRQLAALGHDVRLMPAQYVKPFLKGHKNDYRDAEAIAEAVQRPTMNFVTIKTPEQMDLLALHRVRSRLVSLRTGVINQIRGFLIERGIAVRQQPAPLRKALSDILSSSPSALSPRMIRLIADLSEDWRRLDDRIAIVSAEIEALVEEDQHCQRLMTVPGIGPIISSAVVAAIGDGAGFKQGRDFGAWLGLVPRQESTGDRTILGKISKRGNKYLRTLFVQAAHVVLARRPNAAMRGLWPWIVQASKRLHRNMLAIALANKLARIAWAVLARGHEYQPKIISHAA

SEQ ID NO: 98137 - protein, 395 aa, unidentified
MYQKARAPSPSCNQQVLLFVSLFNVNHTSSELDELAKYIGSLEGETRVVLECTGRYHEPVVKTLSEAGLFVSAVNPHLIKNFGNNSIRKVKSDPADAKKIARYTLDNWIELRQYSSMDNTRTQLKTLNSQFSFFMKQKVAAKANLIALLDNTYPGVNKLFDSPVRDDGSEKWVDYAYSFWHVDCVRKIGLKTFTERYQAFCKKHHYNFQPAKPAELFLASKDLIAVFPKEASYKLLIQQSIQQLNLASSHVEELRSKMNELASTLPEYATVMGMYGVGKTFGPQLIAEIGDISNFSHREALTAFAGVDPGVDQSGTHNSKSNKASKCGSNRLRKTLFQIMSTLLQTAPEDDKVYQFLVKKRAEGKPYYVYMTAGANKFLRIYYGKVKECIRNLEQ

SEQ ID NO: 98138 - protein, 338 aa, unidentified
MAIVMGLDQHRAQITAEWIDTDSGEIGRARVSPAHRDDVRRFLKHFAGQQLVAGLEATTGWRFVAEELRAIGAEVHLAEPAETAARRGSKKRAKTDRADARHLRELLMIGRLPESWIPPDHLLDLRAQVRLRHTLVDQRGEWQQRIQAVLYHHGFPQRHGLLTSENRAWLVELDLPESGRELLTVALTMIDALDAQSAPITRQLRLYARRQPGCKALMKHYGIGELTAVTILAELGDARRFSSSRHAVRYAGLDITVHQSDQRRAPGHLSRQGPPALRWALFEAAQAARRPSSPDRTYYDQAADRLGGNRACLALARKLLKRSFHTLRELGDDALLPA

SEQ ID NO: 98139 - protein, 352 aa, unidentified
MRRPKHQLTSGEDLFVGIDLHKHRWHVTIRTVDLELFSASIPGNWEALQRVLARYAGHQMQAVYEAGYFGFRLHDRLVAHGIPCLVTPPSLIPQEYGNRVKTDRRDSSKLAHLLAKGMLKRVWVPSEEELYHRQIIRRRRQLVRDRVRTQSRIKAELRFYGIHLEEPRGRWTQGYFETLRRIRFDNRWMQESFNRLLELYEFLTTQIDKQTQLLRELSETALYRERVEILQSIPGIGLISAMELLLELQDVSRFQRAEQLAAYVGLTPSQYSSADKVRMGRITGIGKNTLRSLLVEASWTLIRKDPAMQEKYDRIKIRSGGKRAIVAIARTLLLRMRRMLLDKQAYALPLAA

SEQ ID NO: 98140 - protein, 343 aa, unidentified
MNIQVIGIDLGKSSFHLVGHDHQGRAQFRKKLSRPKLCEFLTNHPLTVIAFEACGGSHWLGRYCKKLGHQVKLIPPQYVKPYVKTHKNDFIDADAIAEASQRPSMRFVEVKSEQAQVIGAIHRIRSGYIKARTACMSRIGSLLLEFGVSLPTGHSVMKRLFAWLATQRQVIPPMLMEELVELHEHYQELNARIDRQERKLMRLVKAHRDGELLKSIPGVGDLTASQCLAEFESVNQFKNGRSMAAWLGLVPHQYSTGGKTKLLGISKRGDKHLRTLLIHGARAILSRLETTGTVFGDWLTKLRQRKPFNVACVALANKLARIVWSVLKYKKAFNAECLHTEFA

SEQ ID NO: 98141 - protein, 423 aa, unidentified
MENTAAKKRMQVPEGYLIIGVDPHKKRHAAVAITQDFTTRAKFKIDNTREGLEMMLRRARMEMVKSDCRGVMFAIETGGHYWRNVAYFLDEQGIPFRFINQFTLKRRREGKDLNRRKNDYRDSEVAAQLLCTGEFTESKLPQGVYAELRTAHNAYRRLVKERTRITNLIKGLLDALFPEFTQVFKDPCGLTALSVLSTCAIPRVIAKMTEEKFVATIEAKHQGRLMRRKLRALHYSTGTSIGIDAGAWSVSSEISFLVEKLELIRRHICIIERTLVRLVDETEEGKYLLSIRGLNYTAVAGLLAELGCFKAYRSAKQMIKMAGSNPTESESAGKRSPHTPMSKKGRPVLRYCAWTAVIPMLRLNPDFRAWAKQRRERPAHANPLNGREVVGAALNRLLRLAFALVKNQTYYQVSKPELTLVAV

SEQ ID NO: 98142 - protein, 377 aa, unidentified
MDAPFLKWHLGAKVVIAQSPRNQKGVSTMKITTIGIDLAKTVFQIHGVDEHGKAILRKRLNRSEMTVFFAKLAPCLIGMEACGSAHHWARKLSQFGHVVKLMAPQFVKPYVKTNKNDMADAEAICEAVARPNMRYVAVKNIEQQGVLSIHRARAGFVKSRTALANQIRGLLAEFGIVIPQGIRSIMKKMPSILEDEENGLPGVMRNLMRGLTEHLKGLDTLVAELEIQIQRWHRESDASRKLESIPGIGPITASAIVATIGNAREFNNGRQLAAWLGLVPRQHSSGGKPTLLGISKRGDAYLRTLLIHGARSVIRVAETRMDGDNWLRKLLARRNRNVASVALANKNARIIWALLVREQSFQPGYVTTGNWAVTSSD

SEQ ID NO: 98143 - protein, 397 aa, unidentified
MAKVRSWAGLDVHARSVLAVTLDAQSGELRSRRLPGETAKVVEFLATLPGPTRAAYEAGPTGYGLARALQAAGIGCLVAAPGKIERPAQDKVKTDQRDAERVLRLLMIDALHPVRVPTVEEEALRDLVRAGEDVRGDLMRARQRLSKLLLRHDILYEDTSSTWTQRHRAWLRAQDLGGGAQATLLDYLGAIDTLELRRGALEKTIAELVPASPCAQTVARLRCLRGVDTLSAVGLCAEIGDFGRFQRPGKLMSYIGLVPSENSSGETRRQGAITKTGSRHARRLSRPAGTTARPPPAASPSNAAKTGSPPTSSRSAGKPNNGCTASGAAWPRTAASAARSSRSPSPANSPGSAGHSPTPTDPPTPQRHVGREGRREPANAREHQRSKHEQPCGHARS

SEQ ID NO: 98144 - protein, 352 aa, unidentified
MTVTTLARSITGGVDTHLDVHVAAALDERGSLLGVESFATTEHGYKKLLGWLADFGPVDLVGVEGTGSYGAGLTRHLQAERVRVVEVDRPNRQRRRRKGKSDPQDAISAARAALSGDACGEAKSRDGNVESMRVLRVARASARKGRTQALNQMRNLVSTAPDPVRSELRGISVYRLLERASAYRPGTKRDIVSLTKFTLRMLARRALTLEEEITEIDAILKPLVKETAPELVSTLGIGTDAASALLVAAGDNPERLRNEAAFAHLCGASPLDASSGKNERHRLNRSGDRQANSALWHIVLTRMVYDPRTTEYIDRRRTQGLTKKEAVRCLKRYVAREVYSLLPHDKLGLDSP

SEQ ID NO: 98145 - protein, 316 aa, unidentified
MFVGIDVAKAELVVATRPAGEHWAVANDEAGGRELAVRLRATAPTLVVLEATGGYELLAVAALAAAGLPVVVVNPRQVRDFAKATGQLAKTDRIDADVLALFAERVRPAVRPLPNAEAQALEALLARRRQLLEMLHAERNRLGQVFGRGQRPVAKSLKAHIAYLERELRTTDTDLGTMIRESPVWREKDDLLRSVPGVGRVLALTLLAELPELGRLSRREIAKLVGVAPLSRDSGTLRGRRFVQGGRASVRAVLYMGALVATRRNPVIAAFYRRLVAAGKPKQLALVACMRKLLTMLNAMVRSGAPWRYDPAVVRS

SEQ ID NO: 98146 - protein, 344 aa, unidentified
MERYLGIDPHRDSCTLSLVSAQGKKTKQFVVPTEGSALVRSVRDLRGELHVCVEEGEWSEWLSEILSPFVERLVVCQPQKRRGPKSDASDSRELAERLRTNRTGPPVYKPPRPWARLREAVRLESKLTQDVTRTKLRLNSLYRRRGLASPRGEIYSPRHRGAWMAKLPAASRPSAEIWGEEIDALGELQCKAKSQMLEAARTFPIWRTLQTAPGIGEKRAAILVATVVTPHRFRNKRLFWSYCGLGVVTRTSSDWVQHAGQWVRAPVVQTRGLNRACNRPLKAVFKGASMTVRRMLPPNPLLDHYDRMLLAGTKPNLAQLTMARKIAAIVLAMWKTESEYKIMS

SEQ ID NO: 98147 - protein, 379 aa, unidentified
MPDVSSIAPAEVKRFVVFDVHKNSLVAGTLPPSGGTPEVTRLENTERAVRRFVERLGGPGGLAVAYEAGPCGYDLFRLLTRMGVACDVIAPSLVPVRAGDRVKTDRRDAKKLVRLYRAGELSFVEAPSPEQEGLRDLVRCREDLRRARTAARHRVAKQLLRHGHIYREGKQAWTKQYQAWLSRQRLAPLAQRALAHMLSHLDALDAQLGAIEHELEQVATSEPWCDPVRWLCSFRGVGLITALGLLAEIGDFRRFNQPRELMSYLGLTPSEYSSGDQQHRGHITKCGNRHARRLLIEAAWHYQHAPRLSARAKALAPHVPTAVTARAWRAQVRLNHRHRTLTGHGKRSTVANVAVARELCGFLWAAMTHQPLREEELAA

SEQ ID NO: 98148 - protein, 426 aa, unidentified
MAWRRKDKGGVMTEDVQWFAGIDWASQTHQVCLIDGGGKIVGERGFAHGGAGLCELCSWLLTMTRGPAPAIAVAIEVPHGPVVEALLERGFQVHAINPKQLDRFRDRFTVAGAKDDRRDAQVLGDSLRTDRHCFRRLSAEDATVIELREWSRMTEDLQQERNRLTNRVREQLWRYYSQALAISDDVAADWFLELWAAAPTPATARRLRESTVERILKGHRIRRITAAEVLALLRQKPLTVAPGTAEAASAHIRTVAQRLKLVNRQIKQAHQRLDALCDRLAENEEDNAAGQNCEQRDVTILRSLPGVGRIVLATLLAEASEPLRRRDYHALRALSGVAPVTKRSGKRCTVVRRQACHTRLRSAVYHWARVATQHDQRSRHRYAELRKRGHSHGRALRSVGDRLLSVACAMLIRRTPFDPDVRQMAA

SEQ ID NO: 98149 - protein, 337 aa, unidentified
MEAWTYLERDRRRGVEQDQGGSTDQATAFYVGIDVATAWLDVAVRPSGETWRVSNTEAELPALVERLGQVTPAAVVLEATGGYERAVVAALAMAGLPVTVVNPRQVRDFAKAIGRLAKTDALDAGVLAHFAEAVRPAPRPLPDAATQTLAGLVERRHQLVTMLTAEKNRRQQALPAVRPLVQAHIQWLEQALAELNQNLDQTLHTSPLWRERDQVLQSVPGIGPVVALTLVADLPELGTLTHKQIAALVGVAPLNRDSGLLRGKRLVWGGRARVRAARYMASLAAVRWNPVLRSFWLRLRERGKPPKVALVACMLLTILNARLRHQRAWQPPSLDAA

SEQ ID NO: 98150 - protein, 352 aa, unidentified
MNQIKYIGMDVHKAMTVIAVLDSAGKVLAEAIIETKGSTILDFLKSQRGDLHVAFEEGTQASWLYDLIHPHVSAVIVCNPSKIVRHGNKADKIDAKLLAELLRTGALTPVYHGEKSARAVKELALSYISVVADGTRIKNRLKAMFRGRGIECNGAGVYDPDERKEWMAKLDSKAVRARADRQWQELDLVERLIEEAEDDLLAEARKYAATRILRSVPGIGPIRAAVTLGVVGTPHRFRTKKQFWGYCGLAVVTATSAEYELVNGQVRRSKKRPLLRGLNNNYNHAMKEVFKGAAKTVAAGVWKSRFEAKVANGAPESLARLTLARKIAAITLAVWKKGERYDQRKMKTMHAA

SEQ ID NO: 98151 - protein, 386 aa, unidentified
MAEIAVNGRSVLGMDVGKRPHWACLVTPEGEAALNRPVANDERELSALFASVPKGTLLVVDQKRNIGALPLRVARSRGLEAAYLPGIAAHQAAKLFAGDAKTDERDAEVIARTAMGVPQALRPVPEEGALEGARRLEAQRCDLLRDRTHCVNRLRALLLESNPAFERELDCEAAWALSLMSRVGGPWQVLDAGRRRYAALTRDAPRGAADRLWAALKAASRPTEAQVRAEATLVRMLASRIAEDTALIAELAALVEAEVGGDETYRCLLTVPGVGPRTAAQLVLSVDISDFEDHDHLASYCGLVPRNRQSGTSLNSVSSSRQGNKQLKNLLIFSCSCLARGSGYYREYYERCRDRGMPHKAAIKAVARKRLKVIYAVMRDVRPYVA

SEQ ID NO: 98152 - protein, 412 aa, unidentified
MDLMVERCAGVDIGKDEVVACVRTPGPGGKGRRHQTRTFSSFTSQLEVMADWFASEGVTEVVMEATGSYWKSPWYVLEERGFDLKLINARHVKILPGRKTDVADAEWLAELLEHGLLRSSFVPPVAIRELRDLTRYRKRLIQDHTSECQRVQKTLEDAGVKLDSVASEVLGVSGRLMLKALVAGERDAEVLAELAQGRLRKKIPDLREALRGRFNEHHALLVRLCLDHAEYLEAAIAELDGQVDVVMAPFAEARDHLDTVTGVGKRAAECIIAEIGTDMTRFPTAGHLASWAGMAPGNNITGGKRHPGKTTKGNVWLGDILTQCAWSAARSRNTYLSAQYWRLARRIGKKKAAVAVGHSILVICWHLLTSNTDYDDLGGDYFARRGDTARHQDRLVQQLQDLGYQVTLRKVA

SEQ ID NO: 98153 - protein, 403 aa, unidentified
MYSSFVGIDIGKWNHQAAFLELSGKETARSLAFQNTSEGFQSLSESLAPFDKGQTVIGLEATGHYWLALFSFLVDNGWTVKVINPMQSDALRNMNIRKAKTDRKDCVVIADVLRFGRYTETVLPDEDLLQLRELSRCRVAHVELLGDLKRRVLGILDRIFPEFASCFSTVFGAAPTELLQECTDPEELADYDVDKLIKLLEKESRGRHSREKAEELKAKASRSVGTRFGRDALKFELKMLLEQLDFIKGQIKEFDKFLKKLMKNHELIYTIPGISVTLGSAILGEIGDVKRFGTPQQLQAFAGMDPSVTQSGNFQGTQGRMSKRGSPYLRRAVYLAANAARRFDPVFKEFYDRMIARGKHPKQALAAVGTKLLRVIHAVMTSQKPYNPQKLLPPAARISQVTP

SEQ ID NO: 98154 - protein, 321 aa, unidentified
MESAIVGIDIGKKELSATLLLGDKETNGVFRNSTAGFAMLGRWLGKHDVEHAHICMEATGTYGEALAQHLHDAGHVVSVVNPARIKGFGQSELSRIKTDKADARLIARFCRAMQPEPWQPPAPEVKELKALVRRLDELKGMLTQETNRLGTADDVVKPSIQDMIGLIESRVHQVTQQIRDHVDRHPDLRGKRDLLETIPGIGPGTSAMILAEFGDVSRFPDAGSMASFCGLTPRHRQSGTSVHGRSMLSKTGSARIRKALYMPALAAIRYNPIIRAFRARLLANGKLKMIVVGAVMRKLVYIAYGVLKSGKPFDPAIGATA

SEQ ID NO: 98155 - protein, 511 aa, unidentified
MPLVQHGPGWPQIIDEAYALSHTRIVQMPSRAAAPASPGKEIFLTMAYKRKNVKNKGRKRSSRSLKTIQPNSAGIDLGSREHWVAGPPPEDGASNVQSFGTTTPELLRLADWLKQQDVKTVAMESTGVYWIPLYEILDSRGFEVVLANARQIRNVPGRKTDIIDCQWIQLLHACGLLRGSFRPSDDICQLRALIRERNTMVEQRSDWVRRMQKYLDQMNICVHHAVSDITGVTGMTIIRAIMDGERDPHTLAGLRDRRCRKSEAQIAEHLTGNWRAEHLFNLRQALKMYDQLCAVIADYDSEILSYLATLQPADTGDQPVPPPASKSKAKNLLKRGQEPIRQGLYRFCGFDMTTIDGIGVDTASVVISELGIDFTMFPNENNFVSYLRLAPNLSISAGKKVPKKSKISTCTRVATALRMAALTLRNSKTALGAFYRRVAWRKGASVAVFATARKLAQFIYRLVRYGQTYVDTGVEAYEARFKKRRIKYYTKTLNDMGYNVEPINTEQTILI

SEQ ID NO: 98156 - protein, 345 aa, unidentified
MEYYAGIDVSLESASLCVVDATGRIVREAKVASEPEVLIGWFSRLGLVVTRIGLEAGPLSQWLYAGMRDAGSAVELIETRHVRAAFKTMPVKTDRKDARGIAQLMRLGWFRPVHCTSLPAQEMRAPLTARKLLQTKNHDVEMCLRGVLRGFGLKVGATTPRNFAARIGELVAGHTTLSVVAEALLAARNTLFAEWQKLEKRLRSLAREDRRVRLLMTAPGVGVIVALTYASAIDDPGRFKSSKTVGALFGLIPRKYQSGETDVTGRISKIGDRGVRTALYEAANVILTRPVKGSTLKSWGMRLAARAGMRKAKVALARKLAVVLHRMLADGTSFLADKAAAAATR

SEQ ID NO: 98157 - protein, 428 aa, unidentified
MQAVATSERTQAVWEAVIERCCGLDVHQKTVTACILAGALNQQPSESLRTFSTTTKGLLELRDWLEEHGCSHVAIESTGIYWRPVFHILEDTVTVLLVNAYHMKQVPGRKTDLRDAQWIARLLRWGLLKPSLIPPKPIRDLRDLCRYRKKLTEQASAEKNRIQKVLEDANIKLASVVSNVFGVSGRAMLEALMQGETSPEKTADLARRKLRSKIPQLVEALEGHVNEHHRFLIQMQMEHLEYLEKAIARLHERIDEKIRPYQHEVDLICTTPGIDTVSAQHIFAEMGGDISVFPSEGHLASWIGVCPGNNESAGKRRSGRTTKGNRWLKALLVQTAHASSRTKGTYLKAFYHRVAARRGKNRAAIAVAHKQTTIIYHELSENKPYQELGENFFDLRNQKALEHRLVRRLRNLGYQVDLHPEPVTSQCS

SEQ ID NO: 98158 - protein, 367 aa, unidentified
MEKLRFVGLDVHKDSITMAVADSDGSAPAVVATFPSETGQVIKRLKKLGAPATLRCCYEAGPTGLGLQRALEKAGVPCIVVAPSLVPQKTGDRVKTDNRDAVKLARFLRSGDLTAIHVHDEQTEAMRDLERARDDAKNAERVARHQLSKFLLRHGRVYSQKKTWTGRHLDWVRSQQFEHEAHNRVMPEYVRAVEEATARVERLTKDITELVESWHLKPLVTALQAMRGIKLLSAVILAAEIGDMSRFATAPQLMAYLGLIPSEHSSGGSQKRGSITRTGNRHARRILVESAWSYRFRPGMSYEIRRRNVGVSPEVQAIAWKAQSRLHGRYKRLLGNGKNKQKTVTALARELAGFVWAIARQPQLLAA

SEQ ID NO: 98159 - protein, 348 aa, unidentified
MRFTEGIATYGIDLGKSKFHVVGVDEKGHGLLRRTLRRPTLLEFFANAPAALIGVEACPGSHWLARKLTSFGHTVRIIPAQFVKPFVKSNKNDSIDAAAIAEAVTRPSMRFVAIKRCDQFDVQAQHRVRDRLVSSRTRLISQMRAFLLEYGIALHNGAGMFRQQLPAAIADECNELTPAMRTLLMELWDEFKALDQRIVAVSHHIEALAARDDTARRLTSIPGIGALTATALLAAVGDGKQFRRGRDLAAWLGLVPKQYSTGGKPTLLGISKRGNPYVRRLLIHGARACVLHLDRRRDRLGAWLDRLCARMHSNNVVVALANKLARIAWTVLTRPGTSYERMDPRFAN

SEQ ID NO: 98160 - protein, 391 aa, unidentified
MFYVGIDVAKKNHEASIIDSSGKLLDKSISFSNSQAGCAKLISLLDKFKVDSTNVIIGMEATGHYWVSLYSYLIDLGFTVYVINPIQSDAFRKMYIRQTKNDSKDSFVIAQIMRFGEFSSTSLADENIMTLRQLSRYRLALVDECSDWKRKCIALLDQVFPEYSKLFSDTFGVTSRELLSKYPTPEDMLSIDTDTLTELLSKASKGRFGVLKANEIQESASSTFGVKFAKNAFSFQIKQIIAQINFIEEQLKELEVEISTLLHQTNQVITTITGIGDVLGAIIIGEIGDVSRFESAPQLVAYSGLDVAVKQSGDFVGTQTKISKRGSPYLRRAIWLAATVAAFKDPALSIYYQSLRARGKHHLTAIGAVARKMCNIIFAVFRDNEPYVPHF

SEQ ID NO: 98161 - protein, 316 aa, unidentified
MKTKTETKAAPAYVGVDIGKAGLDVSFPGQVPCRYANSAAGIAELIKVLRKLPGSQVVCEPSGGYERDLLESLWAAGLAVSLVHAARVRSFARAQGRLAKSDPIDAVVLREFGELLRPGTLAEPSPERERLAAFVQRREQLVNILSMEDQRLTQTRDPVVRKMSERLLKALETQIEEMDELIAAHIAADATLKSQSERLQQVQGVGPVTATTLLAELPELGTLSRNESGALGGVAPYNNDSGEHRGRRTIRGGRVKVRRVLYMAALVATRFNPILKTFYDRLVAAGKPKKVALVAVMRKLIVLLNHILKNPQFKLA

SEQ ID NO: 98162 - protein, 466 aa, unidentified
MARSKSKVSRVAHSAPALPPQLAAAHLHAAGIDVGAEAHFVAVPPSDDPQPVRGFGAFTADLEALVAWLVACAITTVALESTGVYWIPLFELLEARGFEVLLVDPQQVQKIKGRPKSDVHDCQWIQRLHTFGLLAGAFRPADQVCVLRSYLRQRAMLLTYAAQHIQHMQKALTQMNLKLQHVVSDITGVTGLAILRAILTGERDPGKLAQLRDYRCKHDEATIARALQGNWRDEHLFALAQAVALYDVYHQKITECDRHIEAYLQTFADRSAGQPLPPAPRPRKRGRNQPAFAVREPLHRITGVDLTQIEGIDETTSLVILSEIGLDMRRWPTVKHFTSWLGLCPHHRVSGGKVLSRRTKPCANRAATALRLAAACLHHSQSALGAFFRRMKARLGAPKAITATAHKLARLVYSMLKHGTAYVMQGMDEYEQQYRDRTVKNLTRRAKTLGYTLVQTPEGTPEGALV

SEQ ID NO: 98163 - protein, 343 aa, unidentified
MKIIGCDFHPSFQQIAMVDTETGEQEEKRLGPGEAALFYQQLQGQPVIVGMEASGNTLWFERLLTDLGYQMRMGDASKIRAMEVRKQKTDRRDAELLLKLLVEERFPEVWVPSLEMRDARQLLLHRHKLVGMRRQVKNQLQHLALNQGVQKKWKLWTRAGRETLEELPLTGWTARRRNDLLGWLDELDQEVAELDGAVEQEARNNAVAQLLQTHPGVGPVTSLAFVLTLGKIERFQHSRQVVSYLGLNPAENSSGGKQRLAGISKQGNPMLRSLLVEAGQSASRMDTELKRAYQRLKQKKHSAVAKVMVARKLAVRLYWMWRTQQPYSATRMQGSPSHPVVAV

SEQ ID NO: 98164 - protein, 375 aa, unidentified
MIAYVGIDAHTTNYTLSTYLEGSAAPVNTNTYSPAVANIISYCKGIRKKVGNDTEIVVGYEAGCLGFKLKRDLERNGLTAKILAPASITGTEINRRRRKKTDKRDAEAIARSLKNHEYSEVYTPDEEDESVRDFIRMQQDHKKQLRVIKQQICAFTTRHGYQYTDGKSYWTKKHLKWLKELPLEEINKETLDSYLLSYETVSDRLEQMNRRIEEIAEKDKYREAVHKLICFKSVKVLTALALIVEIGDFTRFVKAKNFAAFLGLVAGELSSSDDQNQTGITKQGNTFLRKLLVECAQSFSRASSGKSEALKKRQEGNAPEVIAYADRANERLRKRYMRLVLHNRKNHNKATVAIARELACFIWGMMTGNIHTVLA

SEQ ID NO: 98165 - protein, 368 aa, unidentified
MKTEKTPRISVGVDLHKQQFTVNALNEESGEILLEEVYRTTREGYEDFCKKMHEHEEKTGCSIRIAVEATGNARFFKNRMESEGFEVLVVNTNKFKVITMSTKKTDANDASTLAYYLSKDMLPESHLCDQTSEELRRMLKTRSVLVSTIVKIKNQIHGMLLGYGIETSPAQFQSKKRRQELMKDLADQGYSQFTAQSLEVTLNILDNICADVKRIEAQIQEMTKDNEEVELLMTMPGIGFVGATTIVSYLSNIERFEGDFKRFSSYLGIVPGVHNSADTVHYGKITKHGPQDLRTTFVQIALGIIRQPQNTNGWKLMQDYRIMKISKGSGRAIIALTRKIARIVFAMLNNHTPFDENLLRKAEKEVVA

SEQ ID NO: 98166 - protein, 386 aa, unidentified
MPQPNDLSRSLAAFVQDNTLVAVIELSLSSWLVAGVVPGIERQPLKKLEPDHEGLLRLLQRWRDEAAKSGCTIDRIAVAYEAGRDGFWLARWLRGHGIETHVIHSSSVAVSREHRRAKTDRLDSAMLLRVFMGWLRGERGHCGMVGVPTIEEEDARRPHRERENLVGERTRIINRMKAALIRLGIRGFKPELRRAPMKLDALRTPADLPIPPNTLEEIRRDLARLAMVREQIDLIEQARLTRIEQAPDAGPNAMVRMLASIVGVGIETADMLVQEVLSRNLRDRRAVARYAGLTGSPDESGSKRREKGLAKAGNARVRRGLVQFAWRFLLFQKDSALSQWYRTRTEAQGVRKTVMIVAFARKLLIALWRMVTTGEIPHGVVLRPAG

SEQ ID NO: 98167 - protein, 355 aa, unidentified
MPKTASAQIAVIGIDIGKNSFHVVGHDSRGAIILRQKWSRSQIEARLANLPPCLVGMEACVGAHHLARKLTGLGHDARLMPAKYVRPYAKGQKNDFNDAEAIAEAVQRPTMKFVATKTADQLDLQALHRVRERLVSQRTGIINQIRAFMLERGIAVRQGVRFLRAELPIILASRTDVLSPRMLHVIEDLAGDWRRLDERIETLSREIKTIARQDAGCDRLMSVPGIGPIISSAVVAAIGSGDVFSKGRDFAAWLGLVPKQISTGDRTILGKISKRGNRYLRVLFVQAAWVVLVKPMSWERHGLKSWIEAAKKRLHHNVLAIALANKLARIAWAVLAKGRGFEVTRKGTLAASQPA

SEQ ID NO: 98168 - protein, 583 aa, unidentified
MANKLLAISRLKPGEVKTFHIPFASRQFAAGCDIDKPVGTYCVLYATAEGFQAEVRQFPNSPSGCQQALAWVLSHAQKHLSPNEKPPFIIESTGCYHELPVKTFNDATEVVVVNPHRIKAILRADGKDDVKDAVTLTKLVLSFDLKKSALAVGAQKRLRKVLRLKRKLIDNRSQVSNRIGSLLTENSVPLPNVVKVMTISGRAMCHAIAEGQINRDLLMLLWKGKNLPSPGLELVVQGQPFLQVLGPFAPTLKKKDVERLKEIYDALYYVADLDNAMRKLLGQQLRLLEMYDQEIDVIEQDVVAAIEAYTLELPGGGQRTAQKMIDLICTAPVFSEESARMLVAEAGLNFPEIYGHPDALALALGLTPGNSKSAGKILGKEVVRGNQHYKPVIVQAATAFLRRQLTPGKTGWFLWLWARRYQQRSDAQHARIAVARKITRSVYFMCRQWQPYDDSQHRLVSKDHALQTANRLANTAKELSASDFVGLEATTKLKQAAQAINQALGLQVSRYKLRPFDRDFSVDTLGLSTRVVNVLLKNDIVSLSQLVLRLVSGTLMSVNGLGHKAAQEIEVTLVSKKFVEVQD

SEQ ID NO: 98169 - protein, 348 aa, unidentified
MSWNLSAAVAVIGIDIGKNSFHIVGLDGRGAIVLRQKWSRGQVEARLVNMPPCLIGMEACVGAHHLSRKLKAFGHDARLMPAKYVRPYSKGQKNDFRDAEAIAEAVQRPTMKFVATKTADQLDLQALHRVRERLVSQRTGIINQIRAFLLERGVAVRQGLRFLRAELPRILAAPLDVLSPRMVRVIEGLAEDWRRLDERVDHLSGEITALARQDVGCERLMSVPGIGPIISSAMVAAIGTGDAFSKGRDFAAWLGLVPKQISTGDRTILGKISKRGNRYLRVLFVQAAWVVLIKPKSWEHHGFKPWIEAAKKRLHRNVLAIALANKLARIAWSVLANGRVFEARLEAA

SEQ ID NO: 98170 - protein, 371 aa, unidentified
MEQERGVAGIDPHKNTATIAVLDRRGGLVDNKSFPITEDGIDELLTFLLGIELMIDRIGIEGSGFLGRPLVLALVAAGYDVREVQANRTAERRKRRRRAKTDAEDAEAIARETLSDPQLPPAGKHCALSPDVWQALTVVRDWRASLVLQRVRLLTESEAVLVTLPISIRCALPSTSRVLPQLQALAAGVAHPGTLGPAERLKLERLAASLSDITTLTARIKELDRQIPAALGELGCTLTELCGVGVVTAMDLLVEIGDPCRFATEAQFARWCGIAPVALSSGEGHGPARRHRLDLGGNRAVNSVLHIVHVTQVRCHPPAKDYMTKRLAENKTKRQARRSHKRHLANIIIRHMWTDAKRLTAAASAHSPSTP

SEQ ID NO: 98171 - protein, 470 aa, unidentified
MSQKSLTFKKKQHFLDLTRDVPADKILFCPIDISKHFHIAILHDINCQPFGGFFDFSASKLGFESLVSKIEERVASLSAQLVFIGMEPSSVYYENLLFSLYLRYKESTSPRFQLCIVDPAAVSDNRKQHSLRFEKSDQIDTAAIGELLTRGLYNRAHISSPLCIEIKEISRSIKYLKSELLRFWNRFLCRLDRVFPNLMIDYKNEKPICKEPLQSGLLDDLLRICPDPYSLLELNSSDIIDLFHNKGRPLGPIRAAKIKQAVERALLLPRQYQAIHCHLLSREIQFLDSLKEQIKTLSVRLSQLIRLTPARHLLLIPGLSDNLTSEFVAALEDWNRYPSIQQVWSCAGLNPVQKQSGSYSSHPEISKTGSVHLRNAIFKMASTLIWHEPTFGIACFERLLNSYPFIPTLLHIGRKLTNTALTILKRDVAFQPPFSDYQAAKNQLLKLQEQYLNLKKKKEKKKKEKKKKNK

SEQ ID NO: 98172 - protein, 322 aa, unidentified
MVIGIDVAKAELVVARGSSGAITTWANDERGVEALVQDLGTLGTEALERIVLEATGGYEVLCASALATAQLPVVVVNPRQVRDFAKATGQLAKTDRLDARLLALFGERVQPPIRLLPDEQTRALEAVLTRRRQLLEMRQAERNRLLQLLGPGRRPIQQSLKKHIAYLERELRMTESDIGRMIRESPVWRERDDLLQSAPGIGPVVARTLVAELPELGRLNRRAIAKLVGIAPLNRDSGTWRGQRAIYSGRASVRASVYMAALVATRCNPVIKAFYHRLLAAGKPKKVALVACMRKLLTILNHMVRSGQRWHTSLTLPHSPAQ

SEQ ID NO: 98173 - protein, 501 aa, unidentified
MKAKRTKAKIRAEQKGIAVPCSEPAQELQILRPDAAGIDCGAQEHYIAVPPERVSAGEATVRRFSAFTEGLDAAVEWLKACRVTTVAMEATGIYWIPLHQKLEAAGIEVYLVNAGHVRHVPGRKSDVQDGQWLRQLHRFGLLNASFRPEDIICRLRSLHRHRDNLVSSSGSEIQHMQKALQQMNLHLHHAVSDITGVTGLRIIDAILAGQRDPEQLVKLRDKRVHKSTPQQMQAALVGDYRAEHLFVLSQSLQAYRFYQARIEECDRQTEPLLEKLAQQVEAASARLKLDAPRAADAQQRVTLPESPNGSKAEAGALKAKRNRKPIANEPKIELAGLLERICGIDLTKVVGLNVLNVLLIVSEIGVDMSKWRSAKAFCSWLGLCPGNKISGGKVLNSRTRQVVNRVADALRLAAQSVGRTETCLGIFYRRKQAHLGAPKATTATARKLACLIYHLLKYKQPYQEPDPAIYQLRLQKSALTKLQRQALALGYILQPTSPPPT

SEQ ID NO: 98174 - protein, 337 aa, unidentified
MNKIVIGLDVSKKKIDATAIVTSCGGNGMEKLGYSVFENTACGFRKLLSWCSVIGRGCSAEDCLFCCETTGSYDRAMCLYLCAHRCFIWRESAIQIKRSSGVRKGKDDRSDSLMIAEYAVRHMDKAECFRPLDGTVEELRQLFLYRQRLVEERKGAAVSVSESFVGIKDGPVANRIKREMQRHLRHLDAMIRRCEILIRQTLMKDREVWDNFCRITTIKGVGLVNAVAFIVYTNNFQNFKTARQLASYYGVAAFRNRSGTSVDRRAQVSNLSNHRLKAYLAQAAECAARTNGIYRRYYERMVERGKHRMIILNNIRNKIIHTVFALVRDKCDFCIAK

SEQ ID NO: 98175 - protein, 387 aa, unidentified
MPQVNDLSRSLAAFDPISTLVVVVEMSKTSWLVSGVVPGVERQPLKKLEPDATALLRLIERWRIEAVRAGRPIRRIALAYEAGRDGFWLARWLIARGIEAHVIHSASVAVSRERRRAKTDRLDAAMLTRVFLGWLRGERGHCGMVAIPTMEEEDARRPNRERESLVNERSRIVNRMKSALARLGIRGFKPHLRKAPERLAGLRTAEGTGLPANIIEEFRRDMARLALVREQISSIEKTRAERLERAPDTGPHAMVRLLARVIGIGIETADMLVREILSRNLRDRRALARYAGLTGSPDESGLKSREKGLAKAGNARVRRGLIQLAWRFLMFQKDSALAQWYRTRTEGPSGARKTTMIVALARKLLIALWRLVTTGEVPDGVELRPAA

SEQ ID NO: 98176 - protein, 344 aa, unidentified
MTNIQHKETVHEAKPDLFAGIDVGAEELILVIRKNGKPFDPQKFANTPADRTRLVKKLVKLPGIIVCLEATGVYHFDLSLALHDAGVLLMVVNPKAAHNFAKVLMKNSKTDVVDANTLAEYAARMDFVAWTRPSDESIALRSFARRINALTGQKAAAKNHLHALTATSETPKAVLKDAKLAIAQLEKRIDRLTAEALILIGKYPDLERILALLIGIKGIGNTSAIALMGELLLLPPDLSHREWVKFAGLDPRAFDSGKSVHKKTRISKAGNRHIRSALYMPALSAKQYDPHVKAYFQHLVANGKKPLQAVCAVMRKLLHAIHGMLKNNEPFDNTRFYAIPECNG

SEQ ID NO: 98177 - protein, 338 aa, unidentified
MALYCGIDLHSRVCWIAILNEELKVIRLTKVDNDLEAILRVLESYCEELEGIAVESTFNWYWLADGLQAEGYRVHLTNTCAVKQYDGLKYADDKHDARWLARLLVLGILPEGYIHPRQGRAVRDLLRRRSFLVRKRTSMLLAMRGAFTCRTGLTTTTNDVKKWTEADVEPYLDDPVEVLGITCMIEPINALNVQIKRLEKEVLARARLREEFALLQTVWGIGRILSLAVMYEVGDIGRFARVGKFASYCRLVKTARLSVGKSKGSGNAKNGNPYLSWAFSEAAHFAIRHHDDAKRFYQRKKSKTNGIIAVRGLAHKLARASYYVMRDQVEFDPMKAFG

SEQ ID NO: 98178 - protein, 349 aa, unidentified
MSTVAEVVDVVVGGDTHADTHTLQIALPSGVEIATATFRSTTAGLAEVVAWVVEHAPGPRIVVGVEGSRSYGIALERVLTAAGMPVVEVERPARSDRRGRGKSDVIDARHAVLQVLAMDAGRLPTPRADGDREGLRILLGARRDLTTGKTAWANQLTALLRGGDDADRGLLGPGGWTQTTLTRLARRRHVSGQTREQVIRREEAQRLARAILGADTDLKTNLRQLRGLIDDLAPGLLDRVGIGPVSAAQALVSFSHPGRIHSEAAFASLAGASPLEASSGRTIRHRLNRGGDRALNRALHDIAKTRMRCDPRTHAYLQRRRAEGKTDREIRRCLKRYIARELFRTLDNT

SEQ ID NO: 98179 - protein, 309 aa, unidentified
MTSDIQYIAIDIAKQTLQVQSDLKSLSLNYDEVGLKQLRAFIKQHEKPMIIAEATGGYERPLMSMLFKYDISVALINPRLARAFAVSEGIKAKTDPIDADMLLRFATEKNPRPTEYIGAEREELGALMDRRSQLTEHIAKEKNRLDKSPKSICGSIKKMIRLLDQELALIEARITKLIDSNEQMKAQSKLMQEVCGVGPNTAWSILAYLSEITALNRNQLVALAGLAPYNRDSGKYKGKRSIQGGRAKVRATLYMAAQTAAIHNPIIKTYVDRLRNEKGKPYKCAMTAAMRKILVHLQSLLKKQQLLLD

SEQ ID NO: 98180 - protein, 328 aa, unidentified
MFYLGIDVAKAKLDCCLLLDPDKAKRKSKSVANTKAGLANLLEWLRTKKVSPNNLHVVMEGTGVYHEQAALVLVETGVTVSIVNPAQVKNFGRGLAVRTKTDGVDSFVLARYGALLKPAAWQPPTLEARVLRALLARREAVALDLQRELNRLEKANVTEIPIFIRQSIDDSIEFLRTQLAKLQQEIDDHIDHHPDLRRDMELLTSIPAVGPQTGSNLLAIVHSYRFDSAEQLAAYLGLVPVERQSGSSIQGRARLSKAGPARIRAVLYMAAVVATKYNPHVKAVYDRLLARGKAKMAAIGAAMRKLVHLCFGVLKTRTHYQADYAKIS

SEQ ID NO: 98181 - protein, 433 aa, unidentified
MGNFAGVDWASEKHDVLIADPSGKELFAGTFAHDESGITSLCAALIKRDVEVVAIERPDGLLVERLLETGVQVLALHPNQVKAARDRFRASGGKSDRFDSFVLCELARTDRHRFRVLEPDSDETKALRALTRAREDLVAARVAMANQLRAELERFWPGPVGLFADLDSPISLAFLARYPSPTDAKGLGEKRLAGFLKSHGYSSRKTPAQLVERLRSAPAGRAGDVETRTRRSIVLRLTRTLQMMVEQIRELESEIAEALDAHPDGEIFRSFFLTRTSVICAATLLAEIGDCRARYPHRDAIAAQAGHAPVAVESGKRKSAKFRWACNKRLRRALDTVAMSTVRWNPWAADRYAQARQRGHNHRRALRSVGRAWSRILWRCWQTRTPYDPARHTGLQRHITVTIPSQSGPRPDHAATQQMAPDLTRPAAEPARG

SEQ ID NO: 98182 - protein, 376 aa, unidentified
MSGVSDRVSLVNVPCANDVVLAVDYHDAHCVIRRRNLATDQESVRKIDTEPHLLGTWMRQAADEARLQQGRAVWIQESTTGWVRVARLAAECGVEFVLANVLQMPLPPKARRRRTDKVDTARLLRECLNGQLPRSHQPAAEWRQLRRVIALRESLVRRRTALTNWIDRYLAHETWSDRQGLDTRRGIARLRALSLPETDRQVIDWKLEELEQIARRLRGVEALLMQHYRQSADAQRLDEIRGLAPVSAIAIVGRIGPIERFQTAEQLINFAGLSPGVRQSDDNCRGGKIGGGGTDKCLRHYVIEATFWVRDIPRYRETYQRVLRRRGVKVARLVVARLLLRSIHKMLSTGAAFQPRDSRRRKQVEPTAVAGEPQPA

SEQ ID NO: 98183 - protein, 344 aa, unidentified
MQIRSVGIDLGKTTFHLVALGTSGKVLVKKKLSQKQLLAFTANMQTSLIGLEACSGAHFLGRALRQQGHDVRLIAAQFVKPFVKSNKNDFVDAEAIAEAVERKNMRFVPIKTDDQLDLQAMHRIRDRLVSRRTAVINQIRAFLLERGMVFAQKPAKLKAAMADVLENAENALTPMMRNMIGILWDEWKTVEQQIDELTDKLEQIASSEPGCCRIRQIPGIGPIVATAIVAAIGNGAAFRKGRDFAAWLGLVPRQYSTGDKAKLLGISKRGNIYLRKVLIHGARAAAMRIKRDRFAIGGWMNALEARAPRNVLVVAMANKLARIAWAVLSSGEDYRPGVIAPVAA

SEQ ID NO: 98184 - protein, 360 aa, unidentified
MKKDTRDGSGLIVGVDLGDRFSRYCVLDQKGQVLEEDSVATTGRAFRKLFGDRPAAQVVIEVGTHSPWVQRLLQELGHETITANPRYVRLIYSSGSKNDQLDAERLARLARVDPKLLHPIQHRGGTAQADRALLRSRNALVECRTKLVNHARGMVKSIGGRLPTCSTSSFHKRVRQDLPDELKPALTPVLDTIGALTQKIQKLEARIERLAAKRYPETGLLRQVSGVGPLTALSFVLTVEDPQRFKSSRAIGPYLGLRPRQSQSGDVDPELRITKAGDSDLRRLLVGSAHYILGPFGPDTDLRRWGLALAARGKKNAKKRAVVAVARKLAVLLHRLWVTAEVYEPLRAHPAAMVSEAISA

SEQ ID NO: 98185 - protein, 392 aa, unidentified
MGRTSRVVIGMDPHKRTVTIVAMSPDEAVMSRGRFATDVAGFEAMLAVAAAWPERVWAVEGCEGIGKHVAVRLLDHGEAVVDVPAKLSARMRVYATGQGRKTDDTDAYSVALVGVRMAGLREVVNDQTLEVLRLLVGRRRRIGEDHTRMVCQLHRVLLELLPGGAKRDLSAAQARRLLAAVRPADPAGKTGKRVAMELVADLERVYARKKAANKEVVELVRQTGTGLLALHGIGPSGAARLLVEVGDITRFPAKGHFASWTGTAPIDASSGDNVRHRLSRGGNRQINMTLHMMAVVQLPTRTTHGRAYYDRKVAAGKTPDKAMRCLKRRLSDIVYRTMLDDMVANKVTGPGGHRGASLQSSAAGSHPHTGSSDKSLPGPATTKSRTPLRRAS

SEQ ID NO: 98186 - protein, 375 aa, unidentified
MKEKLRFLGLDVHAETIAVAVAEPEGEVRSLGTIPNRAESIRKLIKKLGPAAKLRACYEAGPTGYVLYWQLAELGVECEVVAPTLVPVKAGDRVKTDRRDAEKLARCYRSGDLTAVWVPDEGSEALRDLVRAREAAKQDQTRARHRLSKFLLRSGQRPPAGVRSWTRPYLIWVAQLRFAQIAQESTRQDYLHEVEHMRERVTRLEQAIMEAVKLASPALQQVINDLQALRGIADISAVTIASELGQVSRFDSARQLMGYCGVVPSEDSSGKRTRRGGITKTGNAHLRRIVVEAAWSYRRPPGIWYGLRRRQESISEEAKEIAWKAQHRLHKRYMKLGAAGKDQRKIVTAVARELLGFIWAIGTRAETVSRQQVAA

SEQ ID NO: 98187 - protein, 335 aa, unidentified
MKVFYLGVDVSKKKLDLCLRSNGKDILYDVIPNDLSSIKSWLTRTFEKFFLSEDSLVVCAEHTGQYTYPLVCATKSIGVYLCLEDAAKIKYCHGIPRGKNDKIDACRIAMYAERYNDCLQPYTASELIIQKLKNLSTERNMLVADRAKYQSQLKDQVDYMEHSIYIAKCNRVEGIINTFTDYIAQIDLEIKELINQAPVIAHQMDLLMSVDGVGERVALKMIMETDAFTSFTDPRKFCCHAGVVPFVYVSGSSQRSKNRVSNRADKSIKHLLHMAALSVSQVKNSPLKKYYDRKVEEGKNKMSVLNAVRAKLVTIMFAVFWADAFFSRNYQNSLA

SEQ ID NO: 98188 - protein, 435 aa, unidentified
MGLIGAATVVGGWLRLGGFPGGSGLTYEPADTLLCCLVNDASAGSSGGPGTHRSGGATSVGLLRQFDVVGVRRPGGACHPLPICREKGMAMTMVSAGSITGGVDTHLDVHVAAALDPIGGLFGVESFDTTRAGYEALLVWLLSFGPVERVGVEGTSSYGTGLARFLMDQEIEVIEVDRPNRQERSRRGKSDPIDAVEAARAALSGRATGLAKSKDGPVEAIRALLVARRSGRNHRISALVQMRHLVFTAPQRLRERFFGLSKTQLVNQAAAMRPRDNGDVVIYATKVALKLLAQRVQLLDAQIKQIRTMLEALINTAAPDLLSVYGVGVDNAAILLVAAGDNPQRLRSEAAFAHLCGVAPLPASSGKVIRHRLNRGGNRQANHALYQIVLSRLAADPETKRYVERRTKEGKSIGETVRMLKRYVAREVFKHLPAG

SEQ ID NO: 98189 - protein, 321 aa, unidentified
MDNFSHVGIDVSKATLEIAMRPDAKTFKISNDQVGLAALLTKLPPPDQCSIVLEATGGYECVAVAQLLQAGYRVARANPREVRHFATAMGLKAKTDPIDAAVLSKFGSVRELRHLAIPDGPLGELQQLVQRRRQLTDMQTQEKNRLEHTLSKPTQKSIDAMLATLEKQINTIDRQIARMINDHDDWKHKAALLRSVPGVGVQTAATLIAELPELGQLNRQEIAALVGVAPFNRDSGPRKGLRTIFGGRSSVRTMLYMAALTAKRVNQTMKRFTKRLATGGEGRPAKPSKVVTVACIRKLVVILNTMVKTNTKWNPNLAPVG

SEQ ID NO: 98190 - protein, 392 aa, unidentified
MRKPKQRKPLNDLSRSLTTLDANHTLIAVIEMGQKSWLVAGIVPGVERQPLKKLDTDEDALLKLLNQWRMEAEKAGHKIKRITVAFEAGRDGFWLARWLRARGVEAHVIHASSVAVSREHRRAKTDRLDTELLKRAFLGWLRGERDHCKTVAIPTIKDEDAKRPNRERDSLVGEQSRIVNRMKAALARLGIRDFNPKLKKAAERLSGLRTPEDQPIPPNTLAELYRDMERRRLVTDQIRQIEDARLERLKQAPKDGPNVMIRLLARVIGVGIETADMLVQEVLSRNLRDRRAVARYAGLTGSPDESGSKRREKGLARSGNARVRRGMIQLAWRFLNFQKDSALAKWFQARTANARGSRKKMIVALARKLLIALWHFVRDGVMPEGVILRPAQ

SEQ ID NO: 98191 - protein, 419 aa, unidentified
MTTNYSTASTLLVAIDISKYRHEVLIGVPDNKRRRKLMITNTLEDFERLTTTLASYDLPVRIGFEATGNYHRTLAHHLGEAGFDLKLVSSVSLARTREALHNSWDKNDPKDAQVILHMLEIGAVQFFHDPLVTGTGDIQELSKTHEIVSRSKTELWHRILTHYLPLYFPEAERFHRSSRTDWFLAFLDRYPSPHMISAMSQEAFIKDAWQVVGRKVGKELMLSDIYATAAASVGLPVHPQSEAIRMFRLVLEEGRSLIRQRNEIEARAVELLSDLPDYQLLTTIPGIGPTNAMTILAEAGDLRRFQHHRQFLKFCGLDLATMQSGTFRGQSKISKYGNARLRRTLWMAGQTAVLKRTNSFRDKFERYIARDRHNAHLRRKAYTAIPAKMARTVHAVVKHGEPYRPFFEAGVPRRKDLSL

SEQ ID NO: 98192 - protein, 344 aa, unidentified
MHIASIGIDLGKTTFHLVALGERNKVLVRKKFSRAQLLAYTANLPSSLIGLEAGAGAHFMGAALREQGHEVRLIPAQFVKPYRKSNKNDFIDAESIAEAVTKENMRFVQIKTQEQLDVQAMHRVRDRLVQRRTALINEIRGFLLERGITFAAQPIYLRKNLPTVIEDAEQNLSPRLRWLLQRMWQEWKQVEIDIKAMTDEIERISNENALCRRLRQIPGFGPLVSTATVAAIGNGAAFRRGRDFAAWVGVVPRQYSTGGKQKLFGISKRGNVYLRRMLIHGARAVLLRVKYDTEGFGQWVHRLAQRAPRNKVVVAIANKLARIAWAVLSTGKDYQHQPLQITAA

SEQ ID NO: 98193 - protein, 416 aa, unidentified
MAIKRLIERCAGLDVHKKSVTACVRVPGPGAGERTSETRTFSTTTAGLLVLRDWLTSFGVTVVGMESTGVLWKPVFYLLEDDFDCWLLNAQHLRNVPGRKTDVKDAAWIAELVEYGLVRPSFVPPKPIRQLRDLTRYRKAVIEEHTREAQRLHAVLQDAGIKLSSVATDILGRSGRDMLEALMGGTHDPQVLAELARGRMRPKIAALREALEGRFSAHHALLVAEMLARLDHADETIARLSAELERAMAPLAEQVELLRTIPGVDRRVAEVIVAETGGDMARFPSPEHLASWAGVAPGNNESAGKHRPSRTRKGDKWLRKTLTEAAWGAARTKDTYLAAQFARLKGRRGPTKANVAVAHSILVIAYYVLERGEPYSDLGADYFLHRQSSDAYKARLVHQLERMGHKVTLEPVEPAA

SEQ ID NO: 98194 - protein, 408 aa, unidentified
MQVLYTRCAGLDVHKDTIVACVRCVSPPMHQEVRSFGTTTTQLLELADWLGEHGCTHVAMEATGVYWKPVWHVLEDEFELVLANAAHIRNVPGRKTDVNDAMWIADLLAHGLIRSSFVPPHAIQQLRDLTRTRKQLVREVSQHSLRIQKVLEDANLKLGSVLSDVLGKSGRAMLDAIVAGETDPARLAALAQGTARNKTAELREALRGRITEHHRTMLRLHLQVIDALHRTLGELDTAVGKALAPIQQRTRLLTSMPGVSDLTASVIVAEIGVDMSRFPNAGHLISWAGLCPRSDESAGKRRSTRVRKSGTWIKTTLITAAWAAVRVKTSYLRAQFLRIKARRGAKKAILAVAASMLTAAFHMLRDGTEYNDLGSEHLDRQDRSKTIRRLLKRLQDLGCEVPQMAHET

SEQ ID NO: 98195 - protein, 353 aa, unidentified
MGYDYHIGVDYHKAYSHIVVQDTGGKTLRSGRVRNDSLAVASFLSPYSGNAHAVMEATRNWTVMFDWLDEICDEVKLAHPLKVKAIAEAKIKTDKIDATVLAHLLRADLVPTAHASSQRAREVRLALRERMFFVRLRTMVKNRIVTAVDRYPEQRAALKQYRDLFGAAGRKQLAAIEVSAIDRIQIDRGLASIDDIACRIKECEGTIKTLSKGNENVKRLQTLPGIGEFFARLIDAEIDDIARFRSASKLAAYAGLVPSTYSSGGRTFHGRIIKQGNKWLRWAFVEAVTPAVSCDPDLNAYYQRLKVTKGANRAKVAAARRLLTIAFVLLRDGRSYQRRGATPRGEENLSRLS

SEQ ID NO: 98196 - protein, 385 aa, unidentified
MSQFSGSSQAAIDYNSTIIGALELSEKKWVLAVQLPGVSRHSRHVLDACGDGLVSFVERLKAKCAAAGRKIARVILTHEAGRDGFWLARFLARRGIEVHVMQPSSLPVDRRARRAKTDMIDVEMLLRTLMAWLRGEPRVCSMVPIPSEADEEARRANREREDLSRERRSIVNKIDGILATLGIKGYKALRRDRREQLNCARQPGGDPIPQKARARIERLLDRLDLVLKLIDQVESARDAILKKDAPADEAERMIRSLTDLRSIGPDIATLLVREAFVRQFRNRRALGGYVGLGGTPFSSGGSEREQGIGKDGNRRVRAAMVELAWMWLRWQPDSALSVWFRARVGAMGGRIRKIMIVALARKLLVALWHYVNDGVVPDGAKLKVA

SEQ ID NO: 98197 - protein, 377 aa, unidentified
MKKPTRFLGLDVHADTIAAAVAEPGRSGEVRSLGTIPNTFDALAKLVRKLGVEGLEACYEAGPTGYAVYWQLTKLGVPCMVVAPTLVPVKAGDRVKTDRRDALKLARLLRGGDLTAVWVPDAEHEALRDLVRAREAAKKDQLRARHRLSKFLLRRGVRRDVATRTWGVLHWTWIKSLHFDNGAQEATFVDYVTEVEHASDRIARLEKAIDIAAADAPPQMRAVIDALQSLRGIAKLTAVSVVAELGELSRFTHPRQLMGYSGLVPSEHSSGQSTRRSGITKTGNAHLRRVLVESAWTYRSRPNIGPRLKARQQNATEDVKAIAWKAQHRLCTRYRRLSARGKPSGQVAVAIARELLGFIWAIGMKTEAAFKQSKKAA

SEQ ID NO: 98198 - protein, 351 aa, unidentified
MQYYVGVDNHKKFSYMSVMDEKGIVVKEGKVVNTKEAVNRFLGKEYTKDTSAVLEAGRNWTVMYDWLEEELDEVKLAHPLKVKAIAEAKIKTDKIDAKTLAHLLRCDLVPEAYVCDKDTRVVKNILRQRMFLVKVATMVKNRIHLIIDRHPEVKNQIDLQDLFGKQGMEWLTVVVLPKDDRRILDEELDLLKYLNEKIDSSNHWITNIGKDDHNVKLLMTIPGIGKFFALLIATEIDEITRFRDKNKLASYAGLIPSVHASADKVFHGRIVKHGNKYLRWALIEAVWPAIRKDLSLREYYESLKARKGANQAKVAVARRISIIVYRVLSQKRSYIVNYSGCPHNTLAEAAV

SEQ ID NO: 98199 - protein, 355 aa, unidentified
MSQEKYIGMDVHQATISVAVMDAQGKLIMECLLETKAATIVEFVRGLQGPLSLAFEEGTSAAWLHDLLKPHVDRLVVCDPRKAALLKDGNKSDRIDARKLAELLRTNQLKPVYHGEHGVRTLKELGRSYLTLTQDVTRVMNRIKALYRSWAIPCSGTTVYAPRHRAEWLAKIGEPGVRVRAERLYQQLDVLQPVRQAARHDLLSESHKHAAVKLLRQIPSIGPIRAALLVALLQTPHRFRTKRQLWAYSGFAVETHDSGEYRCVRGELQRNRERITVRGLNDNHNKDLKSLFKSAAISASTRPGPLHDFYAARIAKGMRPTMARLTLARKIVTITLTIWKKGVGFDPQQLHRQVA

SEQ ID NO: 98200 - protein, 380 aa, unidentified
MPEAVIGLDVGKLSHWACVATRDGEILLSAPVANREGDLDSLFGRFPGALVVVDQSRNIGALALARAKAAGMSAAYLPGLAAHGAARLFAGDAKTDERDAMVIAKTALGIPDALLPVGDPGPTVAAARALAAQRNFLTCENTRSKNRLRSILLESCPAFEALVDLSDGPQLRLMASLGGAWSVADAGPRRAAALTRGAARGKIEALVRSTTSSTRPDASVVAAEDRAVKLLARRISENSAEIDVITAEISALLEGDDTYRCLLTVPGIGPKTASELAISIDIEDFPSHDRLASYCGLAPRNRQSGTSISSVTASRQGNKRLKNLLIFSCNCLTRTEGRWGDYYTRCRERGMSHGKALKALARKRLKVIYAVMRDRVPYAA

SEQ ID NO: 98201 - protein, 392 aa, unidentified
MAVITRSPDCTGTIRTDLGAIFVSLELSRSTWLVTSLSPGGGEKMSRHQVDGGDLAGLLERFATLRRKAEARTGRRFPVIVVQEAGLDGFWTHRALEAEGIESHVVDPASIAMPRRRRRTKTDRIDGEMLVRTLLAFKRGEPRVCAMVKAPTPEHEDRRRLVRERQELTAERVRAVNRIKGLLFAQGIRDYRPLRRDRRQRLAELRGGDGRALGPHLQAQLARLLERLELLLEQLKALLAALKALAAEAQAAAAGTDAAVMARLLEIKGIGLGFASVLFTEGLFRPFANRRQVAAYAGLAPTPWRSGTIDYEQGVSKAGNPRLRATLIQLAWLWLRHQPQTALSRWFHDRVRQNGGRFKKVMITALARKLLVAVWKYVTQGVDIEGMAMTTA

SEQ ID NO: 98202 - protein, 347 aa, unidentified
MSITMIGLDTAKSVFQVHAVDDAGKAVMRRKLRRSELIPFFEQQEACTVVVEACGAAHHWARLLGGLGHEVRLIAPEVVKPFVKKGKKNDAADAAAICAAASRPEVRFVPAKSLEQQGTLALHSARSLLVKQQTMLANALRGLATEFGLTVPQGIGRLDELRALVEADETFPERARQVFARLLEHCRLTAEGIEAFEAGIVAHARRDDIARRLATIPGVGPITASLIAATVSDIGAFESARHFAAWLGLVPRQRSTGGRTRLGRITKTGNREIRRLLVLGATSMVYRAEHWSSAAGAWTRGLLERRPVRLVTVALANKMARIAWALMTRKEVYRAKGRAAVAAQAVA

SEQ ID NO: 98203 - protein, 370 aa, unidentified
MGKNILYVGLDVHKNTIDVAMADGQDKNQVRSYGKINNTPDALDKLLRKLQSGKSELSVVYEAGPCGYQVHRHLTSKGISCSVAAPSLIPRRSGSRIKTDRRDAIKLARLFRAGELTCIYIPTQEDEAMRDLIRCRDDIKRLQRKVRQRLLAFLLRHGFRYDGKKNWTKGHTNWLAGVKMAHPAQQIVLQEYIDAANECTDRVQRITEQILALLPEWSRAPFVRAYQALRGVSLIVATTVVAEIGDMNRFKNPKELMAYLGLVPSEHSSGNTVRRGSITRTGNGHVRRVLIEAAWAYRMQARKTMPLLKRQEGLSKSICDISWKAQTRLCTRYRRLYAKGKSKQTTITAIARELSAFIGAIDKEVQQTIA

SEQ ID NO: 98204 - protein, 310 aa, unidentified
MRKDNTAKKSPAVRKKTRQKLTVGIDLGDRSSRYCILDEQGEVLSEGSVATTKKGLAQAFGSKPRSRIALEVGTHSPWVSRYLADLGHEVIVANARRVRLITDSSRKDDRLDAKTLGRLARIDPELLSPIRHRSEQAQADLMVIRARAALVEARTMLVNSARGLTKSYGERLPSCGTGQVGENLAEPLSAPLQGALKPLLATVESLSERIREYDGQIEQTGKQRYPETELLKQVHGVGTLTALTYVLTVEDPHRFRRSRDARRLLRIAAQAERVWRQPTAITDHQGRRCVRAKAASAVRASHSGSLWTGQ

SEQ ID NO: 98205 - protein, 370 aa, unidentified
MKKRNTCPPSSQRRVKRPRGVGTIGMDLGDKVSRYCLLNADGEVVEEGRVATTKKGLAQVFGSMRRCRIALEVGTHSPWVSRLLGRWGHEVIVANARQVKLISASSRKDDRLDAQTLARLARVDPKLLRPIQHRSETLQGHLMMIRVRAALVEARTKLVNTARGMAKSMGERLPVCDPDQMGSAQLEGLPNQLGEALRPLLLQVESLTAQIQTSHQKIEQIARSEYPETELLQQVSGVGTLIALTFVLTVADKQRFEKSRDVGCYLGLRPKRSESGEKQPQLRITKEGDRYLRKLLVQGAHYILGYRGPDTDLKRWGLELARRGGKNAKKRAIVAVARKLAILLHRLWVTGEVYEPLGYHQARRSQPTAA

SEQ ID NO: 98206 - protein, 429 aa, unidentified
MNYNTQNAKIASITEKTLIVGIDVGSETHYARAFSWRNYEYSKKPFAFSNDEDGFASFKAWMDDIAEKHEMEKVIPGMEPTGHYWLNLGAYLQGQGMRPVHVNPHHVKKSKELDDNNPNKNDRKDPKTIAGLVNEGRFSYPYIPTGIYAEIRNLSNLRIQTQEEITRIKNRIARWFSIYFPEIKDVYRNPDAVSGLMVIKQAPLPCDIKGLGVDGVNKIWRDARLKGAGIKRAKTLVTAAERSIGNTEAPRSARKEIRNLLNDYEIYKNRMDELMEEIEELLSEIPYIDKLMGICGIGIKTVSCFIAEVGDIERFDNPKQVQKLAGYAIVADSSGKHNGESRISHRGRKRLRYALYEAAISVIGKNKEFKEIHHYYRTREKNPLKKMQSVIAVSCKLIRIFYTILTKGIDYDGQKMLRDIVRPGMQSAA

SEQ ID NO: 98207 - protein, 352 aa, unidentified
MTVTIVETRAQACAITGGVDTHADVHVAAALDPLGGLLGVQEFPASPAGYARLVEWLGGFGTVCLVGIEGTGSYGAGLARHIAAAGIRVVEVDRSDRQDRRRRGKSDPLDAVSAARAAQSGRAAGAPKGRDGQVEAIRALMVAKRTARSERIQTINQARSLIVTGPDDLRARFAGHPADDLVAELASLRPRPGSMIRYHTLLSLRELGRRAEFLDGQLQRLDALIVPLVAARAPGLLALYGVGHDTAAKLLIAAGDHPERLRSEAAWAQLCAAAPIPASSGKVTRHRLNPGGDRQANHALYRIVITRMSSHPATRAYVARRSKEGLSKKEIIRCLKRYVAREVYPHLRPGPR

SEQ ID NO: 98208 - protein, 386 aa, unidentified
MYFVGIDISKYKHDCFICTETGEVIEENLSFKNTNEGFIQLLNLLKSLDNSQKIRIGFEATGHYGMNLKLFLEKNDFSFMEFNPALVKRFISTLTLRRTKTDKKDAMLITKYLISVDYKPHPKQFYHKYSLKSLSRMREKLVKQRSYYEVQITNVLDIIFPEYKPFFNNDFSKTSLYILNKYKTPDKIKNMKDFDSIRKVSRGKFTSANFIKLKELAKYSIGISNDMFETELESLLILHSGIEVEINKLETKIESIIKELNPPILSIKGIGTISCAGIISEFGDLSRFKSADACVAFAGIEPSISQSGTESHIGHMVKHGSGHLRYFLMNAADYVFLHEPIFTEFYYKKRSEGKSHRVALTHVAKKLVRVIYKLESENITFNSNIN

SEQ ID NO: 98209 - protein, 345 aa, unidentified
MKIIGCDFHPSWQQVAIFDSETGEIEERKLSHADGQAERFYRDLHEPALIGIEACGNSQWFIDLVQRLGHEIRIGDAAKIRASYVRKQKTDRRDAGHILKLLLEKRFPQLWTADAEIRNQRQLLMHRHKLVEIRTRVKNGLQHLAMNRGMQKKSRLWTSKGMAEFQQLALPGWAGERRQDLLHLLQELNSQIEQLDKAVKLAAWQNPQAQLLMTQPGVGAVTALAFVLTIGEVSRFKGSKQLTSYLGLIPSEYTSGNKRRLGAISKQGNRFLRMLLVEAAQTTVRRDEDFRKEYQHRCHRRPKGVAKVAAARKLAVRLYWMLRTNVGYPEIAHVESNPRVPLGEL

SEQ ID NO: 98210 - protein, 404 aa, unidentified
MKGPIVSIDVSKGKSDYQAFKDLNVKYTGSRSIKHNKEGFDEIVNLVREMEKKLETEVCVVYEATGVYHRVLKKVLEDNNIKQFIINPLLSAKTRKNDSLRSPKTDKLDPKSIAKTYYSHSLHNSHKQETIYHELRELSRYYEDILVHIRKDKVAFRAQLDIVFPGYDTLYDDLYGPVALAIVEKYPHPEMLQKKKINTVSKVIQNKTCHRQAVSDTMADKAIEYSKTIYSGCDKDDIEVLILQRFIKKLNEDMAEAERTIGEMIKLAQELPDFNIIKSIPGIGDNLVARIIAELGDMTRFKKKNELVAFAGLDPRISESGQNDGDHMHITKKGNKRLRCLLYLAVTCSIRLKRDDNSIKDFYIKKKQQSNPMCSKAAKTACASKLVRIIYSMCKTGELYQYNK

SEQ ID NO: 98211 - protein, 430 aa, unidentified
MTKLTPTPAGAVLVAIDMSKNRQEVLIERPEGGRRRRLSVMATKKDYDDFAEQLAAIGRPIVVGFEATGNYHRTLAHRLLTAGFELRLISSVALARTREALHNGWDKNDSKDAQVILHMLRIGATQRYVDPLAAGINDLQELSKTHETISKAKTQTWHRILTHYLPLYFPEIARFAGNSRSDWFFALIERFPTPASITALDAETFSAVAWPLIGRKVSKARLINDIYETACASVALPVPEDSAAITMFRMVIAQGRSLIQQRDEIERLAHARLAEHVDYQLLRKIPGIGPINALTILAEAGDLRRFNHHRQFLKFCGLDLATCQSGTFRGRTKLSKYGNARLRRTFWMAAQVAARQRDNSFRDKLGRYVAGHADDADRRRKAMTALTAKMARVAHAVIKTGTEYRPFLERSDARWKDPSLMCREGARATL

SEQ ID NO: 98212 - protein, 356 aa, unidentified
MNKVTANFNEQTIFIGLDVHKRSWNAALFLNDQYLRNIHQPPSPQVLYKYLSTHYPGASYVCAYESGKFGYWIQRQLNNKGIKCLVVNPADIPSTQKDEVSKTDPRDARGIAMALQCGQLRSIYIPTLQQEADRCLVRQRKKIWRDLIRCKNRIKAFLDYNGIPLPAKFDNCNWSRNFINWLNDLTFDYSSTKITLTYQLRQVETLRKELLAINNDVRKLMRSAPYNKLYYLLRTINGIGPLTAASLITEIGNMQRFPSFVELNSFIGLIPMEHSSGERELKGRLTVRKQKQLRSNLIECAWTAKRTDPAIALYYNNQLKKGKEPKLIIVKIARKLLSRIRYVWLTEKPYVAGVVK

SEQ ID NO: 98213 - protein, 318 aa, unidentified
MAEAVFVGIDVSKAELAVALRPSGESFTVAHTGAGIKQLVARLEKLHPTLVVVEATGGWQRQVVAGWWSARIPVAAVNPGWVRSYARGRGLLAKTDRIDARLLALFAEREQPEPRAPLDAETQALQELATRRDQLVEMRVAEVQRLHRASPALHKELRKHIAYLAGRIKQLEDEIDKTVRRSEAWRRKREVLRSFPGVGKVFSLTVLSKLPELGTLSGKAAAALVGTAPVPADSGRRRGVRVIRGGRYQVRRKLYMCALSAVRWNPVLKRFYEQLLARGKLEKVALVAVMRKIIVMLNAMLKRDTLWSEPCAGLSAKD

SEQ ID NO: 98214 - protein, 334 aa, unidentified
MQTITTIGLDIAKSVFQVHGVDAVGQVVIRRQLKRRYVLAFFQKLPSCLIGMEACASSHHWSRELQALGHTVRLMPPAYVKPYVKRHKNDATDAEAICEAVSRPNMRFVATKTPEQQSCLTLHRTRHLFIRQQTSVINAIRAHLTEFGIVAPVGRNGVEQLLSVAANANDKRLPEVARACVTALGAQLRMLKTQILEFDRMINAWHRSNEASRRLDDIPGVGPALATALIASVADPKAWIGLVPKQNSSAGKDRLGNISKRGDRYLRSLFTTGALAVIRYAKIHGTKHRPWLTALLTRRPTKVAAIALANKIARMAWAMMAKGERYKEPAALAA

SEQ ID NO: 98215 - protein, 260 aa, unidentified
MSPLLIRILIGVDVCKDFLDAYARPAGIHRRFDNNPDGITQLVAWVRSLAPERVVFESTGPYQKAAVGALLAEGLPAVVVNARQVRDFAKGIGQLAKTDRIDATILAHFGEVVTTVVRPLPPPQVLEFRDLCDRRGQLVRMRACEKNHRHAAQGSSASRQSIAALVGLAPFADDSGTCKHIRHIRGGRSKVRIALYQAAVAAIRYCATMKAFYAGLKARGKASKVALIAVARKLLVLANALLRDGKTYQARTNSVCPENA

SEQ ID NO: 98216 - protein, 423 aa, unidentified
MKLAAEQPFTALVGIDWSDKKHDFCLQGADSRQREFGVVAHRPEAIDSWAKALYQRFGGSIAVCLEIAKGPLVHALQRYPFIVLLPVNPATIAKYREAFVPSHAKDDPTDAEIALELLLRHRDKLQVLKPQSAAMRALTTLVEQRRNLIGDKTRITNRLCSTLKEYFPQALDWFEDRDTVLFCDFLQRWPSLKHVKRARQATLRSFFCEHNMRRTELIEERIRGIRSARALTEDVAVIGPHQLLVLALIAQLRVTLQAIDQFDVEIADVAKRLPDYALFAALPGAGAILAPRLLVAFGEHRERYASAAQLQQYAGVAPVLERSGNKCWVHWRIACPTFLRQTFVEWAGSTIPRSFWASAYYQRQRDKGCSHQAALRALAYKWIRIVYRCWQTRTPYDESTYLHALKRRGSPLIAALSVALQSP

SEQ ID NO: 98217 - protein, 338 aa, unidentified
MYYTGIDLHKFTSYLTTVDSSGAIVKQENLKNVAHNFIQYFGSIPGEHKTTVESTMTWYWLNDLLTSMNISLVLAHAKYVKAIAYAKVKTDKVDSHILAQLLRMNFIPVAHKISMENRLLRDALRARLKIVQRHTSVTNSMQLLLAKYNYDSPTELSGIPKFQYEQLTEVEALLDEQMLDLEKQLYPYLIPNDNIQRLLWIPGIGKMNAFTILLEVDDINRFPDVKNFFSYCRLVPSARNSGGKSKQRSSKDGNKYLKVAFSDAAVHAVHYYPVIRNYNNSLIRKKNKQIAKTIIAKEIAQTVYFVLKNKTDFNNKFKGKELEHKKSLQWPRITNPYA

SEQ ID NO: 98218 - protein, 440 aa, unidentified
MANVTTFETVNVQAAGIDIGAKEIFVSVDGEQVVSFRTFTGDYYKCVEYLQEKGIKRVAMEATGVYWMAFYFMLESCGIKVSLVNPKETKQVKGRKTDVKDCRWIQKLFSAGILRESFIPEGKYMEIRQLVRDRLDIIEMGSVYVNKMQKCLELMNIKLKEVISQIHGASGIKMIKAIIEGERDGKYLLSLCDKRIQKNKSQEVLKTLEGNYNDTYLFMLKHNMKMWEQHQKHLLEIDEQIEKLLADLSQTKPALEITSAAKRIRFHAPSIEDLHGKIIQIYGVNLSSISGLNDYTLLRLVGETGLDMNRFPSEKHFVSWCGLSPKNHQSGKIKKRVKGTSCNKAGQIFKECAQSLLNSKYTAIGSFMRRLKAKKDSAIAIKAGARKLAEAYYNAQMKGTDYVEQGTKKYEAQIKQREIHALRMLAKKHNIKIVDNQAAA

SEQ ID NO: 98219 - protein, 391 aa, unidentified
MGEKARPGAAFLAFDVGKSAHRACAVGPGGEVLFNREVGNRPADIDRALAEAGAAARVVVDHKRNIGALVVARARAAGNPVSYLPGIAMKRARDMFPATAKTDAIDAEVIARTAAGMPWTLREVAEEAPAAAALRMLASQRDFAVRSRTKAANRLRAVLLEADPAFEAAVDSSSRWQLAVLAELGGPFGIRAAGLRRFRSVAERAGGARRAASDRLWAAALASATSGRPELAAESVLVRALAARAASDAAEAARLDALISDALAGDEAYEALLTVPGVGPKTAAALVTLVDVSMFRSHDELAAYTGLAPCNRQSGTSLNSSSPSRGGNRTLKNLLVYSCTSLVGTDNRFGHYYDACRARGMRHNKALKAVARKRLKVIHAVMRDRAPYREG

SEQ ID NO: 98220 - protein, 394 aa, unidentified
MKLIGIDIGKNKHFFCVMDQQTVEIISQPVSFSNDKEGFDFLVQKIKSYPKDSILIGMEDTGHYHFALLKYLLDLQYTVALINPKTTDFNRKMQGGITKNDKLDTINICDVLDTPERKKQYRITKVNSFDLYEQKQLTRHHHNLKEEENVYKNRLQKCIDIVFPEFNKLFNSKYGTVYMNILKTFGSAENIANTDIRTIRKCFEIEGRGNRISLTPERLKECARSSIGISSSAEVIQIKHLTAQIELIEEQLTEIDKKIEEFSIQNNSPILSIPGISHFSGTSILAELGDISNYSKPSQIIKFAGVAPLHYESSQFNAQHTAITKKGSKYLRKTLYQIILPVIRHNPVFNKYYQLKISQGKGHRCAQGHCVRKLLRIIYHLLKTNQQFDPQLLR

SEQ ID NO: 98221 - protein, 341 aa, unidentified
MKVSTLGIDLAKNVFQLHGVDHEGHTILRKKLTRAKFVQFVIQLEPCLIGMEACSSSHYFARLFTRYGHEVKLIPPQYVKPYVKTNKTDAADAEAICEAVTRPNMRFVQIKTEEQQAVLALHTERGILIRERIACANSLRATLAEFGITIAAGQSHLTRELPAILEDGENGLSPFVRTSIYRQSKHIRELEEQVKQVEEALASWYRTQEACQRMAKIPGVGMLTATYVVAAVGNARQFSTAKQFASWLGLTPKEHSSGGKQQLGGISKRGDGYFRYLLVHGARALTAWVNRNGAVEENSWLQGLLERKHYNVAVVAMAAKTARIMWSMLSHNTEYHPGQLA

SEQ ID NO: 98222 - protein, 415 aa, unidentified
MANPLFVGLDVHSRTNRVCLMDQAGEPWGRRFSVANNRPGSQLLAVRLLEALRQGEFDSLRLAAEATNWYWFPLFQTLQQDPLLNQWPVALFALNPRLIAKYKETFSDRDKTDDSDAFLVADRLRLGRDLPAPFQLDAQHLALRFLTRYRYHLVKDLVREKNHCLSILYLKASEYRQGHPFSDVFGATSQALLQEFATLEEIAAMPLEELVIWLDAKGKGRFPDLAQVARELQQVSQDSYPLDSQLQQPINYVLNWNFQLVNFLERQLQRVNTAIAEAMGQIPHTLDTIPGFGPVYSAGIIAEIGDVARFDHDEAKVAQFAGLHWRKTASAKFQAEDTRLTKRGNAYLRYYLCEAANAVRMRDAEYAAFYQRKHDEVPKHQHRRAVVLSARKLVRLVVRLLTTNQPYRPRSVPGG

SEQ ID NO: 98223 - protein, 477 aa, unidentified
MIKSVGIDFHQGKHIVRCLDEKAQLVESFSFETTVEGLATLEERIFKDGANPVIVFEPAGLSWVILAVCLRAHHPECQLVRAKGQKVAALRRYLRGASKSDRVDALTLAKMPFIDPEQLDEVYLPPAKIYALQRLARQRKHLENGIGGRKMRIGSIVDGYLPRVRKAFSNPWSCQARAFLHCCLNPMAVVRDGEKALHAFLARAGHRKANTLKSHRVYTACESAASLYQISGPAGVVNDEFFNVLQEEIARELKLLEVEEAESEAVAKRMQELYRELHPSDHLRTIPGVGEITAPVFLATVGDPGRFRNQSAFANWTGVVPRTRQSSESEAKGLRMTKAGPAVMKWALFQAGDIARRFDPQLADIYYREMVYHGKNHKQAMGAVMSHLGARVLRVLQDDRPYQLRDNAGKPISRAEARESILLSYQVPEDVRRERRRRNPAKRDQIGPKGMTVRRTNEATTAPQPVKIAAIPGNYFT

SEQ ID NO: 98224 - protein, 479 aa, unidentified
MIDDRRLVGIDLGIASDHTVRVLDGGGGEVCRRRARPTMESLAAVEAAALAGVTVETRLEVVIEPTGPAWLPIAVFFCARGHRVFRVSSAKAADLRRFLSRHAKSNGIDADTLARLPLLAPDCLHPLELPATAEAAALDRRVRACDRLTQQGALHQRRIKDLVRQLMPATPLTGELTKTDLAVLGRWSDPRALLAAGRARLLTVINQASHGHQGVDRAEQWRAAAAAAVELYAEHPAMAWVDLAAEVATEVRLLAAVRAELAGHAAARAEAYRFTDPARLAATLPGLAEVGAPTVTAIVGRAARFRTGRQFRSFTGLAPRASETGETDRKGQPMSKAGNRLLRTTLIRAADNARRQDPQLAKIYWVQMVERGADHLKACCVVAAHLAERLHAVLVRAMPYVVCDTDGTPVDPATAKQLIAEHWTVPREVRARRRSRKTTSTTRAGKAPQHVLTGHDRSDPRRADRRGDLPRTASCSPPA

SEQ ID NO: 98225 - protein, 337 aa, unidentified
MNTTTIGVDLAKSVFQVSVSNQAGRIVARKRLSRSQFDRFLANHEPATLVMETCGSAHHWARKAAAYGHQPRLIHAPYVRPYVRRNKTDSADADALLRANQDQELKPVPVKDEHRQALQGLHRIRSQYDKTRKQRINLVRGLLAEFGLSLPRTTSRFASLLGEQTEPLPEMLRQSLLPVVEEIADLEQRLKGIERQLAAIGKHDPVVQRLMTIPGIGLIIATAMAASVPNIYTFMHGRQFGAWLGITPREFSSGSTRRLGGITKKGDPYLRTLLIHGARSALLAAARTSEESRTELQRWALALKARSCHNTAAVALANKMARIIWCVWTREEQYQRR

SEQ ID NO: 98226 - protein, 326 aa, unidentified
MEHELHYIGIDTAKEKLDVDVLRPDGRHRTKKFANTTKGHDELVSWLKGHKIDHAHICIEATGTCMEPVAECPYDAGYIVSVINPALGKAFAQSEGLRNKTDTVDARMLAEFCRQKRPAAWEASHPLERALRALVVRYQALTDMHTQELNRTETAREVQRPGIDAHLLWLEAELKRLEKQIKDLTDDDPDMKHRRKLLESIPGIGEKTSAVLLAYIGLKNRFAHARQFAAFAGLTPRLHESGSSVRGVSRMSKAGHVSLRRALYMPVMVAASKTEWGRAFRDRLAANGKKGKVIPGAMTRKLARVAYGVLKSGVPFDASRHNPVAA

SEQ ID NO: 98227 - protein, 409 aa, unidentified
MRIIGLDIHRAFAEAVVWDEGELKRTGRVDMRRHLLEAFAKKLAKDDVVVVEATGNASSVAAVIAPHVKKVVIANPKQVRIIAHAKIKTDTIDAKVLAQLYASGFLPEVWIPDEPTQALRRQVTRRNQIVRQRSRLKNIIQSILHSHLIPSCPHADLCGASGRAWLFHQVLPEDERLAVERHPREFDRLGEDLKVIERDLARSALGDESVRRLTTIPGVDMVVALAIVAAIGDVGRFGQSQKLVSYLGLNPSVRQSGPGPAYHGRITKQGRGHARGMLVEAAWAAARAPGPLRAFFLRVRARRGQHVAAVATARKLAVIIWHLLRKGESYAWARPALHARKLRDLELKAGYKAERGQRGAAFAYNIKSHRDQERRWVEQAETAYARFVAGWNPRGPKQVRTGAAKEGRQ

SEQ ID NO: 98228 - protein, 416 aa, unidentified
MLFIGDDWAEDHHDIELEDEDGRRLARARLPEGLEGITRLHALVAEHAPSAWAELPPEQVAGQVVVGVETDRGPWVIALLAAGYVVYAINPMSAARYRERHATSGAKSDAGDAHVLAEIVRLDRDHHRPIAGDSELADAVKLLARAHQNAIWERTRHVLRLRSTLREYFPAALEAFTDLAASDALSLLERAPSPALAAKLTRGQLTAAMRAARRHHVETKAVALQEVLRAGALRQPPTVESAYASVVAGQVRIIAALNVQIAGLGEVMGEHFDRHPAAEIYLSQPGLGVVLASRVMGEFGDDKTRFADARARKNYSGQSPITRASGRKTIVLARYATNKRLGAALHMQAYAALTGSPGARAYYDTLRARGIGHHAALRQLANRLVGILHGCLKTGTLYDEDTAWQHHRTGTHIAAA

SEQ ID NO: 98229 - protein, 495 aa, unidentified
MGNRTIYQAQSQDLLTLFEEAGHPGKVMCVALDYAKTTHTALLCNGCGEYLRKPFPVWNSAEGIEFLLDRIHAGCKKHAINPRHVFFGGEDAPSYAMNFIHTLRSRGWLVAAVNAFDAKKQRENMQASSDILDLLGIAKTLLNRRGNTSPAQTGIYLNLRNLVRHRRRLVHMRTEVSNRMHTLVDQLFPGFLDEKKSGLVAFSGGILWLMEDRFSARQIARRRTDGLVAGLQREGVPHADQAVAKLKGLADQALGPASEYIDTLQMSLGQQVALYRCLSQNADQSEHEMAVLLAQTPGALLTTVRSVAIVLAAGVVAELGDPHAQRPVNNLCSYAGIVPRTKQTGGPEQDAKTGHVGKRANRILKDYVVQTGTLIGRQGPPELIADHHRRQSAGQHADFGIARRYLRLGMHLMRTGGIYLPPELRSETATPEQRAAYYLQLWPRLTKKWRRVKAIDAAFAPGNPLGQWRNMVEELYDIKLPLTHATGNGGDANNG

SEQ ID NO: 98230 - protein, 387 aa, unidentified
MLYVGIDIAKNKHDLACIDETGETIIINYRFANSYQGFHQLKLKLKQLSPITQDVQIALESTGHYSYNIIAFLRELGYTVFAYNPLIIKEFAKSHSLRKTKTDRKDALLIARKLRSDITPEYYQTDKLMDELKELTRYQNRLIQSRSKCKNLYIRLLDIIFPELHEIVSNLHNQFIYDLLTNYPSPQKLARAHSSSLLKIKRLTADKAHQIQEAAKQTIANASPALSLELVQLIETIKHYDKQINQLQEEMNRLMTELESPITSIPGTGIGNRLGAIILAEIKTIHNFKNPNQLQAFAGLDPAIYQSGQMDNTGHMVKRGSSYLRYALIQAAKLISIYSPHFKAYLRLKISQGKHYNVAVTHVAKKLTRIIYHLLKTNQTFDEAKLR

SEQ ID NO: 98231 - protein, 352 aa, unidentified
MTYIGVDLHKEQFTVCYRVTEGNETIREFDNGEEGISDFKQTLSCLDMVAVEAVGRARYFVKQIAPLVRKVVLVTPWKYAILTTSIKKTDANDARVLALGLEKDILPVARLRTEAAHQVRALLNARELLVAHRVRLMNVMESIVANYGIKIPKLKLRYRNWRESVDVNQFAFGEYHAWLTLNDQMEAANSQIVNLERQIVDSSKQFESYGVLASVPGFGPITVAHLLRTIDRIADFNNPKALCSFLGIVPRTRQSAGHNLPSRKAGRYKSGAITRAGDSKTRSALIMAVNRVLVHNQSLRNFYDRVKGRRGYRKARTAAARKLLTFLFFALKKGKPIEAFEKIDFSKPHSAI

SEQ ID NO: 98232 - protein, 338 aa, unidentified
MTLYAGLDVSDKSTHICVVDGEGAVVWRGLCATDPEVIARTLGKHAAGVGRAVLETGALSAFLYHGLLERGVAVTCICARHAKGVLAARVNKSDPHDAEGLAQLARTGWFKAVRIKQEATHLDRAQLKIREQLTRSHRAMANQLRGLLKLFGLRLGQVTTPNKRSQRLAALFEQKPQLQPILQPLIESLEALEVQIRRSTRLLTASAAADPVASRLMSTPGVGPVTALTFKSSIEDPERFDRGEDVGAFAGLVPRRNQSGERDHMGRISKAGDPLLRHALYEAANNLLARVKRPSALQSWGKALAETKGPKRARIAVARKLAILLHRLWRSETEFCWN

SEQ ID NO: 98233 - protein, 418 aa, unidentified
MNEDGDTRALRRYVALDIHKHYCVIAGVDREGRVVLQPVRVEHADLESWLKKNLRGTDHVVIESTTNAWHVYDLLSPFVERVVVANPIKVKQIAQARVKTDIRDTLILARLLAANLVPGVWVPPAHVRELRQLLSQRRQFVETHTQIVNRMHSVAHRHHLKHERGKRFNEQTTAWQKDKRLSKIEQFQLELEMENRAYIEKQIGRIGKEVAKMSHQKPWAESMTYLMQLPGFGVITAMTVLAAIGDVQRFDSARHLASYSGLTPGLEQSGTKYHEKGMTKEGRKELRWALVEVAQRAVKSDPLWTRRFQELQKRMHRNQAIVAIARRLLELVWYVLTRRQPYRHFSQERIAYKYLTWAWQLDEAARDGLTRQQFTRYYLMRLGIGHDLTRIALNPKYPRKIASEAELLALRPELNDIE

SEQ ID NO: 98234 - protein, 340 aa, unidentified
MSITTIGVDLAKNIFHVHGVDADGQTVLRRKLSRSGFDRLLAEIPACLVGMEAGAGSHYWARQLRQYGHDVKLMPPRYVRPYVKTNKHDAADAEACCEAVQRPAMRFVPVKTVEQQTILMLHKVRDHLVCQRTGTINALRGHMAEFGVTAAIQRRGLSELMKVIEYDADSGLPAEARQVLLLLVQQIRTADLRIRDLDRKILDTARASEDCLRVIAVPGIGPVIATALIANLPCPRLFSSGRHFAAWLGLTPKQHSSGGKDRILGISKRGNAYLRRQLINGARAVARVAKGREGTLWTWTNQLLSRRPFNVAVAAIANKLARIAWSMCANGTEWRGRTAV

SEQ ID NO: 98235 - protein, 391 aa, unidentified
MVCVGIDVAKDKHDCCILDSEGTTLVDCFTIPNNMDGFKSLLQTIQDCSQKSDKIKVGLEATGHYSYNILGFLLDNDLPVYVMNPLHTNLYRKSLSLRKTKTDRVDAKTIATMLLSDVDLKSYTDTAYHNEELKSLTRYRFDKVQERAKLKQSVSRLVTILFPELEQLVSSIHGTSIYALLSEYPGAKQISEAHLTRLANILVTTSRGHYRKDRATHIRDAARTSIGSVMPAKSLELKHTIKLIQELTSEINEIEDAIRKIMDELKPPILSIPGMGFYSAAMILAEVGDFSNFNSPDKVLAYAGCSPSTYQSGKLTNCYAHMEKRGSRYLRYALYTATKYVCYWNPVFTEYLTKKQAEGKHYNVALSHATKKLVRLIYALQKSGKAYLAVT

SEQ ID NO: 98236 - protein, 410 aa, unidentified
MRRDKYIYIGLDLHKFQHTAVILDCWNEKLGEMTFQNKPAIFPSLLEYVNRYLTEDLTPIFGLEDVGGYGRDLALYLLEQGYILKFVNSSLSNAERNSYAMTQKNDSWDAQCVARVLIRDLPYLPEATASDIHWIIAQLVGRRNALVKTQTSLKNQLHMQLNYHYPSYKDFFSEVDGKTALAFWESYPSPSHLEGETVEDLRKFLLEVSNNACSTRKAEQILTLVQADGEVKREYQTSRDFIIQSIVRDISFKKREIKKVDRELKVTIQKLGMQLETMPGIDTVTSSALIAEIGDIHRFANSDKLARYAGIAPIKMGSGGKETMKKTKQGNRKLYDVFYNLAVQQVQVSKGNKIPRNPVFYAYYNQKQSEGKSKSQALLCIMRRLVRIVYGMMKNKTAYILPRMPETKAS

SEQ ID NO: 98237 - protein, 425 aa, unidentified
MNCTQNKKIEQVKETTMIVGIDVGSEKHYFRAFNWRGIELTRKPVAFSNSMEGFNSFYNTIVELMQKSELEEALVGIEPTGHYWFDLGQFMGEKDIKFVMVNPHHVHKTKELDDNSPSKNDRKDPRVIAGLVRDGRYFYSYMPTGAYAELRNASNRRFVLVEEQTRAKNRLQKWIAVYFPEYKGIYTHIDAKGGMLVLKKAPTPEEIVRLGVEGIIKIWKDAKLRGNGHKKAMLILAAAMRSIGLKAGLTEARMEIQDLIEDYELLERVNDLIKGLCQQVRYADKLLEIKGIGITTVAGFIAEVGDITRFDSTKELQKLAGLELVADSSGKHNGKTKISKRGRKRLRYLLFEAAISVVGKNEEFKEIHRYYTTREKNPLKKMQSLIVVACKLIRVFHAILTKGIRYDASKMLKDIRHPGEQLKAA

SEQ ID NO: 98238 - protein, 391 aa, unidentified
MIYVGIDVAKDKHDCFITNSDGEVLFKAFTIKNNLDGFDELYQKIESVMEDASKVKVGLEATGHYSYNLLGYLLDKGLATFVINPLHTNLYRKSLSLRKTKTDKVDAHTIASMLMSDVNLKSYSDTSYHNEELKSLTRYRFDKVKERAKLKTSISRLVCILFPELEKLVPTLHQNSVYELLYEFPGAKQVANAHLTRLSNLLETASKGHYTKETSIAFREAARTSIGSNMPAKSLELKHTIKLIRELDSEIEEIENEIKVIMDEINSPILSIPGISYRMGAMIIAEIGDFSQFDSPDKILAYAGMSPSTYQSGQLDNCYARMEKRGSRYLRYALFNATAYVCLWDPTYKAYLAKKRAEGKHYYVAMSHATKKLVRLIYHLERTGQQYQKAI

SEQ ID NO: 98239 - protein, 320 aa, unidentified
MSVSSVVAGIDVAKAHVDVDVVGAEFAPQQFDNGADGHSAIASALKSLGVGLVVMEATGGYETSLACALQGAGLAVAVVNPKQPRKFAEAMGYLAKTDRIDARVLAEFGQTLARRPDLSRFLRPMDDVDQQWLAALVTRRRQLVAMMTSERQRLQITPKKLHPSIEAIIKAIKAQLDDVEGQMVGHVKAHFGQLDAILQSVTGIGPVASATLIAELPELGKLNRRQIASLVGVAPIAKDSGTTKGRRRVQGGRFDIRRVLYMATLTAAFRNPVFKAYYQRLTAAGKLPKVALVACMRKLLTTLNAMVKAGSKWDPEHHGA

SEQ ID NO: 98240 - protein, 450 aa, unidentified
MAKKIKTNGGVKLAVINENVAGIDVSSTEMQVCVPEDRAEENNRVFGVFTEDLYKIADFLSECRIEKVSMESTGIYWVSIYKVLVERGFDVILVNARDVKNITGKKTDEIDAEWLMVLHSYGLLRPCFQPDNFTRELRNIIRHRENLVRSASKEVLHVQKSLEQMNIKLSNVISDILGKSGQAIIHSIIDGERSPEVLVELAEKVCKTPKEVMIKALNGSWDRDHLFTLQQSQEMYEYIQQKIVLCDKEVEKMLEEYCEKNDLENKKKVIRCSKIIGTKSKIHFDVEKYSSDIFGVNLMAIPGINQIALLKILGELGVDFIKNFENFDKFCSWCNLVPNNKISGGKLLSSRIDKKKNHVGLILRQSANSLKQNKSELGQYFRYQQSKKGYKMAIIATARKLAIIIYTMVKNQQEYDPHCQQEEYISNLQKKKAKLIRALQNTEKQLIKAS

SEQ ID NO: 98241 - protein, 350 aa, unidentified
MTTIARRITGGVDTHLDVHVAAALDERGALLGIESFATTLAGYRRLLRWLESFGTLELVGVEGTGSYGAGLTRHLLANEVAVVEVDRPNRQLRRRTGKSDPHDAEAAARAAQGGHATGLAKSRDGNVESMRVLRVARFSARRSRTQAINQMRSLISTAPDELRAELRDLSIYKILTIASAYRQTGRTDVTTLTKLALRTLARRAVSLEEEVKEIDRLLKALVQESAPELCAVDGVGTDVASAILVAAGDNPERLKNEATFAKLCGVSPLDASSGKQVRHRLNRSGDRQANSALWHIVFTRMVNDPKTQHYIERRMKDGRTKKEAVRCLKRYVAREVFAALPRSQFGVDNP

SEQ ID NO: 98242 - protein, 356 aa, unidentified
MTSTKYIGLDVHKESISIAVLDFAGKVMMECVIETKASTILQFIHGLRGDLHVTFEEGTWAAWLYDLLKPHVTELVVCNPRKIALLLKDGSKSDRIDAHKLAELLYMKKIKPVYHGEHGLRMLKELSRSYLTISKDLGRVMNRLKALYRSWAIPCAGTQVYAPHYRSEWLSKILEAGVRRRAEFYYQQLDALRILRQQARKELLAEARKHRATKLLRQIPGIGPLRAAHLVALMQTPHRFRTKRQLWTYSGLGLETHDSAQYRVVEGQLQRSKKPVTLRGLNDNHNHDLKDIFKGAAMRASTAAGPLHDFYEALLAKGRKPTMARLTLARKIAAITLMVWKKEVRFDANYLKQQAA

SEQ ID NO: 98243 - protein, 373 aa, unidentified
MKDHTTVYIGMDVHHTSFTLCSLAEGEEAPKNVQTIPADYLLVVKYINGLRKRYGEGTEFICGYEAGCLGYSLYRSLKDCGQKCVILAPTTMAIEESNRRIKTDKRDAKNIAKCLRNHTYRAVHIPTVEDEQIKEYIRMRDDVKANLKRIKQQLLSFCLRHGWVYSGTKHHWTQVHLKWLEQLKLEDVYQEVLDNYLIELKRLMETVDRYDKRIEELSQRDAYREPVNQLTCFLGVKRPTALSVMVEVGDFMRFPSAEQFAAYLGIVPGEHSSSDSRNRLGITKAGNTHVRKLLVESAQSYGRGKVGYKSKALIKRQEGNPAKVIAYADRANERLRRKYYQMILRGRHSNVAKTAVARELACFMWGMMTGRID

SEQ ID NO: 98244 - protein, 400 aa, unidentified
MLSIGIDVSKGKSTVCGMKPGGEIVYTPFEVQHTRKGMLELVSLLRSSCEEVRAVLESTGSYHCPVVAALLENGIFVSVVNSLRMKRFCSQSIRKVKTDRIDAMQIALYGLAYWQELQPTKLPEDTYRELQLLARQYYQMTSLLIKAKVDFNAICDQVLPGMQELMSDHAGRHKLSDFVLRYHHTTHILEMGETRFRKDYCKWAEKKGYRNCERMAVLIFATAQNGIPVLPNAPSTQIVITEAIRVLHTVEASRDAILTQMQALAKTLPEYSLVREMPCIGDTLAPRLIAEIGDVRRFHSKRALIAYAGIDAPPYQSGKFCANNRHISKRGNRYLRKTGYEVMQSYVMHKPANDPIFTFIEKKRGERKSGKLAMVAGLNKFLRVYYGKVTELYRSLPAIE

SEQ ID NO: 98245 - protein, 351 aa, unidentified
MNATTIAVDLAKNVFELALADAHGKLAARRRLSRRQFERFFHNRPPCRVVMEACGSAHHWGRYLTRLGFFVELLPAQYVRAYVRRNKTDRADAEALLEASRCAELKPVPVKSAEQQAICALHRIRAQWMASRTARINALRGLLREQGIIIAAGAHTVRARVPELIEDAQTPIPRPLRHGLWLLYQELAALEERIADLERELRDYARQQPVVAQLKSIPGIGLLTATALHAQVGDIRSFAKGRHFASWLGLTPREYSSGQHRYLGRISKRGDTYLRCLLVHGARAVLLAAQRAQRTRPTQLSRLQRSAIDLHARVGHNKAAVALANKLARIVWAVWSKQTVYLPQPESAAAN

SEQ ID NO: 98246 - protein, 343 aa, unidentified
MGEISMIGLDLAKNVFQVHGVDASGAVVVRRQLRRGQVEKFFAQLPACTVGLEACGSAHHWARVIGRYGHQVRLMPPAYVKPYVKRNKNDGRDAEAICEAVNRPTMRFVPVKSVEQQATLAVHTARALLVRQRTMLANSLRAALSELGIVAAQGIKGLRELMVKLEAPNQEIPDMMRGALLMLAQHWQALDVDERALEQQIAKAARSDREARRLMEVPCVGPIIASTVLAKVPDATVFRSGRDFAAWIGLTGRDHGTGGRHRPGRISKQGDRTLRALLINGASAYLRHQRVRGVSNPWLRGLLARRPYKVVMVALAAKTARILWAMLVKGEPYRDRASAPAAA

SEQ ID NO: 98247 - protein, 316 aa, unidentified
MYLGIDVSKLTIDCCLISDGQNHEKRFSNNPKGFQLLTDWLKFHQMTSELHCCCEATGTYYEPLANYLYQHYTVTVENPRRIKGYAIAELQRSKTDKQDARLIAQYCQDRKHKLKAWIPPSQEQKQLQELSRYLDHLKQQRATEITKLHEAPDYIAPHIKTTIENLSGQIRDIKKQLLQFYKSHTDYNTQRKRLKTITGIGEQSAAVLLSAYKRHPFSNQKQFTAYLGLDPRKNQSGSSVNGKSRISKIGNADIRKSLYMPAVVAYRCNVFSSFVNRLKAKGKPIKLILIAIMRKLAVIAFNLLKNGQDFDPERYK

SEQ ID NO: 98248 - protein, 354 aa, unidentified
MHATTVGVDLAKNRFELAIREGEGRVLRRERLSRQRFARFFGNFPPSLIVMEACGSAHYWSRALQAQGHEVRLLPAQYVRAYVKRNKTDAADAAALLEAARCPELRVVPVKSVEQQQLQQLHRIREQLKHTRTQRINLLRGLLREFGITVPVGLARGRSAVREALECADNGLPDLLRPMIAETLQEITALSERITRLEATLTALTRPDPIVQRLLELPGVGLLGASALRAAVGDIQRFPSGRHFASWLGLTASERSSGERRRLGRISKQGDIYLRTLLVHGARSALCAAAKAQREGRALDRLRTWALATEQRRGRNKATVALANKLARIIWATWRYQRPFNGDWATHATSNAAG

SEQ ID NO: 98249 - protein, 339 aa, unidentified
MKKRYMGVDLHRNCFTVYTRKEDGSGGSQEWSIRSLKAFAKTVKAKDEVAVEATGNVRLFCEALKGRGCRVVVVNPHQFQVISRSVKKTDEHDAKVLAEFLSKGLLPEVRMKDEVHARVASLAQTRDKLVKLRTTLKNKVNNLLAGRGILIGKESLSSEKGLTAVLVSAVSELERMELEILVGEIRHLNESIKKLEELLREQGKKLPGWKNVTSIKGIGDTGGSILLSTIGNIEDFADEGKLAAYFGIVPRVSNSNETERSGRITKRGCKLGRTVLVQCALIAARYSPYLQKYYRRIAACRGTGKAIIALARKFLGIIYKTLKNNWIFEDFPQFVLAKG

SEQ ID NO: 98250 - protein, 344 aa, unidentified
MIAATIDAQSGELRFARLSGQTSEAVAFCRALPGPARVAYEAGPTGFGLARELTAMGVGCVVAAPGKIPRAPQDRVKTDRRDAERLARLLMAGELHPVRVPASDEEALRDLVRAREDLRGDLMRMRHRVGKLLLRHDVRWAGNNWTQGHRQWLAAVALPEPVAQIVLEDSLGAIDALLVRRDSLERQMTALIPGSPWAEEVARLRCLRGIDTLTGLGLCAEIGDFDRFRRPGQLMSYLGMVPSENSTGDKRRLGSITKSGSQHARRLLVEAAWHYRKPPRVGRELARRQGGQSQAVTAISWQAQRRLHRTWQRLDGQRGKRRTIVAVAVGRELAGFCWAVTTAD

SEQ ID NO: 98251 - protein, 340 aa, unidentified
MSSMQIGVDLAKSVFEVAVSKVPGRVHERRRLSRAALTAFFAARPPAEVLLEACGSAHHWGRELQRLGHTVRLLPASHVARYRAGNKTDRADAKALLEAARNEKISRVPVKSVEQQAVVALHRIRQGYLQTRTARINAVRGHLREFGCVIPVGAAQVLPRAYAALDQEAVPVLLRAPLQTVLEEIAALETQAEAVRTALLRLATQMPDVQLLLTVPGVGILTATALVAFVGDIHRFRSGRDFAAYLGLTPREHSSGPVRRLGAITKRGNSYVRMLLIHGARSALRAGTVTPHPDDLRTWARALADRKGHNVAAVALANKLARVCWRVWHDQRSFKRREPR

SEQ ID NO: 98252 - protein, 321 aa, unidentified
MYKVIGIDVSKATLDGCFLDGSQKESFVVSNTQQGFKKIALKAKGALVVMEASGPYYLQLSNYLHTHGIEVSVVNPLVIKRFSQMNLQRAKTDKKDAETIANYGRIYDPKRWSPNSKNTNSIGQLHSAMELLDKQIRQLKGQQEAFDNSGELASLLRKELKSMVNFLVKQKQKLSLEVERLAEQEFGEKIDKITSIPGIGKKTAIMLNVITDGFTKFEHHKQLTAYIGFSPRVYQSGTSVKGKGHICKMGNAQIRKLLYLCSWPAKFCNKACREMYERLKEKGKPERVIKVAIANKLLKQAFAIGKSQMNYSENHGDNICF

SEQ ID NO: 98253 - protein, 429 aa, unidentified
MIMGFTKPIGHFNLQRKKVITLNTLYVGIDVSSKSNVIFLMLPNGDKHSNFSVANSHEGSIQLVKRIYSALTSHSLDIVLIGLEATSIYGDNLVYFLREDATLASFNRKIHVLNPKQVKKFHDAYNDLPKNDYVDSYVIADCLRFGRINKEVYIGDYRYKALKNLTRARYFAVQNLTKEKQRFINVLFKKYSTMTQEKVFSDTFSTTALAVYDEFESAEALANMDLHELTDFIIEKGKNRFPDPDAVAKAIQKAARSSYRLPKTVNDSVNQVLSISITSMKALESQIKEFDKAIKAQMELLPNVLISVPGIGPVYSAGIMAEIGDINRFENQAKLAKYAGLAWKQYQSGGFEAEVTRLIPSGNRFLNYYLCEAAFSLVRCDKEYSNFYHLKYKEVNRYQHKRALALTARKLVRLVFRLLKDNRLYCPAK

SEQ ID NO: 98254 - protein, 422 aa, unidentified
MHHVTDRQYTAFIGIDWADTKHDICLQAADSEQREFDCIPHQVERIEEWALALQQRFGGFIAIALELSKGPIVYALQKYDFFVLFPINPSTLAKYREAFTPSRAKDDPTDAELALDLLLRHPDRFKALAPQSVEMRTLAALVEQRRRLVNDKIRITNRLRNALKQYYPQTLEWFDHIDTPLFCDFITRWPTLLQVKRARKNTLEKFFHAHNMRRAHVLETRLRAIKAATPLTLDEAVIAPHKLLALVLTEQLRVTLHAIHRYDDAIAELAPQHPDYALFSLLPGAGPSLTPRLMVAFGEQRDRFASAADVQKYSGIAPVTERSGKKNWVHWRWQCPTFLRQTFTEWAAQTINKSYWAGAYYRQQRDKGGSHQAAVRALAFKWIRILYRCWQTRTPYNEATYLKALKRRGSPLLNPSEMAEIP

SEQ ID NO: 98255 - protein, 442 aa, unidentified
MAMRKREEEVVVFPNAAGIDVGASSHWVAVPRHASDEPVREFGAMTDDLKALADWLLECGVDTVALESTGVYWIPLYDVLERRGLTVWLVDARQMKYVPGRKSDVQDCQWLQKLMSLGLLRAAWRPREEVCVVRAVVRQREVLLVEQSSWVQRMQKALVQMNIQLTEVLTDVMGMTGQAIIRDIVAGQRDPAVLAKHRNQRVKASAASVQRALTGTWREEHVFVLEQALAMYDSLAQRLTECDAKLQALLAPLGRHDVKLAGPAKRAGKNTPGFDLRTALARWAGVDLTRINGLAVTSVLTVLSEIGPDLSRFANVKHFCSWLGLCPGTKISGGKVLSARTRRSTNRVRQALKLATMSLSRNGSALGAFYRRLCARMDKPRANTAVAHKLARMIYFMLTRGEQFVDRGQQHYEEHQRQRSIAALRRRAALLGFAITPTAAAA

SEQ ID NO: 98256 - protein, 351 aa, unidentified
MTRKTATVTGGVDTHGRTHHAAAVDEAGRLLGDAQFPATAAGYRALLRWLRSLGRLVLVGVEGTGTYGAGLARFLAGEGVRLVEVDRPDRRTRRSKGKSDPLDAISAARAALSGTASGTPKTRTGPVEAIRALRVGRRGAVKARTAALNQLHGLLAAAPEPLRAALAGLTGTALVDRCAGLPAADDHLDDPTTATTAALRAIAGRVHGLDAEIALADRRLGSLVAATAPTTSAIYGAGPDVAGQLLVTAGDNPERLRSEAALAHLCGAAPIPASSGRTDRHRLNRGGDRAANNALHTVVLCRMRHDPRTRAYVQRRTKQGLGKKEIMRCLKRHIVREVHAALLADFHALTA

SEQ ID NO: 98257 - protein, 393 aa, unidentified
MMTHLDHPQEQTAIRTDLGAIFVSLELSRAKWLITSLSPGGGEKMSKHTVAGGDVAGLFERFEQLRAKARARTGRTFPIIVIQEAGLDGFWIHRLLEDEGIESYVVVGASIATSRRRRRAKTDKIDGEALVRALLAFKRGEPRVCSMVKAPSPEEEDHRRLCRERKALISERVRHINRIKGLLFAQGIGDYEPEKRDRRARLDDLRTGDGRDLPAHLKTQILREIDRLELLMAQVKVVEAERDALLRPEPAAEHAPGGHAPAAELTRLRGIGPEFASVLWAEGLYRAFDNRRRITAYAGLAPTPWRSGKIDHEQGISKAGNPRLRATMIQLAWMWLRHQPGSALSQWFQSRAQNGSAKLRKVMIVALARKLLIALWKFVTTGLVPNGAVMTVA

SEQ ID NO: 98258 - protein, 474 aa, unidentified
MIKSVGIDFHQGKHVVRCLDERAQLCDSFSFQTTPEGLDTFEEHIFRDGSNPVIVFEPAGLTWFMMAICIRARHPDCRLVRAKGQKVAALRRYLRGSSKSDRLDALTLAKMVFIDPEQLDEVYLPPAKIHALQRLARQRKRIESDIAARKTRIGAIVESYVPGVRKAFSNPWSAQARAFLRCQLNPLSVTCDGEKALHSFLTKTRHRNKTDKAESHRVFLVCKSAADLYQLSSRAEAVDDEFFSVFQEEIERELRLMELEEAESEAIAKRMEELYRELHPSDNLRSIPGVGRVTAPMFLATVGDPARFHNQSAFVSWTGVVPRTRQSSDVEAKGLRMTKAGPAIMKWALFQAGDIGRRFDPQLASLYYREMVHHGKNHKQAMGAVMSHLAARVLKVLQDGRPYELRDNEGKAISPAEAKKLILHNYQVPENIRRERRRRNPVKRGYLKSQGTALLRTNEAAVAPQPVKVTIPEN

SEQ ID NO: 98259 - protein, 440 aa, unidentified
MAKPKNKISVVNNNTAGIDIGSRKIFIGIAEKPVVSFDTFTDDFFKAVTYLKENNITSVAMEATGVYWISLYDLLDQSGFDVVLVKADQAKNIPGRKTDVADCQWIQQLHSYGLLRSSFIPPQHIRTLRTFVRQRRTNLQIASDHVRRAHKALELMNIKLQNVITQINGKSGLAVLTAIINGNHNPENLAALCEESILKKKKEAVIKSLKGNFSEENIFLLKQAVEAYLFYLKQVDDCDKQIENHLSHITQELPQPEKLNKPKPIRHHKPNIDELHVKLMQLTGGKDASQITGLTDSTLLQIVSEVGTDLSRFPTEKHFTSWLGLAPNSHQSGLTNKKKRFKRHTSAGQIFRLAAQAIAQSKHLALTSFYHRIKARKGSLGAIKATARKIAVIFYNVMTKGIEFAEQGIKQYEQKIKERQMKYLQKQARHFGYTLTPQMA

SEQ ID NO: 98260 - protein, 388 aa, unidentified
MNKIIYIGMDVHSSNFTLCSFEPGYGFEADKIFGQTQIKEDIFNSTVKYINKLKSMRPDVDVICGYEAGGLGYTLHRKLKAKEIESVILAPTTMAVARNSSKKKNDYRDAITIAKCLASSAYKAVYIPDEKDEDVRDFIRMRDDHKTALKQIKQQLNAFCLRHGHHYDKPKWTGLHLNWLRKLELSKVQRETVEEYLATYEALTSKIAALDVRIEDIASEERYSEKVNKLKCIKGIKTHIALSFVCEIGDFNRFKSADKFSGFIGLVPGECSSGNTERMLGITKAGNRHLRRLVVEISNTYRRGAVGRKSVALRERQKDMPKDVVAYADKATNRCQRKYQRMMFKGKNSNQAVAAVARELCCFIWGMMTGNYSRTAQAEASVYRSELD

SEQ ID NO: 98261 - protein, 350 aa, unidentified
MIIIGCDYHPGFQQIAYVDTETGELQERALQHREEAEKFYRELAAQGLKVCVGMEASGHASWFERLLAELNFELWIGDAAEIRSKRVRKQKTDRQDAQLILKLILKDDFPQIWVPSWENRDLRQLLWHRHRMVQARTRLMNQLQAVALNEGLRCKKRLWREAGRQQLEAFRLAPWASRRRQDLLELLDRLNPTIAELTQAIEREVEKCPEARRLQTHPGVGPLTALAFVLIIGKADRFRCGKQIASYLGLVPLEDSSGSRRRLGHITKQGNTLLRFLLVEAAQVTVRSDPGWRSKYHHLMMRRGRKIAKVAMARRLAVRMYWMMRKGWNYEQLKKFGSHAGQLVPGDGVK

SEQ ID NO: 98262 - protein, 404 aa, unidentified
MYNAVGIDISKNKSTIAILQPGGTIIRKPFNVSHTSQNLIELADYLGSLEGSTKIVMECTGRYHEPMLKALYEAGLFVSVMNPHLIKNFGNNSLQKVKSDPADARKIARYTLDNWAELRQYSGMDNTRTQLKTLNSQFSFFMKQKVAAKANLIALLDNTYPGVNKLFDSPPREDGSEKWVDYAYSFWHVDCVRRIGLKTFTERYRAFCRKHHYIFQPDKPEKLFHASKELVAVFPKEKTYKLLIQQSIQQLNLASGHVERLRQEMNALASTLPEYSTVMGIYGVGKTYGPQLIAEIGDVSRFTHREALTAFAGVDPGVDESGQHKSKSNRASKVGSARLRKTLFQIMTTLLQNAPEDDPVYRFLDKKRAQGKPYYVYMTAGANKFLRIYYGKVKECLRNLEQAE

SEQ ID NO: 98263 - protein, 386 aa, unidentified
MTIQTQVTSFIPRNYDVFAGLDVDKKSMAVVFADHDGAMRSLRMANSATPLLNYVRKRFPGQRVAFAYEAGPTGFGLHDELTSEAYTCVVVAPSKVPRAPGERVKTNRLDGRRLAESLRGGQLRTIHVPGRAYRDLRHLVQLRDTHVRQLTSSKLRIKSLLLYEGIPFPEPSEKWTARAMRELQTLACSETVRFKLDDLLNTLHFHFQAAALATKQIRRYCLNDPELRQSVDLLLSLPGIGWIVSSHLVARLGDPQQIKNGRQIAGFLGIVSSEHSTGDKENRGEITRSGDSRLRNKLIQSAWTAIKKDPELRAFYRRIYQRHPKKVAARKAIVAVARKLTTRVYVVLHEQRPYVMRPDSSIAPLTAEETVGPRDRLDTAQNDQSR

SEQ ID NO: 98264 - protein, 338 aa, unidentified
MDHYVGIDLHSTNNYIAIIDNDNKRVFKKKTKNDLRLVVETLKPYQEQITGVVVESTYNWYWLVDGLIEEGYTIHLANPSAIRQYEGLKHSDDLTDAFHLANLLRLGILRTGYIYPKEERPVRDLLRKRLQLVQQRTLQILSFQNLVSRNLGRSMNGNAVKKLSEEDVEHLFHDKHLVVAGKASIATILFLAEKIKELEKTIHRVAKLKDEYRLLMTVPGIHKILALTIMYETGPIERFKKVGNYASYSRCVGSKRLSNEKVKGKGNRKNGNKHLSRAYVEAAHHALWHYEYVKRYYQRKMAKTNTIVARKAIAHKLARACYHIMRDQVRFEPERVFM

SEQ ID NO: 98265 - protein, 342 aa, unidentified
MKDTMIGVDLAKRVFQLHGATMAGEVKFRKKLSRDQFRAFMAAQPSALIVFEACGSASYWAQEMEALGHDVRLIAPQYVRPFVKRQKNDAADAEAIVIAARQPEMRFVVPKTAEQQAKAVVFRGRERLVHQRTELANALRAVLYEYGHVFPVGFCHMKRIAALVEDPDCDLPALVISECQDLLAQIAEKTERIEAKTKTLKALAAETDTARRLQTMPGVGPLTALAVEAFGPDMAQFKSGRDFAAWLGLVPKQNSSGGKERLGRMTKAGQTDIRRLLIIGAMSRMNWLGQRTIVKGSWLSRMLTRKPKMLVAIALANKMARQIWAMLTKNEDYKDPVLAVAA

SEQ ID NO: 98266 - protein, 321 aa, unidentified
MNRVLVGVDVCRDFLDAHARPSGLPKRFDNTPAGIEQLVAWLRSLAPERIIFESTGPYQKAAVGALLAADLPAVVVNARQVRDFAKGTGQLAKTDAIDASILAHFGEVVATVVRPLPSQEILEFRELCDRRGQLVRMLASEKNHRHAAQGASPKVIKNIDKHIAFLQRQIDDLEERMDRIVADSETFKAKDEILQSIVGIGRQVSRVLLVHLPELGKGTRRSIAALVGLAPFADDSGASSRIRHIRGGRAKVRMALYQAAVAAVRYCPSMKSFYASLKARGKATRVALIAVARKLLVLANALLRTGIPYQRPTNSVCLKNV

SEQ ID NO: 98267 - protein, 355 aa, unidentified
MTSSKYIGLDVHKESISIAVLNSAGKVVMECVIETKASTILQFVQGLRGDLHVTLEEGTWAGWLYDLLKPYVTELVVCNPRKNALLKEGSKSDRIDAHKLAELLYMSNLSSVYHGEHGLRMLKELSRSYLTITKDLGRVMNRLKALYRGWAIPCTGTQVYAPHYRSEWLSKIREAGVRRRAELYYQQLDALRLVRQQARKELLAEARKHRATKLLRQIPGIGPLRAAHLVAVMQTPHRFRTKRQLWNYSGLGLETHDSAQYRVVEGQLQRSKKPVTLRGLNDNHNHDLKDIFKGAAMRASTAAGPLHDFYEALLAKGRKPTMARLTLARKIAAITLMVWKKEVRFDANYLKQQAA

SEQ ID NO: 98268 - protein, 343 aa, unidentified
MQTTTTIGLDIAKSVFQVHGVDAAGQVVIRRQLKRRYVLSFFQKLPQCLVGIEACASSHHWSRELQALGHTVRLMPPAYVKPYVKRQKNDATDAEAICEAVTRANMRFVPTKTPEQQSGLVLHRTRHLFIRQQTSVINAIRAHLAEFGIVAPVGRRGVEELLTVVADPNDKRVPEIARACLSAFGAQLRSIKEQVLEFDRLITAWHRSNEMSMRLDEAPGVGPVLATAVVATVADPKVFRSGRNFSAWIGLVPKQHSSGGKDRLGSISKQGDRYLRGLFVAGALAVIRYAKIHGTKHRPWLTALLARRPTKIAAIALANKIARMVWAMMAKGERYKEPIALAA

SEQ ID NO: 98269 - protein, 375 aa, unidentified
MTKISRIGIDTSKSVFVLHGVDAAEQPALRKKLRRKQMVEFFAQLEPTRLGLEACGASHHWARTLQGLGHDVVLLPPQYVKPYVQRNKNDSRDAEAICEAMSRPRIRSVPVKTAEQQASLMLAGTRDGLIRRRTQLTNTIRGYAAEFGLTAAKGLDKIEPLLARIAAAEDLPELAKELFALYAQEYAQLKEQVRTIEARLMSWHRGNEASRRLAEIPAVGPIGSALTVMKVPDPKAFRCGRDFSAWIGLTPKDHSTAGRTRLGVITRAGDEALRSVLVAGATAVIQQARKGRGRHSRWLLDLIARKPPKLAAVALANKNARIIWKLLVSGERYNPARAMRAAPASEARDAALRRAPRRAPRLPAPQAGATVTTGV

SEQ ID NO: 98270 - protein, 351 aa, unidentified
MEDYMAFDSHKRYTWVEHQEANTGKTRAYRLEHGTGAIRQALAGCAPGTAVAIEATANWYWIIDEIEQAGCVARLVHPRKAKLMMGLINKTDKLDAHGFNTLQRNGTLPTVWIPPGVLRELRELTRTRLVLVAQRTRWKNRITATLAKWGLPPSEYSDPYGKKARAELEQQLERLPEQTRWATRQMLAQLDSLNEQTRQFEKRLEELVEVSPMMQWLMTLPGVGVILAATIALEIGEIERFANAERLASYSGTTPRVHSSGDRTRHGRTRPDVNRYLKWAFAEAANSVAVNHRRNPERHVSQLYARLRTSKGHARAVGAVARHLAEAAFHVLQRKEVYRDPSLNPRSEKGV

SEQ ID NO: 98271 - protein, 343 aa, unidentified
MELYVGMDVSLKDTSVCVVDDGGEIQYEGTVASEPAAIAKFIRTNAVSAKRIGLETGPTTTWLWHELRTLGLPVICIDARHAKAALSMQINKSDRNDAVGLARIMQCGWYKEVQVKSVACHEIRAVLGSRAQLVKIKRDLENQIRGLMKNQGLIIGKAGGNVFRHRAEELLGLHGLLRDAVRPLLEIREKVGKEITALYRKLMSLARVDVDIRRSMTVPGIGPITALAFHSGIDEPTRFRRSRSVGAYVGLTPRRYASGEIDWSGRISKCGDRMLRTYLFEAAGVLLTRVPQWCKLKAWGHRLWKRIGFKKAKVAVARKLAVILHRMWRDETDFIWSSKEVAA

SEQ ID NO: 98272 - protein, 354 aa, unidentified
MNNGIRYVGLDVHRDSISIAVRDGRGKVIQERVLPTSEAAIVGWVREQRGILHVTWEEGTWAAWLYELLVGRVTRVVVCDPRKNSRAGNKNDRIDARELSDLLRCDRLSPVFHGETKLRSLRELARTYVVLTKEQTRTMNRIKALYRSYAIACAGQACYGPKQRDTWLAQLPHTSIRERAKTYYQLLDSLRQLRQGVRQQLLTEGKKHSAYRKLKGIPQMGPIGIVLLIAFVQIPERFRGKRQFWAYCGFALETQSSGDHRWVHGKRERCKKAALVRGLNSNHHHVLKWIFKSAATRACANPGPLQDFYCGLLEQGTRAEMARLTVARKMAAIALALWKKGESFDAQKLNPQAA

SEQ ID NO: 98273 - protein, 408 aa, unidentified
MNELKCWFAGVDWASESHRVRITDSCGKRLGERDFAHGGEGLAEMAAWLTSITGAEPSAIHVAIEIPHGPIVETLLERGFNVYAINPKQLDRFRDRFSPAGAKDDSRDAEVLADALRTDRRAFRRLALAEPLVIELREWSRMTDDLNGERNRLCNRLREQLWRYFPAMLELEQDLGAEWFLDLWELVPTPDKAMRIRETSIARILKSRRIRRVTALEVLAVLRKPPLTVAPGTIEAASAHIRVLSERLRVVNRQLKDAHRQLDRLCGLLAEPTESEPGQVNEQRDAAILASLPGNGRIVLATLLAEGWEALQRRDYHALRTLCGAAPVTKRSGKSCIVTRRLACNPRLQNALYHWARVAVQHDPRSRAKYAALRLRGHGHARALRSVGDRLLNVACAMLRKRCFRRTL

SEQ ID NO: 98274 - protein, 344 aa, unidentified
MLKFNVIGIDLAKNVLQICVINKHGELVSNKMVSRQKLKEVLAKSSPSIVGIEGCGSSHYWGRLAESFGHDVRIISPKKVKGFLEGHKTDANDALAIANAAMQIGLKYSKPKNEEQQSLQSLEASRVFLSRNITSLSNHIRAMLYEYGIVSAKGAAGLRKVIEDTFEENNALPTCLISTLHQLWAQYLNLKDEFTKLEKAKNSIVRQLSPCKQLMALEGVAEVCAGMLYSSIGNGTQFKNGREASAFVGLTPKQYSSGGKVFMMGIDKKGGVKELRAALYQGAMSIVTHLPDEPKTVKQAWLIQLVKRVGIKRTCIALANKTVRTAWAMLRHESKYEKQQLIAA

SEQ ID NO: 98275 - protein, 402 aa, unidentified
MNDRQAHIWVGIDAGKAHHWVTAIDDQGAMLWSRKVSNDESAILDPLAEVLTLGENFTWAVDIVGTTSALLLALLASHGQSALYVPGRIVNRMAGAYRGEAKTDARDAYVIAETARHRHDLTPIRLPVEIIADLKLLIAHRGDLVADRVRMLNRLRDVLTGIFPRLDRAFDYAEHKGALTLLTGYQTPTALRRMGQVRLTKWLARRGVQGAPAVAEAALEAASGQQTQIGNETIAAQIIADIATQILALDKRLRTLENQITTMFHAHPQAEIIESMPGMGPILGAELLAAAGPLDNYADDGHLAAAAGLIPVPRDSGRRTGNMHRPKRYNQHLRRSLYLSAQTSVIREGPNRDLYLKKRSEGYKHTQALLALSRRRVSVLWALLRDNRTFTPAPPIRSAQMS

SEQ ID NO: 98276 - protein, 370 aa, unidentified
MDEGITFVGFDAHKASISVAMLLPNSVTPIEWQLPNEASAVRRMVRRIEREAPGEVRTCYEAGPCGYALQRQITESGDASCMVVAPSLIPRKPGERIKTDRRDARKLASLFRAGLLTEVQPPSEHDEAVRDLCRAREDARDDLMRCRHRLSKMLLRRGLSYNGRSSWGQAHRLWLGTLRFEDSVDQAVLDDYLLAVDHLGERLKALSQKLEDVSREAPYAAPVAALRCFRGIDTLTAMTLVAELHTFGRFTSPRGLMAFLGLVPSEHSSGSSRRLGGITKAGNSHVRRVLVEAAWNYRHRPGTAALKKRREGQSPRVIAIADRAMSRLYRRYSRMTSARIPAPKATVAVARELVGFVWAALYPMSNPAAN

SEQ ID NO: 98277 - protein, 332 aa, unidentified
MSAVVCGLDVHKESTYATVLDRDGQVLVQRKMPNEDIPRFLEPIRPEKLAMEASTYIIPLYRKLVEQGYAVTVSHPKKTRYIAEARIKSDRVDSRALAELLRLDSLPESYIPPREIAEVRERVRRRAFLVRQVTKFKVKIRDVLAYEGIKPPTGYGLFTGKGVEWMRSLGLEPVDCYLRLIEPLKSEVRMLSRDLKREAGKDPDVSLLMTIPGVGYYIALLVKAEIGDVRRFSSGDHLASYAGLVPSTRSSGGVERHGGITREGSRWLRWALVEAARVHTRYDTPVTRFYHGVAERRGGRAALVAAGRKLATVCYSVLVNGGPYCNPLDAQA

SEQ ID NO: 98278 - protein, 346 aa, unidentified
MRPNLFMEIDRVVSQCVGIDVSKEKLVARMCMFSQAEQAVYSKAMEFDNDKTGFNQLVKWSRREATKELPLRYVMEATGVYHEHLANHLVRIGCTAVVMMPTKAREFAYWEGMISKNDTIDSRVLALVGCVKRNMRPWKPTNQLYRELRTMTRFSQDAKKLRTELKNHLEALGHSHEVEKSVIKHYESLVASLDKRIEKNLENMKKKVASDKELNKKVENIITAPSVGFLSVVTVIAETNGFALIQNRKQLTSYAGLDVRDNQSGTVNGVSRITKRGNSRIRAILYMPAVQCRLHNKHLKKAYDRIVAKHPDKKMIAVTAMERRLLLLIYALWKSDRPYSEDYDKE

SEQ ID NO: 98279 - protein, 440 aa, unidentified
MAMRKREDLVFPNAAAIDVGASSHWAAVPPHATDAPVREFGAMTDDLNDLADWLIACGVDVVALESTGVYWIPVYEVLEQRGLQVWLVDARQVKYVPGRKSDVQDCQWLQRLMSYGLLRAAFRPGAEVCAMRAVARQREVLLTQQASWVQRMQKALVQMNIQLTEVISDVMGQTGQAIIRDIVAGERDAKALARHRHRRVKASEQDVVRALTGNWRDEHLFVLKQALAMYDDIAAHLRECDSKLGELLAERSAASVDLGKAPRQGSKARAEYDARQQLANWAGADLTRINGLGLDSVMKILSEIGTDLGRFANVKHFCSWLGLAPATKISGGKVISARTKRSANRVRQALKMAAMSLSHSDSALGAFYRRLCSRMDKPRANTATAHKLARMVYFMLTRGEAYVDAGQQRYEEQQRQRSVAALKRRAAALGFQLNPVGTAA

SEQ ID NO: 98280 - protein, 346 aa, unidentified
MLYAGLDLSRQRLDVHVLDEEGRTVEVMAVHPDADALRTLATHVLLRGQEVTAAVESMTGGRFVHDQLERWGWDVAIADAVKVKGLAPLAAKTDRIDAWVLAELARRELVPAIWLPDPTIRAERERARFRLHLVRHRTALKNRIHATLMTFGYSVPVSDLFGTHGREILGRLAIPEPWATTLTTSLQMIDDLNVEIDSAEADLRRLGADHPYIPLLLSVPGVGQLLAYTIASEIGDIARFESPKKLAGYTGLCPIVRQSGPKDRRGPLAKNGPKYLRWALIEAATHAARDPRYRDRYERTKHRLGRQRGAKVARVDIARKLAEAIWHVLTKNEPFAPAGPAFTLIA

SEQ ID NO: 98281 - protein, 361 aa, unidentified
MAHTIICGIDAHEKTLVTRIGVNQEPAETKRFNNTRSGRQALFGYLKKLSCGHAGGKMVMAYEASTLGFGIYDESVASGIECHILAPTKMPTARKDRKKKTDERDAQRVFEIVRAYALAGNELPRIWIPDHQTRDDREVVRGRLDAAQKLTGLKCQVQTLLKRTGVVKPAEAGDSWTQSYRRWLKQLCIQPGAQIALQSLLRQIEGMEEEIKILDQEVEQLAEGERYKAVVGALVREVKGVGLLTAMVYVTEMGDLSRFNNRKQVGSYLGLVPSSNESGEVADHKGHITREGSARVRKVLCQATWARVAHDKEEAVVYQRLVKKNPKHKKIAVVASMRRLGVLLWHIGLAAQKEAAKELAA

SEQ ID NO: 98282 - protein, 341 aa, unidentified
MNIITVGIDLAKNVFAVHGVDDNGKAVLVKPKVSREHLLPLLVQLPPCVIGMEACSGAHHWARLFRQNGHTVKLMAPKFVTPYRMSGKRGKNDAADAAAICEAVTRPNMRFVPIKEEHQQIILCLHRTRQGFVEERTATYNRLRGLISEFGVILPQKVACLRREIGAHLEDLPGYASQCIIDLLAHADGLDVRIGEYDRIIAKAAKDDARSKRLMERPGIGPVSASALLASIGGGHDFKNGRQVAAWIGLTPGQYSSGGKARLGRITKAGDPYLRSLLVMGARAVLAGLGDKQDGFSRWARSLQERRGYWKAVIAIAAKNARLAWAVLKYGEDFRLNPSAA

SEQ ID NO: 98283 - protein, 316 aa, unidentified
MLEAVKKCVAGLDIHKKTVMCTILTEKEGGNLRKTTREFRTFRDDLTCLAKLIYDSKVELAVMESTGIYWKCVYEEIEAMGTPCYVVNARHIKNVPGRKTDVSDSEWLAELARCGLLRPSFVPPKDFREIRMLTRYRKKVISMQASEKNRLHKILESAGIKLGAVVSDIDGVSAREMIAAIIKESHTLEEIVQMARGRLKMKEDDLAKSLKGRISDRHRFLLKKIKNHMEWLENHINEIDSQVEQAMIPYKKEWQLLQTIPGVDKISAAMLLSEIGVNMKCFGNKDRLSSWAGMCPGNNQSANKKKVVAQGTAINL

SEQ ID NO: 98284 - protein, 424 aa, unidentified
MNADPVLFVGVDWAKDEHQVCVLEPRGSVVEESVLAHTGVAVAALADRLAKRAEGEVARVAVGIEVPRGALVETLIERGFRVFALNPKQMDRFRDRHFPSGAKDDRRDAYVIADSLRTDQHCFREVALDDPLVIRLREHVRVADDLRDEANRLGNRMRDLLHRYFPPLLRIAPAGDEPWLLELLERAPTPTAARQLRPHVIEAILRRHRIRRITADQVLEAAREPGLSLAPGSVEAASAHVVMLIPRIRLVQAQRRETQRQLDQILAELSKAETDSPEKREHRDAEIILSLPGVGTVVAATMLAEAPGPLADRDYHAMRAHAGIAPVTKASGKRKNASARVSMRRACNGRLRNAVYHWARVATQHDEAAKAHYAALRAKGHSHGRALRGVADRLLRILFGMLRSRTLYDPTRRRAVPPPDRKAA

SEQ ID NO: 98285 - protein, 401 aa, unidentified
MKEFIAEQAEVETASALKAVQEAGRQKRYAVYVGLDVHKETIAVAIASAGREEPAYRGEIGHTRKAVGKLIERLSKEFDGQVLLFCYEAGPCGYGLYRQILEAGHECEVVAPSLIPKKAGERVKTDRRDALKLARYLRAGDLTAVWVPDEEQEAMRDLCRARSDMKSQERKAQQQLNAFVLRHGHHWPASKTRWTATHFNWLEALKFAHDWQQVVLQEYVNAVKAASLRVADMMGQMERVLPHWRLAPVVNSLTALRGIDKLSAMTLLAELGDISRFQSPRQLMAYLGLVPGEHSSGARRRQGAITLTGNRHARRTLIESAWSYRFPARQTAHLRRKAANASDEAKAIGWRAQKRLCGRYRTLTQAGKNTKLVCVAIARELAGFVWGIVRQEMPRLQGAHT

SEQ ID NO: 98286 - protein, 454 aa, unidentified
MSKGYADWLILSDKKQTVLENFQLDDTYAGHCKLYSTLEAYFDKNPGLEMYAAVESTGGYENNWLNALKSYQKVFNLKVARLNPSGVNYNRKAGMKRNVTDAISALSIAEYMINHPENIAYDQDEKWKTLCRHWNFVEMQKHQRVQTINQLETILYSANPTLLRFKKNKLSNWLLELIIKCPTAERLSKARPEKLAKIPFLTLKRAKALVAEANQNIASATDRNAEILVSQIARQIKAFDDNIKSQMKLIEKELICPEIELLKSFRGIDTTSAIGLLLEIGTIKRFPTVKGISCCYGVHPKFKQSGDKIIGVRMSKQGSKNMRKILFNIAKGAITYNPVIRDVYEKKLSEGMPKMAAIGVCMHKILRIIYGMLKHEQVFDPSIDKHNCERSKSKQQNKKLQESVNIDKSRRYQEFDDTAPISGKQTKKRKEHDLSQCEITSQSTGSTCSSNTKL

SEQ ID NO: 98287 - protein, 346 aa, unidentified
MLYAGLDLSRKRLDVHLLQESGATREVTAVSPDGDALRTLVSATARYGEPVRAAIESMNGARFVHDTLELAGWDVEIADAQKVKGLAPLACKTDRIDARVLAELARRDLVPAIWLPTPDVRAERERARFRLHLVRHRTALKNRIHATLIAFGHPCPVSDLFGVAGRGLLRRLQIPEPWAGTVEASLALIEDLEIQIQLCERDLRRHGADHRYVPLLTTIPGIAWILGFTIASEIGDISRFSSPKKLCGYTGLCPRVYQSGEKDHRGPLSRKGPTYLRWSLIEAAVHAARHPAYAEHYERTKRRLGRQRGPKVARVEVARKLAEAIWHMLTRNEPFAPAGPPSVLVA

SEQ ID NO: 98288 - protein, 417 aa, unidentified
MESAPSALPEEPPAGLTCGLDWARDDHAVSIVDARGRQVHRCVIEHSTAGLRALPGVLDKRGIREVAIERPDGPVVDALLAAGITVVVISPNQVKNLRGRYGSAGNKDDRFDAYVLADTLRTDRARLRPLVPASPATATLRATCRARKDLIGHRVALANQLRAHLQRAFPGAVGLFADLDSPISLAFLTRFDCQDRADWLSPKRLAAWLTSVGYCGRKDPAVLHQRLTAAPRGAVGDTGAALAHTTRAFLAVLTNLVEQIKVLEAQIAEQLALHADNQIFTSLPRSGTVRAARLLAEIGDCRARFPDPESLICLAGVAPSTRQSGKHKAVTFRWAVDKQLRDAVCDFAADSRRANPWAAKLYNDATARGKDHPHATRILARAWLYIIWHCWHTNTAYDPTQHRALQRLLNQDQPSTA

SEQ ID NO: 98289 - protein, 368 aa, unidentified
MDNEYYTTIGMDVSDRTTKVCVMAKERGRRRILEETTIPTTKDGLRAYLSVKGAHWPVVFETGAHCRWMKREVESLGMKAIVANPSRLRMVTESNTKNDRNDARELARFALADVELLHPVRLRGERCQQALRLMKARDMLVKVRTMHVNELRGFAKSMGFRLPDCPANRVHVLDKSGWPADFESVAWPLMDVLETVDLKIRAYEVQIRSLAESPELKDKVDRVREVYGIGLLSGVALVASIDADPDRFRKARDAGAYFGLVPKQRQSGDMDVQCHITRAGSDFVRRLMIEAAQIAMRDSARDTDVKLKGHRICARGGRIAKKRALVAVARCLVVTAVALLKKPDAEYVPLSESARREFEAMRSGTTAA

SEQ ID NO: 98290 - protein, 321 aa, unidentified
MTEAQTGPTFVGVDVSQAAWDVHVRPGDRRVRIEVTDEAASQLIAAVGAPGACLVVVEATGGLERPLVAALLEAGVTTAVVNPRQARDFAKAMGRLAKTDRIDAETLALFAERVQPRPAQKTPEKQEQLDALVTRRRQLVALRAVERTRQRQTVQRTAKQSIDKTVKFFDKQIAELEQAIARLIDADEDWRAKRDLIQSVPGVGPTTGATLMAELPELGQLNRRQIATLAGVAPLNRDSGTLRGRRCVRGGRASVRTALYMAAFAARRFNPAIRAFADRLHQAGKPFKVVLTACMRKLLTILNALVRQNAHWKLPSQSLVS

SEQ ID NO: 98291 - protein, 354 aa, unidentified
MSKRITTKSELTIGLDLGDRFSEGRVIDARGEVVEAFRVRTTEPALSARLASFPPSRVVLEVGTHSPWVSRTVTRLGHEAVVANPRRVRLIAENDSKSDGVDAELLARLGRVDPSLLKPIVHRGLQAQRDRILIQTRDGFVRARTQLVNQVRGFAKALGTRLPSSSTEAFPKRVRATTALDLFPGLETLLDTIEQLTATIREMDREVERLCRERYPETALLRQVPGVGAITALYYVLTIEDPSRFAKSRSVGAYVGLRPRQRDSGGQRPQLRITKAGDRLLRSLLVRCAHYILGPFGPDTDLRRAGLRMSERGGGAGKKRAIVATARRLAVLLHRLWVTGEAYEPLRCEAVRAA

SEQ ID NO: 98292 - protein, 398 aa, unidentified
MTESSDYESVQVFIGVDVGKDTHHAVAINRSGKRLFDKALPNDENKLRSLISDLKQHGQILLVVDQPATIGALPVAVARSEGVLVGYLPGLAMRRIADLHAGEAKTDARDAAIIAEAARTLPHALRTLKLADEQIAELSMLCGFDDDLAAQTTQASNRIRGLLTQIHPALERVLGPRLEHPAVLALLQRYPSPEKLASLGEKKLAAQLCKLAPRLGKRLAADIAQALAEQTVVVPGTNAAAVVLPRLALQLITLRKQRDEVALEVEQRVIAHPLYPVLTSMPGVGVRTAARLLTEVACRAFASAAHLAAYAGLAPVTRRSGSSIRGEHPSRRGNKTLKRALFLSAFAALRDPLSRAYYTRKMSQGKRHNQALIALARRRCDVLFAMMRDGTFYTPQGS

SEQ ID NO: 98293 - protein, 348 aa, unidentified
MQVSTIGLDLAKQVFQVHGVNAEGAVVLRRRLRRPEVVKFFSMLPSCLIGIEACATAHHWARELSRFGHEVKLIPPSYVKAYVKRGKTDAADAEAICEAVSRPSMRFVPLKSAEQQSALMLHRGRDLLVRQRTMLVNAVRGHFAEFGIVAPQGVRRVGELAALLIEEDATTLPPLARQALRVLLAQLQALDDQIANLEAAVIASHRDNEASRRLASIPGVGPITASAIVASVANAHQFKSARHFAAWLGLTPRSYSTGGKERLGGISKQGDPYLRRLLVTGATCVIRYARRKAPGEAGWVKALLARRPARLVSVALANKMARIVWALLVRGNTYQAPAPAATMTAATT

SEQ ID NO: 98294 - protein, 349 aa, unidentified
MKIIGCDFHPSYQQIAMLDSVTGEIVEKGLSHERKEEVRVFYAGLEGPVRVGIEASGQSQWFERMLAELGHEVWIGDAAKIRASCERKQKTDRRDAELLLRLLAEDRFPRIWVPTAAERDNRQLLLHRHKLVRMRTQVKNQLQAQALNQGVQRKRKLWSEAGRKQLESLPLLPWASRRRAELLQLLDHLEASISELDRAVAEQASALPAARRLMTHPGVGPVTALAFTLTMGPAERFQRGKQVASYLGLIPSEHSSGGHQQRLGHISKQGNPFLRGLLVEAAHSAVRYEPEMRRAYQRLAQRKCRAMAKVAMARKLAVRLYWMLRLQVNYAQLIQGSHAGQPGTFCGRG

SEQ ID NO: 98295 - protein, 460 aa, unidentified
MASDPDKQSGPRCIEVPFFVAPGNGEHAWQCLDYTCGVTVAFLWMEAKMQVIIERCCGLDVHQETVVACVLIGAPGERPRKEIRTFRTMTRDLEALRDWLQELGVTQVGMESTGVYWRPVYAVLEGRFDLIVGNARHIRNVPGRKTDVKDAEWIADLVRHGLIAKSFVPPAPQRELRELLRYRRKLVESQAAERNRLLKLLETANIKLASVASDVFGVSGRAMLKALIEGSASAEAMADLARGQLRRKRDDLVLALEGRMEEHHRFLLATQLRRLEAAEQDIAALDDRIEAKLAPYCVQHALLMQIPGVDWVVAAALIAEIGVDMSVFLSVYHLAAWAGVCPGNHESAGKQKSGRARKGNVHLRTMLVGAAISAARTKGSYLKDKFHRLKARRGAMRAALAIAHKILVAAYHMLAKGSPYRELGEAYLDQIAQTRTVANLKRRIERLGYNVTLEPKAEPA

SEQ ID NO: 98296 - protein, 408 aa, unidentified
MSNHFQYFLGIDWGSERHRVCLMNREGHTLAERWIEHSGDSLAELADWVRQQTSDSTSALAGAIECPRGAVVETLLEHGFAVFSINPKQLDRFRDRYSPAGAKDDRRDAYVLADALRTDMHCFHLVKLDEPVMIRLRELSRLDDELAQEQNRAVNRLREQFHRFFPQLLQLCQSAEQPWLWDLFELAPSPSRAARLTEAKIERLLKQNRIRRITAAEVRAVLKTKPLTLAPGAAEAAIEHALLLLPRLRLLHQQRADLARRISALLDELATPAEGRQEHRDAAILLSLPGLGRKVAATMLSEASQAIAERDYHALRCYSGTAPITKQSGKKKIVIMRRSANERLRNALYHWARTSVVWDQASKNAYAQLRARGHSHGRALRSMADRWLKVLTSMLSTRTLFDPQRRPA

SEQ ID NO: 98297 - protein, 395 aa, unidentified
MKTVCGLDVHKDTIFLCILAGNGQVILREFTTLTCDIKLMLNLIQQEQVSEVAMESTGVYWIPVWRILQGHVSLKLVNPYYIKQLPGRKTDVKDAQWIATVLQKGLVRGSYIPGKHIQELRQYERRYVHLSEQLTRIEQEIDRQLSRCNIRITSYASTVGSKSVMKVVKAIIEGESTAEELIRHVHGRIVNKNKQQVFSSLEGVISGTDKFIFSQCYQEHELISKLQQDCTEQMQQLCDSYFKDELSLLCTIPGVQKLSAMTIIAELGVDLSTFPTSAMLVGWAGLRPRNDESAKKIKSRKITNGNKYLKRILVQCAWAITRTRKCWLSGKYNELAKRKSHKKALIAIARKLLVIIWNILTKHEIYKEYIPYISLEKKQKRIAYLQKQLLELQIV

SEQ ID NO: 98298 - protein, 460 aa, unidentified
MSRIRTKKSRNRTGKIIKVAERAPALRRVNLHAAGIDVGASSHFVAVPPESSENPVREFGVMTEDLHALADWLKACGVTSVAMESTGVYWIPLFEVLEARGFEVKLVDARKVKNVSGRKTDVLDCQWLQELHTFGLLQAAFRPAEEIAVLRAYLRQREMLVQYSASHKQHMQKALQQMNLRLDNVVSDITGETGMAILKAILGGERHPAKLAKHRNYRCHATEEEIRASLEGNYRAEHVFALEQAVELYEAYREKIAACEQQIEQYLQTLAARTNEPLPEPPDGKKSTLSFEVREHLYRQLGTDVLRIKGINAEVALVIYSETGRDLEQQFGGEKRFSSWLGLCPGTKKSGGKVLSSRSKQNASRAAAAFRQAAVSVGKTDTALGAFYRRMSAKLGRAAAVTATAHKLARLWYAMVTQGTQYDEAGAEAYEAKYRTRVIRGMEKKAKALGYELRPLAATA

SEQ ID NO: 98299 - protein, 404 aa, unidentified
MKGPIVSIDVSKGKSDYQAFKNLNVKYTGSRSIKHTKEGFDEIVNLVREMEKKLETEVCVVYEATGVYHRVLKKVLEDNNIKQFIINPLLSAKTRKNDSLRCPKTDKLDPKSIAKTYYSHSLHNSHKQETIYHELRELSRYYEDILVHIRKDKVAFRAQLDIVFPGYDALYDDLYGPVALAVIEKYPHPEMLQKKKINTVSKVIQSKTCHRQAVSDTMADKAIEYSKTIYSGCDKDDIEVLILQRLIKKLNEDMAEAERTIGEMIKLAQELPDFSIIKSIPGIGDNLAARIIAELGDMTRFKKKNELVAFAGLDPRISESGKNDGDHMHITKKGNKRLRCLLYLAVTCSIRLKRDDNSIKDFYIKKKQQSNPMCSKAAKTACASKLVRIIYSMCKTGELYQYNK

SEQ ID NO: 98300 - protein, 407 aa, unidentified
MELFVGVDWAEDHHDVCVVNAGGRVVAKGRVPQGIAGVARLHELVDLGRDDLKALVEVVVGIETDRGLLVRALLAAGYAVVAVNPMAVDRYRDRHRVSGAKSDPGDARVLADLVRTDRHLHRPVAGDSDEVEALKLVARAHQNAIWSRRRLANQLRATLGEFFPAIIDLFDDVAQHDALAVLTQAPTPTRGRSLSRSKIAAALRRGGRRNRVEARAEQIQAALRAPALEQPGVVADAYGTVVASLVRLLQVHAIEIDRLEEALSQGFAKHPDAELLRSLPGLGVVTGARVLGEFGDDPDRYLTAKARKNYAGTSPLTVASGHRRVIRARHVRNKRLADALYWWAFNAIIRSPGARALYDTRRAAGDTHSSALRAVANRLVGILHGCLHTHTSYNEHLAWGHRSSIAA

SEQ ID NO: 98301 - protein, 347 aa, unidentified
MNFYTQQHKHYCGSDLHAKAMYVCILDPHGTKLVHKNLPTTPEAFLRVLAPYREDVVVAVECMFTWYWLADLCQKEGIAFVLGHALYMKAIHGGKAKNDKIDAHKIAVLLRGGMLPQAYVYPAEMRATRDLLRRRCHVVHKRAELLAHIHTTNSQYNLPEIGKKLAYKANREGVEEHFPDPSVRKTLEVDLSLIDHYDKLLGEVELYITRTAKAHDVQTFSRLQSVPGIGQILALVILYEIQDIARFPRVQDFVSYCRLVKCAKESGGKRGGTSGKKIGNVHLRWAFAEAAVLFLRHNQLGKAYFTRLEHKHGKATALTVLAHKLGRAVYYMLTREHAFALQRFVSA

SEQ ID NO: 98302 - protein, 369 aa, unidentified
MNKAITYVGLDVHKDTIAVALAEAGVRGDVRAFGKVANTPAAVKAVATKLSRVGNALRFCYEAGPCGYGIQRQLTLAGHDCVVVAPSLIPRKPGDRIKTDRRDAINLAKLHRAGELTAVWVPDPAHEAIRDLVRARLAAVRSLRQARQQLSGFLLRHGRHYNRPAWTLMHRRWMAGLRFEQAAHHIVLEDCIAAVEAATVRRDRLEAHIEAALPDWSLAPVVRALQALRGMAMVAAATVIAELGDITRFANPCQLMAYLGLVPSEHSSGATRRQGGITKAGNGAARRMLIEAAWSYRFPARISREQLLRQEGLAKPIRDTAWKAQERLCRRYRKLARAGKSPTVVTTAIARELAGFAWAIAKHVQAANA

SEQ ID NO: 98303 - protein, 366 aa, unidentified
MDTADRLSFGFRNRFAALIAVSVPETARTVVRSLETVSLLVRAPVLYLEDKMTSTTKQKFIGIDISKANLDIAIWGSEEFWRIENNVEELQKLTQQLKELTPSLIVLEASGGLEQPVARELSQENLPVAVVNPTRVRNFARSTGQFAKTDKLDAKIIAQFAQAVRPKVRPLRTSEQEHLDALVTRRRQIVDTITAEKNRKSTTHPKLQERLKRHIDWLKEELEALNGEIEKFIQQSAEWKEKAVILRSVPGVGPVTTATLLAELPELGARNRQQIAALVGVAPVNKDSGKKRGKRRVFGGRAPVRKVLYMATLSATRTNPVIRSFYERLLAAGKEPKVALTACMRKLLVILNSMIRHSRTWSPYLV

SEQ ID NO: 98304 - protein, 344 aa, unidentified
MKKISTVAIEGMQIFKGNQLTIGLDLGDCTSHYCILNEAGEVIWEQELPTTAKEIEQVFSKIPRSRIALETGTHSPWISRQLTELGHEVIVAHARNVRLIGESSRKDDRLDARTLARLARIDPALLGPVRHRSAKAQIHLTVFRARAALVSARTALVNAARGLTKSYGARLPKCGTEQINRGITKELKPELREALNPLLAEIESLNARIAEYDTRIEQIAKEVYPEVSRLKQVKGVGPLIALTYVLTLDDPHRFRRSRDVGCFVGLRPGRRNSGMSEPQLHIGKEGDRYLRTLLVQGAHYILGPFGQDSDLRRWGLKLSASREENCAFVPKKQGQWLVALSPHI

SEQ ID NO: 98305 - protein, 387 aa, unidentified
MLFCGIDVAKRKHVAVIIDDGGQVIQAAFSVKNDCQGFEKLHSILDNQSDTVTIGLEATGHYWLALYETLTAQEYPVAVLNPLQVSAYRRSGLRKVKKDTTDAVWIADFVRIANVSPTSRDTPLLLQLRELTRFRYRLSEQVGDCKRKILSILDRVFPEYETLFSSVFLKSSRRLLQEAVTAHEIAELDLSELTTLLRDASRGRFGAQKATTIRETAQRSVGVRFLADAVRVEMRCLLAQIELLEEQIAQISDAIAALMEQIPQHITSIPGIGPVTGAAILAEIGNIHRFAGVEKLVAYAGIDPTVYQTGQFEATEAHISKRGSPYLRLALWQAANMTIQYEPELRAYYQQKRDQGKHHGTVIGAICRKLLARIYVILKEQRPYQIR

SEQ ID NO: 98306 - protein, 285 aa, unidentified
MSLELLAIDLGKRSFHLYGIDTDGVILSRKVSRAKLAEVVGNLSPTAIAMEACASAHYWGRCWLAAGREVRLINPRFVKPFVKGSKNDAVDAEAIFEAAMRPTMRFVPVKSRDQQDLQSLHRARDRLICQRTALINHTRGLLAEYGIVLPQGPWRFIGQAPDAIAGAELSDLARAIFGELLDQLDDLDHRIKKLDATMVSLCRTNETCRRLAKLPGVGPVVATAIVAAVNDGRQFHSGREMAAWIGLVPRQYTTGGKPRLGGIGRRANHYLRRQLIHGARAVVSR

SEQ ID NO: 98307 - protein, 322 aa, unidentified
MSNVDCCGIDIAKSKFDCAIRLENGKYKNKVFKNDVSGFVIFISWITEQNIKNLHVCMEATGIYWEALAEYLIHRGFTVSVVNPAQIKAFSMSLLIRSKTDRGDARVISDFCFERQPAVWQAPSVEEQELRDLVLRLESLQKMRTQESNRIQVARTNVIKNIKDHIVWLDNEIATLLKEIQLYINRNTEMKNMKKLLESIPGLGAKTAAVLLSFGIHLGRFINARQATAYAGVDPRLNESGSSVRGRPRLSKTGHAFLRKSLYMPAMTTLFRTEWGKQFYARLSAAGKPPKLIIGAIMRKLIHVAFGVLRISEKFDKSLHCV

SEQ ID NO: 98308 - protein, 328 aa, unidentified
MCTLGIDVSKNKIDLCLLTAGPGGKKKHKVLTNEPAVARKVIDWLNAQKCVPESVTVVLEATGIYHENLAYGLHEAGVSVCMANPCRVREFAHGMDILNKNDAVDAFVLACYGELKSPAVWVPPSPEVRKLRALLRQRDALREDVQRTVNRLEKANSTSTPQEVIRSLERTKSWLNEELARIEKLITDHTDNDPGLKADLDLLKSIKGVKDQVGREMLALLKDGMFKSASQVAAYLGLTPVEKTSGGSVRGRPHMSKTGPSGVRAKLYVAALTASRWNKQAKAIYERLVAKGKAKKAALGAVMRKLVHLCFGVLKTRLPWDENYVATA

SEQ ID NO: 98309 - protein, 288 aa, unidentified
MSKRTTICAGIDTGKRKLDIALAAGGERLEADNNSAGHQEVATWLRRHRVKRVGIEASGGYEQEVVAELRRKGFVVIVFQPAQVRAYAIFRLQRAKNDKIDAALIARCTSDAPKIHAPPDPRLAPFAHDLTLLDQITDIVAGHRNRRETCGDPRIRQFWKEEITRLKKLQIGLPTAVAILVRMPEIGRITREQAAALAGLAPYDDDSGEHIGVRHIEGGRKRLRGALYTAALPASFRWNPQLIALYRRLIAAGKKHKRALIACARKLLIFANTVVARGTPWLSQASPA

SEQ ID NO: 98310 - protein, 320 aa, unidentified
MAETDKVYVGIDVSKDTLDIATMPQPSSRRFSNNPPGIDELVEYLRELAPTLIVLEDTGGYQRDAAVALNDVGLPTVVVNPRAIRLYAKARKILAKTDRLDAGVLARYAWKEQPEIRPMPDRDQRELRDTVTRRQQIAEMIAAEKNRCHQARGAVKAGIEAHITYLESQRSELDEVLDKIIASNAQWAESESLLRSVPGVGPVITYTLLAELPELGSLNRRKIAALVGVAPFNNDSGKHQGHRCIWGGRAPVRCALYIGVLAGIRYNPVISPYYYRLRKEGKPFKVAMVACIRKLLTTLNVIIATRRPWDTNRIALTGIA

SEQ ID NO: 98311 - protein, 343 aa, unidentified
MSEVTTIGLDLAKSVFQVHGVDASGKPMIRRQLRRRQVLAFFKKLPRCLVGMEACATSHYWAREIAKLGHEVRMMPARYVKAYVKRNKNDAADAEAICEAVTRPTMRFVPIKTPEQQSVLMEHRTRQLLVRQRTQLINALRAHLAEFGIVAGVGRNGLEKLLEVIADDRDERVSPAARDCLLALRAQLVMVKQQILQADRRILVCHRASEVSRRLDDIPGVGPLIATALVASIPDPHAFRSGRDLSAWIGLVPRQNSTGGQERLGKISKAGNRYLRSLLVVGALSVIRRAKQTGCTKRAWLVALMARRSTKVAAIALANKIARIAWAIMVRGTRYREPIQQAA

SEQ ID NO: 98312 - protein, 417 aa, unidentified
MRVVGLDIHRSFAEAALIEDGRVRHLGRVDLVREKVVAFAKKLGTEAEIVVEATGNTMAVVKLMAPHVKRVVIANPLQVRAIAHAKVKTDRIDAVVLAKLHAAGFLPEVWQPDKATERLRRQVARRAAVVQARTRLKNRIHSVLHANLILPYRGDLFSAKGRSWLIAQPLEEDERVAIDGWLAELDRLAQDLARVDATLAKAGLGDARVRRLMTITGINLTIAVGLVSAIGDVGRFSTPEKLVSYFGLNPRVRQSGEGRAYHGRISKQGRSLARGLLVEAAWAAAATPGPLHAFFVRLKARRGQQIAAVATARKIAVLVWHLLTRDEDYAFGRPALHQAKLRQMEIKAGMPSKRGGNTPGRTKDYSIKALRDAERAFVAQAEAAYARFVSAWSERPKGKRTASKRPGCADATNEERL

SEQ ID NO: 98313 - protein, 336 aa, unidentified
MIKYIGLDAHSSTCTFNVTDERGMEVDNTTIESNGRLLVKYLRGIEGVKKLTFEECELSNWLYEILRPEVDELIVCNPVANKDYKKVKTDKMDARKLSKLLRGGFLISVYHDGSKRERFRSLMSGYQDLIEEGVRLKNRYKSLFRKSGNKVKGESLYSDESFLEGLERSDFKFIGVQIYQLLEKMEGSRQEYVKEIDRYGKGFKEIKYLKSIPGIGSIQAAKIVSQVIDPERFSSKYKYYSYCGLVRHKRISDGRGYGSEKIWGNRILKCVYKMAGHSVLKGNSGLRKYYDSLRLKGISHDNAYNAVCRKIAAISLSVWRKSEKYNDRLITGNLIK

SEQ ID NO: 98314 - protein, 370 aa, unidentified
MEEGIKFFVALDVHKDSIAVGTAEPGRAPARLVGTIAHDVAKVRKLLARYGDPRHVHVVYEAGPTGYGLQRALARSGYRCEVIAPSMIPRRAGDRVKTDRRDCLRLAELARAGELRAVWIPDPADEAIRDLTRAREDAVNARTQGRHQLKSFLLRHDVRYPQRTSWSKTFYRWLGTLSFAGSGAQTAFTEYWQAVTAADERVARLTVALKESIAGWRFEPVVAALQALRGIDAISAIGLVAEIGDIARFGHPRQLMSYLGLVPSEHSSGERVVRGSITKTGNAHARRLLTEAAWNYRFKPRIGYEAQRRAEALPQVIRDLAWKAQLRLSGRFARLRAKGLHVNKVCVAVARELAGFVWAIASLQNRQAHV

SEQ ID NO: 98315 - protein, 411 aa, unidentified
MRVVYERCCGLDVHKKSIMACLLTPDEQGGTRQEVRRFGTMTRDLLELSDWLTGNGVTHVAMESTGVYWKPVWNILEAVCTILLVNAQHVKAVPGRKTDAKDCQWIADLLQHGLLRGSFVPPTPIRELRDLTRTRASLRQDHTAVANRMQKILEDANVKIASVATDWLGVSGRKILQEMLDGEQDSKKLADLCRGRLREKIPQMELALEGRMTSHHRWMLRLQREQLEFLERQIAELDVRIQDHIRDYQQAVDLCLTIPGIEKVAAANLIAEIGVNMDQFPSAQHLASWSGLCPGNNESAGKRLSGKARNGNAWLRRNLCQAAWAASHTKNTYLSAQFRRLAARKGKKRAIVAVAHTILVIVFHMIKNQQPYRDLGADYFDRRNSEQLKRSLVRRLEGLGLTVTICPATAG

SEQ ID NO: 98316 - protein, 369 aa, unidentified
MKSIAYIGLDVHKDSIVAALFVGDEREAKFEKSFANDSLVVKKVFNRWREDYDLRCCYEASSCGYVLHRWLADMGVACEIAAPSLIPTRPGDHVKTDRRDAKKLGRLYRAGELTFIHIPTEKEESVRGLVRCRETISNETRQSKQYVLKFLQLRGHIYRDGENWTEKHWRYIRSLKFDGADAVVWNEYLALLNYKLDRLEDLDKRIEEIAFSESYKQVIGRLRCLRGIDTLSAMVLVTEIGDFGRFAGAEQLMSYLGLVPICHQSGGSAKRGSITKSGNSRCRHILIEAGWNYRHKPAVGSRLRVRQTGQNPEVIALSWKAQHRLHKKYWKLANRMESKKATVAVARELAGFIWAVMTQCADVTWAKAA

SEQ ID NO: 98317 - protein, 361 aa, unidentified
MPTQMNNLNFKGQNIYAGFDVHLKSWKVTILSQEMMLKSFTMPPKPEILSDYLQKNYPGASYHSAYEAGFSGLWAHYQLLELGINNIVVNPADIPGTQKDKLQKEDKRDSRKIAYALRSGSLNPIFTPSESTLNDRSLIRSRKMIVNDLTRFKNRIKGLLHFYGIEYPEEFASSRTHWSKRFITWLESIHMKEASGKTALQHLISEARYHKELLKTVLLDITLLSKTDKYKERVVLLRSIPGIALITAMTILTEIEDINRFPNAERFTSFIGLIPMTSSSGEKQKVGEITFRAHDFLRSIIIEASWIAIGRDPALLMAYQHLSKRMESNKAIVRIAKKLANRIYTVLKYKKTYEFGKTDNL

SEQ ID NO: 98318 - protein, 417 aa, unidentified
MDVLHDRCAALDVSKAEVTVCLRTPGKRRNTRHTEVRTFTTMTNALLAMRDWLVAERVSLVVMEATGDYWRPPFYLLEDGLNVELVNAKHVKAMPGRKSDVADSVWLCQLAECGLLRASFVPPEPIRQLRDLTRYRQVLLEERTREAQRLEKELEDAGIKLSVVASDILGVSGRAMLGALIDGERDVEILADLARGRLRPKIPDLQQAMIGRFGPHHAFLCRLHLDRIDALDRDITTLSRRIEAVMAPFHQLLTRLDTVPGVNQRVAEVIIAETGGDMSRFPTAAQLASWAGVCPGNHASGGKRKSGKTRKGDRWLTASLGVAALAALRSKDTYLAARYRRLVRRLGNKQKALVALQHSILTSVWHMLSGNIDYHDLGGDYYLRRDPQRERRRAITALNKLGYVVTLNPIEPAETTA

SEQ ID NO: 98319 - protein, 459 aa, unidentified
MDKNSKKEKPRTKKITQFEILRPNVAGIDVSDNNGMMVAYPVNDTDMVIEEFDCYTRDLRRISATLQSHKIVSVALESTGVYWIPLFLLLQEDGFEVYLVNSKHVKNVTGRKDDEGDAEWLQKLHRCGLLSASFQPDNQTRALRSVVRHRLSLVQTCSTYLNRLQKALELMNLKIHAVLSDIDGKSGLRIIEAILAGERDAEVLADLCDYRVKASREEIVKSLEGFWSDEHLFELSQCYEMYKFHNKMIEKCELEIEKILQQDIQSKNGGVIPKMAKTLKPKPSSDTDICFKLLNYLYMLTKVDIASVDGISGISVITALSIYAETGPDLRFFKSEKHFASWLGLAPNTKKSGGKVISSRVPKKKHYAGQVFRMAAMSMRNNKGPLGDFYRRVRSTAGKAKAVVALARKLAVIYYRMMTDKTAYNPQAMIEYQEKYRERKIKNLEKRLMKLKAEAAAAA

SEQ ID NO: 98320 - protein, 387 aa, unidentified
MPQPNDLSRSLVALDQNSTIIAVIEMSQSSWLVAGMLPGIERQPRKKLEPSPERLLALLQRWRDEAVRAGSTITRIALAFEAGRDGFWLARWLEARGVEAHVIHASSIAVSREHRRAKTDRLDTALLQRGFLGWLRGERGHCSMARVPTIAEEDAKRPNRERDCLVGERTRIVNRIKSTLARLGIRNFKPTLRKAAERLATVHTPEGTPLPPNTLAELQRDMARLGVVVSQIRQIEEARQKRLEQQHETGPHAMVRLLARIVGVGVETADMLVHEVLSRPMRDRRAVARYAGLTGSPDESGAQRREQGLARAGNARVRRGMIQLAWRFLMFQKESALALWYRARTTDSRRGTRKTMIVALARKLIIALWRFVTTGEPLEGVVLRPVT

SEQ ID NO: 98321 - protein, 398 aa, unidentified
MTRKNTLKSLPTDTEFRVVGLDLAKSDVSVAAIPVDDNTPSLVDRMTYADLLDWAGKISPTLFAMEPCNGYSLLCLQLENLGHEIKVISGWTVSMWINTHLSGQKTDLNDAIALARLAVSDAELTPIRHKSITEIRIQTVQAVRQQLMSQRSKSIVSFKALAQQWGIPCAAGHRNLKKLRESIEAKVDLITRPVANAMLFLLDAVKSLDRQIGQLNQTLQELVMSDERGRLLQSVLGVGTQISARVITVVGNVERFNSPRSLVAYVGVAPRNFITGHKNLTKKKHGNCPDLSHKGQGKISRRGDKLLRSLFIQGAACLYMQFCKDQLPECQLKRWILKQLAMQKPYGKLIVSLAAKLIRIVWAVLTYGEKFNIQKAGMTRSMWSEMALETPLNKEVPA

SEQ ID NO: 98322 - protein, 437 aa, unidentified
MQYPTQEAVLSFDFSLDTLDVALRAPDGRWLIPHQPFSNNRAGFQQLKGEVLAHLHGLEGVQLITVGESTALQWWHAFYQISTDPDFAPFDPTLILLNPAHVKHFRKALPEEDKCDPKDPRLIDTYYRTRRPPHAYTFDERYLPLRCLTRAYHRLIQTLAAEKAFCLTLVYLLASDYQRLKPFSDPFGVTSLHLLSEYPDIATIADLPLADLSNELHRLARGHLQDPDETARQLQQIAQDSYPLPDSLRPTLHFVLQQTLDHIRFLEEQKTLYTTRIEEELALLPEAELALTESGLGPILVAGCLSEIQDTQRFTTGQKYDAKGKCYRPRTYRDGQAAVAKMAGLWWPRHSSGRFEGQDRRLARERNPHLRYWFVQAAYSLKRHQPEYRAYYQRKYREATRHHHKRALILTARKAVRLIFALLHKGQMAQLEEAPKP

SEQ ID NO: 98323 - protein, 387 aa, unidentified
MYFVGIDISKFKHDCAIIDELCDTVMPSWSFSNDREGFSHFKALLDSLEGEKKIGLESTGHYGQNLKQFLESNGFTFMEFNPLLVSRFVRSKSLRNTKTDSIDALSIAQYVMTVEYKPYPSSFYHLDKLKSLTRFRNNLVRQRSRQLVELTNVLDKLFPEFKPFFKDKFSVTALYILAHYQTPERIANMNARSYEALRKLSRGRFTLSNFTQLKALAKNTVGTQSDYLLDQMNILLELYSQLDSKVDELDAQIKECVRGIDPPCLSIPGVGELSAAMILSEFGDFSKFQNPSKMLAFAGLEPGYFQSGQSEYTGHMVKHGSSRLRYALMNCCLPLISNEPVFAAYYTKKRSEGKPHRVALTHVAKKLLRVIYTLQTKNIRYDPTMIH

SEQ ID NO: 98324 - protein, 378 aa, unidentified
MRFYTTQHRFYCGIDLHARTMHVCILDAAGTVVCDRNLPCHFETLLQAIAPFRDGIVVGVECMFGWYWLADRCAEHTIPFVVGHALYMKLIHGGKAKNDRIDANKIAHLLRGGNFPLAYAYPKGMRETRDLLRRRMYLVHKRAELITHLEILNAQNNLPPFGKKLSYAANRAELNIPQRFTDPSVQMSATLDLDLIDKLDELIGTVELHLTRTAKVDNVQTYHRLRTIPGVGPILALVLLYEMHQVHRFERVGQFLSYARLVHCAHESAGKKLGCGGKKIGNAHLRWAFAEAVCLFLRGSERARQWKQKQEKKHGSAKVLGILAARLARAVYHMLRKQEAFDEDRFWNGQAKQHQAPTSKTGPAAASGSRRKARAAAR

SEQ ID NO: 98325 - protein, 343 aa, unidentified
MQAVTLGIDIGKRWFHVVGLSDTGRVLLREKLTREQLHRLFATYPACVIAIETCCGAQHLGRLAASHGHDVRLIPAQHVRPFVKSQKNDFNDATALAEVARLPSMRAVPLRSIEQIDVQAVHRARQRLLEQRNGMTNQIRGLLLDRGIAIPQGLYPLRAAVPLILEDAENGLTPAFRSLLALLLQMWRQTDEAIESLSDHLKELARQSEPCRRLQSIPGVGALVSTALVSAIGNASSFRTARDLSAWIGLVPRQHTTGGKPKLLGITKRGNSYLRRLFVQGARALWVWKDKRDDPLHRWIRSLAARMHPHIAVCALANKLVRISWALLRKEEAVFNHAAAAAR

SEQ ID NO: 98326 - protein, 378 aa, unidentified
MRFYNQPHRFYCGVDLHARTMYLCILDQAGAVVLHQEVSAEPSAFLEAIAPFRNDVVVACECLFCWYWLADLCQAENIAFVLGHALYMKAIHGGKSADDRIDSQKIAQLVRGGNLPIAYVYPKGRRETRDLLRRRMYLVHKRAEVVAHVVNTNSQYNLPPFGKKLIYARNRQALKIADRFADASVRKSIELNLRLLDTLDDLIGDVELYLQRTVKVDDADTFYRLRSIPGVGKILALVLLYEIHDIQRFANEGMLLSYARLIRPQKTSAGKVKGGGGAKIGNAHLKWAFSEAACLLARESDQAKRFLARQQKKHGKPKALGILAARLGRAVYHMLRQKKAFDPKRFWNGEPGVTPNQLKKAAVKRPRRAHGSRCVLEA

SEQ ID NO: 98327 - protein, 331 aa, unidentified
MSNIIGIDVSKASLDCAYLRDPDQKKTKRLRCDNDMNCFASLVAWAETRSELPVGSLAFIIEPTHVYHEQLVQFLYNSGATVYLVNPGKVRKFAEGIGILSKNDLIDADLLVRYGLLAKKLNAYAPVAQEVNDLRSLLNRLEVLERNLRSELNRQEKVGKTMVFHRLEQQSIARAVKRLKAEIITFKRAIRECINSAPSLRQNFDLLQTIPGVGAKTAWIMMVILGSRSFRSAPEVASFLGLNPIEKRSGKSQYRRPRLSKSGSRHYRQQLYFPAIVATRKNPDIKALYERLLAADKTKMCALGAAMRKLVHICYGVVKNQTPYTAQSIPS

SEQ ID NO: 98328 - protein, 344 aa, unidentified
MSEQYVGHQIVGMDLHRRRSVLVRMTDCGEQLETVRISNDPEYLQAVMARAGEHPDVVLEATYGWYWAADTLAELGATVHLAHPLGVKMFSLRRVKNDQHDAADLADLLRMGRLPEAWIAPPPTRELRGWVRHRAKLVGLRSNLKCQVHAVLAAAGVQVPMADLFGPSGQQLLATVRLAVESRSRIDSLQRLITGLDFEIDTFARLVAGRLREDPGYRAIQQIPGVGPTLGAVFVAEIGDIGRFRRPAQLACWAGLTPTHHESDTTVHRGRISKQGSRLVRWAAVEAVQRVSAHTRLGQIRDRVGDRRGRNIGVVAAARELTELVFYGLRDHRIRCLATPASAA

SEQ ID NO: 98329 - protein, 391 aa, unidentified
MICVGIDVSKDKHDCYIATSEGEVLADVFTIPNSMEGFKQLFQKIKSVAPDLSKVKVGLEATGHYSYNILGFLLGKGLATFVLNPLHTNLYRKSTSLRRTKTDRVDARTIAAMMMSDVVLKSYSAISYHNEELKSLSRYRFDKVAERAKLKQSVTRLVCILFPELEQLVPTLHLSSVYALLSELPGAKQIADCHLTHLTKLLEAASKGRYGRDKALQIRNAARNSIGSAMNAKSLELKHTIRLIAELDSEIEEIETQIKQIMDSLSSPILSIPGITYRMGAMIIAEIGDFSRFDSPDKILAFAGLSPSTYQSGKLDNAYAHMEKRGSRYLRYALYNATKYVCQWDKTFSDYLARKRAEGKHYNVALSHAAKKLVRLIFALQRSGQMYAPAP

SEQ ID NO: 98330 - protein, 314 aa, unidentified
MEAAVVVGIDVSKRTLEVALSSGEGFSVANNEDGISELLARLRPRGAALVVLEASGGYERRAYLGLWAAGIATALINPRDAYHFAQANRQLAKTDSLDARGLCEFGLRMQPEPTPAPEAGDEELKALATRRQQLIKMLAAERTRVQQAPRSVRSSIKRMIRALERELAALDQQIERRLRDNPRLAQRCAQLDQVPGLGPVTCAILVSRLPELGQLGPKQIAALVGVAPYDHQSGQWRGRSAIFGGRAEVRSALYMATLSAIRCNPVLRSFYRRLRAGGKPAKVAIIAAMRKLLVILNAMLKTNSPWRPQCAVVA

SEQ ID NO: 98331 - protein, 355 aa, unidentified
MGEIEVVIGVDAHKRSHTLVAVDEVGRKLGERTVPATSEGHLQALEWAARWPGARFALEDCRHVTRRLEGDLLAAGCTIVRVPVQLMATARRAGRQPGKSDPIDALAVAHAALREPGLPAARLDGPAREVKLLSDHRHNLVTERTILCNRLRWHLHELDPGLQVPSRGLRRYCVLDDLAVRLEVFDGVVARIAAELVTRCRELTVQINALERELRTLVRVLAPALLAVPGCGVLGAAAIVGETAGARRFRSKDAFARFTGTAPIPVWSGNTAGKVRLNRGGNRRMNCALHMIAVTQARGVGPGKDYLDKALARGKTRTEALRLLRRRLSDTIFAALLVDDQPAATSHSRALPQAA

SEQ ID NO: 98332 - protein, 362 aa, unidentified
MILGLDTHLDFHVAVAVDDLGRRLGKSSAPTTVKGYEGLLCWAEGFGSVRCAGVEGTSSYGAGLARHLRARGIEVLEVERPERQQRSSRRNLKKSDSSDAEAAARAVLAGEASGVPKSSDGRVEMIRTLRAARRSAIKARTQAANQLQGLRVTAPEELRRRLRGLSRKELVSVAARFRLRDDLRDVPSATKFALRSVARRYEALSREIVELEAHLDRLVAQAAPELVSLAGIGTDSAATLLIVAGDNPQRLRSEASFASLCGVSPIEASSGKVVRHRLNRGGNREANRALYMICLARMRRDLRTKEYVSRRTQEGKSKREIIRCLKRYIAREVYRVLISCGARSSPTVPMDEAHIATGSGAA

SEQ ID NO: 98333 - protein, 377 aa, unidentified
MKSTRFVGLDVHAATIAAAVAEPTGEVRSVGTIPNDPEAVRRLMKKLGPAEQLRVCYEAGPCGYPLYWQLTRLGIACAVVAPTLVPVKAGDRIKTDRRDAEKLARSFRSGDLTPVWVPDAAHEALRDLVRAREAAKKDQLRARHRLQKFLLRHGHRPPAGTKAWTDAYRRWIAGLRFEQPAQDATRLDYLTEVDHARDRIARLERAIDAAVETVPAPMRAVIEALQALRGIATVAAVTIVAEVGQLSRFARARQLMGYSGAVAREDSSGPRIRRGGITKTGNAHLRRIVVEAAWAYRHRPAVGGALRRRQAQQSEGVKAIAWKAQHRLHHRYRRLLGRGKSKQQVVTAVARELLGFIWAIGVAVEREGSGSLPSQAA

SEQ ID NO: 98334 - protein, 366 aa, unidentified
MKKHTTKTDLSPTDVSACSTVAVDLAKNVFQIAGENPLGQVIYEQRIKTRDSFQAFLLTLPAGVTVLMETGPGAQAWARLLQARGNPVRILPAQRVAEHRSGAKNDRNDVLAILRAGRDLKILAVPVKSTAQLAMQALHRARQGYVRRRTAMGNQMRGLLLEHGIALAQGEISLSRNVPGILEDATQPLPELLRELIAELLGEWSQLGERITVLTGRLEAAAREDETAKRLMTIRGIGPIIATALLAKQTEPERFANARQFAAYFGTVPEQHSSGQKVRLGKMCKRGDAYLRSLAIQGAHAVLRQLRPDSEHPDDCRLRRWLSRHGQKGAAVRLANRNLRIVWVLLQNDQNYRRQPGNGQEAAMSH

SEQ ID NO: 98335 - protein, 405 aa, unidentified
MWFAGIDWADDHHDAVVLTDQGQLLGALRVPHTAEGLDHLTRFLRGGASTSGAAEPVICLVETQHGLLITALLEAGFTVCPVNPLAVGRLRPPSGVKTDALDARLLARLGRNDWPALRVLPPDGPLLQELKTLTRDLEGLLREQTRLVNQLTACLKAYSPAALRCFDGLTRQVTLAFLQAFPTPEAAAAASLDQLTQVLAQGHYPHPRQKAEQLAALLQAPQLHALPGVARAKARLMAALRAQLAVLTTQVAAFDQAIQQLFAQHADSAVFASLPGAGRRLAPRLVAEWGEDRTRYASAASVRALAGTAPVLFQSGAFRGVRRRRACVNAWRQALSHFAWESVLCEPWATASSQRKRAQGKTSAMALRAVANQWVRSIYAMWQARQPYQRAIFLAAQHAHGGMVA

SEQ ID NO: 98336 - protein, 372 aa, unidentified
MQEECKVYVGLDTSKLKISVALAEAGRGGEVRFLGDIDATPDAVERLVRKLAKQHGRLAFAYEAGPTGYGLQRQITALGQDCVVVAPSLIPKRPGERVKTNRRDALTLAKLHRAGELTPVWVPDPIHEAVRELVRAREAAMEELRSARQHLQSFLLRHGRVFGGRAAWTRAHTRWLCEQAFEHPAQHLVLAEYRQAILDAEARLERLTRQVTEAVASWSMAPVIAAYQALRGVAFLTAVTFAAEIGDVRRFDSPRQLMAYLGLVPSEHSTGERVRRGSITKAGNGRARRVLIEGAWTYRFRARMSRLLQERQAGLPKLVREIAWKAQLRLCSRYRKLMARGKRQSVVTTAIAREMAAFLWAIGREVKPQLAS

SEQ ID NO: 98337 - protein, 415 aa, unidentified
MEQATRFVGMDVHKDTIVVAVTAAGEVGKVTAYGKLPNTVVALEKLVKGLRQANGGALKFCYEAGPCGYGVHRTLTKLGEDCMVVAPSMIPRKSGERQKTDKRDAASLAVLHRGGLLTAVWVPDVAHEAMRDLIRARQAAVRAVRTARQQLSAFLLRHERTYPNGRRSWTKAHRGWLADQKFAQPSQQIVLEESIEAVRLGEQRRDRVDGYLRAQIPSWSLFPLVRNLCALRGLDMIAGAGLAATIGDPSRFASASDFMSYLGLVPSEHSSGPKRRIGAITKAGDIHARTLLIEAAQSYRYPARVTRHKLAAVDTVPEAVRAIAWKAQTRLCQRYRHMMAKGKPRQVVVTAIARELAGFIWSIACITTDPPAKSVPATIAPEEIVRRPSTARARRPSAAGRLDKPAAMADAGLTG

SEQ ID NO: 98338 - protein, 344 aa, unidentified
MITIGVDPHKASHTAVALDGDGHSLGELRVPATRATAERLLRWAGRWPDRTWAVEGASGLGHLLAQRLVAADETVLDVPATLSARARLLDRGHGRKTDALDARCVARVAMSQAGLRRVCPEDHTAVLRLLSDRRDELTGERRRVVNRLHRLLRDLRPGGAPTELSTAAAATLLGRIRPETAVDLQRKLMARALVADLRRIDRVLAENRTRCANAVAASGTTLTAIFGISDVLAAKILGHVGNVDRFRSDDSFASYSGTAPIEVSSGEVTRHRLSRNGNRALNNALHLAARVQTMHPGLGRDHYERKLAEHKSSREALRSLKRQLAKVVYRRLVADHVHRPALAS

SEQ ID NO: 98339 - protein, 422 aa, unidentified
MTTKNQPTKNDSTCQPAPAALLAIDWADQKHDYALLVEGASQPETGRLDHDAGHLQEFIAELRRRFGGRPVAVILEQKRGALIHALLGHDHLWLYPVNPLTVARFREAFATSGAKDDPTDARLQLELLAKHRDRLHRWLPDDAHTRTLALLVEERRCAVNECTRLVEQSLACLKGYYPQFIALLGGQLDTTLACKLLLKYPDFATLARARTQTIRRFFYAHHFRRVEVLEARLKALAAAVALTTDPAVIEAGRLRATRLADQMLALLPHIAHLDQRIAELFAAHPDAAIFRSLPGAGAVMAPRLLAAFGTQRDRWRDASHVATFSGIAPVIKRSGKQSLTSFRHAAPKFLRQTFHEFAGCSIRFCPWAASFYHAKRAAGCNHHAAVRSLAFKWIRILHACWRHHSTYDPTRYTPPTPAQAAA

SEQ ID NO: 98340 - protein, 342 aa, unidentified
MDIHAVGIDLGKNLFHLVAMDATGKVIIQKRCSRTQLLTFTANIRVWRIGMEACSGSHFLARALQQQGHDVRLMPAQYVKPYVKTNKSDYIDAEAIAEAVQRPSMRFVPLKTEEQLDLQAVHRVRERWVMRRTAVINQVRGLLLERGITLPKGRSHLEEALPEILAEAHIRFSESISVLLAQLRCELDDLGTRIEEMDALIARISKENESCRRLTTIPGVGPVTATALVAAIGNGSAFKRGRDLSAWVGMVPGEFTTGGKQKLLGISKRGNSYLRRLFVQCARSLLRFRERQGAPFGVWLAQLIGRAHQNVAVVALANKLLRIAWAVLYKNETFRSSLPVSV

SEQ ID NO: 98341 - protein, 413 aa, unidentified
MELLHRRCCGLDVHKETVVACLRLVSNGKVTNEVRTFQTTTADLLHLSEWLTANDCTRVAMEATGVYWKPVWHILDDGAFELVLANAAHVKNVPGRKTDVNDAMWLAELLAHGLIRASFVPDTQTQEMRNLLRTRKQLVREQSSHVLRVQKTLEDANIKLDSVLTDLMGKSGRAMIDALIAGETNPAKLASLARRGVKASPEEFREALRGRVTEHHRFLLRLHLHQIDALDAAMATIDAQVAANLGPFRTAVELLMSIPGIKSLSAHVIISEIGTDMSRFPSAAHLISWAGICPRNDESAGKRRSNRLRKGATWLKTTLTQCSWAAAKKKDSYLQAQFYRIKARRGPKKAIMAVAASILTAIYHMLKDGTMYKDLGRNHFDRSSTDQQKKRLVKRLADLGYTVEIKPIAVVSC

SEQ ID NO: 98342 - protein, 307 aa, unidentified
MNPPMLYVGLDIGKDSLQVNLQNQNFPIPNTRPGHRKLIVQLNALAQPLLVVCEATGGYEQAIVVALHQAGLPVTIVEPARVRHFAKACALRAKTDRIDAALLTEFGRQTAPQAQAPLNPNTAALRELSRHRLQLQTMTQNVIQQARHLTLPALRQQNAALLRQLRGHLQKLQKQIDALLQQDAALQIKAHKLQQVVGIGPKTIVSLLAEMPELGKLNRAQAAALAGVAPHARESGRWQGKRFIGGGRPLARKALYMAALVASRYHPALKLRYQALIARGKAPKVALVALMRHLIIHLNTLLKPLAV

SEQ ID NO: 98343 - protein, 400 aa, unidentified
MISTDGVDVFLGLDVGKQTHHGHGLTPAGKKVFDKPLPNSEPKLRAVFDKLKDKFGTVLVVVDQPASIGALPLTVARDAGCQVAYLPGLAMRRIADLYPGEAKTDAKDATVIADAARTMPHTLRSLDLADEVTAELTMLAGFDQDLAGEANRTSNRIRGLLTQFHPSLERVLGPRLDHPAVTWLLERYGSPTALRKAGRRRLVEAVRPRAPRMAQRLVQDIFAALDEQTVVVPGTGTLDVIVPSLAKSLAAVHEQRRALHARIEALLEAHPLSRVLTSMPGIGVRTAAILLTTVGDASTFPTAAHLASYAGLAPATRQSGTSIHGEHAPRGGNRQLKRAMFLSAFAALHDPASRSYYDRCRARGKTHTQALLRLARHRISVLFAMLRDGTFYEPRTPRTA

SEQ ID NO: 98344 - protein, 426 aa, unidentified
MDVVVERCAGLDVHRDNVVATVRFPSETSRRWVHKTRTFKATLAGLSELAEWLASFAVTLVGMEATGVYWKPVFQVLEDRFECWLLNAQHLRNVPGRKTDVKDSEWICDLVAHGLVRPSFVPPPEIRRLRDFTRLRKAQSNERTRAIQRVEKVLQDAGIKLTSVASQSYSKSARAMLEALLSGITKPEELAELAKARLRSKIPQLREALANRFKVDHHGILVAQLLAHIDTLDSAIATLDEKVEAMLAPHKRAVELLCTIPGVALRTAQVLIAECGLDMSRFPSAGHLVSWAGVCPGHNESAGRRRSGRTRPGPGWLTEALTEAAQAAARTKGTYLAAHHAQLRGRRGEPKAVGATRHDILIAYYHIVRDQVPFRELGPDWLRRRHSPEHRARRLQKQLEALGYKVMIEACPEQQGALEQETPATT

SEQ ID NO: 98345 - protein, 315 aa, unidentified
MTKQRPSVNVGIDVGKATLDVYLLERDRMFNVPNEEHAIAALLNRLARYRLERIVIEATGRFEQPFVRAAIAKGLPVVVVSPLKIRRFAGAIGQLAKTDEIDARVIARFASTLKPVAHPTPDAKVQLIKDLVVRRRQLTSLRTMEKNRRQIMPEDLTPSIDRIVALLDEELAGLQQLIDRAVEQHAAWRHKRDLLVSMPGIGLSVASTLIGDLPELGSLNRRQIAALTGVAPYNRDSGSLRGKRRIRGGRAHSRTALFLSAMAAIRFNPHIKRFYERLLKAGKHKKVALIACIRKIVTALNAMLRDNTPWNAATT

SEQ ID NO: 98346 - protein, 360 aa, unidentified
MDTSKSVFQLHGVDAAERPVLCKKLRRRDFLSFFAQLPPTRVGLEACGGSHYWARELTALEHEPKLLPAQHVRPYVRRNKNDKQDADAICEAMSRPRMSFVRIKSAEEQAAQMLMTTRQRLIDHRTQLINTIRGHAAEFGLTAAKGPAHVEPLLARVAKDVTVPALAKELFAIHGQEYDRLKIELREIEAKLKVWHRGNEMSRRLAEVDAIGPIGGCLLAIKAPDPQAFRCARNFAAWIGLTPKDHSTAGKIRLGVITRAGDEALRRTLVVGATSVIKQVRNGKADPSPWLRDLVARKPPKLAAVALANKVARIAWKLMVSGERYDAARAGIVSPTARIAPCSRRQGRCAPPAAVACGQP

SEQ ID NO: 98347 - protein, 420 aa, unidentified
MSSDRNGTLSEAEEKHMTTRPSRLWVGIDASKAHHWWVAIDDTGTTVWSRKVGNDETVILAALSEVRDLADEVCWAVDLTGTAPALLLALLASHGQHVVYVPGRTVNRMSGTYRGEAKTDARDAYVIADTARLRQGFAPVEVPTDLAADLALLTTHRTDLIADRVRLFNRLHDVLTGISPALEAAFDYADHKGALVLLTGYPTPAALRRCGRTRLTRWLTARGVRHPETLALAALTAAHAQHIRLPGQDTAAAITADLATQVLALDDRLKQLDRQIGDAFRAHPQAAVIESMRGIGPILGAEFLVAAGDLAAYPDAGHLASAAGLVPIAKDSGRRTGNLHRPQRYSRRLRRVFYLSAQTSIIRDGPNRTYYLKKRAEGHKHIPAVIALARRRVDVLWALLRDNRPFTATPPARTHTAAAA

SEQ ID NO: 98348 - protein, 408 aa, unidentified
MEVLYPRCAGADVHKDSVVARIRCVSEPRYDEVRTFATTTSALMELGEWLRSHGVTHVAMEATGVYWKPVWHLLEGDFELILANAQHIRNVPGRKTDVSDAAWIADLLAHGLIRASFVPPAPIQELRDLTRTRKQLVREISQHSSRIQKVLEDANLKLGSVLADVLGKSGRAILQALIDGETDPQELADLAQGHARKKRAELVEALHGRIRDHHRGLLKVHLDLVTALHHALAELDASVGKALASIQESARLLSTMHGVSDITAHVIVAEIGLDMTRFASDAHLRSWAGFCPRNDESAGKRRSTRVRKGAPWLKTTLITAAWAAVRVKDSYLQAQFHRLRARRGAKKAILAVAASMLTAAYHMLKNGIEYKDLGAAHFARRDRGKMIQRLVRRINDLGCQVQLTPLAA

SEQ ID NO: 98349 - protein, 346 aa, unidentified
MLYAGLDLSRKRLDFHLLDGEGATLEVGAAPPDGDGLDGLTERLARYGAPIRAAIESMNGARFVHDRLELAGWQVEIADAQKVKGLAPLACKTDRIDAWVLAELARRDLVPAIWLPDPLVRAERERARWRLHLVRHRSSLKQRVHAVLLTHGKPCPVSDLFGGRGRRLLAQLGLPEPWQGTIDASLRLIDELDREIGESERELRRLGADHHYVPLLCTVPGISWVLAYTIAAELGEIGRFPTPRKLVGYSGLCPRVYQSGERDLRGPLAKQGPRYLRWALVEAATHACTHPAYRQRYTDTKARIGKQRGAKVAQVDLARRLAEAIWHMLTRNQPFAPKGATDPLAA

SEQ ID NO: 98350 - protein, 349 aa, unidentified
MLYAGLDLSRKRLDFHLLDAEGATVDVGASPPDADGLDRLTERLERHGAPIRAAIESMNGARFVHDRLELAGWQVEIADAQKVKGLAPLACKTDRIDAWVLAELARRDLVPAIWLPDPQVRAERERARWRLHLVRHRSSLKQRVHAVLLTHGKPCPVSDLFGVRGRQLLAKLGLPEPWQGTIEASLRLIDELDREISESERELRRLGAEHRYVPLLCTVPGISWVLAYTIAAELGDIGRFPTSRKLAGYSGLCPRVYQSGERDLRGPLSKQGRATCAGHSSKPRPTPAPTPPTATATNRPRRASANSAAPRSRRSISPGDSPRRSGTCSAAANPSLPKAPPTPWPPDGP

SEQ ID NO: 98351 - protein, 368 aa, unidentified
MSHKSAPPTVSTIGIDLGKNSFHLIGLDQRGAIVWQLKCSRAQLERRLVNIACCLIGMEACSGAHYIARQLAALGHDVRLIPAQYVKPFLKGHKNDYRDAEAIAEAVQRPTMHFVAIKTPEQMDLLALHRVRSRLVGQRTGVINQIRGFLIERGIIVRQGVVPLRKALPDILSSNDDALSPRMVNLIAELIQDWRRLDERIAAVSAEIESLAEQDEACQRVMTVPGVGPIISSAVVAAIGNGAGFTQGRDFGAWLGLVPKQESTGDRTRLGQISKRGKQHLRTLFVQAAHAVLARRPNAEYGAAEYPVRLYEHSLACVEAINDFMMAVRDRRRPLCSIDEAGRTVLACLAGVESYRTNRPVAVLPLAS

SEQ ID NO: 98352 - protein, 337 aa, unidentified
MMYSGIDLHSNNSVVAVIDDGDRVVAQKRLPNDIGKITGFLARWQDELAGVVVESTYNWYWLVDGLQDAGLHVHLANTAAIKQYEGLKHSGDETDAQHLAHLLRLGILPTGTILPREHRVVRDLARKRMQLVQSCTTHVLAVENIMARQLGGRMTSNQIKRLTDDTIDSLPMAADVGLAIKANVAVIATLQSQIEVLEKRLQERVRPRPQYALLTTVPGIGQTLATVIVLETGPIDRFAEVGNFASYARCVDSVHTSNRKKKGEGNVKNGNKYLAWAFVEAANFARRFCPEAKRFHERKKAKTNNIVATKALAHKLARACYHILKEGKPFDVTRCFA

SEQ ID NO: 98353 - protein, 341 aa, unidentified
MSEYVGLDVSQKETSICVVDGDGRIIAEGKVATEPATIAAFVAKRAPTAIRVGLESGGLSEWLHDGLQACGVPAICLDARQAHAKLSGNKLNKTDRNDARGLAQLVRTGWYQEVCIKSASSRRVRGLLASRGLLIATRMNLENQIRGLLKGAGLLLGKPGRQGFARRAAALSADVPHLTALIGPLLAVRETLIRQLAILDKALRAEARQDAVVRRCMTMPGVGAVTALAFRAVIDEPTRFAGSRTVGAYLGLTPRRYSSGEIDYSGRISKCGDRWLRSYLFEAATVLLSRVSRWCALKAWAVRLAKRIGLKKAKVALARKMAVILHRMWIDGTDFRWTAAN

SEQ ID NO: 98354 - protein, 415 aa, unidentified
MALKIVYKICCGIDVHKNFVVACIAKTDKQGITTYERHHFSTYTKGLKQLLKWLLDRNCKDVCMESTGKYWIPVYNVLEHDCSIVLAHPKYVKAIRGKKTDKKDAKWIADLFKHDLVAGSFIPPADIRQLRDLMRYRFKLTCFKSSEKNRYQNCLTVSNIQLASVVSDTFGKSSQKIIAKILENPHNTSFDIESLIHGSMKDKLPELELAIDGYITPEQAAKLKIIKEHFDNLESRKAELEELILALANPYQQEISIILTAPGFKNTFTAIGIISEIGTNMEAFPSAKHLCSWAGLTPTNNESAGKKKSVRVSKAGCYIKPLLVQCANAAIKSKKHPEIRDRYLRIKKRRGHKKAIIAIARMLLTALYHMLKNGENYNSDLYQKSDILPTTREITVEQAILMAQFQGYRIKSATE

SEQ ID NO: 98355 - protein, 415 aa, unidentified
MEIIHTHCAGLDVHKKTVVASIIVPDGNEGLRKETRTFGTMMSDLLALSDWLMVFGVTYVAMESTGEYWKPVFNILENNFEVLLVNSQHVKAVPGHKTDVKDSEWLAELLRHGLLKASFVPPLGQRELRELTRFRSTFVRERATLVNRVQKVLESANIKLASVASDVMGVSGRAMLEAIIAGQASPTEMAELAQKRMRQKRDLLAKALEGRVKPHHRFVLTELLCQIDSLDETIERFNQQVEEYCHPFEEAVVWLDTIPGVGREVAEIIVSEIGTDMGRFPTEDHLASWAGVAPGNNESAGKRRSGKTTKGNKALSTALNQAAHAAAHTKDTYLSAQYRRLAARRGKKKAIVALEHTILVIAYHLIKRKETYRELGGDYFDKRRPEATVKRLVKRFEQLGYSVSLQQPATPYAAG

SEQ ID NO: 98356 - protein, 339 aa, unidentified
MLIIGCDYHPSMQQIAWVDKETGECGERRLLHRSEAEEFYRQIKGKQVRVGIEATGHSRWFERMVAELDFELWIGDPAEIRAKRVRKQRNDRFDAQHILKLMLEGTFPRIWVPTAENRDLRQLVWHRHRLVGMRTRVMNQLQAVAMNEGIRRKKRLWSEKGRQELESLSLMPWTTRRRQELLQLLDQLDPNVDQLSQAIEQEAERMPEVKLLMTHPGVGPITALAFVLVLGTPERFGCGKQVASYLGLIPCEESSSEHWRLGHITKQGNKLLRFLLGQSAQSAARCEEQWHRQYAHLSMRRNKLIAKVALARKLAVRLFWMWRRGWDYQQLKKFGSHAG

SEQ ID NO: 98357 - protein, 365 aa, unidentified
MTTQEKQRTLFVGIDVHKDTHTAVGLSPFGEKVFEMTIGNEPDDFISLVEKTKVEANKVGLIPSFGLEDVHSWGERLSSFLVEEGLPMRAVAPVLVDHCRSKMTHPEKSDPLDAQGVAEVMIQKIDTLPIYTITEDAKKAKNIRELSLEREWLVKERARLKNQLHILLHRIHNTGYRVKFKDPFSLKAMRYWMKNMPKSTDSILAGRMKRAIRRIRDLKSEILEIESELDILIKNSGHTITTANGCGTIIAAEIIGEIGDIVRFKTPGALAKYAGCAPREHSSGKTIRWRKTRSGNRRLNRAFHRMALSQISRMGNDSGREYFKRKISEGKTKAQALVCLRRQMVSIVWIIMKHKTAYVYPQKND

SEQ ID NO: 98358 - protein, 387 aa, unidentified
MEARIVNTPSAALDNEPARCFFAIELSKTNWLVAAQGPAGNVSRYQLPGCDANALLELIERIRARVKRETGRPVEMVSCYEAGYDGFWLHRFLVARGVRNCVIDPASLQVDRRARRAKTDRIDAERMLRALIRYLRGEPDACSVVRVPSVEEEDAKRLHRERHRLVAERVQHVNRIKSLCALQGIYDYQPLRPDRMERLDHLRTGNGQALPVRLKAEIERELERLQLVLEMIVSLEAERNAITKDKAPTAHLHADKIRKLVRLKAIGPEFSTALVGEVFYRQFANRRQIGSYVGLTPSPFSSGAIARDQGISKAGNPKARTMMIELAWMWRRHQPGSALTVWFNERVGSLKGRPRRIAIVAMARKLLVALWRYLETGLVPTGAILKV

SEQ ID NO: 98359 - protein, 304 aa, unidentified
MNGIGIDVSKRQLDVGTTDGKTLQVSNSRSGFAELDLWLQGHPAVQIVLEATGGYEQPVLDFLHNAGHPVVRANALRARKLAQGLGHMAKTDRLDAYALAKMAALVKLRSYQPLEPWQREMRDFVRARRQAMHALTVARQQQEMVGNRELRRLLQANITCLQRTVERLGKRISEQVSKQPQLAVLKSMKGVGPGLQAVLASYLPELGNISGKAVASLVGVAPMSHDSGTMRGKRSIHGGRAEIRQVLYMASMSAMRHEPRLRDFYQSLRARGKEGKVAIVAVMRKMLVILNARMRDAQGGSIPA

SEQ ID NO: 98360 - protein, 314 aa, unidentified
MNNDLFAGIDVSKATLDLGTTESEQSVSFANSSDGIAELTAHLDALQPSLIVLEATGGYEAVAVASLAAAQLPVVVVNPRQVRDFARSAGRLAKTDAIDARVLARFGQVFRPEPKPVPDAQASEIKALVTRRAQVLEMITAETNRLHAAPRDVQQDIRLHLVFLKERLAHIDGDLSQFIRNSPVWREKDQIIRSVPGAGPVLSATLLAHLPELGSLNRRQIAQLVGVAPINRDSGYYRGSRHIWGGRSKVRSALYMATLVASRYNPVIRAFYLRLLEAGKAKKVALVACMRRLLTILNAMLRRGANWNPTPEAA

SEQ ID NO: 98361 - protein, 413 aa, unidentified
MTVFCGIDWAEDHHDVALVDADGKLIAKRRIGDDADGFALLLQLFADAGDSAESPIPVAIETGRGLLVACLRATGRKVYAINPMAVSRYRDRHSVAGKKSDAGDALVLANILRTDLAAHRPLPADSELVQAIAVLARAQQDAVWERTCAHNKLRSLLREYYPGVLAAFADKRDGLLRPDARAVLAAAPTPAAGAALTKPQLRAALKRAGRHRGIEAEAARIQAALRTPQLQQLPLVEKAFGRQALALLRLLDAACANAEELAEATSKHFDRHPDAEIITSLPGLGSLTGARVLAEIGDDRSRFADARALKAYAGAAPVTRASGKSLTVMHRRVKNQRLASVGYLWAFAALTASPGARTHYDRRKTAGDRHIAAQRNLFNRMIGILHHCLETRTRYHENTAFPNTDTTTPAAAA

SEQ ID NO: 98362 - protein, 410 aa, unidentified
MVKENFIYVGIDLHKETHTAVMIDCYNQKLGEITFPNRPADFPKLVTKVKKCNTDGKEVVYGLENAYGYGRALAVWLIDKGYLVKDVNTAISHRQAKHRGAMYRKSDSDDAKAIALATLNMLDKLPDACPNDAYWSLGQLVHCRDNIMKQRTRLVNQLHEQLRIAYPSYKQFFNDISRPTALYFWEHYPSRKYLKGKSVEDLRAELVPVSHNKCSTKTCEKILDAVASDKVKNNAYQDARDMVTLSIVSDLQHYDSQLAEVDKMLEQMYKMLGCTLTTIPGVNVITAVKILAEIGDIKRFSNANKLAQFAGIAPLHLSSSGKGKDVATKQGNRRLQATIYFLAIQMVQVSSKGTPRNSVVRAYYEKRKAEGKTSQQALICISRRLISIIYGMLKHGTEYRMPVVESAGEK

SEQ ID NO: 98363 - protein, 442 aa, unidentified
MMGLSTTHQGGALTMKFKQSDAQNQRIQQITTSHLVIGIDMAKETHVAQATNFRGIVVSKRHLSFSNSIEGFEKLNRWMTELLQKQRLKRLIIGMEPTGHYWFNLANWLSDKGLHVVMVNPATTKRNKENRDNSPSKNDPKDALTIADSVSRGFYYEYTRQSLLFQRLKTIMSDREFWVTNSVRLQNRIVRWLDIRFPEYPSVFKDWTCKRSLATLKTFPCPQDLENYRVPDVIDAWRVHMQRAGGSTGFEKAAQLIARAKCSVGEQAAAEEAKADLRRLIEEFERVTTMLEQIEMDIEVLLSEIPMAQQLRTIKGLGKIFTAAILAGTGDLRQYAHGRQVMRKAGLNLAESSSGRRKGKIVLSKRGDSALRKYLYLATVQLVWNNPVFRHLHEHNVQEKKMKKQQSIFKLIGKLARILVGIVQRGEKFTPEKTVLTWSKAA

SEQ ID NO: 98364 - protein, 344 aa, unidentified
MEPMYYIGLDVHKRKISYCVKDGSGKVFAEGSLTATRLDLDLWMKTLPQPWSAAMEATMFTGWIYDHLKPHAAALKVAHPLMLRAIAAAKKKNDRIDASKICDCLRCDFLPECYMAPTAIRERRRTLRYRNLLVRQMVQMKIKISSLLMEAGVSYNKQRLHKAGYFRELLTSNPDIDEGLGSLLRLCRETVVRLQKTESAMVRSLERDSLLIDRVERLMTIPAVGPITALTWALEVGDVQRFSSIKKAISYCGLCGAERSSGNTVQRTPLSKQRNKHLQTTLIEAAKMAPRNSADLAMLYDKEKQKGNANRATLAVARKLVAYLMAVDRRQRNFQAVESDVIAA

SEQ ID NO: 98365 - protein, 397 aa, unidentified
MHTERFVGIDIHKRHVVVAAVDKQQKVLLSPKKISNQQFASWAHNHLNPSDQVALEATSNSWAFHDQLEPMVKGVFIANSYKLKLITASSAKTDKHDAMVLAKLLAANLLPSVWVPPQHVRDLRNITQHRWQLIQVRTAAKNRLHAILHQHNIQIPTGSPFQSSSEEWWQNLAISPVEQLQIKHYWLTIHHCNDLIQETEATIAQLSVSDDWSEEMTFLIQLPGIGLYTGMTILAAIGDIRRFPSPRKLSGYAGLGARVRATGNTVRTGKITKQGRKELRTALIASAWVAVRFSDYWSTRFQALAKSIGTNKAITAIARKILVVIWHVLTKRQADRFANGQAVARSLMGWCSLHHLASSQGLRRVDFVRQRLNQLGMLHKVSSFRANGRTYHLSASP

SEQ ID NO: 98366 - protein, 484 aa, unidentified
MKTRRAKASRSIKKPAGQKGPIKAATKMPVINRHAAGVDVGSVEHYVCVPEDAVPAGQSNVRSFRGFTGDLDQLVEWLQSCAVTTVAMESTGVFWIALAQKLETAKIEVVLVNARHLRYVPGRKTDIKDCQWLQQLHSYGLLNGSFRPAQDICCVRSLMRHRANLTQSCGQEVQHMQQALQQMNVHLHHAVSDLTGETGLRILEAILAGERDPKKLVELRDCQCSKTTAQELEAALKGDWREEHLFVLKQAVQTYRHLLKQMEECDAQVEKALAAVVIPAPTEPEEPAPKNPKAKEDAQPKKKRFQHRKTGTGLKRDLSAELKRLCGVDLTQVMGLNVLGVLIILSEIGLDMSRWRGEKAFCSWLGLCPGNKISGGKVLSSHTAHVVNRVAILLRTVAPSVGKSDTWLGIFHRRMRARLGPAGANTATARKLAGLIYHLLKYKEEYIDVDHLVFVEKIRKTRINRLRKQAEELGLEVVEKQMAA

SEQ ID NO: 98367 - protein, 345 aa, unidentified
MKEFYAGLELATTFFDICVTNFQGKKVFQRSGLSKVEVITKALRECRAKLKGHISLNIESGELSVWGHGLVTPYVDRVVVTDPRQNHWIAKDRQKNDKLDAFKLAELLRMGNYKAIYIDDSEDRRDFKSVVKHYESQSRVRADTMVIIKARLRVFGIICKGSGVFHPSQREQLLNQISSEFKRESILQLFRSFDTATELKLDALRTMKRMSRQFPEVELLTSVPGVGIVNACRFVGYVQNPYRFNNVRALWRYARLGVVQQMSNGRPIGPKHLDQAGCGSLKDVSRKTFEAITRRKEENLFSRAYQESLKRINNSTHARLSVQRKVLSVMRAVWISGTPYRDDLG

SEQ ID NO: 98368 - protein, 417 aa, unidentified
MKNWNEITHYLGFDWAKDHHQVVIVDRQARVVAEFEFEHSMEGWNKWREQIRDYPALAVAVETNQGAAVEQLLQSGVTVYPVNPRCAKAYRQRKIATSNKTDRLDAWCLAEALRVDGHAWRALQPLDSIIQELRLLCRDELRLIAQRTVLINQLQQALTEYYPAALEAFDDWTVPATWKFLERFPTPGALASAGPKKWQAFLHCHKLYRAHTQERRLEAFGKAGQWGSSPAVENAKSLLVLSLVKLLVTLEKQLQEYRKMIEKLFASHPDHDLFGSLPGAGPKLAPRLLSELGDDRALFPDADTLRCYAGTAPVSYQSGQVHKVYLRRQCNKHLRNALHLWTDLSRRWCQWAQVYYKQMRQRHKSHAEALRCLGHRWLKIIWKMWQTRTPYDAEFHMRNQLQHGSWVFQMMTHKTGE

SEQ ID NO: 98369 - protein, 449 aa, unidentified
MMMPQEIEDEEHERVLGRVAAVDVAKASGMVCIRVPHPSRPGKRRTRVWEAAATTGTVLGLAEQLAGEGVEMVTLEATSDYWRIWFYLLEAAGLSVQLVNARDVKNVPGRSRSDKLDSVWLAKLTERGMLRPSFVPPAEIRQLRDYTRLRTDLTRDRTRYFSRLEKLLEDSLIKVSSVASSLDTRSVRDMIEALIAGERDPGVLAGLARGKMKAKHAALVEALTGRFDDHHGELARMLLDQTGALTAQIERLTGRAGELIAGIPAARGVDAGGATGPGAGEGQDAAVRPAIARLDEVPGISRRTAQVILAGTGLDMSRFPAAGHLVSWAKLSPRTIQSGAKSTPGKTGKGSPYLKGALGEAAAAAARTGTFPGERYRRIVKRRGKLRALVAAARSILVIVWHLLADPAARFRDLGPGHYASRTDTGRKTRNHVRQLEALGFTVTLAHAA

SEQ ID NO: 98370 - protein, 532 aa, unidentified
MRKRRGRGRVRGTVHRQRASKALTARVRRVGPECFGILAVDSAKSRFAVLLTDFYGRPRMGVVEVDNTAPALDALVAQVKACCAEHGLKDLVVAMERTGRYHMPIRQVLEKHWDVQIIHPFATKQLRQPADPGNKTDPTDLRAIVRATIVGFGTREQELPPGWVDWRLVSREREALVRQRAWTRVRLHMRIEALMPGYPALFGNLWTSPLAVLWAEHYGSASALVAAGEPGLRACGHEAGALVQARTVAKVLQWAAQAAPADPGAAAGQRLLRDQVGLLRPLEAQIEAYERQLVVPLVQTPFVLLVGIPGINVASAASYGAELGPIEHYVHPKKITGRAGIYPSRYQSDETDLADGPLVGHRNARLRDAILEIAHNLLAHNDHVKAWAAIRRLRGWPEAKVHIAVASKFVRISYWMLAGRTVFEHPCLGGRDAVVRKLYRFARAHRIPLADTHTLLHRAAQQLPADVRHEEAHALAEALPRRSRRGGEPQRIGTLLRDIIAQLAPGIHLETQRRPVRPCPPTEGPSLNAQDC

SEQ ID NO: 98371 - protein, 411 aa, unidentified
MKALYERCCGIDVHKRIVVACLKCGKKQEIREFGTTTEELRSLTEWLSDSKCQMIAMESTGSYWKPLYNIFELSSLAAIVVNARDMRNVPGRKTDIKDAEWIADLLQHGLLRASYIPNREQRELRELSRYRKSLIEERARELNRLQKMLEGGNIKLASVVSDINGRSARNLLTHMLKRDTSLTKEEVSSLVRGRLRHKVESIMKALDGFLTPLQKQLMLKVVDHIDDMTKRIGEMDDLMNQYLTEYHEAIQKLDEIPGIGRQSAETILAETGLDMNRFPTAKHFSSWAGLAPGNNESAGKRRYGRTTKGNITLKTTLIQCAKAAVKKTDSFLSAQYQRLVVRRDTNRATVAVAHTMLISIYHMLKNNVPFTDLGADYYNRFNTQSKIQHYLKKLKQLGWELDSATIPTAAV

SEQ ID NO: 98372 - protein, 501 aa, unidentified
MANIHWRGLDRHSPKSESKRLPPRAAVVPVTINEEESSMKTQRRSTKKKRPSNRAGSGLRVIREKVAGIDLGAREHWVCSPVLGASERVVKVYTTTTPQLNQLADWLEQESIESVAMESTGVYWIPLYEILEARGIEVVLANARQLSYVPGRKTDMQDCQWLQLLHSCGLLRGSFRPSDSICQFRALQRERANLVGEATRALQRMQKSLDQMNIQVHHAVTDLAGKTGMAIVRSLVEGERDPHQLAALRDPRCRKSEAEIAEYLTGNWRSEHLFNLKMALHLYDQVQEILTAYDEEIKRILSQFQPPEAAGLEPPPNPNSAKEKALRQRGDQPLRTALWRFSGVDLTRIDGISSTAAQVVLSEAGYDLQAFPSEGNFVSWLRLSPNTPFSAGKPLYKKNKGTGSSRIAAVLRMAALSLKNSPTAMGAYYRRMARRKTGSIAVFATARKIATHIYRMLRYGQDYVDEGAKAYEERFRQQRMKSLKSNAKSMGYKLVPLAETG

SEQ ID NO: 98373 - protein, 393 aa, unidentified
MDYVGIDIGKNNHVASMMDASRKTVFKAYKFANTREGAQSLLEKIQRHAADRTQVEVGMESTGHYWLALYSFLFDAGYVLHVINPIQTDGWRKGVEIRKRKTDDIDSLLIADLIRYGDFVETKRADEGLFSLRTLTRFRSYLVDSIADLKRKVICVLDQVFPEYESVFSTVFGTTSKEVLLTYSTPAELETVSVEQLTELLAGLSRQKCGAEQAQRLSQAAAHSFGVTFCRDAFTFQLRALLNQMNYIEQQVTDTERQIKAIMDTLASPITSITGFGPVLGAVVLGELGDISRFDSGSKLVAYAGIDASVSQSGQYESINNRISKRGSPYLRRALYQAAMVAAFHDPDLAAFYQKKRVEGKHHNVCIGAVARKLCYIIFTILKENRPYVKRQP

SEQ ID NO: 98374 - protein, 367 aa, unidentified
MEHYVGLDVSLKLTSICVVSETGSVVQEGVVDSDPEAIAAFVRSKAPKAVRVGLETGRTATWLWTELKRLGLSVVCIDARHARAVLKMQINKSDRNDAAGIARIMQTGWFKEVRVKDVDSHSIRALLASRALLVKIKRDLENQVRGLFKNLGLVIGRATFNVFAVRAEELIENRPELVAAVRPLLEARKAIERQVSDLDRKVLRLARHDAEVRRFMTAPGVGPITALCFKATIDDPTRFKRSRSVGAYVGLTSRRHSSGEVDWSGRISKCGDAMLRSYLFEAAGVLLTRVPKWSALKAWGMKLVKRNGLRKAKVAVARKLAVIMHRIYGPAVRCKGIRTEWSFWSALIYPASRGSSCSGPSWLSAHT

SEQ ID NO: 98375 - protein, 343 aa, unidentified
MNEISMIGLDLAKNVFQVHGIDGSGKVVLQRQLRRGAVEKFFAKLSPCTVGMEACGSAHHWARVIGRYGHDVKLMPPAYVKPYVKRNKNDGRDAEAICEAVSRPTMRFVAVKSVEQQAMLSVHTTRALLVKQRTMVANALRAQLNELGIVAAQGREGLHELMARLEAPSEEIPEIMRSALLMLVEQWHALDAKERVLEKQIVKAVRCDQEARRLMEAPSVGPIIASMVLAKVSDASVFRSSRDFAAWVGLTGRDHGTGGKHRPGHISKQGDRILRTLLINGASAHLRQQMRRGVSDPWLRELLARRPYKVAMVAFAAKTARIIWAMLAKGEAYRDRASASAAA

SEQ ID NO: 98376 - protein, 338 aa, unidentified
MCLSLELSSVCAVDGTGRIVREAKVASEPDALVSYLREGGLVLTRVGLEAGPLSQWLHAGLTEAGFETVLLETRHVKAALRARAVKTDRNDARGMAQMIRMGWFRPVHAKTIPAQEIRALLVARKQLQARLNDIELGLRGILRGFGLKLGDIARGRFEARVRELVAGQATLEGLAAPMLRARAALRAEFAALHREVLRIVRVDADCRRMMTIPGVGAIVAVTFKAAVDDPGRFRRSRDVGAHFGLTPKRYQSGEVDRSGHISKTSDAQVRTALFEAAHVMLLRVQRFSALKAWALRVARARGLKRAKVALARRLAVVLHRLWVDGTEFRWGRGAEAAA

SEQ ID NO: 98377 - protein, 410 aa, unidentified
MLFIGDDWAEAHHDIEIEDEAGRVLARRRLPEGLAGITMLHDLVAEHLDPAAEPDQVLIGIETERGPWVQALLAAGYVVFAINPLQVARYRERHSPSGAKSDAADAHLLAEIVRLDRAHHRRIAGDSQIAEHVKIATRTHQSMILSRVRQVNTLRSLPREYYPAALAAFGTDLAGRDALAVLTAAPSPDLGRRLSQSRIETLLRRAGRQRNVSSTAATIRAALTSEQLTARPGVVPAYTASASALLAVLSTMAAQTEVLAGQVEQGFGQHPDVEIYRSQPGLGVILGARVLAELGDDPGRYIDAKAWKNYSGMSPITKASGTKRGCPGPVRPQPPPRGCAAASRVRRVEQLPRRPRVLRPTTRPGATHYRALRPLANRLVGILHGCLRTHTLYDEHLAWHTGPDHLSSAA

SEQ ID NO: 98378 - protein, 428 aa, unidentified
MTCKDILKLSEGTHVVTVNTERCMVIRKYVVTSLANRGFTCHSKVATNKQELPHTRGGHYMNSIIYVGMDVHTTNYTLCCFSPDKDRVFAVAQVEPDYLNILKYLKRVEKNIGKPCQFLCGYEAGCFGYSLYHQLTESNVECVILAPTTMMSSAKQIKTDRRDAEKIAKCLAFNTYKPVYIPTEEDNAVKEYIRMRDDAKSAAKRYKQQILSFCVRHGKCFEGKGHWTNKHRAWLTSLDFGNTLLQETFQEYLRLLDQTLESLERFENKINELANSERYAERTRRLNCFLGIANVIALAVLAEVGDFNRFSSASQFASYLGLVPGEYSSGDKRCRSGITKAGNSHIRKLLTEAAQCYSRGKTGAKSVTLKRKQAGNSPDIIAYADRANDRLRKKFRKTASHSNRNIAATAVARELACFIWGMMTDHTA

SEQ ID NO: 98379 - protein, 367 aa, unidentified
MASIAHREFVHLGMDVSKDSIAVAVLAPDRDTAEVDKIFHDTDSVRRLVKRIGRPKGIWACYEAGPTGYDLQRLFASMGVRCDVVAPSLIPKGSGDRVKTDRRDARRLAGLHRAGQLTPIAIPTPEQEGVRDLCRTRGDMVQDLTRARNRLSGFLLRHSVVWRGGSTWTERHRRWLNTLSFDDPAMAATYSHYLATVKLRDTALEAVEHDLLSWCDTEPFGHQVPRLAAYRGVTRIGALCLAAEVFDWRRFPRARPFMSFTGLVPGENSTGLTQRRGSITRAGNAHLRGQLCEAAWAYQHTPNVGVGIRERQLGVPPETVARSWAAQVRLSRRFRQLATHKNVRSVVAAAIARELAGFLWAEMVAEV

SEQ ID NO: 98380 - protein, 346 aa, unidentified
MEHHAGIDVSFELSSVCVVDSQGKIVKEAKVTSEPEALICFFKGLGFPVKRIGLEAGPLSQWLHAGLAHGGFEAVLLETRHVKAALSAMTVKTDRKDARGIAQLLRMGWFQPVHAKSIGSQELRALLVARKQLLGRLVDVELSIRGILRGFGLKVGQATRKNFEVRIRELVTGQATLERIAGAMLSARAALRAEYEKLHKALLAIVREDAVCLKLMTVPGVGPLVAVTFKSAVDDPSRITKSKAVGALFGLTPKKYQSGEKDVTGGITRAGDEMVRTALYEAANVLLSRITRFSKLKRWGMDVAKRRGSKRAKVALARKIGVILHRMWVDGTTYRWTEAKPIAAQA

SEQ ID NO: 98381 - protein, 410 aa, unidentified
MANLLVGIDVSLKNHAVQFMNDSGDALASFSVPNDLNGAEVLSQRILHSADKYSTDMVRVGMEATSNLGWHLAHFLNSRFHDVDRFKAQVFVLNARKVARFKKGYDSLPKNDRIDAWVIADQLRFGRLPHALTSCIQYEALQRLTRTRFHLMKNIARDKTYFLNQVFLKFSGLRQDNPFSNLFGATCLALLQELEPEQIVSMSITELVDFLKEKGKNRFENPEELAAYLQKLARSSYRLDKAMADPVNLSLSVMLSVIKTMEKEVTKLDKEIEKLMKSIPETLSTVKGIGPVFAAGIIAEIGDIHRFSDHNALAKYTGLVWSQYQSGEFESEETKRLRTGNKYLRYYLIQASNSVRRHDSDYATFYAKKYAEVPKHQHKRALVLTARKLVRLVFMLLKTKQLYTPPERRG

SEQ ID NO: 98382 - protein, 387 aa, unidentified
MQKPHDDSKACDATFVQDSTLVVVIEMGLSSWLVAGMIPGVSREPLKKIDPKAEELLQLLYRWRDEAIAAGKEITRIAVAYETGRDSFWLARWLRKRGIDAHVIHATSVAISREHRRAKTDRIDTAMLRRGFLGWLRGEPGHCSMAIVPTVAEEDAKRPHRERDSLVHERTSTINRMKSILIQFGVRNFNPVLRKAREKLDAVRTPEGIPLPPNTVAALRRHIERFCVINEQIKAIEQTRLQHLERDPADRFNAMVFLLVRIIGLGVETAEQLVREILSRQLRDRKAVARYSGLPGSPDESGSKRREKGLSRSGNGRVRKALIQLSWRMLQFQPKSALVLWFKKRTENVQGSRKPMIVALARKLIIALWRYVNTGVVPEGFELRPAA

SEQ ID NO: 98383 - protein, 456 aa, unidentified
MAKVRSWVGLDVHAAKVIACVVDAESGEMTVHRLSGATAEVVVFCAGLPAPSCAAYEAGPTGYGLARALVAARVGCVVAAPGKIERPARDKVKTDARDAERLVRLLMIDALHAVKVPTPEQEALRDLVRAREDVRVDLMRARQRLSKLLLRHDVRYEDTTSRWGERHRRWLAQVDLGQPGAQATLSDYVGAVEALELRRGTLEGAIAALVPDTPCAHTVARLRCLRGIDTLSAVGLAVEIGDFERFQRPGQLMAYVGLVPSEYSTGQTRRQGHITKSGSQHARRLLVEAAWHYRRPPRLGSTLQRRQQDESQVVVAIAWKAQQRLHHLWRRLDSQRHMRRTIVAVAVARHLAGFCWAIVNHDDHQELADQPPRRSEPSRSRARRRVADAGLPSSASRSACGRPTGDSSTGHPLCGSEVGPGGPTTGKAVAKSNALHAGDRPTRARRSHPKPDTATR

SEQ ID NO: 98384 - protein, 462 aa, unidentified
MPGREDSETGESSRKQLQGLPVIRRNVAGIDLGSERHWVCAPTRDGNGREITSFGATTPELLRLAEWLKARQVESVAMESTGVYWIAPHEVLEARALQVLLVDTRQLARVPGRDKKTDPSDCEWIQRLHSCGLLRGSFRPEEAVCMLRTLVRDKANLVAESGDWLRRMQKSLDQMNVRVHRAVSDIDGVTGMAILRAIAAGERDAQKLAQLRDRRCSKTQQEIAEQLTGHWREDHLFSLQQALKMYDAVQERIAAYEQEILRQLGEMEEPGQRGQTAPPLYNANKSKAIKKRGQESKRQALYRMSGVDITQIDALGVETVEVVLSEYGPDLSRFPTEKEFVAHVTLAPRVPSSGGKPLKKKKRNSASTRVAAALRMAALSLRHSQTALGAYYRKLAQRLGGDVAVFATARKLATLIYRLLRWGQPYVDEGAAAYENRYLQQRIKTLTAKAKELGYELTAVNA

SEQ ID NO: 98385 - protein, 366 aa, unidentified
MKKHTSKKQTTRKGTAQETFAFYIGIDLGDKKSGICVLDEQGELQDQVRRRMNAQEVQTYFGSRARSRVAMEAGAQSRWVAEVIERCGHQVYVSNTRQVPYIHQSDAKNDPGDAYKLAELVRFQPRLLHPIQHRSQEAQADLSWIRAREVLVGSRTQIINAIRGMSKAFGERLQKCSTTSFTGKRGDQIPAPIRSAVAPLLETIDHLNEQISYYDQMIEQVARTRYPRHRLLDQVQGVGVHTALAYMLTIGDPERFDKSRAVGSFLGLRPKQKDSGERKPQMGITKAGDEYLRKTLVNCAHYILGPHGADSDLRRFGLRICERGGKNAKKRAVVAVARKLAVLLHRLWISGEVYDPLRNRQVAAAA

SEQ ID NO: 98386 - protein, 345 aa, unidentified
MNILKQTVGIDVAYKTFDARFGTTNTQQLITLSPSKSFKNSPAGFKLFLQWLKKYILSNDIPLVFVMEATGVYYEQLAHFLHSHGYQVAVILPNKIRNYAKSLESKSKTDPIDAATITRFGLERKLSLWTPPSDTLKTLRDLCREYHCLKANCTQIKNQLHALKSSFKPHRESFKRKTQLLKFLERQVALIKKELLALVKTEPDLAQRLKNIKTAKGLGYITILTVLSETRCFQLVTNQKQLASYAGFDIVFNDSGLKKGKTSISKKGNTFIRKALFMPALSACRANPHMKELYKRLVAKGKNKKLAIIAVARKLLLLIYTLWKSNSVYIPDYKPLHCAAQSLSS

SEQ ID NO: 98387 - protein, 436 aa, unidentified
MTADGATARATKSNKMKDWNEITHYAGLDWARDHHDIVIIDRQGQIVADVRIQHSLEGWKEFGCQIQNYPALAVAIETAQGAAIDQLLQLECTVYPINPLSAKGYRTRKVPSGAKTDRLDAWALADALRLEGQHWKALRPLDPLTQQIQLLCRDEMGLICQRTALVNQLQQALCEYYPAALEAFDDWTRPYCWDFIVRFPTPERLVSAGRRRWENFLHTEKIWRPETASKRLEIFKRAQQFCGSAAVTAAKSLLAVSLAKLLKALQLQLDQYRQQIESLFKKHPDHDLFGSLPGAAQTLAPRLLGEIGGDPQRFESTENLQAVAGTAPVSFQSGQIHKVRVRYQCNKVLRQIVHLWAQCSLRRCTWAEVYYRQKRAEGKSHACALRCLGQRLLKILWRMMQTRKPYDADLHARNQKQHGSWVLKLMKPTAPVNTTS

SEQ ID NO: 98388 - protein, 423 aa, unidentified
MKLATEHRFTALVGIDWGDRKHDFCLQVAGSEHRESGVLVHSPEAIARWATGLYSRFGGPIAVCLEIAKGPLVHALQRHDFIVLFPVNPATLAKYREAFVPSRAKDDPTDAEIALELLLRHRDKLQMLQPQSADMRTLATLVEQRRDLVGDKTRITNRLNSTLKEYFPQMLDWFEDRDTLLFCDFLQRWPSLKHVKRARQATLQSFFSAHNLRRARLIEERIHSIRSASALTNDPAVIGPHQLLVQALVAQLRVTLQAIDDFDAAIIEVAERLPDYQLFAALPGAGSILAPRLLVAFGEQRERYRSAAELQNYAGVAPVLERSGNKCWVHWRLACPTFLRQTFVEWAGSTIPRSFWAGAYYQRQRAKGCSHQAALRALAYKWIRIVYRCWQTRTPYDESVYLNALKRRGSPLIAHLATTTQVT

SEQ ID NO: 98389 - protein, 455 aa, unidentified
MARKRKSQTQAKHSQRIQQNNAAGIDIGATSIYVAVPWDRDPQPVRCYQTFTEDLHKIAEWLRECGMETVAMESTGVFWIPLFQILEQYGFQVCLVNAHHVKNVPGRKTDVCDCQWLQYLHSVGLLQASFRPAQEVCALRSLLRHRDSLVQMASADAQRMQKSLDQMNLQVHHVLSDITGLSGVTILDAILRGERDPLKLAELRDGRVKASEETIAKSLVGDYRPEHLFTLRQSLEAWRFHRKLIAECDGELETYLACFTSKADPKQHPLPPTKKVASRTVHGRPGFDLRSEHYRILGVDLTEIPGINTLTIHSVLAEVGPDLSKFRSAAAFASWLGLCPDNRISGGKVLKVRTRHVQNRAALALRLAAHTLHHDRSALGQFFRRMRTKLGAPKAITATAHKLARILYHLLTTGQPYQESIFAEWEKQHRQRTLSRLHTQVQALGFRLVPIELQA

SEQ ID NO: 98390 - protein, 352 aa, unidentified
MNHYIGLDVSMKETSICVIDETGKIVYEGIEESDPTKLVTHIKALKLNVEKIAIESGSISHWLVSQMQKQGTPVICVDARHLAAILSLNVNKTDKNDARGIATALRGGLYREVHLKSQVHVDVCSLITARKTLVNQRTKLKNTIRGLLKSYGIRLLTTGTNSFSEKVNESLQGLPFPPATAITAVLKGFQALDEQVLKLEKQIKIEAQNDPDICLLMSIPGVGPITALSFKAAIGDPARFQDSRFVGAYLGMTPHQYSSGETQRLGRISKRGTAAVRSLLYEAAVVMLTRTKVWSKPKAWALKILRKKGMKKAAVALGRKLAVIMHRMLITKQAFKLGNPSDEKDQPSIKVA

SEQ ID NO: 98391 - protein, 407 aa, unidentified
MKHVIALDVSKGKSTVAIYNGYKQCEFEGELYHTRVDFEHLHQRIEEIKILDGHAPEIVFEATGIYSKPVEKFLRDYGHIYCRMNPLEANQQMASMRRYKTDISDAHELAKTHFKMEREITYVQDAYYDQMRAITRYYDEIDGEIILLRSRMHAILHISFPELEQLLTPSSALFLNFVQLYPHPALLMAHSKTIIKNRLKSNTRKNLSLERAEKKAIVLLEAAENSYPAIEPTDIRCDQVRDYARRIADLLEKKDQLVKQMVEMSKGRKEYTVLRSFPGIGDTTACRLIGEMGDLRRFKNAKQLNAYVGIDIMRYQSGNTQYHDRINKRGNKKLRKILYFMICAMLMTKGKPNHFVDYYYKLKTQPQRKPHKVAIVACINKFLKVTFHLLKHDILYDYESALPAQKS

SEQ ID NO: 98392 - protein, 350 aa, unidentified
MQTIYIGVDFHARQQTICYLTTDSGEIVLRQLKHDDKAAVRAFYAQFRGHVIVGLEASGYSPWFERLLAELGCEVWLGHATEIRRRARGRHKNDRRDAELMLDLMLHDEFPRLYLPPLQSREVLRMLRYRQKLIKIRTIGKNSLQALALQSGLAKGRHLFTKAGLQELDNATMSPAMQWQRQQWLQLLAPLNERLLETMLWLKQQSQADERISRLRTHPGIGLLTALCVVHSLEPVRRFANTRKVTAYAGLDPVERSSAERQRFLGISKGGSRVLRFLLVEAAHTALRKDADLRRFYQRLAERHGRPKAKVAVSRKLLIRAYIMLRDEIDYAEFQRRAVAARPAPSAHRH

SEQ ID NO: 98393 - protein, 327 aa, unidentified
MLYFGIDVSRDKLDCAVVDEQGQRVKRARTFTNDTQGVIELIGWARAVAVDQPRRFVMEATAAYHELAATRLHCAGLVVSVVNPAQVRALARGLGTLSKTDLIDALLLAQYARLAEPRQWRPTKPQLQEFSAMLLRLDCLEADLRREQNRREQAAVRGSADCVMASIDACIEFLRGQCKAMRKTIDSHIVANEGLSQSITRLRTIPAVGEKTAKRMASILGANDFVSAKEAAAFLGLVPIKCESGSSVRGRSRLSKAGNPKVRASLYMAAVVAKKINPDIKDLYDRLCAQGKTKMSALGACMRKLVHLCYGVLKSDHDYVPPEARSS

SEQ ID NO: 98394 - protein, 315 aa, unidentified
MDETGYFVGIDVSKAMLDVHVRPGDGRARFDNNSTGWAELVAWLSPFSVVRVIMEATGGYERKAAQELLRQGLQVCVVNPRRVRDFAGASGVLAKTDRLDAAVLAHFAQVFDPHALSQADEAEARLAQYATVRDGLVGQRTSLSNQIGLNDDPDLLRLLQDLLEQVKARLADLERLIRACIREKAELRRRYEQLQSVKGIGPVAAVSLLAFMPELGRVSRRAIAALVGVAPYTRKSGKMQGQSRIAGGRAGVRRVLFMASLSAVRHNPVLKAFYQRLTKAGTSKKKALIACARKLIVILNAMVRDDKQWTPKITA

SEQ ID NO: 98395 - protein, 388 aa, unidentified
MPAAETPVAYLGIDVGKSSHSACALDAGGGVAFRAELANRPDDIDRLLERAGSGALVVVDQKRNIGALVLARAHAHGNPCAYLPGYAEKQARGMFPGTAKTDAIDAEVIARTALGVPRALRPAPEEPEGAASLRILSSQREFASSARTRAKNRLRATLLEADPALEGAVDPSSRWQVSMLAEFGGAAGCSAAGWRRFSNAARRAGAPAAGARRLWEALLASSRSGRRLPAGEDVAVRMLAREIASLDADIEELDSLVADSLAGDEVYECLLTVPGIGPKTAAALVTSIDISAFRGHDELASYCGVAPSDRRSGSSIRSTSPQRGGNRQLKNLLIFSCNSLIGTDNRFGRYYGECRARGMRHSKALKAVARKRLKVIYAIMRDAVPYAA

SEQ ID NO: 98396 - protein, 358 aa, unidentified
MYYSTSVGLDTHARSIKAAALIHETAEVVEGSFAYDPPALITWIKLLPQPARCVYESGPMGFDLLRKLEAAGIHCSVGAVTKMLRPSGDKIKNDKRDAVFLARMLAVGNIVRVYIPSEDDEAARDLARAREDVRQELTRAKHLLSKFLLRKGILYDEGKRAWTKTHRRWLEHLELPLPTERLVLSEYLISIEEAERRKERLDKAIDNMAQTDRWHSVVSRLCLLRGISTTTAFTVTTEIGDFSRFKNASAFYSFLGLVPSLNESGGSTSRGPITKTGNSHVRKLLIESAWHHRRRYLPSAQVFPEDTPVSVAQVAKKANLRLHDRASHLMSRRVHPCKANTAVAREVAGFVWSLANMS

SEQ ID NO: 98397 - protein, 378 aa, unidentified
MPSETTIHVAIELSVSSWLVATRPPGAEKSRLHHIEGGNTTALLALIAELRTRASTKLGKPAEVVCCFEAGRDGFWLHRALTMHGVTAYVLEPTSILVNRRARRAKTDRLDAEGMLRVLAAWLAGDRQVCSMVRVPTPEEEDAKRPHREREHLVQERLRIENRIEALLFTQGIRKRPSLRSWERDVAELRTGDGRALPSLLRVELDRLRRRLVLALELIREVEAERAEALAVTADDEMTQKIAALQRIRGIGTNFAAVLVREVLYRSFANRRQLASYVGIAPIPYQSGGMDRDRSISRAGNPRARTTLIQLAWLWLRYQPGSALAAWFRERVGTLQGRTRRIAIVAMARKLLIALWRYVETGVMPDGVEIRAQADVTA

SEQ ID NO: 98398 - protein, 525 aa, unidentified
MLSSGYVLAAKADRAVVSSNPFASMVKGCFDSFIGDVTSTIPFRRLSQVINPLQNVSHYLTEGCSMTKKLRLEQAKEIRRSGKSTGFELINANAAGIDIGSEEHWVAVPEGRDEHSVRKFGCFTADLHEMANWLKQCGVKSVAMESTGVYWIPPFQILEQHGIEVKLVNARQARNVPGRKTDVSDCQWLQRLHTYGLLSRSFRPEDQVCVLRSYWRHRDNLVRYASAHIQHMQKAMTEMNIQIHKVLSDITGVTGMRIMRAILSGERNGEVLADMRAPGVKRSEEDIIKALQGDYREEHLFALRQAVELYDFYHDKIRACDDKIERCLKGFETVVGSDKIAPKKGKHKARKNECIADLQTELYRITGVDFTEIDGLDVLSVNTILSEVGLKSEAFPTVKSFTSWLGLCPNNRITGGRIKSSSTKRVSNRAATAFRIAAQSLANSKCALGGFYRRLRARLGSPKAITATAHKLARIFYVLWSTKQRYQDVGVEYYERKYKERLIRNLKKKAHELGYKITLQEVGVS

SEQ ID NO: 98399 - protein, 337 aa, unidentified
MIHVGVDLHQRFCYVTAMDASGKKLAQRSLPNQAAALQQWFQALPEPPQVVVEACSFWPAFRRAVEGLTQELVMVHPARVKAIAAAKLKNDRVDSETLAHLSRCDLLPEAWMADEATRQLRLQVRLRVKLGRERTRLKNLLQSVLHQEGLQKPVSDVFGKAGRRWLAAVEMSAAARLNVNSYLALIDYLQTMIARQERALQKLAAGDERARWLRTIPGIGALSAMVILAEVGDVRRFADKHALASYAGLVPRVRESAGKRSYGGITKTGSETLRWIMLQVAQVAGRKSPAVRAYQQHLLRTKHPQVAKVAVARKLLTCAWVLLRYGVCFEDSAFAAR

SEQ ID NO: 98400 - protein, 341 aa, unidentified
MDKVSTIGLDIAKSVFQVHGVDAAGAVLIRKRISRAKVLEYFGELPPCLVGIEACPSAHHWGRELQGLGHTVRLIPPSYVKAYLKRGKNDANDAAAICEAVTRPSMRFVPIKTKEQQTALMLHRARQLLVRQRTMLSNALRGHLAELGIVSAKGRNGTAELLRIIADGRVSPAVCGILKVLTRQYGAVGTEIASIDKSIKALHRGCEASQRLAEIPGIGPIGATALVAEIGDWKTFSSGRSFAAWIGLVPKQHTTGGKDRLGSITKQGNRYLRWLLVVGAMAVIRYARKHGTQKRPWLGRLMERRPTKVAAVALANKIARMAWAIMVRGERYKEPKLLLAA

SEQ ID NO: 98401 - protein, 374 aa, unidentified
MSNSITYVAMDTHKKEHNVALHYPGQEEIVRFTVKNTAREITKMTKKIIKQVPGEVEFCYEAGVCGFVLKRRIEAQGCKCAVIAPSLTPRKPGDRIKTDRRDALKLLGMFKAGLLTEVHAPDKQQEAARELTRCRQSAQEDLKRVRHQLLKFLTRHGYIYSEGNHWTGKHIKWLRSLEFEETVLADVFDNYFTQMQHCLQRLDSLDKQVEKLAKSKPYKKVVGLLRCFHGIDTLSAITIITEIFDFGRFSSPGELMSYLGLTCSEFSSGEKQKRGPITRAGNKRGRRILIEAGWHYRHPCSISKALRERRKGQPQWAIDIADRAGQRLRKRYRHLTNCGKMSCKVTVAIARELAGFIWSVFKEYETRKGVKQAA

SEQ ID NO: 98402 - protein, 404 aa, unidentified
MIYLGIDWAEDHHDLCLLDEAGERLAAARVPDGVEGLRRLHELVALRADSAESVVVGIETDRGLLVQGLVASGYTVYAINPYAVSRYRDRHTTSGGKSDRGDAKILADLVRTDRHNHRQIAGDSDLAEAVKVLARAHQNLLWARQRHINQLRSALREFYPAMLEAFGTDLASRDALVVLGLAPTPQEGLRLTRARICTALARAGRQRNVDATAIAIHTALASQQLLPPARLSAAYGLTVRASVALLRQFNIEVDELEAELVASFERQPDAEILCSLPGLGSVLGARVLAEFGDDPTRYKDARSRRCYAGTAPITRASGTRTVVLARTARNRRMAQACYLWAFSALRPSPGARAFYDRQRAKGKTHHQALRTLANRLVGVLHGCLISGQRYDEQVAWPTHTEVAA

SEQ ID NO: 98403 - protein, 400 aa, unidentified
MTQAQRAWAGIDAGKRHHHLVVVDPDGRTLLSRQVANDEAELEQAITAGRALAQQVVWAIDLADGPAALVIALLLAHQQQVLYLPGVAVNRVSAAYRGEAKTDAKDAAIIADQARMRRDLRELRLADTTVAELRMLTAHRADMVADRTRTINRLRTHLLGIFPALERALDFTNRGPLLLISRFQTPTALRDIEEHDLIEWLREHKARPAAKLAAAARNAAFSQHTKIAGETAVAQIIAQLAATVLGLDHQLATLDTMIAERFHSHELAPVITSMVGIGTLLGAELLAATGGSLGGFASADHLAGYAGLAPAPRDSGRRTGNLHRPKRYNRQLQRVFYTSALISIQRSPSSRAYYDRKRTEGKRHTQAVLALARRRVNVLWAMVRDGHLYQEPPLSAALAA

SEQ ID NO: 98404 - protein, 326 aa, unidentified
MEHELHYIGIDTAKEKLDVDVLRPDGRHRTKKFANTTKGHDELVSWLKGHKIDHAHICIEATGTYMEPVAECLYDAGYIVSVINPALGKAFAQSEGLRNKTDTVDARMLAEFCRQKRPAAWEAPHPLERALRALVVRHQALTDMHTQELNRTETAREVQRPSIDAHLLWLEAELKRLEKQIKDLTDDDPDMKHRRKLLESIPGIGEKTSAVLLAYIGLKDRFAHARQFAAFAGLTPRRYESGSSVRGASRMSKAGHVPLRRALYMPAMVATSKTEWGRAFRDRLAANGKKGKVILGAMMRKLAQVAYGVLKSGVPFDASRHNPVAA

SEQ ID NO: 98405 - protein, 373 aa, unidentified
MKKDSIAKLQVTKSQIRRMAAKQRVTVGLDLGDRSSRYCILNEAGGKASEDQLATTTVGLDSLFAKMASCRIALEVGTHSPWVSRHLAAMGHEVIVANPRKVRLITQSVKKNDRMDAEQLARLARVDPQLLAPIRHRGPEAQGDLAVIRARAELVEARTALINAARGLAKPMGDRLKSCDADYVKETLADGLKEATQRAIRPLLKSVEEMTKQIGVYDKKIQEIEKGYPETKVLRQVHGVGTLIALTFILTLEDAERFEHSRDVGPYLGLTRKQRDSGESQPEMGISKAGDELMRRLLVQAAHCILRDGAPDSDLKAWGMTKVQAGAKTGSGKKGSKRRKKKAAVAVARKLAVLLHKLWVTGEVYDHSTTGKR

SEQ ID NO: 98406 - protein, 326 aa, unidentified
MSELKEFIIGVDVSKKTLEVAILEKATQKVVGTKSFSNTPKGYSELLLHVASKTKRCISTVVLESTGVYHENFVDYCHEVGWAVSVVLPTKIKNFTKVENIKTKNDKVDAKIIARYGCMFPLKLWTPMTGNYHELRTLSRHILALKKERSRAMTRLAAYKSTKRTPKSIIQSEEEHILCLGDMIEHEEAELKKLAYADHEFKRKIQKVATIKGISELVAIQIICEVNGFEMFANTRQVTSFAGFDVVERQSGDYAGRTHISKKGNRYIRRLLYMPAMTAATHGSGKFVDLYQRIAERNTGTSKLKGLVAVERKLLIIIYTSTRRDC

SEQ ID NO: 98407 - protein, 343 aa, unidentified
MESYVGLDVSLKRTSICVVDRTGKVLCEGTVTSAPEAIVEFLKSKAAGAVRIGLETGPTSTWLWTEIKALGLPVICIDARHAKAVLKMQINKSDRNDAFGIARIMQCGWYKEVRVKGLDSHAMRALLESRALLVKMKRDLENQIRGLLKNLGLIIATARGQAFHARVQELVEGKPFLAVAVLPLLKTRTEIARHIAALDGEVLMLARNDDQVRSFMTVPGIGPITALCYRATIDEPSRFKRSRSVGAYVGLTTRRYASGEVDWTGRISKCGDAMLRSYLFEAAGVLLTRVQKWCALKAWGMRLAKRGGLRKAKVAVARKLAVILHRMWIDGTQFQWSADKVVA

SEQ ID NO: 98408 - protein, 338 aa, unidentified
MNEVTVIGIDLGKHSFHLHAQDAAGRMVFRKKLSRQQLLRTLANVPCCRVVMEACAGSHWLARQLAGMGHEPRLISPQFVRPFVVGNKNDFGDAQAICEAACRPSMRFVSPRNEAQQTVSAMHRLRERLVRERTATVNQIHGFLLEFGISLPRGAALMSRLPTVLDHETLPPRLVGLVVRLHAQVHYLEEQIRQVVQDLKASLREDDKGRRLLEIPGIGPITASALAVELGDARQFANARQFAASIGLVPRQYSTGGKPTLLGISKRGDRNLRRLLVQCARAVMQHTASRTDALSLWVKTLSTRRHSNVVACALANKLARIAWAILARGTHYQARALT

SEQ ID NO: 98409 - protein, 313 aa, unidentified
MLFIGIDVAKAQLEFACRPSGETGTVRNDDGGIRELGARCRALTPALIVLEATGGYEAAVVAALVTAGLPVVVANPRQIRDFAKATGQLAKTDALDAQVLALFAERVRPALRLLPDDAVQALDARLTRRRQLVDMLTAERNRLLLARPPVRRDLQQHIRYLERRLREADDDLHTAVKASPVWRVKDDLLQSVPGVGRVVSLTLLAELPELGRLSHKEIAALVGVAPLNHDSGTLRGKRLVYGGRAPVRAVLYMAALVASKCNPVIRAFYQHLRAAGKPAKVALTACMRKLLTILNAIARSGIPWSPPHTLART

SEQ ID NO: 98410 - protein, 393 aa, unidentified
MSLDHHFAEPTAIRTNLGAIFVSLELSRSTWLITSLSPGGGEKMSKHGLSAGNIAALLARLSELKQKAFARTGQSFQVIVIQEAGLDGFWIHRVLQSEGVESHVVDAASIATSRRRRRAKTDRIDGEALVRALLAYKRGEPRVCAMVRTPTPEEEDRRRLCRERKTLTNERVQHVNRIKGLLFCQGISDYEPLRRNRRQRLDELKTGGGRPLPPHLKAQITRELDRLELLLGQIEAVEIERDALLSAMKPDGMNADAVRSPPAMLINLNGIGPEIAAVLWSEGLYRSFANRKQVAAYAGLAPTPWQSGSVAREQGVSKAGNPRLRTTLLQLAWLWLRHQPQSALARWFHERVTRNGGRLRKSTIVALARKLLVALWKYVTAGVVIDGAVVRAA

SEQ ID NO: 98411 - protein, 328 aa, unidentified
MNYVGIDVDSKLLVCKINRNGKAFPIAEFDNTSVGHQKFIKWATKSNKQAKVCMEATGVYSLPFALALHQISNIEVMVANPKAIKNFGAASMQRGKTDALDAETILQFVMRMPFRLWQPPAEEIFEIQCVSRRIVQLTALYTKERNRHLATLKLGAMGRVVANDTLVSMRHFERRIKRMEATLLGLVTAIPELNEKLTLLTSTTGIAKKTGPRILAELMVLPKDMVGPQWVAFAGLDPRPYESGTSTLKPRRITKAGNKYLRAALYFPALVASRNDPNVKAFYEKMLANGKKPLQALVAIMRKLLLAIWGMFKNNQPWDGNKFFALEA

SEQ ID NO: 98412 - protein, 409 aa, unidentified
MDVVYERCCGLDVHKTSVVACLLISRSAGEPVRTVRTFGTMTGDLLALADWLAAAGCTHVAMESTGVYWKPLWNLLEDGFELLLVNPRHIKAVPGRKTDVTDAEWIADLLRHGLLRASYVPNRPQRELRELTRYRTSLVRERTAAANRLQKTLEGANIKLASVATDILGKSGREILAALVAGETDGATLAQLAQGRLREKLPQLEQALVGCIGPHQRFLVAEHLAHIDFLEAAIDRVSAEIAERLRPCAEAVARLDTIPGIGPYLAEALIAEIGTDMSRFPTAAHLASWAGMCPGNHESAGKRRSGKTRKGSPWLRALLVQAAHAGARKKDTYLGAQYRRLAARRGKSRAAVAVGHAILIIAYHLLRDGTDYHDLGPRYFDERDRRAVERRLVHRLEGLGYTVSLQPAA

SEQ ID NO: 98413 - protein, 340 aa, unidentified
MSSTLSPIGIDVSKLTLDIRLLRGEKLCKQHVANTPEGFEQFQQWLMRQGVKQAHVCVEATGTYSDAIARYCYEQGHQVSVINPAWLAAFRVSEGKHSKTDGQDAVLLARYCQQKRPLLWQPTPDEVQEMQGLVQRLDDLEQARQQERNRLENSRWTPRLREQIEENIRRFDEQMEQVKAWIAEELDKEQSRQMQQIVTHLESIIGIGRLSAVRVVSTLVDLTRFASVEQVVAYVGVAPCERQSGTSVHGAASISKTGRAQLRKWLYMCAIVSKRWDADMRRWAEELEARGKTKKQVLVAVMRKLLHIIYGCGNHSADYDPRLAFPSHYASEHQGVEQAA

SEQ ID NO: 98414 - protein, 318 aa, unidentified
MLPTRRDTSPHGHRPYREEHLFPNSPDGFAALLAWADGHGAGSTAHFGMEATGGYEDALATFLHAAGRTVSVINPTRIEYAGVMRGRRNKTDKADARLIAAYTRDEAPPAWSPPSPEVRELQAVVRRRDDLRQLAAREKARLDAPLLTPAARKSVARVIKLLGKEADAMQAAADALIAASPVLAADRDLLASIPGVGTQTASTVLVELPALDRVPSAQAAAAYCGPSPREFTSGSSVRGRTRLSKSGNARLRKALYLPTLTAIRFNPLLKGFFDRLVAAGKPKMQAVGACMRKLVMICYGVLKNRTPFDPLWASRIAT

SEQ ID NO: 98415 - protein, 463 aa, unidentified
MKHNSTRERKEKSARLSVSLLERIQPDAAGIDCGQNSHFVAVPPERDPQPVREFRTFTADLHRLADWLMQCGVKTVAMESTGVFWIPLYEILEQRGLQVVLVNARDVHNVPGRKSDVKDCEWLRELHSVGLLRASFRPAAAIVPLRSFMRQRETLVEEAATRIHRMQKALSEMNLKLHTVLTDLTGQTGLRIVRSILAGERNPERLAAHRDYHCHASHAEIVAALTGYYRTEHLFALRHNFATYEFLLKQIAECDGEIEALLTTLAAQQPPPSAPLPAARRRRASKHQPQFDIRGPLHRLTGGADLSQIDSIGPQTALQLIAEIGTDMRRWPSEYHFASWTSLAPNNRISGGRLLSSRTPPSANRVAAILRRCAMSVGKTSTALGAFYRRLAIRIGKAKAITATARKLALLVYRVLSGQLVYNDPGADAYHQLNRTRELKSLRKRARLLGFHLVDQTTGEVTT

SEQ ID NO: 98416 - protein, 346 aa, unidentified
MWYTGIDWADEHHDALTIDEKGHQMGSIRVDHTPQGFAKLDTFLMQIIGSASKEQMACIIETTHGLLIVHLLEAGWPVYPVNPRTVDRRRSASGAKTDTIDAYLLAKTGRADFADLHRLTPDSDKVAELKQLTRDQDTLIRTQTRLVNQLTACLKAYYPVALDLFSQLQQKSTLGFLQTYPTVEAARAASLKEIQQQLKHTRHPQPAQAAASIVEMLHHPQLQADAVLTRTKSRLMLALVSQLLPLLEQIATYDKEIHTLFLTHEDHAIFESLPRAGQHLAPRLLAEIGDDRTRYQDASSLQALAGTSPVLYQSGMYSEAHRRLGCIKPLRNALHQFAWQTTQSEA

SEQ ID NO: 98417 - protein, 430 aa, unidentified
MMEEVDDAELVVERIAALDLGKAGLEACVRVPSPHRPGRRMQELRSYGTTTAQLLEMVAWLRQWGVQRAVMESTSTYWKGVYYLLEAEGFECWLVNAREVKNVPGRAKTDRADAIWLAKVAERGMCRPSLVHPAEIRRLRDLTRYRRALVQDRTREQQRIEKLLEDAQIKISSVLSELHGVTARAMMDALIAGQRDPRALAQLAKGRARKKTAQLEEALRGFFTDHHAAILRMMLDNTDRISAQIAALDARIEKEIGPFSGQAARLAEIPGVDAVAAAELIAEIGVDMTRFPSDAHLVSWAKFCPQTHESAGKSKSKGRGRGNPWLAGTLGRIAFANSRADTFLGARYRRLARRRGKQKAIVATGNSVLTVVYYLLSDPMATFCDLGPGYYESRINVHRRARDLVTQLQALTGQHIVIRDGKAVITDAAA

SEQ ID NO: 98418 - protein, 344 aa, unidentified
MHIASIGIDLGKTNFHLVALGERSKVLVRKKFSRTQLLSYTANLPASLIGLEACAGAHFLGARLQEQGHDVGLIPAQFIKLYRKSNKNDFLDAEAIAEAVTKENMRFVPIKNQEQLDVQALHRVRDRLVHGRTALINEIRGFLLERGITFAVRPIHLRKNLPEVIEDAEQNLSGRLRWLLERLWQEWKQMEGDIEAITEEIERISQENELCRRLRQIPGFGPLVASATVAAIGNGAAFRRGRNSAAWVGVVPRQYSTGGKEKLLGISKRGNIYLRRMLIHGARAVLLRVKYDTGGFGQWVHRLAQRAPRNKVIVAIANKLARIAWAVLSSGKDYQHQGLQTMAA

SEQ ID NO: 98419 - protein, 346 aa, unidentified
MTIVEAARGVTGGVDTHLDVHVAAALDPLGTLLGSEPFATTPAGYKELLAWLEGFGDVAKVGVEGTGSYGAGLARFLRRRGVQVIEVDRPNRAARRRSGKSDPLDAIEAARAALGGRAQGQPKTKDGAVEAIRVLVIAKRSARQSRVKALTQIRNLGLTAPDQLRCRLKGLTVPALVSEGTKLRPGRSTDPVTAATKAAVSSLAHRIQSLEREIADLDELLAPLLAATAPELLGLFGVGPDTAAALLVAAGDNPERLHSEAAWAHLCGVSPLQASSGKVTRHRLDRGGDRQANSALWRIAMVRIAHDPETTAYFERRVKEGRSKPEVIRILKRYIAREVYRYLPRR

SEQ ID NO: 98420 - protein, 389 aa, unidentified
MLLDHPTDGLTAIRTQFAAIFMSLELSRSNWLVTSLSPGKGEKMSKYSLTAGDVAGLMRLLADLRRKAEVRTGQSYPIITIQEAGLDGFWLHRVLQQQGVESHVVDPASIAVPRRRRRAKTDKIDGETLLRTLLAYKRGEPRVCAMVVAPSPEEEDRRRLCRERRTLIEERVRHGNRIKGLLFAQGISDYAPLRRDRRARLEALRTGDGRELPSHLKAQIGREFDRIELLLEQIKSVEAAQQALLAAARKPASEKAAPDPVTMLLALKGMGANFTTVLWSEAFYRSFSNRRQVAAYAGLAATPWQSGGIRHEQGVSKAGNPRLRTTMIQIAWLWIRHQPQSALTRWFKERSHQGRKRAIVALARKLLVALWKYVTQGVLIEGAVMKQAA

SEQ ID NO: 98421 - protein, 370 aa, unidentified
MAKRSMFVGMDVHKETIDISIAEDGRLGEVRHYGVIGGDLEPLAKVVKALRASDRVLHFVYEAGPCGFGIHRYLTAQGEDCVVVNPSSMPKRSGDRIKTDRRDGDALARLHRAGELTAIYIPTAEDEALRDLVRAREDAVGLSTQAKHRVKAFLLRQGRRYPGRVAWTRPYRRWLSDLSFPLAPQHIALQEYRDTIDEAERRLERITEQLRQLVPLWRWAPVVDAVQALRGVSFVTAVGLVAEVGDFRRFQHPRHLMAFLGLVPSEYSSGPSVRRGGITKAGNAHARRLLAEAAWAYQGPPRIGRQMLYRQEALPKLICDIAWKAQLRLTSRFRRLVARGKAKPKVATAIARELTGFIWAIAREVPPPPA

SEQ ID NO: 98422 - protein, 326 aa, unidentified
MEHELHYIGIDTAKEKLDVDVLRPDGRHRTKKFANTTKGHDELVSWLKGHKIDHAHICIEATGTYMVPVAECLYDAGYIVSVINPALGKAFAQSEGLRNKTDTVYARMLAEVCRQKRPAAWEAPHPLERALRALVVRHQALTDMHTQELNRTETAREVQRPSIDAHLLWLEAELKRLEKQIKDLTDDDPDMKHRRKLLESIPGIGEKTSAVLLAYIGLKDRFAHARQFAAFAGLTPRRYESGSSVRGASRMSKAGHVSLRRALYMPAMVATSKTEWGRAFRDRLAANGKKGKVILGAMMRKLAQVAYGVLKSGVPFDASRHNPVAA

SEQ ID NO: 98423 - protein, 315 aa, unidentified
MAEQVVVGIDVSKAKLDVALLPSGELFTVSNDRRGIGQLVQRLKSLAPNRVVLEATGKLERLAVSELAAAGLPVAVVNPGRVRHYAKARGKRAKTDPIDARLIAEFAQDLAPEFHPLPDAETQALAGLCQRRNQLLEMQQMENNRLERADAATCKSIKAVLRTLERELEQVDQDIDRSIRNSPIWQAKRELLATMKGIGATSCSALLAWLPELGQFSRQRICALVGVAPYDDDSGEWHGRRQIAGGRAVVRRVLYMATLSAVRHNPVLRAYYQRLLERGVKPKAALIAALRKMLTILNAMVRDNTPWRPPCPTPA

SEQ ID NO: 98424 - protein, 354 aa, unidentified
MIIIGCDYHPGFQQIAYVDTDTGELQERRLQHREEAETFYRELGAQGVGVRVGMEASGQARWFERLLAELQIELWIGDAAEIRTKRVRKQKTDRQDAQLMLKLLLEDRFPRIWVPSGENRDLRQLLWHRHRMVQARTRIMNQLQAVALNEGLRRKKGLWREAGRKQLEGFRLAPWASRRRHDLLELLDRLTPTIAELTQAIEREVEKCPEAQRLTTHPGVGSLTALAFVLIIGRAERFQCGKQIASYLGLVPAEESSGDRQRLGHISKQGNALLRFLLVEAAQVTVRSNPEWRRKFFHLAMRRGRKIAKVAMARRLAVQLYWMWRQEWDYEQLKKFSPHAGQPGTGVGVQSNTE

SEQ ID NO: 98425 - protein, 347 aa, unidentified
MTIVEDARVVTGGVDTHADLHVAAALDPIGGLLGVQEFPATPEGYGRLLGWLGGFGTVSLVGIEGTGSYGAGLARHITWAGVRVVEVDRSDRQDRRRQGKSDPLDAISAARAAQSGRARGASKGRDGAVEAIRTLMVVKRTARSERTQTINQARSLVLTGPDDIRVRFIHHTTAGLVADLAGLRPRPGATVGYATRIALRELGRRAQFLGGQLASLDELIIPLLTAHAPGLLALYGVGPDTAALLLIAAGDHPERLRSEAAWAHLCGAAPIPASSGKTVRHRLNSGGDRQANHALWRIVITRMSSHPPTRAYVERRVKEGLSKTEIIRCLKRYVAREVYPHLRPPAR

SEQ ID NO: 98426 - protein, 408 aa, unidentified
MMLFVGDDWAQDHHDVYVMNEAGVQVAARRLPEGLVGVGQLHDLIATHAEDPGEVIVGIEKDHGLWVGALAASGYQVYAVNPLAVARYRDRHRVSGAKSDGADAKLLADLVRTDRHNHRLLVGDSEQAEAIKVLARTHQNLIWMRARQISALRAGLLEYYPAALQALPNLGDRDRDRDALAVLGRAPTPDQGVRLSLSKIAAALKAGGRTRCIEERAREIQAALRSEQLRAPEAVTAAHGAATSALINIIIELTNQISAVETELAQHFRTHPDADIYLSQPGIGVILGARVLGEFGDDPNRFTDAKCRKNYAGTSPITVASGRKHAVTARHVRNARLYDALDRWAFATLKCSPGARMFYDQHRAAGNTHHQALRALANRLVGILHGCLRHQTPYNEDTAWAHRTPAAA

SEQ ID NO: 98427 - protein, 389 aa, unidentified
MLEPFNPSRSLAALEQDSTVIAVIEMSQSRWLVAAVIPGIERQPLKKIDPDEELLLKLLHRWQNEAGRAGREIKRIVAAYEAGRDGFWLARWLRARGIEAYVIHPTSVAVSREHRRAKTDRLDTELLKRAFLGWLRGEKRHCSMAAIPTLEEEDTRRPNRERENLVTERTRLINQMKAILVRFGIRTFKPTLRKAEEKLEGLRTAEGTPLPQNTRAEMRRQLARLRVVREQISAIERERLRKLAAAPAEERGPHAMVRLLARVLGVGVETADMLVNEILLRHLRDRKAVARYAGLTGSPDESGRRRRERGLARAGSARVRCGMIQLAWRFLRFQKDSALAQWFRARTTDGRSATRKIMIVALARKLLIALWRLVTMGEVPRGIILRAAS

SEQ ID NO: 98428 - protein, 429 aa, unidentified
MDGSTYRFWVGIDWATADHQVCVLDAARRVLLERSYPHSGVGLAALANELGKLAPDDPGQIAVAIEVPRGPVVEALLERRFHVHAINPKQLDRFRDRFTVAGAKDDRRDAFVLAHSLSTDLERFRKLEIDAPTIIQLRELSRIDEDLRQEHNRLTNRLREQWHRYYPQLLALCSSADEPWLWALWGVAPTPARGAKLRVDRVRRLLREERIRRFSGEEVCAALREPPLVVALGTTEAAVVHVGLLLPRLRLVVAERQQCARQIEALLLALETEGEPGQQNEHRDVQILRSMPGIGRVVVATMLAEAAQALAARDYHALRALCGAAPITRQSGKSAYVVMRRGCNGRMRNAVYHWARVCVMLDGHWRARYAALRARGQTHGRALRAVADRLLNRLVAMLRDRTLYDAARVRAGAAGHRHATEVELMPHHA

SEQ ID NO: 98429 - protein, 401 aa, unidentified
MDLVYKRCAGMDVHKKTIHVCIRIGRGKKLEVLTRVFGTFTADLEQLREFLRTNKVRRVIIESTGVYWMPVRNVLERSDWKFDLVLVNPQHVRALQGEKTDDKDCRRLAEFGQHDLLRGSFLPPVEIRDLRDLTRRRSQMQSDRNRVINRIGRLLETANFKLGSVASNIVGKTGWLILNAIANGETDAKRLAEQAQGSLQLKMAELAEALRGYSREPFRWLLSQLIEDLSRLDSKLNEIDLRLREQMKPYEDLIGRLCTIPGVKEITAWTLIAELGTDMSKFPTASHAASWAGLCPGNCESAGKRQTGRTRKGDRYLRRMLIQNGWAVAHKKDCFLTALFYRIAARRGSKRAAMAVAHRVLVIAYYIIRDGSVSRNVHADRSVAADRAPCVIDPGIEIAAD

SEQ ID NO: 98430 - protein, 368 aa, unidentified
MSKETKKKAIKKQVTLLKYSVGNDISKDKFDACISSIDSTQRVKVVATRKFNNTKKGIDSYLIWVKQKCKLDLPIVHLMEATGVYHEKLAWSLHRSNVYVSIILANKAKKYLQSLGLKTKNDKIDAKGLSRMGAEQNHSRWEAPGENMVNLRSITRQREHLHETRTQINNQLHALESGEYINKVLIKQQKTILRMLDKQIKETSKMIKKAVDSDDELKSKIEKITIIKGLGLISVATVIAETNGFKLFKNQRQLVSFAGYDVIENQSGKHIGKTKISKRGNTHIRRILHMPSFSVVTNNETVFKNLHERVYASTKQKMKGYVAVQRKLLVMIYTLWKKNENYEKNYVSKGKEKYPEMQSKSSSFRSVA

SEQ ID NO: 98431 - protein, 347 aa, unidentified
MHKDESEHVLCLCQKMKKEPLNQNTSSLYVGMDVAKATLQVHLNGHQIEFTNDAKGHAQLTKRVGKFPHPHVICEATGGYERPVVEALHQANITVSVVNPAHTQAATKAQGIRAKNDCCDATSLTDYGERYHPEPTPPVSAQMRAVTELTLWLKQLIDNRAVAKTQAEHLFNTFVCGQHKQLLAHYEKQIQAVEEKIRKLVESMKEFQQRLNCLTEIKCVGFRTALMVLVFMPELGQLNRGGTAALAGLAPWTHDSGTMKGKRCIGGGRSQVRPVLYMSALSSVRFNPVLKSFYTNLRERNKPAKVALTAVMRRLIVYMNSKLKELAALPPAEKVKPIQHTERALAN

SEQ ID NO: 98432 - protein, 399 aa, unidentified
MFVGWDWASTAHDVTVIDSAGERVHRMAIPHTEDGIARAVAKLADYGDPGELPVAIEATRGLVVDRLLGAGHPVIPVHPNAFHAVRPRWGAARAKNDPGDSFKLADYARTDIHRLPVLVPTLPETLELQALTRQRDCQLALRIAAVSQLAALLDQHWPGGKTIFAQLHSPITLEFLHRYPTPQAAASLTAARIEAFCRRRGYSGRRSGAELLDRLRSAPISASRLGEPVVAQMIRGQVAVVRALQAGIDALDTVIAEKATAHPYAGLLADLPRVGTLNLAQIIGEVGPVLERATSFDQLAAETGLAPVTRSSGKTHTVAFRYATNRRARQALHTWLDNSRRSNDWAQQRYAAARARGQRHPHALRTLGRAWLRIIWACWRTKTPYNPARHEAAKQPTAA

SEQ ID NO: 98433 - protein, 343 aa, unidentified
MGEVSTIGLDIAKSVFQIHGVNAAGAVVMRKRITRAKLLEFFAALSPCLVGIEACPTAHHWSRQLQALGHTVRLLPPSYVKAYLKRSKNDANDAAAICEAVTRPSMRFVATKSEQQQSGLMLHRSRQLLVCQRTMLSNAMRGHMAELGIISAKGRNGTAELLEIIADEQDDRIPAAARFSLDALARQYAVVRAEIATIEKRINAWHRSCEESRRLEEIPGVGPIVATALMAEVGDWKVFASGRSLAAWIGLVPRQHSTGGKERLGGISKQGNRHLRWLLVAGAMAVIRYARQHGTKRPWLARLMDRRPIKVAAVALANKIARMAWAMMVRGERFKEPKLLPAA

SEQ ID NO: 98434 - protein, 345 aa, unidentified
MKVTTVGIDLAKTVFQVHGVDERGNAVLRKQLKRKDVLSFFANLQACLIGMEACGSAHWWARKLAELGHTPRLMAPQFVKPYVKTNKSDRNDAEAICEAVARPNMRFVPVKLPEQQAVLALHRARQGFVKARTAQANQIRGLLTEFGIVIPKGIGHIAKRLPEILEEGENGLPGMMRQLLRCLGENLKDMDDHVGEMERQIKLWHRENEQSCKLEAIAGIGPITASAYVASLGDAKSFKNARQVPAWLGMVPRHEGTGGRATLGKISKRGDVYLRTMLIHGARSVIAQIERKPDQADEWLKKLLARRNKNIAAVALAAKNARIAWALLAHERGYQRDYVTPRPVA

SEQ ID NO: 98435 - protein, 331 aa, unidentified
MKFLETAGIDVSKDTIDATLHVKKCSKQFKNNTTGFGSFIRWAQKQSGLSINQIQICFEHTGLYSLKLATFLSNNEIKFSMVPALEIKKSLGIARGKNDQLDARRIAEYAYLRREKLAFYNVPSINIIKLQALTTLRAHMVKNKSGYQSSLQGLKTFFNQKDNENIYKTIQSEISGLNKKIKKIESEILQVIRREESLYHLYNLITSVKGVGLILAANFLVITNCFTKFETSRQFACYSGIAPFEKQSGTSLKSKSKVSHFANKRMKTLLNLAASSAIQCDPELKAYYNHRIETGKSRMSTLNIVRNKIVYRVFAVVKRGTPYVPLHLHAA

SEQ ID NO: 98436 - protein, 425 aa, unidentified
MAVVMIGVDPHKASHTAVAISAAEEPVGQLRVRASAVQAERLLGWAQAWPERAWAVEGAGGIGHLLAQQLLSAGERVLDVQPKLAARVRLLATGDVNKNDPNDARSVAVAALRSADVREARRDDHAAVLKVWSKRYQDLGRARTQVACRLHQVLCELIPGGVPGEISAGQAAQILASITPADAVEAARWELATELTGDLRSADAAIRETRKKAAAAVRAAGTSLTGLFGVGPVIAAAVIGDVRHVSRFPNRDHFAAYNGTAPIEVSSGGRKVYRLSRRGNRRLNHAIHMAAVTQIRYRHSPGRAYYDKKLAEGKTGKEALRALKRQISDAIFACLQADARRAACAQSPGGQPGNHSAARAAGSHPEHRLFGQATPGPATHPTTPTAPFPAPLPSRASGRPGQGPGAARPRSDVRRASLRRPPGSR

SEQ ID NO: 98437 - protein, 355 aa, unidentified
MLYSGVDLHRRLIAICTVNETGTIIARSKMKTDPELVTAYFQQWPDQHRAVVECTIGWYWFCDLMRSLGVDVVLAHAKYLKAISYAKVKTDAVDAETLAQLLRMGYIPEAHQLPPEYRAMRDLLRQRMVMEHKRTNIIQRVTSILAQFNITDLPFSPYQPGFADFLNQCPIPEEYRMTLMMYHHQCLQTTEHRKQLEKHFKAHLRPTPAVQLLMSIPGIGDITSSIIAMETGDIRRFADDKHYCSYCRLVPGAKDSGGKHSHRSGSKDGNQYLKYAFTESAIKAMRFYPEIKHFAARLERRATKAIARTVVAKELAKISYYVLSRQQEFKTFKGIEINKLRDPPERAAGWLASHS

SEQ ID NO: 98438 - protein, 344 aa, unidentified
MDNHTQYSGFAGVDLAKKVMQIHFVTGDGEITDKQVKRAEFLDFFRNRTKCLIGMEACGASQDWARKLEAMGHEVHLMSPKAVKPFVSGQKNDYNDAIGIYKAMFNGVRRVPVKSTEIRDLQTLRRIRSQVTKDKVKEINHVRGLLAEYGIVMGKSITAFNKGISSALESLKERGDVSPLVAEELQTTVESIKTKIERQKRLDREIEQLARGCKNYENFLKTPGVGPFTAAMLCVLLCDPAIFANGRPFAAYIGLAPRSRGSGGKNFIIGIPSKFNCDSESRAVFVECAQALARYKNKSPWVDGILRRKPKKVAVIAIANKLARQVWAMANKGESFKQMTILTA

SEQ ID NO: 98439 - protein, 359 aa, unidentified
MNATTIGVDLAKNVFVACVGDGMGRVIETREFNRCGFLAWLSSLPRGTVIGMEACSGAHCWGRTMAALGLAPRLMAADFVRAYRKRQAVKNDRADAAAILAALHAPGMRFIAVKTEAQQQRLAWHSLRLGWIEERTALLNRIRGVLAEFGMVVEPGATRLRRWLAEHEFDTAQPMIVRHLIQSVRDQLDALDARIGECDRQIAAQQAKDAAARRVRELPGVGQLTADAITASVGDARMFSNGRQFAAWLGLTPSQYSSGGKPKLGRITRRGDSYLRSLLVQGARSVFAATLRKARSAPDTLTRLQQWIVGLNARVGYHKTLVAIANKQARQLWAVLAKGEAYSPEAWRQWGQTAEQPAA

SEQ ID NO: 98440 - protein, 387 aa, unidentified
MIKKRGRVVGLDVHPDSFAGAVVEGSDPASAQVLSTSTRVELEQLEQWALRHTRTEDTLVLEASGNAFSVAERLRAIGRKAEILDSHRAGKVGKVYCANDRVDAVKIARIYLSALSPIVWQPDAKTLERREVFSAYQAVVKESTRARQQLRSMLNEHCVRLEKGFRLCHPNALMRLLALREWTPARRMLLQQLHGSLVAARARRTLLRRHMAQEIVAEEALLRLTRLCGINLITLYGVVAAVGDVRRFSHSKKLVAYLGLNPSVSQSGNFEGSTALKRHGRGALRALLIQSGKKLLQVTNPLQKWGLAVAARRGRNKAAVAVARKLCVALWHVLMGHAIGALERLDTLETKLSKFATEMGPAALHAFGYNNKADFVKKQLYVLRSYP

SEQ ID NO: 98441 - protein, 355 aa, unidentified
MNDEKYIGLDVHQATIVVAVMDSTGKLVMESILETEAATILQFFAGLRGALSVTFEEGTWSVWLYDLLNPHVDKLVVCNPRKNALLKDGNKSDRIDARKLAELLRGNQLNPVYHGETGVRMLRELSRSYLTIVKDLSRVMNRLKAVYRSWAIPCAGRDVYYRRHRAQWLAKIREAGVRRRAERLYEQLDMLQHLRQQARRELLAESRKHAITAKLRQIPYLGPIRSALAVALIQTPHRFRSKRQLWAYSGLALETRISAEYRLVEGQVRRSKKLLSIRGLNKDHNHDLKGLFKGAATMASVRPGPFQDFYQAALAKGIKPTMARLTLARKIAAITLTLWKKGENFDAEKLKSQAA

SEQ ID NO: 98442 - protein, 468 aa, unidentified
MPNRGQSQVKNKRRRSSKVSRRLTVLNPDAAGIDVGAREHYVAVPPGRDEQAVRRFGAFTEDLHKLAQWLLQCGVRTVAMESTGVYWLPLYQILEDYGLVVKLVNARHVKHVPGRKSDVQDCQWLQQLESFGLLSGSFRPEAKICVLRSYMRQRQMLISQASRHLQQMQKALTQMNLKLPQVLSELSGQTGMRIVRAILQGERDGMKLAALKDRRVKSTLATIAKALEGDYRAEHLFALRQAVELYDYHQEKIAECDEAIFKEMQALETRAVPSPTPAPPLKRKKRSRHHPLPFDSQAELYRIMGVDLTRIDGINEATGQLILSELGLDLCQKWPTEAQFCSWLGLCPNNEISGGKVLRRGTRKVINRVANALRLCAESLLNSKSSALGAYARRMRAKRDSKIAISATAHKLARLIYRTLKYGQEYSDIGQAQYEAKYRTNAIKSLQKRARQLGVQLIDPNPPAVVVP

SEQ ID NO: 98443 - protein, 392 aa, unidentified
MVISVGIDVSKDKHDCFIVSSEGEVLADAFTIPNTLDGFHCLLQRIQDCTAPQDKIKVGLEATGHYSYNLLGFLLDNGLATYVLNPLRTNLYRKSLSLRKTKTDRVDARTIASMLLSDAGLKPYTSTAYHNEELKSLTRYRFDKVKERAKLKSSIARLVCILFPELEKLVPSLHIASVYALLEEFPGAKQIAAAHLTRLKTLLETASKGHYKRDMALEIRDAARNSIGSWMPAKSLELQHTIRLIRELDDEIAEIEKQIQAIMDELNSPITTIPGIGFRMAAMIFAEVGDFTRFDSPDKLLAYAGMSPSTYQSGQLKNCYPHMEKRGSRYLRYALYNATKYVCHWDPTFAAYLAKKRAEGKHYNVALSHATKKLVRLIFAMEKSRQPYRLVA

SEQ ID NO: 98444 - protein, 409 aa, unidentified
MDIVPIYKRVIGLDVHQAQITGCAIIEQADGSVTHERREFGGFKRDRKALAEWARAINPDVVVMESTGIYWKSPYAALEGVGIIAWVVNARHVKAVPGRKTDVADAQWLASLARAGLLRASFIAKADLRSLRHIARHRQKLGGMLASEKNRLHKLLTDAGIRLGVVVSDLHGQSARAMVKALIEGKSVPEVLDLASNRLRASREDIFEALQAEEITPAHRFCLAEIMAHIEELEARMARFDAELLRSLQEAGYGVPLRLLQTLPGIDLMGAAMLLVEIGADMSVFGSAQRLASWVGMCPGNNESAGKRKSGRIRKGNAWVRRLLCEFAQAAGRSRCALKDKFQALNVRKGHKRSIVALGHKMLRTIYAMLSKNTHYVDKTVDYEALMVARNAPRWLQMLVKHGFVPARA

SEQ ID NO: 98445 - protein, 326 aa, unidentified
MTSLPNPTSDDRVTVGIDVAKATLEVAITGRTATLAFANDDAGYAGLLAELSGMAVSLVLLEATGGLEQACATALQLAGLAVAVVNPRQARDFARAMGYLAKTDRIDARVLADLARTLVHRGDLSKLVKPLPDAKQLELQGLVTRRRQLLAMKLAEDHRMKMPGVRQRRSLNTIIKALDREIARLDRDLQAFVGANHGELAALLDSAKGVGKATISTLLAEVPELGKLSGREVSALVGVAPINRDSGTMRGKRAIFGGRPDVRRVLFMAALVASRHNPVIKVFYQRLLAAGKPKKVALVACMRKLLIILNAMVRSGKPWDQALHRA

SEQ ID NO: 98446 - protein, 350 aa, unidentified
MEYIAFDAHKHYTLASVVTPDGQLVREERIEHDRGALREFLERCERGSPVAVETIGNWYWIVEEIEAAGCLPRLVHARKAKLMMGEINKTDRLDVRGLNRLQRSGTLPTVWIPPGELRDQRDLPRTRMVFVRQRTQLKNRIHATLAKYALHDLDVSDLFGVRGRALLRERFELLPPHTAYASQQLLGQVEELGRQVHAFEQRIQATFKLTPAIQRLLTLPGVGYTLAVVIALEVGDVARFASAERLAAYAGTTPRVHASGGKSRFGRPRPDVNRYLKWAFVEAANAICLHRGRAADRHVSRLYERLARRKGHAKAIGAVARHLAEATYWMLSKEEAYREPQSVGRVVHGG

SEQ ID NO: 98447 - protein, 435 aa, unidentified
MSPPEIRDYSKEATFKGRRLDFSLGNKPRAWRLADASCRLIIVAGSAVLEYGNSSEAEVAKHKTYQGVEMKEKVEKTLYVGVDYHKNSFTAAYLDCLTGILNTKKYEAEELEKFKNHLTTFRKKGYSVKVAVETLTGVTFFTEEIRNCVDEITYVNTNKFKNILKGVNSAKNDRIDAETIAIYYEMGLLPTVYVPTRKEKELRIKMKERDSFVDMRKGVINRLHSLLLEYGIKTNKRELTTKKGMERIKEETKKKVPPSLRETIWRQIETIEYLTDKIRETEEDIKSFIGEDEELKGKVELLKSIPGVGDIVAIAFISAVCNEERFENGDKVAAYFGLVPRANSSGDEVRNGRITKKGDSRTRNKIIQATRALLNSKLDNSVKRFYEGLVKKGLEKKKALIAAARKLVKVMFAVLRERRQFMDFVENKCNLCVGG

SEQ ID NO: 98448 - protein, 453 aa, unidentified
MKTLSVINPKAAGIDVGSEKLFVSVAGDEAVVLGTVTDEVYRMRDFLKENGVTTVAMEATGVYWLYAYAVLEAAGLEVIVVNGRYVRNLPGRKTDMCDCQWLATLHAHGLLRGGFVPPAQIRRLQDYQRLRADHISEAASQVQKMQQALERMNIKFHDVISDLTGVSGMKVIKAILAGERQPERLLELCDRQIQKKKSERVLESLHGVWAPEHLFALGQALSVWEFYQKLLAECDRQIEAVLKDLAGPPPASPPSSPEQGEAQDKAPKPPGKNAPQIEDLHALLVRICGGRDATDLPGVADYLWLQLVAETGTDMSAWSTEKHFTAWCGLAPGTRQSGKRKGSVKRQRNRAGRLFCAGARSLVQSVDKGLGGFVRRLSRRKGGLVATKALARKLAGLYYRVLRYGLEYAERGLREYEHKYEESQRRLLGKLAAKHGFLLTAIPQESDKKWLEA

SEQ ID NO: 98449 - protein, 346 aa, unidentified
MLVIGCDFHPGWQQVCWVDTITGETQEKKLVHGSGEAERFYRQLSGPALIGMESTGNHQWFLEMVTAAGHELWVGDAAKIRASDVRQQKHDRRDAALLLKLLLDGRFPRIWVPSSEQKDLRQLLIHRHKLVRVRAQVKNELQHLALNQGVQRKQRLWSAAGQKVLNELALRPWGSRRREDLLKLLAMLDQQIAPLDLAVEQAAQENSQAKLLQSQPGVGPVTSLAFVLTMGDVSRFRRGKQVASYLGLIPREYSSGGHQRLGSISKQGNRFMRMLLVEAAQIAVRYDPGMRNEYLHRCHSKAKGVAKVAAARKLAIRLYWMLRTQKPYPQIVRIESSSRVALVGES

SEQ ID NO: 98450 - protein, 355 aa, unidentified
MNQEKYIGMDVHQATISVAVVDGKGKLIMECILETKADTVLEFLRGLRGTVSVTFEEGTSAAWLHDLMKPHVAHLVVCDPRKNALLKDGSKSDRIDARKLAELLRGNQLHSEYHGEHGVRTLKELGRSYQTLTTDVTRVMSRIKALYRSWAIPCSGTTVYARRHRAEWLAKIPQPGVRLRAERLYQQLDLLQPVRQEARGDLLRESRKHDAVKRLRQIPAIGPIRAALLVAWLQTPHRFRTKRQLWAYSGFAIETHDSGEYRYVRGKIQRNRERITVRGLNDNHNHDLKNLFKGAALSASTHPGPLRDFYAALVEKGMRPTMARLTLARKIAAITLTIWKKGVSFDAQQLHRQAA

SEQ ID NO: 98451 - protein, 483 aa, unidentified
MKPKPEEKNKRATNHPTQHHWDEMNRKQRREMTRKIESEDLRLEVLHPDAAGIDIGNESHYVSVPPSRDSQPVRRFGCTTAELRAMAAWLKQCRIRTVAMQSTGVYWIAVYDILEQAGLEVYLVNARDTKNLPGRKSDVQESQWLMKLHTYGLLRNSFRPPQEIRVMRTYWRQRNDLVQSASRHILRMQKALTQMNLQLANVLTDISGATGQAIIKAILAGERNPHKLAEFRDYRVKASEGQIAQSLEGNWQEDLLFVLKQEHEGYEFCHKQMAECDRQLQQYLQQREDRSHGAPLPEEKRKGRLQKKRANKPQFNLREGLFRMTGTDLTRIDSIDVMTATTVISEAGYDMSKWKTENHFVSWLRLCPDNRISGNKVIGKGRLPTNNPISIALKMAATTLRESKTYLGAQFRRLRTRLGAPIAIKAMAAKLARLVYRMLRYGMKYLDQGAAVYEIRHRELQIKRLKAKAEKLGYRVTSIPAAA

SEQ ID NO: 98452 - protein, 431 aa, unidentified
MTNHQLIPNKGVLVAIDVAKARNDILVDIPDRGRRRRLTILNERADHDRLIGILSDLKEPVLCGFEATGNYHRPLAWRLLEAGFDVRLISSVALARTREALHNSWDKNDPKDAQVILHMLKIGACQRYYDPLARGISDIQELSKTHEAISRAKTEALHRLQTHYLPLYFPEIDRFRQNTRSDWFFAFLDRFPVPASIVSLSKEAFIEAAWNIVGRKVAKAQLLGDIYETATASIGLPIPADAIAVRMFRMIIAEARSLIRQRDEIEEIANTVLQGNRDYQLLRQVPGIGPINALTIIAEAGDVRRFGHHRQFLKFCGLDLATLQSGTFRGQTKLSKYGNARLRRTFWLAAQVAIRQRDNSFRDKFERYIAKDRANKDLRRKALTAITAKMARVVHAVIKNGSDYRPFFEGKVPGGRTPLSSAVRAQPRPCR

SEQ ID NO: 98453 - protein, 367 aa, unidentified
MGWMAPLRHLSAKVLVDRKPPANREPSMNEITTVGLDLAKHVFQVHGVDAEGTTVLRKQLRRGQVLAFFSRLPRCLVGMEACATAHYWARELRTLGHEVRLMPAQYVKAYVKRNKNDAADAEAICEAVARPTMRFVPAKTAEQQAAVLLHRGRERLVRQRTMLVNALRGHLAEFGVIAPQGLRNVGRLIAIIRDEKDARLPGLARQVLQVLAVQIEQLEAAIAALEKQLMGWHKSNPVSQRLATIPGIGPIIATAIAAMVAEPSGFRSGREFAAWLGLVPRQNSTGGKNRLGGISKRGNQYLRRLLINGASANLLRSKATNADPWVIGLRRRRPSLVVAVALANKTARIAWAVMHRQENYQRMATAA

SEQ ID NO: 98454 - protein, 423 aa, unidentified
MPHRIAGIDVHKKKLAVVVADVEVEDEYQFERRWYGSNPEQLRVLSEWLIEQQIEEVVMESTAQYWKPVWGALERYWKPRCQSREGAGRMSGTLHLAQALSNRGRRGRKKDFRDAERLVKRLVSQELVLSFVPDTEQRMWRTLTRTRYQRTRDKVRLQNQLEALLEEAHIKLSSLVSDLLGASARRMLKALADGETDPAALAALADQRLRATPAQLHDALGACTELNPVYRRLVKMTLEGLQFVEQQIGQLDQEMASLLRQHQDAVERLAVVPGLGVDSAQQIIAEVGAKAATFPSAEKLSSWVGACPGEEESAGVNRSRHSPKGNRQMRRVLNQAANAAVKHKGSIFEIVYRRLVPRLGHNKTIGVIAHRLCHLIWIILHKGVRYEERGPAVSEKSRQRRTARMVRTLRILGYRVEPLANPT

SEQ ID NO: 98455 - protein, 431 aa, unidentified
MKLQDYGRCQKKRNLFVKQSDLLLVGIDISKAKHDACFDRTNHCLTFGNHREGYQKFEATVRTTMELTGCSRSLIAMEPSGLYWQGLYNRLRQCGFNVCLVNCLAVRNNRRTMHDGLSKTDKKDAQSILDLVRQGKFFLPVVREPELEAAYRLMRRHMACKKRVSQLRNQLRGIVHLSFPEFNELVPDITQPTALRFLISNPTPTFITMSGRKRFLEKWRPRRKAGQWNRAKLERIYELAKKSVGLKDPFRVDAMEIRALAEELKACIAQEKQWAQEAYGMLKHREDLQLLLTLPRIGKTAATAILCYIGNIDSYSNGKQLVKLAGLDIRHCESGSSIRKHPHISHVGSAFLRHIVFYYSLRLIGYVPEFKALHQRYKQNAPGKGAGKRGLMVVCDKVLRIIYAMLKKKKRYHREHDKMIACHYEKLSKVA

SEQ ID NO: 98456 - protein, 337 aa, unidentified
MEKIIRIGLDTSKKVFQVHGVDDAGRCVLKEKLQRRELLKFFRKLESTLIGLEACGASHHWARELRALGHEVRLLSPSYVKRFLVRQNKNDARDAEAICEALGRPSACFVPIKSETQQADLMLHSIRDLLTKQRTMLINAIRGHAAEFGIVGALGTANVPGLLDKIRSSAIPALARDLIELLAGQVELLDAKVSQIDRRLRDWFRASPEAQRLATIPGIGVVAASALAMKIPDPSVFQSGRHLAAWLGLTPRQNSTAGKSRLGKITREGDETLRNFLVVGATSVIRWAKPGRTSPWLLELLKRKPRKLAAVALANKNARIAWAIMTRAETYRRPMPA

SEQ ID NO: 98457 - protein, 340 aa, unidentified
MNQKVENCVLDNEKVVANTCDSTYFVGVDISMKSFHVALIQEKKKVLWDESFSMNQKGFEAFYQKLQSYSNCIVGMESTSTYHLNLLLYLLEKEVFVVLLNPMLVKRYISSQTLRNCKTDKADASVIASFVKDTRESLTPYTETQTHHLFRLARCKEDMTHQITALKTKLKQLLRLTFPELVDSYKIYTATMLQLVTFYPSAQAFYKAGEKKIDKRLLALSKGKGKPVSYTGHSICHLAHHSIGRTDPSVEFVIQQTIQTLQFFETKKKEVKAKLEEEVKKFAVEDVQILSSIPGIGKDSAVHFMAEIGSMDRFRNYKALTAYIGTDPGTIGSKSSPKKD

SEQ ID NO: 98458 - protein, 336 aa, unidentified
MDVVHRRCAGLDISKKDAKVAVRVAGGGRAGTKTTVTTWSSMTGQVLALREHLVAAQVTCVVMEATSDYWKPFYYVLEDGPWELMLVNARHARNMPGRKTDVSDAAWLAQLGAHGLVRGSFVPPAPIRALRDLTRTRTALTRERAREVQRLEKLLEDAGIKLSAVATDIVGVSGRAMLEALIAGQRDPEVLADLAKRKLRWKLGELSEALDGRFADHHAFLARTHLDLIDHLTGTIDQVTTRIEEAMAPFRGVRDLIVTVPGISTGVADVIIAETGADMTRFASPGHLASWAGTCPGANESAGRVKSDLVQMKGCGSWFQALTQFRMSVSRAWTER

SEQ ID NO: 98459 - protein, 409 aa, unidentified
MGLYCGLDWATAHHDIVVINDNGKVVARGRVGNDAAGFAALLTLLVEAGDTADHPIPVGIETDRGLFVAALRETGRVIYPINPLAASRYRSRHSVSGAKSDATDAVLLANIIRTDAAAHRPLPADTELAQAIRVLARAQQDAVWARGQVSNQIRDLLKEFYPAALVAFADLDGGLARPDARTILAAAPTPTQAAKLTSPRLRRLLIKAGRQRYLDRDVERLRAIFTGTYLHQPPVVEDAMGIHLTALLGQFDAACAAADALAEAAITHFERHPDAEIITSFPGLGNLAGARVLAEIGDDRSRFTDARGLKAFAGSAPITRASGKKTVVLHRHIKNRRLNAVGPIWALASLRASPGARRHFDTRRAAGDWNHQAQRHLFNKFLGQLHHCLHTGQLYDEHRAFPPPLPLAA

SEQ ID NO: 98460 - protein, 344 aa, unidentified
MTKISTIGLDLAKNVFQVHGVDASGAVVLGRQLRRAAVEKFFAQLPPCLVGMEACGSAHQWARVISGYGHEVRLMPPAYVKPYVKRNKNDGRDAEAICEAVSRPTMRFVPVKSVEQQATLAVHGTRALLVRQRTMIANALRAALSELGIVAAQGYEGLRELMARLQEPSDEIPEMMRGALLLLAQHWQALDTDERVLERQIAKAARCDGEARRLMEVPGVGPIIASTVLAKVPDAKVFRSGRDFAAWIGLTGRDHGTGGKHRPGRISKQGDRMLRALLISGASAHLRQQKRRGISDPWLRELLARRPYKVAMVAFAAKTARIIWAMLVKGEHYRDRASAPAAAC

SEQ ID NO: 98461 - protein, 438 aa, unidentified
MKSLPILDARATGIDVGSERVYVSVGGGEPRVFGTMTRDIHEAVRYLREQGVGSVAMEATGVYWMCLYAALTAAGMRVVVVNGRQVRNLPGRKTDMADCQWIATLHAHGLLSGGFVPTAQVRQLQDYMRLREDHVDMAASHVQHMQKALERMNVKFHDAISDLTGVSGMKVIRAVLDGQRDPQRLLELCDVQIRKKKAERVLESLRGTWQAEHLFALRHAVAGWDFYQAQIIECDRAIEQVLQEMGGPPDDSGEGHRGKKAAGSNSPRITGLHQMLTQICGGTDPTRLPGLADHSLLKLISEVGTDLTRWKTEKHFTAWLGLAPASAQSGKRRKNQARQLNHAGRIFCDVARSAGNSIDSAFGGFYRRLKARRGGLVANKALGRKIAVMFWRLMVHGTQYVEEGLQKYEQRAVVSQQRTLSKLASKFGMQLVKAPAAA

SEQ ID NO: 98462 - protein, 358 aa, unidentified
MRFYLQQHRFYCGVDLHARTMCVCILDADGTVLVHEDIAADSKVFLQLIAPYRDGIVVGVECMYGWYWLADVCHEQQLPFVLGHALYMRAIHGGKAKNDRIDSAKIARLLRGGTFPIAYAYPKGMRETRDLLRRRMYLVRKRAELSTHVQIVNSQYNLPPLGKRLSAVANRAELKIAERFRDPSVHKNVAVDLALADHLDGVISELEAYLTQTAKVDDADTYQRLRTVPGIGKILSLVLLYEMHDVCRFATAGQFLSYARLVRCDHESAGKKLGTGGAKIGNAHLKWAFSEAACLFLRFSARARKWKQKQAAKRGAGKALAILAARLGRAVYHLLRKKEAFDEDRFWGGVAADKKSAV

SEQ ID NO: 98463 - protein, 385 aa, unidentified
MLAHPTQTQAAARCQANTLFVSLELSKVRWLVTVSAPASDKLSRYDVPGGDGQALLKLLARLQAAASERTGAPVAIVVIQEAGLDGFWIHRLLVRNGIDSHVVDPASIAVNRRHRRAKTDRIDGVKLVRTLMAWMRGERQVCSMVQPPSPEDEDRRRLTRERARLLKERIQHTNRIKGLLCGQGIPDYDPLHRDRRARLVALTTGDGHSLPERLKTEIGRELDRLEVVVSHLAAVERERDALMAQTIAADPCAAPAALARLRGIGPELASLLWLEALFRPFDNRRQIAAYAGLTPSPWQSGGIDREQGIAKSGNPRLRRAMIELAWFWVRHQPGSALSRWFVERVGTARGRVRRIAIVALARKLLVALWRYVTQGVVPEGAVLKG

SEQ ID NO: 98464 - protein, 372 aa, unidentified
MNNKPNGAVSKGIRDKATQDNVVVRALNLGLDVHYRQVTVAMQEDGGRIKAAGKMNHGAFVDWIGAKLEKGWQLYSCYEAGAGGYWLHHQLVELGVKNLVVAPKAMGGPEAKRQKTDKRDSAQLCDALDRYLRGQNKALSVVGVPTLEQEQNRTLIRYHRQMIKDRTRAEARGKGLLCAQGIEVGGRWWESKGWTQLQSDPRLKDWMKEQLEDWRKKILSAQAEEKPLRKRIEALAPERLPKGVGAYSAAVLKYEMKGWERFSNRRQVASYTGLCPGIHLSDGRGKEGSINRCGNPTVRWTLVEMVWRLMIWQPQYGPVRQLATGLVKSKRAKKRLVVKAARRLAIDLWRLETGQTTAEKLGLIMRLRSSSK

SEQ ID NO: 98465 - protein, 310 aa, unidentified
MIIHPDYVGIDISKAHLDIFDASRGRQQRCANTAKDIASLIRSWKRQPPFILFEATGHYDALLRRRLAKAQIPFARVNPARARDFARAAGYLAKTDSIDAKMLAAMAQCLHPEPAQPVDIDRERLARLHKRRDQLVAMRQQERTRASECACPDTNADISRHLTWLDREIDTIEARIETLIAASTNLAAAADLMRSVPGVGPVTAAALLALLPELGARSPKTIAALAGLAPFNVDSGQCRGLRRISGGRKRVRDALYMAAVAASRSKSRFATFYKTLRNAGKPPKLAFIALARKILTTLNAILRDQIAFQP

SEQ ID NO: 98466 - protein, 443 aa, unidentified
MSRGKRTLEIAYPNAAGVDIGSASHFVAVPADRDEQPVREFASFTADLQALAQWLKDCGVEIVAMESTGVYWIPLYELLESQGFTVHLVNARHVRNVSGRKSDVLDCQWLQQLMSYGLLSGAFRPKQQICALRALSRQQSMLVRYQRQHVQHMHKALSQMNLQLDNVISDVTGETGQKIIRAILAGERDPHRLAQLRGQRIRAHEQELAKSLQGTWRSEHVFALKQAVDLYDAYQQKLQECDEEIARALAELACHPAPPPPALSRGRKSKGEPANLRNAVIRACGVDLTRIPGIGTGTALKVICEVGIDLSRFKTIKHFTSWLGLCPGTKISGGKVLSGASKRIANPLAQALRMAAVSLRRSPTALGAYYRRLCARLDKAKAIRATAHKLARLIYILLTRGEQYLDQGEAYYEERHRERVIYHLNKKARAMGFTLTPTQPIPT

SEQ ID NO: 98467 - protein, 353 aa, unidentified
MSYDYHIGVDYHKAYSHIVVQDTGGKTLRSGRVRNDRRSLAGFLSPFAANAHAVLEATRNWTVMFDWLDELCDEVVLAHPLKVKAIADAKIKTDKIDATILSHLLRADLIPAAHAPSLRAREARSALRERMFYVRLRTMVKNRIVTLFDRYPEERAKLKPLTDLFGTAGRKQLAEVAVSELDRIQVDRSLALIGDLNTRIKESEATIKAQSKGNANVRRLKTLPGIGEFFARLIDAEIDDIGRFRSAGKLAAYAGLVPSTYSSGGKTFHGRIIKQGNKWLRWAFVEAVAPAVATDPDLKAYYERLKATKGTNPAKVATARRLLTIAFQLLRDGRSYERRGARPEGRSQQSRLS

SEQ ID NO: 98468 - protein, 338 aa, unidentified
MIAVGVDTHKHEHLARALDGLGQLLGGLTVDASLAGYTQLVQWLRTLGEDVLVGIEGAGSYGAGLCEFLLAEGITVVEVERPRRQDRRRGKSDEIDALMAAKKVLANDGLSTPRAGGTRQALAALLIAQRTCKGERTRLLNQIQALHTTAPLALRERIGEGNGRKLATRLVKMRTRSDRPASEQLIFTIMRDLARRSQELAAQAGAYEHELAILISSLDGALLEEQGVGPISAAKLLVCDPKRLKSEAAFARCNGTAPKPASSGQTIRYRLSRGGDRQANNAIHTIALHRARRDTQTRAYLDRRISEGKTPREAMRALKRHLSRRLYKQLITIPLTSS

SEQ ID NO: 98469 - protein, 353 aa, unidentified
MTRAMIAVLGIDLGKSSCSLVGLDAEGAVVLRKRMRRETVIAFATKLPTCVVAMEACCGAHHLGRLLAGLGHEVRLMSPEYVRPYVKAQKNDDRDAEAIAEAATRPTMRFVELKREEQLDLQTLHRVRDRLVGLRTMLTNQLRAILLERGLVFPKGRRKLELAIDALLLEAQPALGVRMQKLIGDLREEWRGIDQRIGSLDTEFVARARADSATRRLMTIPGVGTLTATALVAAVDDAAAFRRARDLPAWLGLVPRQHTTGGKPKLLGISRRGNSYLRRLFIHGARSALPTLSKTDTPTGAWLRALLSRAHANVVVVALAAKMARIAWAMLRRSTEFTPEPGLAMTRLVAPPR

SEQ ID NO: 98470 - protein, 314 aa, unidentified
MYYYIGIDVSKKVLNIFDGKKDLIFDNKENLSSFKKYLKKRCSDLSSLVILFEATGIYSYHLKAFCADHHIKAYIINPQASHNFAKSLGTRSKTDTTDARTIWAYHKLISDKDIHIPKIDPVSITLASYLASYQLSLKQRLSFANHLEGVKDKALYRLLKKELERLFKLEQELLVRMDDYIKEHPKLNEDYQRLLSISGVGQKTAISLLALFRAYPATNRKQITALIGLDPVQRQSGTSVHGRSRISKHGNQMMRKCLYMPALVSIRYNQKIKVFYDRLVSKHKPKKVAIIACMRKLLLIAHAIYKNKTVYVPG

SEQ ID NO: 98471 - protein, 353 aa, unidentified
MGNILAIDLGKFNSAVCIFDRSSLKSKVKTIRTRKQVMHDLFVEYQEDIEIVLFETGSQMGWVADILWTLNIPFKVANTNHSAWKWKNNPNKSDRKDAQRLAMMYHTGFFPTVHVPKREVRQKRSLIVYRDDLVKRITKIKNSIRAILSREDIHQFGGKKGWTIKALAPIRKLAIDINEIADPEEFWKGQLDTELQALDSATALLKNIETKLNALGDADEKVKRLRTIPGVGPRLSEAVVAIIDDPHRFKNGRHVSSYLGMVPRRWQSGAVDITGRISKCGNKLLRTLLVEVSWLGLRESWMREIYDKVRRGDKKRSKVAIVAVARQLLVRCWAILRDESCWDADHSKRLSNC

SEQ ID NO: 98472 - protein, 344 aa, unidentified
MFYAGIDAHVKSSTIWIVDRKGRKVSNSTVVTSAEGFAAGLGRWADRGLKAAVEASGITPWICQLLKDLGVRVVVVNPNRVRLIAESRKKADRVDAETLAELLRLGGLPEVHQPSLEARRLRTELSVRRQLVRQRTGLTNQARGLLRGWGVMLPTRFFQARTGWKDLEARRLPEYLRPLLETMKGVYEQLTRAIRQVEATLKQSEHSDERVARLETIPGVGRVSALTLVAAVDKVARFVRAKQLTAYSGIVPTVRSSGEREQQGSITRQGRSEVRAVWIQAAHSLVRSRQTDARLLQKWFWKVARRRGVRTAIVALARKMLSLAFYLLRDGTQYEPLRLRKAAA

SEQ ID NO: 98473 - protein, 383 aa, unidentified
MIVIGADTHKRTHALAAVDAGTGRVRGQRQIGAEEPGHLAAARWARRLDEERVWAIEDCRAVSRRFEQALLAAGERVVRVAPHRMGSSRRGEREPGKSDEIDALAIARAVVKDGPERFPAAHLDERAMEIRLLCDHRNDLVAERTRAQNRLRWHLLELCPELERTLKRGSLAQPRQLDRIDRRLRRLPAHARVRVAREQVRQLRVLTRQIDALERELLALVAAHRPQLLAETGCGTLTAAILIGRTAGAVRFQTDASFARQSGTAPIPCSSGQRDRHRLDRGGDRQLNHALHVIAITRARHDPATQAYLERKQAEGKTKKGALRCLKRHLARRFHHLLSLPAAPPQPNRGTTDKTPVHPSQRDPSDVDASIPSSAPTPMICLT

SEQ ID NO: 98474 - protein, 344 aa, unidentified
MEHYAGLDVSVKETSVCVIDGTGKVIQEVKVATEPDAIRAVLVDDTFAIERIGLEAGPLSQWLYSGLAEAGLPVICVETRHMKAALSAQLNKSDRNDARGIAHMMRAGLYRPVHVKTLASQKRRMLLTSRQLLQAKALDIENDLRGTLRNFGLKVGTVGTSKFEARICELLADHPDLAAIVEPLLIARRALREQLGVLHRRLLAIVRQDEVCRRLMSVPGVGPMVALAFRATVDVPARFKNSKAVGAVFGLTPRRHQSGEVDRMGGISKCGDAMMRRLLFDAAHVMLTRTIRWSWLKAWGMKIARHRGMKRAVVAVARRMAVIMHRMWADGTEFRWTSTNIAAA

SEQ ID NO: 98475 - protein, 435 aa, unidentified
MEQPTRFIGMDVHKDTIVVAVTAAGDVGKAVLYGTFPNTAATVEKLVRRLRQAGSGPLKFCYEAGPCGYGIHRALTKMNEDCMVVAPSMIPRKSGDRQKTDKRDAASLAVLHRGGLLTAVWVPDAAHEAMRDLIRARLAAVRAVRAARQQLSAFLLRHERIYPAGRTAWRKAHRGWLADQSFAQPAQQIVLEESIEAVRLGEQRRDRVDGYLRAQIPTWSLFPLVQNLSALRGLDTIASAGLAAAIGNPSRFASAPDLMAYLGLVPSEHSTGPKRRIGAITKAGDVHARSLLIEAAHSYRFPARVARHKLTAVDAVPDAVREIAWKAQTRLCQRYRHMMAKGKLKQVVVTAIARELAGFVWSIACITTDPPTKNSAVTTPSEKICPTGSTTRSSVSRRQPIKETARRAERPGQIRTASADGKRPDRMIAHQHSSG

SEQ ID NO: 98476 - protein, 342 aa, unidentified
MEELYYIGLDLHKKIIAYCIKTSSGVTIGRGTVAATRSALLKWVESLPKPWVAAMEATLFTGWVYDFLKPHAKELLVAYPAMLKAITAAKKKNDRADAEKICDLLRVDLLPLCYMAPAELRELRRVLRYRNFIVRIATTVKNKMSGLLMEVGAEYSKKRLHGRTYFGNLLDTVEDVPSSVKELLKLSRAGLEMFAAVQKKLLAALRENVLIRERVRRLMTIPGIGEVTALTWVLEMGDPQRFSARQAVSYCGLCSAQRESAGKETRGPISKKRNKHLQSVLIEAAKLAPHWNPQLAMVHERELKKGNRNRATLAVARKLVTYMLAVDKTGIDFVLAHEADAA

SEQ ID NO: 98477 - protein, 366 aa, unidentified
MPDSTTTHLPVAGLDVHAASIRLAVVREAELLDERTLPYDCGLVERELRRLGATRVCYEAGPTGFGLARHLRGAGLECDVVAPGLVPRRSSDRVKTDKRDARKLALLYQGGMLKPIWVPSAEQEAVRDLIRAREDARQDRSRARQRLGKFVLRRDRRLPGKGWTLARRQWLGRQAFEHVAQQTAFDDYLLACDLLDRRIETLERQIDEWAAHDSFRQLVGRLRCLRGIDTLTAIGLVAEIGDFSRFRTAPAFMAYLGLVPSESSSGEHRRQGSITKTGNNHARRLLIEAAHNQRRRPARSAHLARRQAGQPAEVVARAQQAQLRLHKRWQRLSARGKHSNKIAAGVARELAGFVWAIATEQPLHAG

SEQ ID NO: 98478 - protein, 413 aa, unidentified
MEVLVERCAGLDVHRDTVVATVRTPARERRRRREQSTRTFRTTLPGLRVLRDWLAGEGVTLVGMEATGVYWKPVFAVLEERFECWLLNAQHLRNVPGRKTDVQDSAWICQLVEHGLVRPSFVPPAEIRRLRDLTRLRRAQTNERIRTVQRLEKVLQDAGIKLTSVASQTYSKSARAIIEALLGGTSDPVALADLAKGRLRSKIPQLVEALENRFDITHHGVLAAQLLAHIDALEVAIATLTERIEHELAPFSDLVELLCTIPGVATRTAQVLIAECGVDMTAFVSAARLASWAGICPGHHESAGRRRSGRTRHGSGWLTEALTEAAQAAARTKNTYLAAHYAQIRGRRGDAKALGATRHDILVAYFHIVSDRVPYRELGADWQKRRYSVEHRASRLQRQLEALGYQVTLTATA

SEQ ID NO: 98479 - protein, 364 aa, unidentified
MNKCHSNTELSSHEGTRCQFNGGTGVIKLGIDVHQDFYVVVEQVEGSNSKPPQRFQKQAFLHWAAKLRSQSAEVYAVYEACGFGFTLQRNLSALSIHCYVVCPQKLDEQNKRVKTDGLDAKALCLKLDRFVQGNRAALAIVRVPSEAEEQKRAIHRQREQLVKARKQLEAQGRSLMVNHGLEPVQSWWKPRAFAALPVPQWMKELLANSQPILVALQQKISTLTLQLQAAAAPTNPRGLGQMTSVIIDREIGDWNRFNNRRQIASYTGLCPGEYSSGQTRLQSCVTKHGNPRLRAALVELSWRLVRFQPNYKPIVKWRQILATGALATGAARKKAIVAVARQLAVDLWRIKTGRLRAEELGLIN

SEQ ID NO: 98480 - protein, 417 aa, unidentified
MIRKVIDVIHHNVGGLDVHKKMVMGCRRRLVDEIHAELETKPFKTTTAGLRQLANWLTEWNVTHVAMESTGIYWVPIWNILQDHFKLILVNAQELKKVPGRKDDLLDAEWIAQCMQCGLLKASFVPSLEIRQWRHLTRQRAKLSDHHTALVNRMHGVLHQSNIKLSDVASNIVGVTCRKIITAMTDGESDPENLASLGKGRLRAKPEDLIESLDGRVDDHDRWLLRRLIFQLKMIEKEIATYDERIRTQMNEYQHQIELLDTITGVGRRVAENILAEIGPDMTQFPSDDDLVSWAALCPGRNESAGKKRSSRTANGNKWVRRTLVEAAWAAVRSKNTYIAALYKRLAPRRGKNRAIIAVARTILQSAWHILSKDIEYKELGGNHFDNLNRDKATNYFVKRLQHLGYQVDLTDINTAA

SEQ ID NO: 98481 - protein, 388 aa, unidentified
MNRIIKIGMDVHSTNYTLCAMEPTIGSEDRIFGEIQVAPDYKEVICFIESLKMKLGLSDDYSIECGYEAGCLGYTLYHQLTNAGLKCVIMAPTTMLTQQGQRVKTDKRDARLIAQCLCYGGYHPVYIPTGEDDAVKEYLRMRDDHKLALKKLKQQINAFVLRHGHKYVGTKWTIKHVTWLNKLELEPMYRETLNEYMASYEELGAKIERYDKRIEEIASEAHYQENAKKLGCFLGIRTHTALSLIVETGDFKRFAKGNTYAAFLGLAPGEHSSSTNVNRLGISKAGNTHLRCLLIEAAKGICKGAIGHKSKELRSRQSGQAADVISYADKANTRLRSKYYKMIRYGKKKNVAVAAVARELACFIWGMMTGNISVAGSIGTSVPAVGQG

SEQ ID NO: 98482 - protein, 416 aa, unidentified
MPHILFVGIDVSSKNNVICCLPSGDGAKSLSRFTVSNDEPGVLSLHERILALMQKHNLTHIRFGLEATGCYSSHLARYLESVLDFAPFEHSVYMFNPSLIKMFKKTHFLDAPKNDRVDAWFIAAKLRSGHLPRAYTWSESLAALQRLTRTRYHIVQTLTRETNFLLTNLFLKFSSYASGPFGKKTSATSLAVIQEFASVEDIITMSVDDLVAFVAECGKNRFDNPQEVAKALQKAARSSYRLPKAMADAVNLAMASNIRIIRSLQEQAKSLQKAIEEHLATTPQTLTSVPGIGPIFAAGLLSEIGDIQRFPNQTALAKYAGLAWTENQSGDFKGVESRLIKSGNRYLKYYFTEAAKSVQVHDIVFAQYYAQKKAEPAKYAEKRALALTARKLVRLVDYLLRTNRLYEPREVIRQQA

SEQ ID NO: 98483 - protein, 412 aa, unidentified
MDVIVQHPAALDVHKEQVTACVRFPAPDGTRAQDVREFKTTVGGLLVLHDWLKAHGVTQVAMEATGVYWKPVWAVLEDSFDCLLVNARHVKQVPGRKTDVKDAEWLCQLLEAGLLRRSFVPPKPIRQLRNFTRYRKAQIKERQREANRLHKALEDTGIKLDCVATDILGVSGRAMLDALCAGTTDPEVLAELARGRLRAKLPALREALEGRFDAQHALLIGAILAHLDFLDEQIERLSDAIEEQLRPFQPAVDLLRTLGGIETRTAQNIIAEIGTDMSVFPTAGHCVSWAGQCSGNDQSAGKRRSGRSRKGSKWLNDALKDAAMGAIRTNDSYLQAQYRRLKPRIGHGRALGAVKHSILCAIWHMLSTGELYRDLGGDYFRKRDPERQTRRLVAQLERLGHQVTLQALAEAA

SEQ ID NO: 98484 - protein, 346 aa, unidentified
MLYVGLDLSRKRIDFHALTEGGELVERGAVPADRDGLARLVYRLGGYGREVQAVIESMNGARFVHDQLELAGFEVEIADAQRVKGLAPLACKTDRIDAWVLAELARRELVPAIWLPDPAVRAERERARFRLHLVRKRTALKNRIHATLIAHGHPCPVSDLFGTGGRRLLERLDLPEPWRGTLEASLRLIDILEVEIDACERELRRLGAEHRYVPLLMSCPGIAWVLGYTIASELGDVARFQSPHKLVGYTGLCPKVDQSGERDWRGPLKKNGPRYLRWALIEAAQHAGASSHYRALSQRKRAQYPGPRGSKIAAICVARKLAEAIWYMLTRNQPFAPAGATRPLTA

SEQ ID NO: 98485 - protein, 527 aa, unidentified
MAVRSKSSRRRKARPHVFQKPRGVLHPRVQAVGPEHFAIVCVDCAKARSKIMLADFYGRVLIEPTTVAHNQFDLDAGVRSVRDAMVQHELKDVIVVVERTGRYHKVVQRIFTKAGFEVRVVHPFATKQFRQPANPGNKTDDTDLYAIHRATVTGFGLSEPKPDPLFAHLKVLVRHRRSLVRSRVTIQLKMRDHLEACMPGYSDCVSDLFDSDVAMWVAKNLGSAEAITDAGVTGLVRRLSEAGVRKNVPVVEKIVAWARSAPTADEAASLHHRFFVELDEDQTSKRRMIEGLEAEIAEQLVLTPYVLLLAIAGISVVSAAQFAGEARPMERYPSARAITGRAGLYPSRYQSDEVDRRDGKLIRCANRDLRYALTLIADNLLKCNEYFRVLAASWRLRDKDPRDVHVKVAGRFSRIAFQVVGGRQVYRHPCARQHDYILEKLSDFCIEHKIPPERHRRILNAAADQLPPAARPEEAIPLQEKLARVRKHRGAGPRSLGEILPEVLAKLGVTLVRSNESGESDLTTRPS

SEQ ID NO: 98486 - protein, 535 aa, unidentified
MATHIGITAPRLTKSPRRRKSRFPETVQKPRGALAARVKEVGAEKFALVCIDPAKQRSEWMMADYLGNILIQPQTLEHQSVHFDLAVQLVREAQQQHGIAEVLVTVERTGSYHLPPQRAFARAGFSTRVVHPFATKQFRLPADPGNKTDRTDLMAQHRAAVAGFGLAEAIWDETHRRLQLRIRHRRDLVEKSTALICQIREHLHLSLPGYAELFSDLFTHSAALAIARACDSPAAMLQLGQAGLRQKLREQQIRVQAPTLDKILAWACQAARQVPTPEASPRHALWTDLDDLRQQLRRRIQSLEVEIADDLVRTPYVRLMAIPGIGVVSAADFAGEMGPIANYANANAITGRSGLFPSRYQSDTTDHADGPLVRQANRSLRAAILRIADNLARSNNHFRGRAELARAGKVDERAIRVKIGKSFTRLAFAAVAGDQPLRHACCAARDSIIEKLREFHLEHGTSPAAVLAQLELCVPQLLADTRGHEALIVSQVLQRQQTRRRGPTRLAELLPAVLARLGVTSLDTQPDTTGTTAPN

SEQ ID NO: 98487 - protein, 317 aa, unidentified
MQSPSAVLNIGIDVAKDALVVACSEGSFPVREVANQRAALLAFLKGLPAASRIGVESTGTYHELFAETAHQLGFRVFLLNPKDTRHYAKAVGLRGKTDRVDAELIARMIAHEHTKLHVWNPPTPQQREIDRLIKRRATLISLREAVEMSLHDLGGFADELKALRTHFNQLIARIDLRTKALVEASPGRKQNVTRVCTITGVGPVVGTALVNTLERVPVKNADAFVAFTGLDPRPDDSGQHRGKRRLSKRGPGELRRLLFLAAMSAAKTKTWRPVYEHYRAKGLSGTAALVILARRIARTAWSIYTYKTEFDPLRLTN

SEQ ID NO: 98488 - protein, 417 aa, unidentified
MKKDNKFRKKNELHAKPAKSCGRRQGEPKELLAELVVRLREKLDGKRASGRLGESYRRGDLRPNLERLTVGVDLGDRWSNYCILDLEGETLGEGQLRTTQQDFAEMFQSLSSARVVIEVGTHSAWVEEVIGDCGHEVLVANPRLMEGSKRRKRKNDRIDANKLARLGRMDPQSLYPIKHRSREVRQDLVLLRARDALVAARTELINTTRGTVKSMGRRLPGCSSRSFASQAKEGLPDEIREALLPLLQLADALSHCIKEYDRRIEEMASEKYGHTKLLRQIKGVGPITSLAYVLTLENPERFPQSRDVGPYLGLVPKQEDSGESQPQLGISKAGDRMLRKLLVGSAQYILGPFGPDTDLRRYGLRLCERGGKNAKKRAAVAVARKLAVLLHRLWVTGEVYEPLRNSMSLPSVAATAA

SEQ ID NO: 98489 - protein, 466 aa, unidentified
MSKPEQNSGPKVAGRKGSKTKPVVRECQPDAAGCDIGAREIFVAVPADRDANPVRHCGTFTGELNKMAEWPVQNKIKTVAMESTGVYWIPVYDVFEKHGLEVRLVNPRNMKNVPGKRTDYHECQWIQYLHSMGLLAGAFRPDAEVRAVRILTRHRNDLVDMASQHVQHIQKALTQMNVQFQHVISDITGLTGLAILDAIISGERDPAVLAQLRDPHVKASPETLRQSLEGNWDPTQIVVLKQRLELYRIHREKIDESDQEIEKLLAAFVPQVDPEKKPMPEDRKQKQRRRKKKTGSPGFDMRKEGYKLFGVDLTQVPGLMASVFTLFSEVGRDMTRWPTAAHFASWLGLCPDNDISGGKVLWRANRQVKNRAGTLFRLAAHSLHRDQTQMGHYLRRMKAKQGPAAATTATAHKIAVIFYTMIKNQVEYDATLWADRDLMREKRMEARLRKQAALSGFKLVPLEATA

SEQ ID NO: 98490 - protein, 406 aa, unidentified
MKEFNAETAKVETATALERVNEAEAVKTYALYVGLDVHKDTIAVAVAYPGREEPVYRREIANRPKSVLKLVNRLSKEVDGGLLLFCYEAGPCGYGLYRQILGLGHDCQVVAPSLVPKKAGERIKTDRRDALKLAKHLRSGELTAVWVPDREQEAMRDLTRARDDMKGQERKARQQLNGFVLRHGHSWPKDKSRWTKAHYDWLESLRFEHAWQQVVLQEYIDAVKAATARVAQMTGQMMAVLPGWSLAPVVNSLVALRGIDKISAMVLMAELGDISRFESPRQLMAFLGLVPSEHSSGGRRRQGAITLTGNGHARRTLVESAWSYRFPPRQTAHLKRKAANASKEAKEIAWRAQKRLCGRYQTLTQAGKITKVVCVAIARELVGFIWDVVRHEMPRLKGQGARQQAA

SEQ ID NO: 98491 - protein, 350 aa, unidentified
MKIIGCDFHTRYQQIAMLDDETGELTERRLEHENGEAQKFYRDLLKPVRVGVEATGPLAWFERLLDELGHELWIGDSAKIRASEVRKQKTDERDAQLILDLLLTNRFPRIWVPTPAERDLRQLLWHRHKLVRMRTMVRNQLHFLAMNQRLCRKHRLFTRKGRQQLEALPLAPWTARRREELLQLLDRLEPSITQLDQAVLAEAKLRDDASRLMTHPGIGSVNALAFVLTVGSIARFRRSKQLVSYLGLNPSEHSSGGKQRLGAISKQGNTMVRWLLIEAAHQVVRLDAELRCDYQRLKSRRGSAVAKVAIARKLAVRMYWMLRSGADYAQLVRMQGSPRGTLVTLSSPTA

SEQ ID NO: 98492 - protein, 325 aa, unidentified
MTDLPPLGLDVAKSKFNACLIRESGKLRHSSFANSPAGFARLSQWLAKLGAGTAHACMEATGTYYEALAAYLHEKGHAVSVVNPAAVKAYAQSRLSRTKNDRVDAELIAGFCLERRPAPWHPPAPELRELQALVRRLDALTEMRTMEENRLASGVTVAAVRESVEEHLAYLAEQIKRTEALIRDQIDSHPGLKRQRELLDSIPGVGETTAAALLAEVPDILQYRSARRVAAFAGLVPRERQSGSSVRGRVRLSKIDNARLRKALYFPAVTALRCSPFFQAWAEGLRQRGKSKMAVIGAAMRKLVHLAYGVLKTGKPFDPEWAQRA

SEQ ID NO: 98493 - protein, 448 aa, unidentified
MDVIVERPAALDVHKAQVTACVRAADEGGRRVARVEQFKTTVRGLLVLHDWLKAHGVTQVTMEATGVYWKPIFHVLEDDFELVLVNARHVKQVPGRKTDVCDAAWLCQLAEAGLLRASLVPPKPIRALRLLTRYRKTQVSERQREANRLHKVLEDTGIKLDCVATDILGVSGRAMLDALVAGTTDPEVLADLARGRLRAKLPALREALEGRFDARHALLVGAILAHLDFLDEQIDRLSQAVGEALAPHAAAVELLRSIPGVERRTAENVLAEIGLDMTRFPSAGHLASWAGQCPGNHESAGKRRSGRTRKGSKWLNEALKEAALAATHKNGSYLQALYQRLRPRVGHGRALGAVKHSMLCACWHMLSTGELYHDLGGDYFLSRDPERQTRRLVRRLEALGHTVTLQDAVIVEDGDTVTLEDGDTVTLTHGDTGMLTHGDTGMLQEPAA

SEQ ID NO: 98494 - protein, 384 aa, unidentified
MRPAGEVLAKPFEVAHSEDGLKELSTRILSYGENTRVVMEATGRYHEPVAQALCTMGIFVSVLNPVVIKQSGAGSVRKVKSDKKDALKIAKYGIDNWRDLRQHSIMDATRQQLKLFSRQYNLHMKTVNGLQNNLISLLDKTFPGVNGIFTSVARDDGHQKWVDFVMQFWHCDLVAKVSLDTFVKRYQKWCKSKGYKFSLSKAESIYGFSQGLFATLPKSDTTKFLVTSAVSALIQTMKVRASVKAEVIRLAKELPEYETVRAMYGVGDITAAQLMAELGDVRQFANRGSIVAFAGIDPEVNQSGQQNRNSNPSSKRGSPHLRKALFQVVSTHLKRSPVDEPVYQFLDKKRREGKPFYVCMTAAANKFLRIYYAKVKECLNALQA

SEQ ID NO: 98495 - protein, 346 aa, unidentified
MSYSTTVCVDLAKNVIQISVISDRGKEVLNRSLTRRKFAEFLGKQKPALVAFEACATSHYWARTAKRHGHIARIIPAKAVAPFRQGHKTDSNDALAVAEAARRPNIKEAPMKTIDQQGLQAIQRSRDLLVQESTALSNHMRGLLMEFGVVIPQGFAALRRMLPEILEDGDNEVPDMYRPTLHRLYGRFLELRDDIQSMNVEVKELVKQHPDCKRLIALEGVGPISAVLLYASLGTGEAFSGSREFAAYLGLTPRQFSSGGKTNIVGLSKKIGNCRLRSVLIQGARAYVHKLKEPKTSKDRWLMELIERAGHGKAAVALANKNVRTAWAMLTQGTEYQRRPQLKVAA

SEQ ID NO: 98496 - protein, 355 aa, unidentified
MDSKKYIGMDVHKESISIAVMNGAGKIVMECIIETKASTILQFIDGLRGDLQVTFEEGTSAAWLYDLLKPHVTKLVVCDPRKNKSMREGNQSDKIDARRLAELLRLDHLTPVYHGEHGLRTLKELVRTYLTVTKDLTRVMSRVKALYRSWAIPCTGKQVYAQRHRAEWLGKINEPGVHRRAEFYYQQLDALRVVRQEVRRDLLAESKKQKAWKRLCEIPSIGPIRAAVLLGILQTPHRFRTKRPLWNYGGLAIEMHSSADHRKVDGQLQRSRKNVLVRGLNRNCNHDLKNLFKGAAAVASSKPGPFQEFYTALLAKGMRPEMARLTLARKIATIVLIVWKRGVCFDAQHLKPQTA

SEQ ID NO: 98497 - protein, 314 aa, unidentified
MDATVVGIDVSKDRLDVHVHPAGENFAVARTAEGLDALIARLAPLGVHAVAVEATGGFESVVVASLGGAGLPVIVVNPAQVRAFAQALGKRAKTDPIDAAVIARFLEATKPEIRALPDADTRLLADLVARRRQIVQMLVAERQRERLLPTRHLRRSAGRLIKALEKELDVLDRSIEESVRGSPVWREKEELLKSVPGVGNVIARTLLAEMPELGKLDRREIASLAGLAPWTRQSGRWRGKSFIGGGRSSVRAVLFMAAMVGARCNPILQAFHQRLIAAGKPKMVALIAVARKLLTILNAILRDRKSWQTASIPA

SEQ ID NO: 98498 - protein, 331 aa, unidentified
MSVHVGLDVGSRTTAMGWRDKGRAAGSWEIAQTPKGRKAAVKKLMALKPLSVVMEATGIYYLDLALELSAAGLPVSVINPKSSRNFARLMLQHSKTDAIDAQLLAEYGERMAPRLWVPPSPVQLELRAIGRHINRLICHCTRAKNELHALQATGTTSALLIEDEEEAIAMFGKRIERFRQAGRAIIANCPALRSQFDHMMAAPGMGEVSTFAVLAELTALPVTLKSPQVSRYAGLDVRLTQSGTSIDKPGRLSKGGNAYLRSAMFMPAMSAIRCDPHVKAFYDVLIGRGKRKMQAICAVMRKYLTGLWACIRTEEDFNTAKLFSEKHLLKA

SEQ ID NO: 98499 - protein, 384 aa, unidentified
MEKSSTLYVGLDVHKDSIDIATADAGRDGEVRHVCSIGGDLVGLDKALRRLVSKGHRLHVVYEAGPCGFVIWRHLSTQGIDCEVVAPSSIPKRSGDRVKTDRRDAMMLARLSRSGDLTAVRVPGAADEAVRDLARSREDAVRECRNARHRLKALLLRSGIAYAGKSAWTAAHLRWLATLKMEHAAQQIALQEYLHAVTEATTRIGRLEQAMRDTLPEWGLAPVVQALQAMRGVQLVAAMTLVAELQDFLRFDNPRQLMAYVGLVPGEHSSGPKRRQGSITKAGNSAARRMLVEVAWHYQHSPRVSPIIAKRHDQLPKAVTDIAWKAQLRLNAKFKRLVARRVMKNKAVVAVARELTGFVWAIGREVQTSGWQGIKIEPAGSGAA

SEQ ID NO: 98500 - protein, 391 aa, unidentified
MIYVGIDVAKDKHDCFITNSDSEVLFKAFTIFNNLDGFNDLYQKIESVMDDVTKVKVGLEATGHYSYNLLGYLIDKGLPTYVINPLHTNLYRKSLSLRQTKTDKVDARTIASMLMSDVNLKSYSDTSYHNEELKSLTRYRFDKVKERAKLKTSVSRLVCILFPELEKLVPTLHMASVYALLSEFPSAKHVATAHLTRLTNLLSESSKGRYGKDTAITFRDSARASIGSNMPAKSLELKHTIKLIQELDSEIDEIENEIKIIMDEINSPILSIPGINYRMGAMIIAEIGDFNRFDSPDKILAYAGFSPSTYQSGQLDGAYAHMEKRGSRYLRYALYNATKYVCHWDPTFAAYLAKKRAEGKHYNVAISHAVKKLVRVIYHLEKTKQQYIKAA

SEQ ID NO: 98501 - protein, 389 aa, unidentified
MKYVGIDLHKKTISGCVVVKERGQKKIAARKRLECRDEAGIKSWFSELGKFEVVVEATASYEWFVKLVEPLAQRVVLAHPKKLRIIAESKRKSDKLDAQVLAEFLASDEIPLAYRPGPRVREHRTLVRWRNYIQRRLTSVKNKLRHILAAYNADVPHLFTAEGRAHLATVKLSAADRFVAEQLVVELEQHQERLVTANCRLREFAASASLAEREARAILDSIPSVGPVTTEVILAELGDWRRFRSQAEVASYAGLAPGFRESAGKAKQLGITKEGSRLLRWVMIEFAWRMVGASRKWGGHYHRLEARVGAKKAIVAIARRLLGMIFALLRTGRKYSLALESPRPASCRSKSPRDTNPSELACLRGQPRQASSLGAGVYYGGPLSVPERE

SEQ ID NO: 98502 - protein, 353 aa, unidentified
MNNLSEANEVILGVDTHLDVHVGALISGTGRLLGTFAVETNIAGYLKLLIWGQSFGSLKRAGVEGTGSYGAGLTRVLQEHGIEVLEVNRPDRSKRRLQGKSDPTDAENAARSVLAGTSSAIPKTHLGAAEALREVSLVRRSAVKAKTQAINQLRALLISAPQEVRERLWKSKPGDCAKHCARLRSLGDTPLLATLTITLRLLGKRWLALAEEINELDKTLEHLTQEHATRLRGQFGIGPQTAAVLLSVAGDNPERLRNEAALAALCGVSPLQASSGKTVRHRLNRGGDRAANNALWTITMVRMRSDTRTRAYVARRTQEGLSSKEIQRCLKRYIVREIYPLILADLAESAACS

SEQ ID NO: 98503 - protein, 359 aa, unidentified
MQRNKISFKGQKIFIGIDVHKTTWEVAVLTESGLLRRHPQEASAKVLFDFLRKHYPDGEYHAVYESGFSGFATYYALKEFGIECTVTHAADVPTTQYEELMKTDTIDAEKLARALRRGDIKRPVYIREKDNIDDRGVIRIRRIIRKQLSGYKSRVKHMLHCNGVELPERFSKSGSHWSRAFITWLKDDVRLLSSTRLSLDLLIRQVEVIRGTLLEATRELRKLSQTERYRHRCDLLMTVPGIGPQVAMCILTEVWDVNRFSNERKFAHYMGLVPTCHDSGPNKSSGEKTFRGNKHLGPMIIEACWVAIHRDLGLGACYACHKKRMNPQKAIVRVARKMSNIIYSVLKNDKGYEPYQWDN

SEQ ID NO: 98504 - protein, 343 aa, unidentified
MERYYYIGLDIHKKIIAYCMKTIDGRMVDQGKIPADRQSLREWIKSLPGPWIGAMEATMFTGWIYDFLKPYAVALKVAHPEMLKAITVAKKKNDRADAEKIVDLLRVDLLPECYMLSEEMRDLRRILRYRNHMVRTAVTMQNKISGLLMEVGVIYSKKRLHGRKYFRELLERVEDIPPSVKALLQLSRSGYEMFRSFQKRLVVELRTNQLIRDRVARLMTIPGVGEITALTWVLEMGDVHRFTSIRKAVSYCGLCSAQKESAGKEQRGPISKKRNKHLQTTLIEAAKLAPHWNPHLAVIHERELMKGSRNRATLAVARKLVAYMLAVDRKEAAFTCPSEFRVA

SEQ ID NO: 98505 - protein, 311 aa, unidentified
MTYIGIDVASATLEVGRSDSAITQRFPNNEVGITALVQWLQTRGRPQVILEPTSTYHQQLVQALALQNVPYTLINPARTAAFARLQGKRAKTDRVDARLLATLGESQQLQPTPPPDEVQEELKALRRHLEWLEGEQRAAQNRLETARRSPWAPQAVLESLERTVQALEQERQQLEDAVRAKVQEQPGLQHQMRLLTTIPGIGDRSALLLLSELPSVDRALSAKTWVAFCGVNPEPRESGKIRYSKLSRVGLARIRARLYMAAVSALRWNPVVHALGACPFSGVRRDPHAGDVGGCLLAEVRFWRLRTALRV

SEQ ID NO: 98506 - protein, 424 aa, unidentified
MNCNQNFKISQVTEGTLVLGIDVGSNTHYARAFDWRGLELSKVFKFKNSFEGFQSFVLWVNDLCCKYNKSKVIAGLEPTGHYWFSLGELLKENNITIAIVNPYHVKQSKELDDNLQTKNDSKDPKIIAKLVIDGRYSFPYIPEGIYGELRVADKLKNDITQQIISIKNKIHRWLSIYFSEYEKIYSSIDSKSGFLLLKETPLPKDIVELGSEGIVERWKQTKLRAVGLDKAKKLEEAAKKSIGCKNITSSARFEIKLLIEDYEYKQNQLNSITEELNKLCEKIPMIKEIAEIKGIGIATAISFVAEVGDIRRFKSAKQVQKYAGLALKENSSGKHKGLTRISKRGRKKLRTILFRATIPLIGFNKEFSSIYNYYIERKDNPLKKKQALTAICCKMIRIFFTILSKGIKYDETKMLHDIKRPVAA

SEQ ID NO: 98507 - protein, 434 aa, unidentified
MTKRNSTPPDAVLVAIDMAKHRQEILLERPEGGRRRRMTVMATKADYDRLADELTAIGRPVIVGFEATGNYHRTLAHRLLTAGFELRLISSVALARTREALHNGWDKNDSKDAQEILHMLRIGATQRYVDPLAAGINDLQEMSKTHEAISKAKTQTWYRILTHYLPLYFPEIERFAGNSRSDWFLAMIERFPTPGSIASIGREDFTEQVWPLIGRKVSKARVVNDIYETACASMALPIDEDSTAVKMFRMVIAQARTLIRQRNEIERIAHDALAANRDYQLLRMIPGIGPINALTILAEAGDLRRFGHHRQFLKFCGLDLATRQSGLFRGRTKLSKYGSARLRRTFWMATQVAIRQPNNSFRDKLGRYVAGHADDPDRRRKAMTALTAKMARVVHAVIKTGTEYRPFVERADTRWKDPSLLCREGVPRSLGATL

SEQ ID NO: 98508 - protein, 344 aa, unidentified
MANLNQFCDFTKLIGIDIAKSVFQIYSCDTQTGEITNVQVKRDKVLESFANCGKCLIGMEACGSSQYWARQLQALGHNVRLMDPKLVKPFVRHNKSDKADAEGVYHALVSGVRAVAVKTETERDIQTLLTMRALLVKQRTARINHVRGLLAEYGHVMPKSVDQFDKKVDECINSLEGDAVQLVIDTLRDTVKSIRDDQDRIKTLQREISWLASQTKNAKHFLTVPGIGGTIMAYMYVLLADPTQFPSGRQFAAYLGLVPMHTGSGGKTVTTKIPGRCDKALRALLVEGAHAVARSKYRTDWVKNILAKKPKKVAMVAIANRMARQCWAVASKGQDWRRMPVTAA

SEQ ID NO: 98509 - protein, 478 aa, unidentified
MIKSVGIDLAGSGEHKVRCLDEQGQLCDGFSFDSTPEGLAKFEERVFKDGSNPIIVFEPTGLAWLIVAVYIRGQHPDCRLVRTQGRNVVALRKYLHRSSKSDKLDALTLAKMPFVDQERLNDIYLPPAKINAILRLARQRLRLEASIASRKKRILSIIDGYIPGIRQTFSNMWSPQGRAFLRTYLNPLAVARSSEKALDRFLTRARFRKKEDAEESHTVYLTCKMAATIYEKSRSIGAIDDDFFEALQDEIGRELRLMETEEAESEAIAQRIQELYQEMHPSDNLRSIPGVGEQTAPIFLAVVGDPARFPSQSAFANYTGVVPDSRQSANMEAKGLRMTKAGPSIMKWALYQSSQIGRRFDPQLAWVYYHEIVNNGKNHKQAMGAVMSHIGARILAVLRENKPYELRDLQGKPISWEDARKQILLNYQVPEEIKQQRRRIKSTGRSDKTRTKRWEMVAHSTHEAAEAPQPVMTTASPG

SEQ ID NO: 98510 - protein, 437 aa, unidentified
MAIVGGFDIHRRQVTFDYLDTGTGQVRRGRIDPACRQRLRAWLERFAGRDDVTFAVEGCTGWRFVVEELQRAGITALLAEPAETAHQRGPKKRAKTDRADARHLRTLVAEGRVPVSWIPPGQARELRVLLQLYRDLREEHTAWTQRIHATLFHQGVPSLAGRLSDPRARALLEQDIGLSPAGAQAVAVALRRMDDLEAALAPVHARIAAFARRQIACKALAAELYGVGPLVAAIVWAFLGDARRFSSSAQAVRHTGLDVTVYSSDDKRAPGAPVAPGPADLALGAVRGRAPGLARQLPGPPVLHRRRRAHRREPGRAVGRPQASPPLASHPAPPRRPGLRPSAGLVRLMRVNAAALTKPMHRGHPGGRRPAVFLPPAPRATRDWTASKDRRGHHPSGTTPSIIMSPGPASTGLADRDKAGRPRHPHTPIPGFPRRNP

SEQ ID NO: 98511 - protein, 321 aa, unidentified
MHSYHLGIDVAKAKLDCALRLPDGKYRNKVVNNNASGFKTLLEWLQKHGAASAHVCMEATGVYWEEVAAYLAQRGLPVSVVNPAQIKAFGASHLVRTKTDRVDAQLIATFCFERSPALWQAPSATEQALRAMVLRLDALQNMRTQESNRLDVAREAVKAGIASHIAWLDKEIDKLARQIRQHMDNDPDLKGKQELLDSIPGLGERTIASLLAFYGDLQRFDNARQAVAFAGLDPRQHESGSSVRGKPRLSKVGHSFLRKALYMPAMVALHRTAWGAVFRQRLAAAGKPPMLIIGAMMRKLIHVAFGVLKSRQAFDPSLHGA

SEQ ID NO: 98512 - protein, 426 aa, unidentified
MAYRIAGIDVHKKMVAVAIADVEGVETWRFERRQIGTSPSQLRALAEWLVEREVDEVVMESTAQYWRPVWEALERAWQPRTRETRRGPRAGALHLAQAQSNEGPRGRKRDFPDAERLVKRLVAQELTLSFVPDVTQRLWRTVARRKYQSTCSRVQLQNRLECVLEEMHIKLSSLVADLLGPSARRMLRAIANGETDPAAVAALGSRRLHATPDELRDALGACTDLHPVYRRLLTLTLDELEVIDRNIHQLDEELAQLLRVHQDAVERLAAVPGLGVDSAQQIITEVGPTAATFATAKRLASWVGACPGHDESAGINHSHRAPNGNRQMRRLLNQAAHAAVKAKGSIFQLVYRRLVVRLGHAQAIGAIAHRLCRLLWKILHDGVTYEERGPAVTKHRAQRRAVKMIRELRSLGYRVEPAPSPASVLA

SEQ ID NO: 98513 - protein, 413 aa, unidentified
MTDETTCWFAGVDWGSEQHQVCILDAAGKVRGERAFPHGGAGLVALCDWLVSVAGSPGSVAVAIEVPHGPVVDALQDRGFAVHAINPKQLDRLRDRFSVAGAKDDRRDARIAAAGLRTDPQLFRPVRIGDPMVIELREWSRLAAELQQERVRLGNRVRQQLWRYYPQLLELTDDVAAEWVLELWLMAPTPAKAARLRETTLARLLKQHRIRKISAETAIGILRAPALTVSAGVTEAAVLHLRSLINRLRLANREFRQAGRKLDDLCAALTQTETPSETAPSDAAILASLPGVGKTTLATLLTEAPGPLTGRDYKALRTLSGVAPVTKRSGKSCVVVMRYAAHKRLREAVFHWARVAVQNDPKSKRRYEASRARGHSYGRALRGVADRMLGVACVLLERRELFNPQHGMTTARA

SEQ ID NO: 98514 - protein, 410 aa, unidentified
MQTIVERGCGLDVHQATVVACLLIVRKNGTVHKQVRSFGTTTRELVSLREWLLAEGCTHAAMESTGVYWKPVYAVLEGALEIVVANAYHVKNVPGRKTDVKDAEWLADLLGHGLLRSSFVPPKPIRELRDLTRYRRKLVEAQTAERNRLLKVLESANIKLASVATDVFGVSGRLMLRALIEGVATPEEMSELAKGTLRRKIARLQPALEGNLEPHHRFLLKLQLQRVEAAERDLATLQERIQQKLEPYAAQSALLDEIPGVDRGLAAVIIAELGVDMTVFQSVSHLASWAGVCPGNNESAGKRRNSRVTKGNLYLKSALIEAANAAARAKGTYLRDKFYRLKARRGYKRAALAIAHKILVAVHHMLLHNVSYKDLGDLYLDKLNKHHLTRNLVHRLERLGFEVTLHLKAA

SEQ ID NO: 98515 - protein, 339 aa, unidentified
MNCTVYGLDLAKRVFQLHWVDMETGEMCRRQLKRQQVAGFFANHTPGIIAMEACGSGHYWGRKFAAMGHKVRLIAGQFVRPFVKSNKTDVADAQAIWEAAQRPGMKFVALKTEEQQSVLTLHRIRAQLVKMRTMQINQLRGLLYEFGADLPQGRQRGIARVGEELARLEGTLSPLVIDAIRDQLRRIETLDQDIAGIEKKLLLWKKQDESSRKLMEIPGVGLLTATAAVATMGNARVFKSGREFAAFLGLVPRQSGTGGRVKLLGISKRGDVYLRTLLIHGARSVIQNQKEHDPWLTKLLSRRPRNAVVVALANKMARTIWALLAHDRRYDRNYAASAE

SEQ ID NO: 98516 - protein, 349 aa, unidentified
MEESIVTLSTTKNKRPVQYDHYIAVDWSQKNMAIARSTQKLKHVRTLDVPSELRDLKDYLSNLKGSKILTIEECPAAQWLYVELLDYVDKILICDPYRNRLLFDGAKNDVLDAEKLCLLLRNGLLKEVYHTHNSLFELRKYVSAYLDIIQTGVRIKNQRSSIFRSEGKNFRKESVELDANSFIVGIIDRNIETYEQDKAEYKTLFNKIKRKNTILKNLCNVPGIEIISAVKILANVIDAHRFPKKGNYLAYCGLVKHKRVSGQKTYGLRKPRYNRVLKSVYKSAAWTSIIATSNPMKDYYEYLLEKGVEVHNARNALARHIAIITYGMLKSGEKYQPYKREKETKPILN

SEQ ID NO: 98517 - protein, 351 aa, unidentified
MENSSKVVTQGVVGLDLGDRSSQVCRLDRESGAILEERRISTTTVSMQRSFGALPPQLVALESGSQSAWVVRLLQQLGHEVIVANARKVRAIAASLSKSDERDARCLAQLARVDPQLLAPVEPRSAESQRALAVVRAREGLVKARTMLINQVRGCVKSFGFRLPASSSASFARKAQEALPAELKAALEPLLRVLAELNQEITRFDRDIEAWAERWPVTQRLRQIRGVGALTALVFVLILGDPHRFARSRAVGPYLGLTPGRRDSGNSRPQLPISKHGDRLLRRLLVQAAHYILGPFGQDSDLRRFGLRLAERGGKNGKKRAVVAVARKLAVLLHRLWVSGADYVPLYQAAA

SEQ ID NO: 98518 - protein, 324 aa, unidentified
MSKFKEFFGIDISKDVFDVVDFSEKHYQFKNDPSGFKKFGKLLNGNSHCVMEATGSYYQGLATWLYSRSFKVSVVNPLSVKRFIQMRLKTSKTDKMDALMIRMYGESEQPKLWNPPAKLIIEATELHKLIELLVRQRAGLKNRLHALESKGITTSIVLTTVRRQIRNLSKEISDLELKLEAVIKEYEPDLLTRLCSIPGIGKRTAIYLIVLTHGFEKFESSRQLISYFGMNPIIRESGSSIRGKSRISKTGDHQVRKLLFMCAFTACEHNKACCDIYQRLTAKGKSKKLALIAVANKLLKQSLAIAKSGLYYDENYRSVNVNLG

SEQ ID NO: 98519 - protein, 309 aa, unidentified
MIHPDVIGCDIAKVHLDFFDSGLDRHARIDNTPAAIAVWLDGLGDRTVHIVLEATGRYDRQLRLALEARQQSYSRVNPARARDFAKAIGLLAKTDAIDARLLATMGRSLTLAAQAPDDPARHALARLHGRRDQLVTIRQQERTRLHEAEGVERDSLESHMAWLDAEITRIEKQCRDALKADESLKEQEERLRSVPGIGPVAALTLIAHMPELGDRSAKAAAALAGLAPFNVDSGSLRGKRHIRGGRKRVRDALYMAALTASRMPSAFKAYADRMKERGKPFKVIIIALARKILAIANAITRDKTIFSKA

SEQ ID NO: 98520 - protein, 370 aa, unidentified
MSVRRILAKTINTDLEYEAIGIDLAKNCVSAALLTTDGEVVCIDRLDYSELEKSAQALSSTTFAMEPCTEMNYLVQKLEAWGHRCLVIGGKNVQNYVENHFSGQKTDLNDAQALAFLAQDTQLRTIKAKDVEQQKYASLTTLREQYIKQYRQTIVSLKGICQAWGLNISKGISGKARLKDLIENHAAFPEELKESLVDMVTHAQTAQKALNKITKTLELLAKNDKVCQLIQTIPGLGSICSCRLRATVGDIKRFKSPKDFPAYYGLVPRSIATGHNERKGKITHRGDRTMRSLMVQAAGSLVNMATKGKLKSKQLTKWILKKQKEKMPWGKLVCAVAAKLLRIVRAVLISNKPYNSKIAGVAKCSLPKGS

SEQ ID NO: 98521 - protein, 289 aa, unidentified
MNIIGIDVSKSKLDCALIDNSTHRKLKFKVVSNSDEGFVTLIDWLAKHTKSSISAYHFIMEATGVYHEKCAYWLFDSGARVSVVNPARVKYYGQSLGVRSKNDKKDSVVLAHYGLTQTPMVWQPEALEIRILKALASRLDAIEKDILREKNRHEKSSINPSSQTILNSIETILFTLNKEKLHLEKLIHNHINQYEYLKNNNALLQTIPGVGPVLSRYMLIVLGGRTFQSASQCAAYLGLVPIQNESGSSLRGRSRISKAGSPVIRAKLYMATISALQHNPDIKIQNSGY

SEQ ID NO: 98522 - protein, 322 aa, unidentified
MASFLGIDVSSRSLDGWVRPQAVRIAVSNNPAGFEELERTLRKFSIKRILLEATGGYERDVLRFLQDAGYKVIRVNPARARKFADSMGVKAKTDAIDAEVLAHYAEVIPDQPTLQISPDRALLRELLMQRDRLVQQRDDDRRRLKQAQSLVVANFLKANLQHFRSQIRLVEQEINQQAAKLNDERIARLTQVKGIGMVTAGKLVALLPEIGRVESREIASLVGVAPFNHDSGKSLGKRSITGGRFEVRRTLYMALLVAVKYNPALKARYEALRGRGKLAKVALVACMRTFIVRLNAMIKTGTPWRDLILPQPAGTTQIEKAA

SEQ ID NO: 98523 - protein, 410 aa, unidentified
MRRVIGIDIHRTFGEVVFWENGRLRPAGRIDMTRTALEGFGKNLLPSDEVVIEATANSMAASRVLAPFVARVIIANPLQVKAIAQAQVKTDKIDAATLASLHAAGYLPQIWTPDAATERKRRLATRRYQVVRHRTRLKNEVHSILHAHLIPKCPHADLFNARGRTWLAAQPLPDDERVAIDRRVRELDRLAEDLALLDREIAQDAIDDPAVKRLITITGVNLTVAAGIMAAIGDVGRFKSPQKLVSYFGLNPRVRQSGLAVAYHGRISKNGRSHARAMLVEAAWAAAKAPGPLHAFFVRIRARRGHQIAAVAVARKLTVLCWHLLTKGEDYQWTRPALVANKTRAMQLQAGYPQQKGSRRGPAYAYNIKALRDREMLIATQAERSYERFVAQWKPRRSKLGARAPQLGKT

SEQ ID NO: 98524 - protein, 368 aa, unidentified
MVEVRRGVGGSCLGVVRRWLVVVHVGLDLSRRRVDVCVLSDRGEVVGEFPAPVDGEGLFGLSRRVGVFGQEVRGVVESMNGARFVHDELSERYGWEVLVADAHRVKGLAPLACKTDKVDARVLAELSFRDLVPAIWLPSPELRQERERARFRLYLVKHRTSLKNRIHATLIAFGHQRQMSDLFGASGRRLLAGLDIPQPWRSHLDASLVMIDDLERQIADIARELQRQGAEHRYVPLLLTVPGIGWVLAYTIAAEIGDITRFRTPTQLVGYTGLCPRVKQSGQSDLRGPLSKHGPRYLRWALIEAAQHAASSPFYRERYQTTKRRLGKQRGAKVAQIDLARQLTEAIWHMLTRNQPFAPAGARKRLAA

SEQ ID NO: 98525 - protein, 417 aa, unidentified
MKVFYLGVDVSKKKLDLCLRSNGKDILYDVIPNDLSSIKSWLTRTFEKFFLSEDSLVVCAEHTGQYTYPLVCATKSIGVYLCLEDAAKIKYCHGIPRGKNDKIDACRIAMYAERYNDCLQSYTASELIIQKLKNLSTERSMLVADRAKYQSQLKDQVDYMEHSIYIAKCNRVEGIINTFTDYIAQIDLEIKELINQAPVIAHQMDLLMSVDGVGERVALKMIMETDAFTSFTDPRKFCCHAGVVPFVYVSGSSQRSKNRVSNRADKSIKHLLHMAALSVSQVKNSPLKKYYDRKVEEGKNKMSVLNAVRAKLVTIMFAVIRTDAFFFEKLSKFACVIHKNRGGSTRPDERDFSYLSTAFTNIFHRSSHLYALMRSNIIVCIYGIGYTFIQLFKAVICTVKKPPILDRVIHPFSQSIM

SEQ ID NO: 98526 - protein, 422 aa, unidentified
MGGLGSSTGFVIEVEEVIGLIFVGNDWAEDHHDIHVMNTEGKKLAIRRFPEGVAGVSDFHALIAEHAQDPAEVVVGIETDHGLWVASLVAAGYRVYAVNPKAVARYRDRHHVGGGKSDVGDAKVLADLVRTDAHNHRVVAGDSDEVHAIKVLARAQQSLVWSRNREANRLRNALREFYPAALVVFEDLHGRDALAVLGRAPDPVTAARLTLYQVKAVLRAGGRRRNLDATAAKIQAVLRTEQLHAPAAVAAAYAAVVKAQVGVITALNTQLAQLETQLESSFEQHPDADIILSLPGLGDTLGARVLGEFGDDPERFADAKSRRNYAGTSPLTVASGKKRAVLARHARNQRLYDALDQWAFCSLTTSPGARTLYDQRRATGDTHHQALRALGNRWVGILHGCLKHRTTYNEHTAWGHRQPAAA

SEQ ID NO: 98527 - protein, 331 aa, unidentified
MKNRLIIGIDVSKLVLDVFILSCNFHFTVENSPKGFAALLEISCTKLKTSKQQLYFCFENTGRYSRMLAVFFHQAEITFSRIPALDIKASKGISRGKTDKADARDIALYARRKGAEMEPTKISSAETSELRQLVSLRDKLIKHRTAYKNSLNDLTDCYYEGETDFIRQTQLRMVKQLDNEIKNVEKRMYTIICSMPDWEENYKLIRTVRGVGPVISRYLIIYTENFTRFTKYKKFACYAGIAPFEYASGTSVKGRTRVHPCANKQLKSLLNMAAMNAIKINGEYKQYYLRRQQEGKNNMSTLNIIRNKILARIFAVVRRQSPYVDLHKFAA

SEQ ID NO: 98528 - protein, 359 aa, unidentified
MTTTMTYVGLDVHARSTHAAAIEVANGELRRARFGGGSEEVIAWLQALPQPLRGCYEAGPTGFALYRAAEAAGLPLQVVAPSKTPRAPGDRIKSDRKDAELLARLLLAGQLKPVAVPAPPFEAARHLARAREQVRGDLMRCRHRVSKLLLLHGRVYAGSAWTKTHRRWLAAQRFDEPATELAFLDALAAVDGLVARKAALDERLSRLAREGEWWPTVARLRCFRGIDTLSAFVLCLEVGDWRRFPRPAKLASWLGLVPSLDQSGESRRQGSITKSGSGYARRLLVEAAWHYLPRPSVGPALAERRAGQPDHVLQIALRAQRRLHRLYHRLRERGKPGNVTTVAVARELACFLWAAAVAE

SEQ ID NO: 98529 - protein, 473 aa, unidentified
MKEHKKTKGKTKSEAHKSIREHQPNAAGIDLGAEEIWVAVPADRDKDPVRRFEAFTQDLKAIVQWLVDCGVQSVAMEATNVYWIGLYQLLEDAGLKVCLVNARHVKNVPGRKSDVSDCQWLQYLHSVGLLSGSFRPAQVICATRSIYRYRQNLLSLAGQHLQHMQAALDQMNIKLHHVIDDLSGLTGQSIVEAILQGQRDPVQLAKLRDKRIQASEEKIVKSLEGDWRKEHLFVLAKAWAQHQEVQKQIQDCDRELLEYTRELEAGTTVAKPAKVVRLKAELLGAEPVSNPLKKKRRSKTSKNQPLGPWQQELERFFGVDLTLIPGISVLSGLTLMTELGNDLSAFKTQHHFASWLCLCPDNETSASKILRRRTRRSQNRVRQALRMAASSLHHDKSFLGDKYRRLRARLGAPKAITAMAHQLARLIWTLITRQLPFDPSVFAHEEKLNDQRRLKHLAASARQMGYQLTPVAA

SEQ ID NO: 98530 - protein, 305 aa, unidentified
MTLYCGIDLHSNNSLISLIDETDRLVSEKRLDNTLEAIEHHLQPFQDDISGIVVESTYNWYWLVDGLMERGYPVHLANTLTIQQYNGIKYTNDATDARFLAHLLRLKILPTGYIYPKAMRPVRDLLRHRLLLVKQRTAQLLSLQGMIGRYTGQRLSSLKMKQLKLGDLGRHFGSTPALFAAQQHHRLIQQLNTQIEALETFVLARCQDSERYALITSTPGIGKILGMTILLETGPIERFPQVGHYSSYARCVPSNKISNGKSKGKGTPETVTAIWRWPLWRPHIKPLSGNSRSSAITSASVEKCL

SEQ ID NO: 98531 - protein, 331 aa, unidentified
MTNASSAQASMTLPTLFVGVDMAQKSFVWAIHGQPQTHCASTDDSGFEQLLKALEGQRVGLLVLQATGGIERALATYLLQHGLPVAVVNPRAAREFARSMGHLAKTDAIDALALAHYAQTLAARADQSGVRYAPASEQVQQLQALVMRRAQLLNMRTAEKNRLGGSIRVLRQSILEVIRTLEQQIARIDKDIDGHVRQHFQEQAKRLEAIKGVGSTTSATMLAFMPELGAIKAGSAAKLAGLAPLNQDSGKARGKRHVWGGRAIVRSTLHMAMLSAVRYNPVIRAFYERLIAAGKPKKVALVACSHKLLRILNAMARTGEPWSEALHVKNA

SEQ ID NO: 98532 - protein, 343 aa, unidentified
MKTYYIGADVHCNSTDMAIEYRRQIIERVTVPTTITALRQVLEKFPGKKHFAIEESTLAGWIYRHLYPHVDQLIVSDPRRNHLIARDGDKDDPIDAVKLAQLLRGGYLRAVHHSRDDQRIALKQWVNLYHQRVAQRTAQINRIRAQARAYGREIPSVVFNDPAQRQAWLRDQQLPQLAELLNLLWIGWEAADQQVQLAERRLRQFTRCDPIIKQWMKLPEIAHIRALTILAYLDTPFRFKTKSHLWKYCGIGLERQTSGTDKKGRPKPARLQMPRRRNGRLKSVLLTAASHMTISHNPFSQHYERMIAHGISPANARHTIARKLITVMWGMWKNHTPYDPQRV

SEQ ID NO: 98533 - protein, 410 aa, unidentified
MQVLYPHCAGLDVHKESVTACVRSTVGNTVKREVRTFDTTTKGLLVLADWLTSEQCTHVAMEATGVYWKPVWHILGDGDFELVLANARHVKNVPGRKTDVNDATWLADLLAHGLIRGSFVPDAETQVLRSLLRTRKQLVREKSSHVQRLQKTLEDANIKLDSEISDIIGPTGRRMIEALIAGETDPAKLAALAHPRIKAPPEQLREALHGRVMTHHRFLLRLHLQQIDALDVVVSDIDREVNARMEPFRTATELLTTIPGISELSAQMIAAEIGTDMGRFPTAAHLISWAGLCPKNDESAGKRRSTRMRKGAPWLKTTLVQCGWAAVRKKGGYLQAQFHRIRSRRGPKKAICAIAASILTAIYHMLKDGTCYHDLGHDHFNQRAKAAQTKRLVARLHNLGYAVQITPLPA

SEQ ID NO: 98534 - protein, 337 aa, unidentified
MSYFAGLDVSLEKTHLCVVDHEGTVVHEATARSSPEAIATTLNAGPACSRVVFETGRMAPMLYHGLVERGVPVVCIESRQAYQALKTLGTHKTDRNDARGLAQLARTCFFKPVHVKSLPAHAIRSLIMARKKLVGQRVMLENQIRGLAVVFGVRLPRGLSPAFVQQVLDMSRDVAGLSSAMRGLITAREAMLHAIAEIDVDIKRLTRTSNACQRLMAIPGVGKLTALAFTAAIDDPARFRRSRDLGAYLGLVPRRYQSGEIDYTGSISKVGDRRVRTLLYEAANVMLTRYKGQLKLRDWAMAIAKRSNMRKARIALARRLAIIMHAMLRDGTEFRVA

SEQ ID NO: 98535 - protein, 344 aa, unidentified
MNHYAAMDVSLELSSVCIVDATGKVVKETKVETHPEALVKFFKDIGLPLTRIGLEAGPLSQWLYAGLTEAGFETTLMETRHVKAALSAMTVKTDRRDARGMAQLLRMGWFRPVHAKSPGSQEVRALLVARKQLQHKLTDIELSIRGILRAFGLKVGQVTDKTFEARIRNLVTGHAMLEQIAEAMLAARATLLIQFNKLHKAVLDIVRHDEVCRRFMTTPSVGAIVAITYKSALDDPSRIKKSRNAGPLFGLTPKRYQSGQTDVTGGITRVGDEMVRTVLYEAANVLLSRVTRFSALKRWGLEVAKRRGLKRAKVAVARKLAVILHRMWVDGTTFRWTTPEAARA

SEQ ID NO: 98536 - protein, 316 aa, unidentified
METTQPFVGIDVSSQRLDVDTVPVSQPFSEANNEDGIASLTAHLKALNPQIVLLEATGGYETPVAYALYEAGLNVVIANPKAVRHFAKALGRLAKTDKLDAQVLALFAQRVDQPVRPLKDQDQLELAHLMSRRRQLQGMIVMEENRRRTCTPKVRANIDRSLAHLRQLLKDLDREIHDSIRRTPLWLENAKILQSFTGVGPKVSASLIADLPELGTIPGTKASALAGLAPMNQDSGKHRGKRMIKGGRPAVRQALYMAALVASRHNPVIREFYQRLRLAGKPAKVALTACMRKLLVILNAMLKNRTYWNPQLPLAA

SEQ ID NO: 98537 - protein, 430 aa, unidentified
MNESVSEQPVNPKVAAFVGIDWADLKHDVVLRSVGDPTKSEHQIIKSEINALADWIAQMYERFEAKGKVLVCLEQSRGALIYQLMAYELFELYPINPSQLANYRRTFFSSGAKDDRPDADLLSELVMCHRDRLKAWKPDDQLTRELASLNEGRRNAVDRRTDLANEIKSQLKLYFPVALQLLDNDLTTALAADLLVQWPTLAELQKVSPAKLRKFFYGHHSRQEKKILERLALIKEAKPLTTDLAILRPNALRVKLLAQQLKSLLPFIAEYERRIAEIFGSHPDRFLFDNLPGAGPALAPRLLTAFGTDRDRFEVAGDLLSLSGIGPVRIASGKKTGKHASVHCRRACPKFLRQSFHEFGECSIRYSPWAQACYQAQRGRGKGHHAAVRAVTFKWIRILFACWKQRTPYDPQRYFQALQTRGSDYAQTTA

SEQ ID NO: 98538 - protein, 428 aa, unidentified
MIDQQHSTAASNLVAIDIAKEWNIALVQETSGRRRSFKFANRRADHDDFVAFLHSLAGPVQIALEPTGDYHRNIAYRLLTEGFHVVSISSLALARFREARFGTWDKNDPKDAQVMLAMMAQDLVQIYWDPLISGSHDWQELSNTYFHITLSRTRLQHSLLLHHIPLYFPEFTRYWYSTRSEWFIRFLVRFPTPASIRALDRNAFITEAWDLVGRKVSKQAKLEEIYTLATESIGLPVALESPAIETFRLQLTRYLELSQQRHYLDRRAQELLADNPDFQRLKTLPGVGAITALTILAEAGDLRRFRHHRQFLKYCGLDLSKSQSGQSKGHEVLSKRGNKRLRLAFWMAGLVAIHQRENAFRDKYERYMSANPFDGDRKRKALTAVSAKMARVAYAVVKHGSDYQCFFEHRLPSGSIPFARAVEATSTS

SEQ ID NO: 98539 - protein, 416 aa, unidentified
MDVIAECCAGLDVHQASIVACVLRSQGGGRLSKTFKTFAATAAGLEQLATWLKSLAVTHVGMEATGVYWMPVYAVLEAAGGIDLTVANARHVKAVPGRKTDVNDAEWLARLVRHGLMRKSFVPPKPIRDLRDLTRYRRTLVETQASERRRLIALLETVDIKLASVLSDVLGVTGRAILRALIAGHQTAAEMARLAQGAARKKLSQLTEALGGRLDGHHRRILSIQLARVEAAEADIAAIDQDIAARLAAYDAEIGLLIGIPGFDRVVAGSVIAEIGTDMTAFPTPQHLAAWAGVCPGNNQSGGKHKPSRARKGNTHLKTALCNAATAAARKRGSFFKAKYHSLKARRGGGRAALAIAHKLLVCVHHMLANGTLYQELGEHHAQQYDRERRAKAHVRKLKSLGYTVEIHPAETAKAT

SEQ ID NO: 98540 - protein, 406 aa, unidentified
MPGLLREILDGGLIVAIDPGKVMHRVWVTDRGGVVGEPVSLPNSRAGLDRLEALVGPATATFAIEATGALHRAWAAELERRRPGALRTFAPSETVAARAQLASRRFKTDDRDCAALVWLARQGAGRPASGRGVEALLAAVSHRRQLVLAVKPLRQRLHDQLNALAPGLSAPAGHGRPLLLETPTGRAVLACAAAFAGRPPTPRSLKARAEGRLADATAAFWAQRWKDCLAPPPDAELRAARLARDLDRFLALRADITFVDAQLEQLLADSPGQILTTLPGVATVRAAAFAAYTLPVGRFPTPEQLYSATGLAPASYESASVRRRGTIARTGLPEHRDALMSIAWGLGQHAPAFKRRRRELAARDKTGIAARVALARHACRLCWRMLHSQQPYDDQRYDRARRDRGR

SEQ ID NO: 98541 - protein, 365 aa, unidentified
MNSVRYIGMDVDKQKIAVSVLADNERESSFEGVIANEPAKIAWFVERQKSQCENVVATYEAGFCGFELYRQLTDLGVACLVAAPGLIPRKPGDRVKTDRRDARKLAKDLRNDELTGVYVPTREDEQVRDYLRLYEDFKSDLRKAKQRLQHFLLRHGQHYDGKTKWSQRHKQWLRSLELDSPLANEALSEYLCHIVDLEEKIRRIAERIESIAGESRYAEKVKTLKAFKGVETLIALSFIVEIGDFRRFSRAEQFMAFLGLVPSEHSSGNRRRVGSITKAGNSHLRRLLVEAAWHYHSYHATSKRLMTRRQGLAAQVITYANRAGRRLNKKYLRLVFAGKPSQVAATAVARELAGFLWGAMVEKIA

SEQ ID NO: 98542 - protein, 423 aa, unidentified
MPQLWAGIDAGKTEHHCVVIDANGTKLLSQRFKNRETAILTLMGDVASLPGGTDVAWATDLNHGGTGLLQTLLHSHAQPLFYISGRVVHHASGAYRGEAKTDAKDAVIIADQARTRRDVTLMRQADEVTAELRLLSARREDLVHDRTRAVNRLRAILVHYFPSLEGAFNYATTRGPLVLLTRYATPGAIRRMGESRLAAWLKGQGCWKSAAVAKTAVEAAREQTSVVVGEGAAARLVSRSARDLLRIRDEVAELDGEIEAALQDSRSADLLVSIPGFGRRLAADFLAATGTDLAAFETPDRLASFAGLAPVPRDSGKISGNHHRPRRYDRRLLNACFQAEFIASRNCPVSRSFYDRKRQEGKSHKQALIALARRRMNVIWAIFRDQTTFNPTPPRPNDPVTPLLQHGPESPSRSRPTIALAAA

SEQ ID NO: 98543 - protein, 459 aa, unidentified
MTTGHATAGEQPLSILMKALPVLDAKAVGIDVGSEKLHVSIGGDAPRVFGTFTGELEALQGWLQQEGVRSVAMEATGVYWLYLYEVLEAGGLEVVVVNGRHVQNVPGRKTDMADCQWLATLHAHGLLRGGFVPPAHIRRLQDYQRLRADHVIGAAAQVQKMQQALERMNIKFHDVISDLTGVSGLKVVRAILRGERRPGELLALCDEQIRNKKSAAVKESLRGCWKKEQLFGLRQALELWETYRQKIADCDREIELLLQETLGQPSQGGSDLMGPIQLAPAKVLSKNTPAIDRCQELLARLCGGRDATQIPGLGEHMVLQLISEVGTDMTRWKDEKHFVSWCGLAGGHRQSGKRKGNVKAHRNRPGRLFCAAARSLAQTVDKALGAFYRRLRGRLGGLAANVALARKLALLFYRLLRYGMDYVEKGLKAYEAKVLETEQRLLRKLAKRQGFVLIPADMK

SEQ ID NO: 98544 - protein, 327 aa, unidentified
MAKRTTICAGIDTGKRKLDIALDGSSEQLQIDNTPEGYKALLDWLRRHRVKRIGIEASGGYEQAVVVELRRKRFVVVVFQPAQVRAYAKFRLQRAKNDKIDAALIAACTGAVKTIHAPPDARLLPFAEHLTMIDQIAEDITRLKNRIETCRNSRFSQTWKEDIARLEQREKIEFKALVAAIRKHRDLAERLDLINSVDGIGPPTAVAILVRLPEIGRITREQAAALAGVAPYDDDSGEHAGTRHIEGGRKRLRRALYTAALPASFRWNPQLIALYQRLIAAGKEHKRALIACARKLLIFANTVVARRTPWKHERPPIPSMTALPQPG

SEQ ID NO: 98545 - protein, 342 aa, unidentified
MAVASIIGIDLGKRSFQLHGAAADGAVAFRKKLSRDKVLAFLARQPTAVVAMEACGSAHHWGREIARLGHEPRLIPPIYVKPYVKRQKNDAADAEAIAEAASRPTMRFVSVKTEDQQAQAMVFRTRDLLVRQRTQSINALRGHLAEHGVIAPQGVAQLGQLIMAIDDPASPLPSTVRELGRLLVEQITWLEGKIATMAKAMRAAATQDDEVTRLTSMPGIGPICAMAIRAFAPPMESFGSGRDFAAWLGIVPRQLSTGGKTRLGKTSRMGQRDIRRLLIIGAMTVVRWAACKGAPLGSWLDRMISRKPRMLVAMALANKMARMVWAMMTKKESYRAPMVAAA

SEQ ID NO: 98546 - protein, 350 aa, unidentified
MTMVGGLDVHRQQITFDYVDDDGLVHWGQIRPATRKRLRDWLAEHCPDGDADFALEGCTGWRYVCEELAAAGVVAHLGDPAEVAALRGRKKRAKTDRADARLMRTLLLQGRFPESWIPPAHVLEIRTLGRLYCTLMDERRAWQQRIHAQLFHQGCPPIKALLSAAGRQALASAELSPIGRQYVDAALRRIDDLTIEIDPLRTQLANFARRQAGCQALQHHYGIGWLCAAIIWAEIGDARRFSSSDQLVRFAGVDVTVYSSDGKSSPGHLSRQGSPELRWAAFEAGKSAARRGSPDYGYYRKLAAKHDGHNGKNPTLAVERKILRRCYHTLRGLGDAALALPVPQRQEAAA

SEQ ID NO: 98547 - protein, 366 aa, unidentified
MASMPNSTSQVNPPSTMSRVVIGGIDTHKDLHVAAVIDTCETVLATHSFSTTRAGYRALVKWLRTFGGVSKVGVEGTGSYGAGICRHLTEVGIEVLEVDRPDRSDRRRKGKDDDLDAISAARAALHGRRVSIPKSKDGAVESLRVLRVTRQTAVRARRNALQLLRMTIVAAPEELPDQVRNLTRMQLIRTCAGWRPETTHAADPVAANRIALKSLARRVLELGDEIAALDELIAPLVTALAPQLLARVGIGIEVAGQLLVTAGDNPDRLRSEASFAMLCGVAPLPASSGMTRRHRLNRGGDRQANSALHLAVISRIRIDEKTQAYVAKKTAEGHSKLEIIRCLKRYLAREVYYLLNAPTGALTRAA

SEQ ID NO: 98548 - protein, 391 aa, unidentified
MIYIGIDVAKDKHDCFITNSDSEVLFKAFTIFNNLDGFNDLYQKIESVMDDVTKVKVGLEATGHYSYNLLGYLIDKGLPTYVINPLHTNLYRKSLSLRQTKTDKVDARTIASMLMSDVNLKSYSDTSYHNEELKSLTRYRFDKVKERAKLKTSVSRLVCILFPELEKLVPTLHMASVYALLSEFPSAKHVATAHLTRLTNLLSESSKGRYGKDTAITFRDSARASIGSNMPAKSLELKHTIKLIQELDSKIDEIENEIKIIMDEINSPILSIPGINYRMGAMIIAEIGDFNRFDSPDKILAYAGFSPSTYQSGQLDGAYAHMEKRGSRYLRYALYNATKYVCHWDPTFAAYLAKKRAEGKHYNVAISHAVKKLVRVIYHLEKTKQQYIKAA

SEQ ID NO: 98549 - protein, 323 aa, unidentified
MSGVGRANAGIDVSKLHLDACVGDQHRRVPNDADGWQELINQFKSTDVDLVVIEATGGYERELVWALQRAGIAVARVNPRQSHDFAKSMGELAKTDKVDARILRDFADVLARHKDRAKYITPMEDVRRQELAVLMTRRRQLIEMRVAEGHRLEQASARAARSIKAVLGMLDKQIAAIDADADSHLDRHFKQQRALLDSVKGVGPVAILTLSAALPELGRLKRRQIAKLVGVAPLANDSGERSGKRRIWGGRAEVRAVVYMAALSAIRYNPVFKVFYERLLQAGKPKKVAIVACMRKLLTILNAMLRDKTAWDLSKHENFIQQT

SEQ ID NO: 98550 - protein, 408 aa, unidentified
MQVLYPRCAGLDVHKDTVVACVRCVSPPACHETRSFATTTKGLLALADWIGAHGCTHVAMEATGVYWRPVWHVLEGGVELVLANAQHIKNVPGRKTDVNDAMWIADLLAHGLIRSSFVPPAAIQELRDLTRTRKQLVREISQHSLRIQKVLEDANIKLGSVLSDVLGVSGRAMLDAIIDGESDPEALAQLAQGTARRKHADLVEALRGRITPHHRSMLKLHLDLIGAIEGALAEVDAAVGKSLAPIHQRARLLTTMPGISDLVAQVIVAEIGVDMTRFPTAAHLVSWAGLCPRNDESAGKRRSTRLRKSGTWLKTTLVTAAWAAVRVKASYLNAQFHRIKARRGAKKAIIAVAASMLTAAYFMLRDGVAYRDLGPTHLDQRHRDNAIRRLLRRLDDLGYQLPAAHEAS

SEQ ID NO: 98551 - protein, 343 aa, unidentified
METITTVGLDIAKSVFQVHCVDTNGDVVLRRQLKRRYVLTFFQKLPPCLVGIEACASSHHWSRQLQALGHTVRLMPPAYVKPYVKRQKNDAADAEAICEAVTRPNMRFVPTKTPEQQSCLTLHRTRHLFIRQQTAIINSIRACLAEFGIVAPVGRKGVEQLLEVAANVDDTRLPEVARACVAAMGAQLMALKAQILAFDRRIMAWHRSNETSKRLDAIPGVGPALATALVASIADPKAFRSGRDFSAWIGLVPKQNSSGGKDKLGSISKQGDRYLRSLFTTGALAVIRYAKIHGTKRRPWLTALLARRPTKVAAIALANKIARMVWAMMTRGERYKEPVALAA

SEQ ID NO: 98552 - protein, 414 aa, unidentified
MRVVHERCAGLDVHKKTVVACRIVPDGKGGWQIEVRTFGTMTDDLLKLADWLREGRVTHVAMESTGVYWKPVFNILEGDFEVLLVNAKHIKFVPGRKTDVKDAQWIAELLQHGLLKASFIPKAPQRDLRELTRYRLHLVNERTREVNRVHKVLEDANIKLSSVATNIMGVSGRNMLSAIIAGKDDPEALAQLAKGRMRNKIADLERALTGRIKDNHRLMLTLHLEHIDDLNGKLTRLEEEIDRLIAPFDEDDLIERFDEITGIDKKTAQVVIAELGIDMSRFKNANHATSWAGLVPGKNESAGRNRSSRTNKANRYLKSALVQAAHAAGRSKNNYLSAQYRRIASRRGKKRAAVAVARSILVIMYHMIDRGTRYQELGGNYFDERKQETVQKQLIRRLEKLGLKVTIEPLPTAA

SEQ ID NO: 98553 - protein, 349 aa, unidentified
MIVIGVDSHKRTHTAVAADGTGRRVAEKMAAATAAGHLELVRWAGRFTERRWALEDCRHLSRGLSRDLLRAGEAVVRVPPKLMAGARRSSREPGKSDPIDALAVARAALREPDLPVAALDGPERELRLLVDHREDLVVERTRAQNRLRWHLHELDPGSEPPVRSLGRAAVLAGLEARLDPLPGTVARIARELVGRIRELTTAIDALGREITALAGTLAPSLLALVGCGPLTAAKLVGETAGVLRFRSSAAFARHNGSAPVPVWSGNTERHRLSRSGNRQLNLGLHRIAITQIRLGGLGRAYVDHRLAAGDTRTEAIRALRRRISDEVFRRMRDDERLRASAPGLLAAVA

SEQ ID NO: 98554 - protein, 345 aa, unidentified
MEHFAGLDVSVKDTSVCIVDETGEIVREVKVASEPEALLAVLKSPAYHFKRLGLEAGPLSQWLFSALAEADLPVICVETRHMRAVLKAQINKTDRNDARGIAQMMRVGLYRPVHVKTLRSQKLRMLLTHRKLLQSKAIAIDNDLRATLRNFGLKVGLVGAVRFEARIRELVEDLPDLAALVEPLLIVRQALREQFGILHRRLLVAVRNDEVCRRLMTVPGVGPVVALTYRATVDVPVRFRKSKSVGAVFGLTPARDQSGERDCMGTISRCGDEMMRTALYEAAQVMLTHSAKWSWLKAWAMQIARRRGMKKAIVALARRLAVIMHRIWLDGTDFRWTREELATAA

SEQ ID NO: 98555 - protein, 342 aa, unidentified
MHYIGLDVASKSSFVYVIDGRGKKIESKEIPTDKDGFRKYFGDWAKKPAYVAVEAGGHTRWIHDVITQLGISVYVVNPLKVKLIAESKKKTDKIDAKILADLLRMDGLPRRVFVATGESRELRDLLRSRQQLIKSTTNVMNHVRGLLRQEGIRLKAKALSSGEIFGRLRESCGIPAHFVPILACYESTIAELYKQRRALDVVIEGYRHEDIDLLKSIPGVGEVASKTIYAAVSTIKRFKRAKQLTSYCGLVPTVRSSGERADYGHITREGRSEVRQMAVQSAHAILRCKTIESFPLRKWHAQVAKRRGFKTAVVGLARKLVEIAFYVLRDRRAFDARLLQAA

SEQ ID NO: 98556 - protein, 358 aa, unidentified
MVDKVTEAAVVGGVDTHKDLHVAAVVDQNNKVLGTQYFSTTRQGYRQMLAWMTSFGTLKRIGVECTGTYGSGLLRYFQNAGLEVLEVTAPDRMERRKRGKSDTIDAECAAHAAFSGIRTVTPKTRDGMIESLRVLKTCRKTAIPARRVALQIIHSNIISAPDELREQLRNMTRMQLIRTLGSWRPDASEYRNVTNVYRISLKSLARRYLELHDEIADLDVMIAAIVDELAPELIKRNAIGYESASQLLITAGDNPQRLRSESGFAALCGVSPVPVSSGKTNRYRLNRGGDRAANSALHIIAIGRLRTDAKTKEYVARRVAEGHTKMEAIRCLKRYISREVYTLLRNQNRRINSIPITA

SEQ ID NO: 98557 - protein, 480 aa, unidentified
MRPHIKLMEDAMDKSKKQKRKNKKHRKVNTPHLEQLNINAAGIDIGAKFHYVAVPNGRDPEGQDVRHFSTFTADLHQLADWLRQCNIDTVAMESTGIYWIPVFEILDSQGFDVRLVNPRNVKNAPGRKTDVLDCQWIQQLHTYGLLQSAFRPENQICELRAYLRQRAMLVSYASHHIQHMQKALEQMNIKLTQVLSDITGVTGMKIIRAIISGERNPVKLASMRDARCNNSETIIAKALEGNWRSEHIFALQQAVELYDFYEKQIIECESRIQEHLESFDDRSNGTPLEKPRRKSGGSSNQFHFDARRYLHRMTGVDVTRIEGIEGPTALNIIGEIGIDMSPWPTEKHFASWLGLCPGSKISGGKVLSSKTKPSANRAAYAFRLAAYSLQRSKSAIGAFLRRKKAQKGAPKAITATAHKIARVFYNMLKYGTEYVDLGQEYYEQRYQDRVIANLKRKAKQFGFELVNIKEYKLLTGLPAN

SEQ ID NO: 98558 - protein, 338 aa, unidentified
MYYTGIDLHKKTCFLTTVDENGKTVHKAHLENTEGSLLSYFQVLPGDTKIVIESMASWYWLYDLLTEHGFQVVISNPIKTKAIASAKIKNDKVDSHMLAQLLRAGLISTVYVSTVKTRQLKELLRHRQRLVRDITRMKNRIHILLMKNNYPVPYSDLFGVQGLKYLREISLPDYHREQVEIYLSLYGQIRMKVEPLTKKIQEMAQEHPIAKLLMTIPGIGPIVAMFIIAEIEDLGRFRSYRNLASYAGLVPSLDASGGKERRGRITKQGSPYLRTALIEAAQAIARMKQRRLNIFFRKRIVKSGYQKAIVATAHKLLQYVFYVRKNQTSYREEHPVWA

SEQ ID NO: 98559 - protein, 419 aa, unidentified
MDVLIERCAGIDIGKDEVVACVRTPGLGGKGRRKQTRTFASFTDGLEEMADWFTEQGVTDIAMEATGSYWKPVWYMLEERPFELKLVNAQHLKILPGHKSDVLDAEWLAELLEHGLLRGSFVPPPAIRELRDLTRYRKRLIQAHTAEGQRIEKTLEDAGIKLGSVASEVLGVSSRAMLAALVAGERDPAVLADLARGKLRNKIGELRQALRGRFHDHHAILIGLGLDHITHLEGAITRLDERIDILIGEHTSEAGIPFARARDRLITITGVGKRAAECILAEIGADMTRFPTAAHLASWAGMCPGTNVTGGKPRSSKTTAGDVWLRDILTQCAWAAARTRDTYLSAQFWRLARRIGKKKAAIAVGHSILVICWQLLTDDCDYDDLGGDYFTRRNPERQRDRLIAQLQHLGYRVSLDRVA

SEQ ID NO: 98560 - protein, 457 aa, unidentified
MPQPKRSRSRTSLSAVHPAAAAIDIGATMHVAAVGPDRDTEPVRTFRTFTDDLHRLADWFARCGVKTVAMESTGVYWIPVFEILEQRGFEVMVVNARDAKHVPGRKTDVSDAEWLQRLHEYGLLRPSFRPQAEIAGLRAYLRQRERLLDYAAAHIQHMQKALMQMNFQLHHVVSDITGVTGMNIIRAIVAGERDPNVLASHRERGCHASVETICQALVGNYREEHVFALSQAIELYDVYQTKVAACDKQIETILKRLKESATPPASKLLPPKHRSRQPNAPSFDARAALHAILGVDLTQIHGLGPYLALKLVAECGTNLTAWPTAKHFTSWLGLAPHNKISGGKVLSSKTRRTSNRAASLLRLAAVSVGRTDTALGAFYRRLAARAGKAKAITATARKIAVLFYNTLRHGMSYADPGATYYEERYRRRVLGNLQRRAKSLGYVLHQADRDPTQVAVS

SEQ ID NO: 98561 - protein, 480 aa, unidentified
MNVKANQTKKQVNVENQANLLLSKEELRKRMEGVEKELKSYTWRELETNGKFAKNDKLSFITDDMLIVGCDIGSESHYIRAIDIRGRELGKGAFEFSNTAEGFENAKAWMLKHAAQNEKRQIVLGLEPTGHYWFALAAWMISKGISVVQVNPYAVKQSKEIEDNSQLKDDRKDPKLIANLVKDGNYGMPYLPEKTYADMRRLSMFRDQLTEDRIRNINRLHRELKIYFPEYMDAFGKIDGAFALEVLKVSCIPSEIAALGTEGLRNIWHDAKLRGRGYSRAGKIVNHAEKSVGLEDGTSSGREAVRWFSEQIMKLDEQLARIESTLHKKCMEIPYAENILEIKGVGENILAGILAEMGDISRFDDVKEIQKLSGMGLVACSSGKHRGQTKISHRGRKRLRYWLFQAAKSAVSHAEEFKQLHVYYTTRARNPLKKMQSLIVIACKILRVIYTILKTGATYDPQKMLKDIKRPEAAPAQMAA

SEQ ID NO: 98562 - protein, 402 aa, unidentified
METMTIQPQRYLGLDVHKHYLVAAGVNAARQAVHGPQRVALAHLERWLRTTVTPQDAVVLEMTGNSYQLYDELLPHAHSVTVVHPPHVKLITSVPVMNDKIAAFRLAELHAVGLLTGIWVPPLAVRELRALIAQRRKMVRLATQAKNRLHAVIHRYHLQPPEGDICAACHQAWWQTLTLTPVEQVRIQCDLSTLTYAQTQSAQLEALLAELAATDERVIFLVQLPGVGLLTAMTILAAIGDIARFPDAAHLVGYAGMGSRVHESGQLHRHGGLIKAGRRDLRSAMVEAAHTAARTHPHWQALLARLEPRLGYNKAIVVIARKLLVAVWHVLTEHCADRFADPALVARKFLTYAEQLGQARRPAGQTRATFVRAQLDRLGLGAELRAIQRGQRVLELPPSQLP

SEQ ID NO: 98563 - protein, 450 aa, unidentified
MNSSPQTVLPVASGLDVHKSFLVAVIKSTSNQGTVNTVKKRFSTFHADLEDLRDWLLQNDCHHICMESTGKYWIPVYNVLESAMNEVRVCNPKWLSLEKGEKDDNKDAARICDLYRNGMTKSSYIPNKQIRTLRELTRLRQKYVQQRTSDHNRLINCLTVSNYKLDMVFSNVRRRSAFLIINLILSGEPYTDEDILKCVSSRCKAPREDILRACHGFELDKLQREKLRIIQDHIDGLTKEIEKLDQLIAEACEDHKDYIRLLMTMPGVSEISARKIIAELGTEMDQFVKGSRVAKWAGLAPGSDESAGKIHSRHITKGGKYLKPVLIEAAWAAVRSKNPYYRCKFEILSLRLGKKRAIVAIARKMIISIFHMFSDMKEWHPKDCDDCFVPRSLSVQKESRKLNKTVNTLKAMGLTEHQILKTIAAGLDDPEISDDEGNRYDLITGEYRTA

SEQ ID NO: 98564 - protein, 427 aa, unidentified
MAYRIAGVDVHKKMLAVVVSDVEVDGEYEFERRKVGTSPDQLRALAAWLAECEVEEVVMESTAQYWRPVWETLERYWQPLRQQRDDAGPRSGRLHLAQAQSNRGPRGRKQDFPDAERLVKRLVAQELTLSFVPDVEQRLWRTVMRRKLQVTRNRVRLQNRLECLLEEAHIKLSSFVSDLLGASARRMLQALADGETEPAALAALGSRRLHATPDQLKDALGACTTLHPVYRRLLKLTLDELRVIEDHIRQLDEEMAGLLREHQPAVERLAEVPGLGVDSAQQIIAEVGPTAATFPSAKHLASWVGACPGKDESAEVNHSDRSPKGNRPMRRVLNQAANAAVKTKGSIFQLVYRRLVPRLGHAQAIGAIAHRLCRLIWKLLHERVRYEERGPAVTKHRAQRRAAKMIRELRNLGYRVERVPALSGSPA

SEQ ID NO: 98565 - protein, 324 aa, unidentified
MALGASGKVLVKKKFTQKQLLAYTANLQTSLIGLEACSGAHFLGRALRKQGHEVRLIAAQFVKPFVKSNKNDFIDAEAIAEAVERKNMRFVPIKTDDQLDLQAIHRVRDRLVSRRTAVINQIRAFLLERGLVFAKRPAQLKAAMADVLENAEADLTPMMRNLINVLWEEWKIVDQQIEELGDELERISAADAGCTRIRKIPGIGPVVATAIVAAIGNGAAFRKGREFAAWLGIVPRQYSTGGNARLLGISKRGNVYLRKILIHGARAAVLRIKRDRAPIGAWLDRLDARAHKNIVIVAMANKIARIAWAVLSSGNEYRPAAVPA

SEQ ID NO: 98566 - protein, 340 aa, unidentified
MDTETGEFTEKTLVHDGDAVREFYTGLESPVLVGIEATGAMQWFLELLEELGIEYRVGHPAKIRAQEMRKQKHDRRDASLLLTLLREDRFPEIWMPSTEQRDLRTLLRDRDQWVRMRSRVQHTLQAIALNHGLRQGRGLWSRQGQSALQALALSPYTAQRRNELLGMYEQLQKRTQELDKEVESQARERPQARRLMTHPGVGPVTALATEVFLGDPSRFTTGNEVASYIGMIPCERSSGKRQRLGKLTKEGNKLLRYLWTEATMRAVEKDAELKRFYRRKLVQKGMGKARIAVARKLGIRRWIMLRDEIDYAEFCRRGQLRQEGKAHAGMPELQHGPAMQ

SEQ ID NO: 98567 - protein, 371 aa, unidentified
MHGLAHSTASTRILALDLGKFNSVLCVYDPATHDHHFVSAQTTPQTIHDLLVTHQTDDPSSTLLVIETCDVAGWVYDIAVALGMNVAVANPAHEAWRWTRVKRKTDKDDALKLAKLAVLGQLPTAHMPTPQQRQRRRLVHYRRVLVDRRTQIKNQVRSIFSQQGLSLPKRGKAWTKMGIAQIAEEAQPLRVCESIDDLWRGRLHIELQLLESLNQQIEQVDAKLDALGAADDRVQLLQSVPGVGPRLAETVVAHIDDPHRFSNARQVASYAGLVPKLFESGTIKRSCRITRRGPALLRSMLVEVAWMVYIRNGWAKAFVQRISRGVASRKNIAIVALARKLLVTLWAMLRDNTRWREPKVAHDSSTALALT

SEQ ID NO: 98568 - protein, 369 aa, unidentified
MTAGADRRGNVVGVDPHRHTLSATVVDERGGIVAAGHYKVSGDGHRALEAWALSFGPVVRWGIEGASGLGRHTSAYLCRQGHDVRDVCPTRTAERARGRHQGKSDALDSERIARETLAHPDLPLAFKRAGDDTGPDETAELIALWHKERRSLLKTRQHLLNEADALLSDLPDELRSHLPQTKAVRPRLTALRRPRRAWPAATAVRLRLLDRHRAAILELDRRDREITRELAKLIAGTGSTLDQLCGLDTRSVAELLVEVGDPRRFTEGGFGRFSGTAPLPASSGEGAGEPIRHRLNRGGNRRVNAVLHRMAVTQLRCDERAQRIRDEARRRGHTKRESIRIVRRHLAAVVYRRMIHDLKAPSTASSLAA

SEQ ID NO: 98569 - protein, 384 aa, unidentified
MKKLSTVRGRESKIFNEHNLTIGLDLGDRSSYYCVLDEAGKVIQEANVGTNKEAMAMVFGSMGRCRIGMEVGTHSPWVSRLLLALGHEVVVANPRQVKLISTSSRKDDRVDAQTLARLARVDPQLLRPIQHRSAKAQGDLMVIRVRAALVEVRTGLINTARGLAKSLGERLPLCDSDQMGVEQTESLPAQLQQVLEPLLKEVVSLTEKIKEMDRRVEQIAREDYPETELLQQVKGVGPLIALTFVLTLEDKTRFAKSRDVGCYVGLRPRRGDSGESQPQLRITKEGDAYLRKMLVQGALPRAGYRPEALGPEVGSARREKSEEGRRGCGGTETGSLVASIVGDGRSLRTLAKRPHTATGKESSSVVSSGLVDCQSPSSGDCGTG

SEQ ID NO: 98570 - protein, 365 aa, unidentified
MLIIGCDFHPKFQQIAYLDKETGEYGERRLTHPAEAQAFYRSLAGSQVRVGMEATGNFRWFRRLMGELGYEMLLGDPGAIHASMPRRQQTDKRDARHILTLLVEDRFPVVWQPSVGNEETRQLLLHRCRLVRLRTKVRNQLDAMAKNEGLLSARGWSEKRRQIEALPLSGWYAERRKDLFALLDELDRRVRPLDEAVKKAAWENADARRLMTHPGVGPIVSLAYVLTIGDWQRFPRGKHVASYLPPQRRRPVAGDPGLGLIPEEASSSDKRHLGHISKQGNEMLRWLLVEAATTAQRHDPSWRRQYLRLSMNKHHGVAKVAIAHKLAIRLYWMLRSGQDYEQVKERGSHAGQSVCPSGCGSTPRT

SEQ ID NO: 98571 - protein, 421 aa, unidentified
MHVLYQRCAAVDIGKDVIAVAVRLPGDGPEHRQTIKRTFKTFYGVLKHAAGWLTAQQVTHVAMEATGIYSMPVYHALIEHGQFEKVLVCNAGHVRNVPGRKTDLSDAEWLVHLLECGLLRGSFIPPAQIKAARDVIRYRTKLTESRTSELQRLGNVLQDAGIKVDSVASTITTRSVRAMVEALIDGERRPVLLAELAKGRMRARIPDLQRALEGRFDDHHALMCRLHLDHLDHLEEMIARLDTQIQDMMQPFRAQRELLTTIAGIGPFAAAAIISEAGADIGETFPSAGHFASWIGVCPGNHESAGKRHSGKPRKGNQHLQHVLVECAWAASRTPGYLQSLYRWHVRKFGGSRNPTAKNKAIVAVAHKLATIIWHVLATGKPYTDLGADYLDRRIDPAKETRRLIARLQALGHTVTIEPAA

SEQ ID NO: 98572 - protein, 344 aa, unidentified
MQITTVGIDLAKNVFQIHGVNEHGKAVLRKQMRREQVTAFFANLPPCLIGMEACGSAHHWARKLQEFGHTVRLMAPQFVKPYVKSNKNDAADAGAICEAVTRPSMRFVPIKNIEQQSVLALHRVRQGFVKARTAQANQIRGLLAEYGLVVPQGIGHITTRIPALLERASDALPGVFRHLMTRLLEHFKELDRQVGELELQIKAWHRDNEASCRLEAIPGIGPLTATAMVASIGDARNFDNGRQLAAWLGLVPRQHSSGGKNNLLGMSKRGDSYLRTLLIHGARSVIYRARQRPDAGGWLVKLLARRNVNIAAVALANKTARTIWALLAHQRAFRSDYAGAAQAA

SEQ ID NO: 98573 - protein, 344 aa, unidentified
MDYYAGIDVSLELSSVCVVDANGKIVREAKVASDPESLSAFFRELGLSLTRIGMEAGPLSQWLHAGLVSEGFAVVLLETRHVKAALSAMTVKTDRRDARGIAHLLRMGWFRPVHCKSLPSQDIRTLLSGRKLLLCKVIDVELSIRGLLRGFGLKMGQISQGRFAARVRELAVGQPMLESVTEAMLRAREVLRTEVATLHRQVLAIVRADEVCRRFMTAPGVGALTALTFKSAVDDPGRFSSSKAVGAHFGITPKKYQSGETDITGGISKVGDAMVRLALYEAAQVMLTRTRRFSTLKRWAMQVAQRRGMKRAIVALSRKLATVLHRMWVDGTDFRFGKEVAATA

SEQ ID NO: 98574 - protein, 412 aa, unidentified
METIYRSCCGLDVHSKSIAACVRRVDERGRVHAEVRSFGTVTRDLLSLRDWLEQERVTHVAMESTGVFWKPVFNILESGFTVLLVNARDVKHVPGRKTDVKDCQWLAQLLQCGLLKASFVPPAPQRDLRDLTRHRAQLTGEHTRVTNRVHKTLEDANVQLGDVASDILGVSGRAMLRALAAGQTDPRRLAELARGQLREKIPQLCLALEGHMRDHHRFMLQSLLDHLKYLEDQIERFDRRIEELMGPFEKELRLLKALPGFGDRTAQNVLAEIGVNMGQFPSHDHLSSWAGMCPGNHESAGKRKSGRTTKGSRWLRQTLVQAAWAASRKKKSYFQSQYRRLVGRRGKKRALVAVGHSLLVVIYHVLKTGMPYAELGADYFNRLDSKRLTRYHVKRLESLGYQVTLAEAEAAA

SEQ ID NO: 98575 - protein, 445 aa, unidentified
MRDHSEAFIGIDTSKLRNAIAIAEGGRGGEVRYFGEIDSADAATRKLVSKLAVKYRSLTFCYEAGPTGYGLYRLIRSLGHECVVAAPSLIPKKPGIRVKTNRRDAVELAKLSRAGELTAVWVPDERHEAMRDLSRARQAAKKHLTSKRQQILSLMLRLGRHYPGKKTWGTAHMNWLTQQKLEHREQRIALEELLEGMRQEAERVERLEQAIREAVPEWSLAEVATALQAMRGIDLVAAVTVLAEIGDLSRFQSPRELMGYLGLVPSESSTGDKVKRGGITKAGNGRARRILVEAAWSYRHPARVSREKQPKVAAAPRRVREIAWKAQTRLCGRFRSLTRKGKLPSIVATAIARELSAFIWAINREVMAPGEGLEIRNVPIARSVTPCSPPSRRGLATADEVAGAPRRPALTAAARGVPATARVGTKKRAPRSNKETGSEAESAGL

SEQ ID NO: 98576 - protein, 350 aa, unidentified
MVIIGADLHKRSHTLVAIDEQGRRLEERTVPATPEGHAAVLAWARARFGERRWALEDCRHLSRRLERDLVTAGESVVRVPPKLMAGARRSTREPGKSDPIDALAVARAALREPDLPAARLDGPERELRLLVDHRDDLVAERTRAEARFRWHLHELAPGEEPAPRTLDRQHVLDALDERLAGLGGTVARIARDLLARIRELTGVIDRLERELATLVAGLAPALLALPGCGTLTAAKLVGEVAGIERFRSSAAFARHNGSAPVPVWSANTGRHRLSRSGNRQINAALHRIAITQMRIDQRGRDYIARRIAAGDTKTEAIRALRRRISDEVYRRMRQDHDVRAVGQPPRAIVA

SEQ ID NO: 98577 - protein, 345 aa, unidentified
MELMYYIGLDVHKQKISYCVKDSGGKVYAEGSLPATRLDLDLWMKTLPQPWSGAMEATIFTGWIYDHLKPHAAALKVAHPLMLRAIAAAKKKNDRIDASKICDCLRCDFLPECYMASTAIRERRRTLRYRNLLVCQMVQMKIKISSLLMEAGVSYNKQRLHKAGYFRELLATNPNIDEGLCSLLRLCRETVVRLQKTESAVVRSLERDSLLIDRVERLMTIPAVGPITALTWALEVGDVQRFSSIKKAISYCGLCGAEKSSGNTVQRTPLSKQRNKHLQTTLIEAAKMAPRISSELAMLYDKEKQRGNTNRATLAVARKLVAYLMAVDRRQRNFRVMETSSSIAA

SEQ ID NO: 98578 - protein, 341 aa, unidentified
MNIVTVGIDLAKNVFALHGVDQSGKAVFIKPKVARGQLLETVAHLPPCLIGMEACSGAHYWAREFSRFGHTVKLMAPKFVAPYRMSGKRGKNDAADAAAICEAVTRPNMRFVPVKDVDQQAILCLHRTRQGFIEERTALYNRLRGLISEFGIVLPQKVERLRREMGAHLEALPGWANRCVGDLLVHADRLNERIDEYDKAIAEAAKQDQRSRRLMQLPGIGPTTASALVASLGGGHDFKNGRQLAAWVGLVPGQYSSGGKARLGRITKAGDTYLRSLLVMGARSVLAGLGEKQDRFSRWARSLVERRGYWKAAVAIAAKNLRLTWAVMKYGEDFRLTATAV

SEQ ID NO: 98579 - protein, 351 aa, unidentified
MTIVGGFDVHRAQITFDYLDTGTGEVCTGQVRPATRAALRRWLNERFAGRPDVAIALEGCTGWRFVVEELNRAGVEAHLAEPADTAAQRGRKKRAKTDRTDAGHLRELLSTGRLPESWVPPSHVLEVRTLGRLYVDLMDERRAWQQRLHAQLFHQGAPPIRGLLTGEGRKALAEAELSPAGRQMVEAALDAIDHLTGLALPLRAQLCSLGRSHPGPRSLMAHYGVGALSATLIWAELGDCRRFSSSEQAVRFAGLDITVYSSDAKRSPGRLARQGSPVLRWALFEAAKCAARPASPDYELYTSVRERLGGKRPTLTVARKLARRCYHTLRELGDQAWSPPAWAKTDEAEAA

SEQ ID NO: 98580 - protein, 363 aa, unidentified
MFSERTSVGLDVHARSVAAAAIDGVTGELVQARLTPAYEHIRLWVQDLPGPVAVAYEAGPTGFGLQRTLAAAGIRCVVAAPSKLQRPAGDRVKTDARDAVHLARLLRLDEITAVAVPSVDQEAARDLVRAREDCRGDLMRARHRLSKLLLRHGIVYCDGDAWTGKHDVWLRHQAQPQLTSRATRLAFDSDYEAALAVKIRRGRLDTAVAEMATDSEFTAMVRRLGCLRGVSTLTGFALAVEVGDWHRFTGNTIGSFVGLVPSEHSSGGSRVQGSITKTGNTHVRRLLVEAAWHHRARYTVGKTMRDRWDLAPAAARARGDEGNRRLHQRWVRFIERNKKPTIANVAIARELAGWCWSLAVLEE

SEQ ID NO: 98581 - protein, 419 aa, unidentified
MTQREDSKIISVVHPICCGLDVHKESISACMIYVDENGVDQHDIKIFETFTDDLMRLRSWLLGYACPVVAMESTGIYWRPVHNVLEDAVQVVLVNARDIKNVPGRKTDIGDSKWLAGLLRHGLLRGSFIPSKEVREWRDLTRLRKRYVQTVGDYQRRTHKLFESANIKIDSVVADLFGVSGRNLMNLLLANRAPLALADLELCVRGKLKMKVQELYRAIQGFFSDHHRFILKRLLNTIAMLEEEISLLDTQIRDLMKNQNSLLNRLDKAAGIADVASRQILAELGPDLRAFPTGEALVSWAGLCPGNNESAGKRKNGRSPVRKNHLKTIMIDVSWAAIKKKGSYFKDKYYRLKARRGAKRAIVAIAHRILLGIYHVIKDGVEFRDLGEDYLNQRNKTLKLFQLQKQAQSLGFNLVPRTT

SEQ ID NO: 98582 - protein, 427 aa, unidentified
MTNSQGLKFNAIENTDAIVGIDIAKNVHWAGIILPNGKEIKKSFSFHNNKKGFESLVETVKNVLTMLNLKKVIIGMEPTGHYWKSCARYLQKIEWIKVVTVNPKKVKDAKELDDNCQTKNDKKDCITIARLIKDARFFEPYLPEGVWAELRNLSNTRAELVRKQNAVKNRLIATIDEYFPEYTKVFKKILSRTSEEILKKCPFPEDIKSLGEEELLKHIKETVKRGYSKKQVKEIYEIANESIGTTEGTAGAKFQIKMYIEEAEMLEKQVKLTEEELEKQLKETGFYESLISIQGIGIVSAATLIGEVGNINRFNSYEQIRRYAGLNLVENSSGKHKGKTTISKRGRSLLRSILYRMAFTMVNKNNEIKELYKYLTTRKENQLKKKQAMIAVIGKILQIIYAVVTKNEEYKATRVFTEERLEQLKVA

SEQ ID NO: 98583 - protein, 411 aa, unidentified
MDVIAERCAGLDVHQGTIVACVLKGAPGQRQTKEVREFGTMTGQLQELRAYLTAAGCTHVGMESTGVYWQPVYECLEDSFKLVVGNAQHIKRVPGRKTDVQDAEWIADLIRHGLIKSSFVPPKPIRRLRLLTRMYRKFTQAQAAERNRTIKVLETANVKLSSVASDVFGVSGMAMLRALVDGKQTPSEMAELALGRLRPKIPKLQMALEAQMDTDRRAMLAECLARLDNTANTLVRLQRLIDQHLIPYKAEQDLLDTIPGIDTRIAAAIIAEIGVDMTAFSSAHHLAHWAGLCPPNNRSAGRQKRIKILTGNLTLKSMLNEAALAASRCKTGYLPQKFRKLAARRGFKRAVVAIAHKLLIAAYHILARRVPYKDLGADYLDRQGRKATTANLVRRLKALGYDVQIQPTATA

SEQ ID NO: 98584 - protein, 433 aa, unidentified
MKPPPEQPAPDWLVHRAFGGLDWASQKHNVIVVDPHGKVVEDFEIEHSALGWKKFRERLAPYGAIPFAIETSQGTAVEQLLEAGMKVYPINAKSAKSYRERKAPSGVKDDRLDAWSFADACRIDGQGWRALRPEDPLVKELRLLCRDEVSLIEQRTSFICQLRHALAEYYPTALEAFEDWGSVSAWMFVQRFPTPQLLQVAGKRAWEKFLHARHLWRTESGPRRIELFSHATELSGTVPMANAKSQLALSLISMLFALEKQLGIYRKRIDELFGRHPDHDLFGSLPGTGPKLAPRLLSEIGDDRERFEDGPQALQCLAGSAPVTRRTGKCKVRANPDRWPCHQRWACDKHLRHAMHLFSEHTLRQCVWAQIYYQHHRQKGSSHADALRRLTQRWLKIIYRMWMDRTPYDPMLHHHNQLKHGSWVFELKTTNCK

SEQ ID NO: 98585 - protein, 347 aa, unidentified
MTIMVDTQRALTGGVDTHADVHVAAVIDPDDGLLGVESFATDLAGYKLLSAWMCAFGKIGLVGVEGTGSYGAGLARHLHRVGLVVVEVDRPNRQERARQGKSDSLDAIEAARAALSGRAFGVAKTRDGNVEAIRALMVARRSARESRTKAINQIRQLVYTAPDELRERFVGVPSWRIAEGVSVLRVHADADPVRMATKSALGTLGRRAVALGEEGKRLDVLIARLVDKVAPELVELVGLGPDTAALLLIAAGDNPSRLRSEATWAKLCGVAPLEASSGKVTRHRLNRGGDRQANHALWRIVITRLSCHAPTKVYMARRTAEGKSKREIMRILKRYVAREVYHYLPRD

SEQ ID NO: 98586 - protein, 371 aa, unidentified
MEHTRFVGLDIHKERISIAVAESGRSGAVEYLGEVANDPGAISKLCDRLGRPGRPLAFCYEAGPCGYGVYRQLTSLGHRCDVVAPSLIPMKPGDRVKTDRRDATMLARLHRAGELTPVWVPDADHEAMRDLIRLRSVVRQIVTRTRQHLQGFLLRHGRKHGQGTAWRMAYRRWLSTLAFQHPAQQIAFQDYVDAVMDAERRLQRVEEQISCLLPEWNLCPVVDAVQAMRGIALINAVVLVAEVGDFTRFSNPRQLMAYFGLVPGEHSSGETIRHTGITKTGNSHARRALVEGAWAYRMKPRIGRHKVDRIEALPKIIRDIGWKAQVRLFARYRRLSARGKNANVVNIAIAREMVGFIWSIACTIQSAPRTA

SEQ ID NO: 98587 - protein, 438 aa, unidentified
MEVIHPHAAAIDVGSERLHVAVCDGPVQVFDTFTASLHALRDWLLSQTVQTVAMEATGVYWLPVYEVLEEAGIAVSVVNGAHVKSLPGRKSDMADCQWLAKLHSHGLLRSGFVPDEWIRRLRDYQRLRQDHVQMASAHIQHMQKALDRLNVKIHEVLSDLMGVSGQRLVQAILEGERDTERLLALCDVQVLRKKRERMRQALQGHWKPGHLFALQQARQGWEFYQQQIVACDREIQATLQEIAALTPPPVAGAAAPPSVCKRISHNAPHIADLKQLLVRITGHDLAVLPAHTDYSILQLLAETGPTLTAWPSVKHFTAWTGLAPSSRQSGKRRRREPRFRNRAGRLFCVMARSLARSNQIGLGGFYRRLRATRGPAVANVATARKLAVLYYNTLRHGLTFVEQGLETYEQHYREQSVRRLRAAARKFGMTLTPITSVA

SEQ ID NO: 98588 - protein, 356 aa, unidentified
MSRDVKYIGMDVHKEAVVIAVLNSSGKLVMESIVETKASSILQFIHGLRGELHVTWEEGTWAAWLYDLLQPQVAQVLVCDPRRNALLKEGNKSDKVDARKLADLLRTGMLRPVYHGEHGLRTLRELGRSYQTLSQDLNRVMNRIKALYRGWSIPCAGTQVYAPRYREEWLQKIEHAGVRRRAELLYQQLDGLQALRRTLRPELLAESRKHKAAKLLRQIPCIGPIRAARLIALMQTPHRFRSKRQLWTYSGLGIETHDSAQYRYVHGQLQRTKKPQQIRGLNRNHNHEMKEIFKGAATRASCGVGPLRDFYVALLAKGMKPEMARLTLARKIAAIALTLWKKEGRFDAEQLKPQAA

SEQ ID NO: 98589 - protein, 347 aa, unidentified
MRFYTTQHPYYCGIDLHARSLYVCILDETGETILHREIKARPEPLLDLLTPYIGNTVVGVECMHCWYWVSDFCAQHGIDFILGHALYMKAIHGGKAKNDRIDSYKIAHLIRGGNFPLAYVYPPEMRAARDLLRRRTRIVRHGADLKAHVKNTTSQYNLPPNNLDLKYPCAREAMRNCFDDVFVQRNIDLDLNIIAFYRHELSSIECFIEKHAKHHNGRDYHILTSFPGIGRILALTILYEVGDIGRFSTVQDFASYSRLIKCKAESAGKSYGTQGNKIGNAHLKWAFGEIAVLYLRGNDKAKNYLLKLQKRMSKAKALSALAHKIGRCVYYMLKNQKGFDEKRFLTG

SEQ ID NO: 98590 - protein, 410 aa, unidentified
MSHTIAGIDVHKKLLVAVIADSAQPDVVLQSRRFGAGSAELNHLAAWLEQHGVVEVVMESTAQYWKPVWMALEPHLRLHLAQAQSNKAPQGRKSDTADAKRLVRRFAAGELMLSFIPEPEQRGWRSVTRGRLQLIRERVQLQNQIESLLEEGRIQLSSVISDLLGASGRRILRAMAKGETNPESLAVLGDKTLRCTLPMLVDALTGSRGDVHRRLLDQQLDRIELIDKQIQELDQLAAELMGKYQNTITRLVAIPGIGAEAAQEILSEIGPEAAAFPSSEQLASWIGVCPGSQESAGENHSGRCAKGNRFLRRLLCQAAQAAARTKDSHLQSIFKRLVVRLGYVKAIWAVAHRICKIVWNILRKGSSFIEFSETRSPKAVRRAITHHLKALRRLGYQIPSLPATAMEAQR

SEQ ID NO: 98591 - protein, 367 aa, unidentified
MKNQAVQYLAMDVHQATVVVSVRNEQGAITMRATVATEAGAILSLIRAVGARVMVAFEEGTQAQWLHDLILPHAEGVVVCNVRGKSELTNKSDRMDADALSELLRLGALKAVYHGAPSMLTLKELVRNYNAVVEDTTRAMLRIKALFRARAIPTRGTSIYKVSDRAGWLDQLTNQGARVRAESLFKQLDLLRELRPKAKRAMIAEARKQSGWKPLRSIPFLGEVRTAQLMAIMATPHRFRTKRNIWPYAGLAVVTRSSADQEFAGGKLRRRNRPPQTRGLNRNHNPMLKSIFKGAANRVLKDVFKGAATAAAHKDGPLKDLYEQTLAHGVDPDMALLTLARKISSVALRLWKKGELWDPTKLTMRTT

SEQ ID NO: 98592 - protein, 323 aa, unidentified
MGRSVGLDVHRDFCEVAILDEQGGRRSGRLPSTPQDLQLFAQSLARDDRVALEVTGNAWEIARILEAHVARVIVVSPSDTGIRQARAKTDRLDALALARLLAAGSLDAVWTPDEPVRVMRRRLARRSQLITSRSRVKNEVHAVLVRRLKGRPPCSDLFGLKGRAWLAELELPVEERETVDAGLRQIDFLDSEVAEVDRVIALHALQWPEIGRLMTVPGVNVTVAATFLAAVGDIRRFPTQAKLVGYLGLDPRVRQSGDAPAKHGRISKQGSAPGRTRSWRPPGAPSDRRARYAPSTSASARGAGIRSRSSPRPASWPACSGVC

SEQ ID NO: 98593 - protein, 343 aa, unidentified
MQIRSVGIDLGKTTFHLVALGDNGEVLLKKKFTQKQLIDFTANLQTSLIGMEACSGAHFLGRALRAQGHDVKLIPAQFVKPFVKSNKNDFIDAEAIAEAVDRRNMRFVPIKTDDQLDLQALHRVRDRLMVRRTSVINQLRAFLLERGMVFAKSPIRLREAIPEVLENANENLTPRLRNLVAMLWSEWKHMELQIQEMNNEIERIASSDAACCRLRQIPGIGPLVATAIVASIGNGAAFHKGREFAAWMGLVPKQHSTGGKTKLYGISKRGNRYLRKILVHGARAVVLRSKRDRIAMGSWMTSLEMRVPRNVLIVAMANKLARIAWAVLSSGQDYKATPGATPA

SEQ ID NO: 98594 - protein, 352 aa, unidentified
MAYEYHIGVDYHKAYSHIVVQDGSGKTVRSGRVRNDRRSVAGFLHRYSDNAHAVIEATRNWTVMFDWLDELVDEVVLAHPLKVKAIAEAKIKTDKIDATILSHLLRADLVPAAHVPGHQARQVRLALRERMFYIRLRTMVKNRIVTAFDRYPEQTAAMKRCSDLFGAAGRKQLAALQLSEIDRIQTDRSLAFIDDIERRIKQCETTIKALSKSNANVNRLKTIPGIGEFFARLIDAEIDDIGRFHSAKKLAAYAGIVPSTYSSGGKTYHGRIIKQGNKWLRWAFIEAVTPAVAHDPVLKEQYEHLKTKGSNRAKVAVARRLLTIAFQVLRDSRPYERRAVCPESGSKQSRLS

SEQ ID NO: 98595 - protein, 409 aa, unidentified
MRIIGLDIHRAFAEAVAWDEGELKRLGRVDMRRHLLEAFAKKLSKEDVVVIEATGNASSVAAVIAPHVKKVVIANPKQVRVIAHAKIKTDTIDAKVLAQLYASGFLPEVWIPDEPTQALRRQVTRRNQIVRQRSRLKNIIQSILHSHLIPSCPHADLCGASGRAWLFHQVLPEDERLAVERHLREFDRLGDDLKVIERDLARSALGDEGVKRLMTIPGVDMVVALAIVAAIGDVGRFEQSQKLVSYLGLNPSVRQSGPGPAYHGRITKQGRGHARGMLVEAAWAAARAPGPLRAFFLRVRARRGQHVAAVATARKLAVLIWHLLSKGESYVWARPALHARKLRDLELKAGYKAARGQRGAAHAYNIKSHRDQERRWVEQAETAYARFVSGWNPRGPKRVRTGAATEVRR

SEQ ID NO: 98596 - protein, 331 aa, unidentified
MKNKELIGIDVSKNVLDVFILGLSYHFTVENNPTGYAKLLETCCIKLSCNKDHLFFCFEHTGRYSRLLSIFLSDSLIVFAKVPAMDIKQSRGMTRGKSDKKDARMIAQYAYRKLDELITTKLHTPEVGQLRQLLSLRNKLLRHRTAYKNSIKDLQDCFMEGETDFIRITQERLIQHLNVELDNVEGQIDTIINSMPAWARNFRLMQTVKGIGPVVSRYVIIYTENFTRFTDPKKFACYAGIAPFEYSSGSSIKGKTRLHPCANKQLKSLLNMAAMGAVRLKGEYKAYYERRTDEGKNKMSTLNIIRNKLLFRIFAVVKRQTPYVDLTMFAA

SEQ ID NO: 98597 - protein, 443 aa, unidentified
MPVRLWREHCFIRSLMVLLLAVGSDGLMVVGDALLFVGDDWAQDHHDVEVMDVSGRRLAKARLPEGIAGMTRLHAMIGEALGGDIDAEGVAARVVVGIETDRGPWVQALVAAGYMVCPVDPLQAARFRERLGVSGATSDAADAHMLADMVRADLHRLRPIAGDSAQAEAVKVVTRMHQMMVWERTRATERLRHALREYFPAAVEAFEDLDAADTLELLAKAPDPQAAARLSLSHLSVALKRARRRNVAVKAAAIQVVLRAPQLGRPAAVVAAYAATVRSLVALLGTLNEQVKVLQGEVEAHFGRHPDAEIIWSQPGLGAVLGARVLAEFGDDHDRYTSAKARKNYAATSPITRASGKKKTVMARYVHNDRLVDAVMKQAFAALLRSPGARAYYDRQRARGVHHNPALRQLANRLVGILHGCLKTGTLYNETTAWSHHPNQTAA

SEQ ID NO: 98598 - protein, 317 aa, unidentified
MDKPPAATCFVGIDVSKGHVDVHVRPDGTAFSCTTDPDGLANLITRLAPLQPQLVAMEASGGYEAVIAAALTEAGLPVAIVNPRQVRKFAGAIGRLAKTDAIDAGVIAHFADAIRPAPKPMPDALMLRLRELLARRRQLVVMVNAEKQRLGKAADKLAQRSFKTILRSLEAERARIDRAIDTLIQQSPLFCAKQDLLKSVPGIGDIVARTLIVELPELGSVDRHQIAALAGVAPMNRDSGRYRGKRRIQGGRVEVRAPLFMACLTAIRHNPPLRSFYRRLRDAGKPARLAIVAVMRKLLTTLNAIIRGNTAWTHAHI

SEQ ID NO: 98599 - protein, 329 aa, unidentified
MSRKGQSMSTRAIFVGIDVSKAHLDVAVRPDEIEWRSPNTDAGAREAANKLKDLDPDLVVLEATGGMEIPAASALAVLGVPIAVVNPRQVRDFAKSTGRLAKTDALDARVLAHFAEAVRPEPRPLPDEQARQLSALLSRRRQISEMLTAERNRLQSADSTVRRRLKVHIRWLERELSDIDDDLNRAIKESPVWRVKDDILKSVPGIGPVVSFTLLSELPELGRINRKQIAALAGVAPFNRDSGTMAGRRTVWGGRSRVRAALYMAALVASRYNPVIRDFYLRLCAAGKPKKVALTACMRKLLLILNSMVKNNVRWNASAAEVRGTLISA

SEQ ID NO: 98600 - protein, 321 aa, unidentified
MTYVGIDVSKATFVVAYSSAKSSETKTFKNTTKGIREFIRTISPEENHCVLEATGNYSMLLVYLLSKAGFTVSMENPLKIKNFARVMLSVVKTDEIDARLIALYGERMQPAPFKLRSDSLLLLKQKRTVLRQLKKQLTANRNLEGSLKVLPFIDSKCKKVLEKTIKFLEKQIEEMEEELTSLAEIEYKKQMDLLTSIKGIGATLAAALIIATGGFTYFDNAKQLTRYLGLSPTYQQSGTSVNVKGHINRNGDAYLRSQLYIGAMASLRCNTECKACFDRLRSNGKPGKLAIVAVANKLIRQAFAVVAHEKKYIDGYKSVKP

SEQ ID NO: 98601 - protein, 307 aa, unidentified
MKAIIERCCGIDVHKKQVVACVMKGKADSEPTRQVEKFATTTSGLKKLQRWLQQEGCTHVAMESTGSYWKPVFNILEEHFVVILANARHLKNVPGRKTDVKDCEWIAELLRHGLIPGSFIPPRNIRELRDLTRYRRKLLNMYSSEKNRIQKVLEDANIKLGNVLSDVFGASGQDMLEAIVEGRGEAKDIANFARGRLKAKREQIQEAASGTVTDHHRFLIEHMLSHMRFLEEEIQKIDEKIKQHLEPLKEDYERLQTIPGVGKTAAASIIAEIGTDMSQFPTSAHLSSWAGICPGNNESAGKKKAVE

SEQ ID NO: 98602 - protein, 316 aa, unidentified
MEPCGVGLDVAKATLDLACSTNPAVRWQTTNDEAGWAALVAHVGTLEPAVVVLEATGGYETGAASALSTAGLPVAIVNPRQVRDFAKALGLLEKTDAIDAGVLALFAVRIRPTPRPLPDDLHADLHALITRRRQLVEMLTAERNRVPLARGAVRKNLLAHIAWLDKQLGKTDRELRTRVEASPLWRVRDQLLQSVPGIGPTTSACLLAALPELGTLTHRQISKLVGVAPLPDDSGTRRGYRRIQGGRSAVRTALYMATVTAITHNPTIRASYRRWRAAGKLPKVALVAAMHKLLIHLNAILKQQSLWHPSPTAPTA

SEQ ID NO: 98603 - protein, 313 aa, unidentified
MDVPATVPTHFIGCDVGKSEIVVFDSRTERITRVRNDNAALVDFAAAVGPDVLVICEATGGYEAALLDALVTAGRAVHRADARKVKAFIRSFGILGKSDTIDARALAQYGRERHDRLSRWQPRERQREQLHRLVSTRQELVHQRVACRNRLQAPGMADVQPRLKRILTALDAEIAGLEADIHALVDASDTLRKTIKILSGISGIGAVTAAQLTALMPELGTLGRRQAAALAGLAPHPKQSGSNDAYRRTRGGRSDVKQALFMAALAATQHNPELRAFYQRLIANRKKPIVAIVAVMRKLIVIANAKLRDAAII

SEQ ID NO: 98604 - protein, 495 aa, unidentified
MNNCAAGENFAGERPAPARSQSQSPHPKRVIGRLLAEPEALAPTSHRKRPQEGHYISAMDGRAKRRKSQPQQQKTMNDSKQWQQHRAFGALDWASEKHSVIVVDQTGKVIEDFEIEHSALGWKKFREKLQPYGSIPFAIETSQGVAVEQLLEAGMLVYPLNPKSAQAYRERKAPSGVKDDRLDAWSFADALRVDGQDWKALRPEEPLIKELRLLCRDEVTLIEQRTAFINQLRHALAEYYPAALEAFEDWTSVSAWMFLQRFPTPESLAQAGKRQWQKFLHSRRLWGSDQGPRRMEIFAHATEFAGTPPTARAKSLLALSLVQMLFSIEKQLAVYRQRIEELFARHPDHDLFGSLPGAGPKIAPRLLSEIGDDRQRFGGDPQNLQCLAGSAPVTKRSGKQRKYWHVHQRWACDKHLRHAIHLFSEQSLSRCVWAEIYYQHHRQKNQSHANALRRLAHRWLKIIYKMWIDRTPYNAELHHRNQLQHGSWIFQLQKS

SEQ ID NO: 98605 - protein, 429 aa, unidentified
MEEVDEVELVVQRVAALDLGKATLEACMRVPHPSKPGRRMQEIRGYATTTATLLEMAIWLRQWGIERVVMESTSDYWKGVYYLLEAEGFDCWLVNAREVKNVPGRAKTDRADAVWLAKVAERGMCRPSLVHPPPIRRLRDLTRYRRALVSDRSREMQWVEKLLEDAQIKISSVLSDIHGVSGRAMMEALIAGQRDPRSLARLAKGLARKKTDRLEEALRGFFTDHHATILQMMLDNIDRIGAQIAALDARIAEAIGPFSRQGSRLADIPGVNTVAAAELIAEIGVDMTRFPSPAHLVSWAKFCPQIHQSAGKSRSKARGKGNPWLAGTVGRIVFSASHTDTFLGARYRRLARRRGKPKAIVAVGNSVLTVVYHLLSDADLDFCELGPAHYESRINKHRRARDLATQLQALTGQHIVIRDGKAIITDNAA

SEQ ID NO: 98606 - protein, 467 aa, unidentified
MITVPAIRESCAGIDVGKREVAVAIAVGPVDKEAAIHTRMFGTTVPALQQLRCWLGEHGCTSVAIESTGSYWVPAKNVLEGAVEIVLICSRKHHPKKGDKTDFRDAINMVHYHRHGLLTGSYIPERRVVELRDLTRRRKKLLGDVRGEKNRIQKVLETANVKIGNIISDMFGVSGQEMLKALLSGQPLPASKIADLAKRKLRLKIPELEEALQQHQLNEHHRWLIRQSIEHLVLLDRQLEELESKILEYLEPYRTGYDLLQTIPGVKEHTAAAILAEIGPDMSVFPTAGQLCSWAGICPGNNRSAGKSKTAHIKKANPFLLVALVEASWGAARTADTKFQVQFQRWTRNLGRKKAVIAVCHSLLRTIYAMLRDNQSYKEPDPDAAAARHREKRIRHHAKQLRDLGMDTQASQELIEQLMAVPAPVRPTRAAVCRKSQRPVRPCRGALGFRARQTRPQRTKYSNIKEP

SEQ ID NO: 98607 - protein, 419 aa, unidentified
MEDIKAKKVKSINEKTLIVAMDIGKGVHHAYFRAPNGREMKSFPFSNSRNSFESMWARICQFKTVHDLDDVVVGFESTGPYAGPMCHFLRKKPVRLVQVNPVHTKRLKELTGNSPNKSDQKDPRVIADIISLGHALSLVVPEGPAAQLRRLTQARERAMKRRTALSNQLQHLIFVIFPEFLTLMKDISCKSAIYLIKNYPTPESIVGLGLEGLTMLLKRVSRGKVGREKAEALLRAAEHSIGIKEGRQSLLLEIEYVVSQLGADTQFILSLEKQMGHYLEQTPWSRSLLSIKGIGRVTVAGLTGEVGDFRKFHTVSEVMKLAGLDLYEISSGRHKGRRRISKRGRSLMRKLLFFGAINAVKSKGILHKPYHEMLDRGMPKIKALVAMARKLLRVIFALARDGSVYMENHGYQEPLKLAA

SEQ ID NO: 98608 - protein, 434 aa, unidentified
MRILYERCCGLDIHKVSIAVCVVITRDGKTEEETRRFGTMTADLLELAAWLKARGIRHVAMESTGVYWKPVWNILEAEGFDLLLANAKEVKIVPGRKTDQKDSQWIADLYQHGLLRKSFVPPKQIRDLRDLTRTRATLAQDHSSICNRIQKVLEDANIKLACVASDVFGASGRAILQALMKGESDAEGLAELSKGRLRNKIPELRRALEGRVTGHHRFLIGRHWGQMETLESQLRQFETEIAERMKPTAEEIARMRESLAADAPLPLSPREEAISLWMELPGIGLTTACSMVAELGVNMEQFPNSGHLASWAALCPGNNESAGKRMSGKTRKGNVWLRRTMCEAAWAASHSKDTYFAAQFGRIAARRGKKRALIAVAHSLLVVAYEMLKHKKHYRELGADFFDGLNKDQVKRRLVQRLAKLGFQVIVTTTPAAE

SEQ ID NO: 98609 - protein, 358 aa, unidentified
MAAPSIADVRAHVTVGVDTHKHSHLGSAKDELGRTLGQLEIPTNPRGYADLLTWARSLGQVAAFGVEGTSSYGAGLTRFLRAQGVTVIEVLRPTRRDRRLRGKSDPVDADAAAQAVLSGKARAVPKAGDASVEMIRPLRIAKVTAVKARTQALNALKALIIMAPDSIRESLRDLSTARLVTTCARYRVEQLTDPTAATKQGLRSLARRYLALDDEVRSMNRELDTLTSRIVPQLRERFGVGSDVAATLVLAAGDNGGRLHSEAAFSMLCGSSPIPASSGVVRRHRLNRGGDRQANAALHRVVLARLRWHEPTKAYMARRRAEGKSKTEIIRCLKRYVAREVYNVLVGPLEKALSANAA

SEQ ID NO: 98610 - protein, 450 aa, unidentified
MNINSHPKMNYLYVGIDCHKYTHTATMKNCFNETLGCITFNNDKVGYESLIKKVDEIKENLIPIYGLEDTRHLGYGLAEFLMNKECSVKHINSNLTYNERKKNPIIYKNDEFDSSCIAKVLLDELDTLPDAENNEIYWTLKQMVKMRDAIIKNNVNLKNKLHAQLLHHYPNYNKVFSELTSKSCLVFFEKYPSPNLLADLTVDDLSTFFKENTNSRFYNKFASGIMELIGEYEIYKNDYQEQRNCIIKLLIQQLNENTKRINDLEKSICNIYDKIGKKLHTIPGFTKVYAACILAEIGNIHRFSDSGKLARYAGIAPIENSSGGKDNHLSNDYGNRNLNKLLYYASCLSLSCGKTSGENIKANNPIFREYYDRKISEGKTKHQAIICIMRRLNNIIYKILKEDKDYVSPEDLIQQSINSFRERKKLEEEKLNKKKLLKEQRKKEKILSTC

SEQ ID NO: 98611 - protein, 424 aa, unidentified
MNNTQNQKIAQVTDKTLIVGVDIGSENHYARAILARGFEVSKKPFPFTNTEEGFENFVNWTHNLAAAHKLTKIMVAMEPTGHYWFAFVAFLKKYDVQVVLVAPQHVKHSKEMDDNTQEKDDQKDPIVIARLVPEGRYLIPYIPEDVFAELRVAFNRRCELVEEQVRIANRMIRWFDIYFPEYRKIYGRIDAKTGIKILKRAPLPADILDIGVDGICQIWKDAKLRGYGQKKAKQIYSAAEHSVGMKGGASVRWKLWQLLEEYELIERQLHDILQLIEGLLYQIPGADKLLKIPGAGLVTVAGFLSEVGDIKRFSDPKQIQKLAGLAVVENSSGKRKGLPGISKRGRSRLRWVLFQLARSMVMFNSEMKAYHQYYTTRKENPLKKLQSLVAISARIARIFYGILKNGTEYDPTMVMKDFNKAVAT

SEQ ID NO: 98612 - protein, 394 aa, unidentified
MKRNDLSRSLVAFDQTSTLVSVVELSLKTWLVGGVVPGLERTPLKKQGPDAEALLALLHRWRDESVKAGSKIERIVVAFEAGRDGFWLARWLQARGIEVYVIHPTSIPVSREHRRAKTDRLDAGLLTRALLGWLRGEPKHCGMVAIPTLAEEDARRPNREHEHLVGERSRIINRLKAATIRHGIRNFNVKLSKAAECLEELRSAEGVPVPPNTLDEMRRDMARLRFIREQIKEIERMRLERLQRAPREGTHPMVLLLAKVMGIGVETADMLVHEVLSRSLRDQRAVARYGGMTGAPDESGGKRRDKGLARAGNARVRRGMVQLAWRWLMFQKNSALAHWYRARTANARRDIRKTMIVALARKLLIALWRYVTTGEVPAGAVLRPATGAVPRLAA

SEQ ID NO: 98613 - protein, 337 aa, unidentified
MIVVGVDVHKQSLTAVAVDEVGRPLSELTVGSAEELLVWSRSLAVGRLWALEDCRQLTRALEQRLQAAGERMVRVPPKLMAPSRRSGRIRGKSDPIDALAVARAALREPRLDHPRPAEAALRELKLLVDHRDDLVDERRRAQQRLRWHLHELDPQLTVPAGALDRTVWLDRVARRLARQEQTVLVRIARELVGRCRSLTRTILALDRELQARIEKTAPALLALPGCGALSAAKLLGEIGPIKRFQTDAQLARHAGVAPLEASSGKHRRHRLDRGGNRQLNCALHRIAITQARIHPPARTYLERKQAEGKSRREALRCLKRQLARTVYVTLRKEPLLT

SEQ ID NO: 98614 - protein, 374 aa, unidentified
MKEFTKYVGLDVHKSTIAVAIAQAGSSEVRYFGEIPNTPEDINKVMRKLSSSEATLSVCYEAGPCGYEVYRHLSGRGIDCMVVAPSMIPRKPGDRVKTDRRDSQMLARLHRAGELTSVWVPSAEQEALRDLVRARADFVLLQTQSRQRLNAFLLRHGQRFGGKSKWTQAYFRWLETIKYDFPSQQIVLQEYIDTVLHMQKRIKALDTQIELAGNESALWPLIQNYMALRGISRLIATALAAELGDVTRFTTAPQLMAYLGLVPSEYSSGPSKVRGGITKTGNGYIRRLLTEAAWTYRHMARKSACVQRRAEQTPEPIQEIAWKAQQRLCARYRGYIQRGKVSVQACTAVARELVGFIWAIGQATGPLHEMSANA

SEQ ID NO: 98615 - protein, 424 aa, unidentified
MREEGLSMAEEIEWFVGIDWASQSHQVCLVDARGECLGERAVAHGGLGIEELCDWLIARTGATPEVIGVAIEMTQGPVVEALLERGFCVYGINPKQLDRFRDRFTVAGAKDDRRDAHVLGDSLRTDRHAFRRLSNDEPVIVKLREWSRMADDLQQERARLASRMREQLWRYYPQMLELADDLAADWFLDLWNQAPSPAKAARLRQTTIERFVKAHRLRRWQAPEVLRILKQKPLSVAPGVVEAASDHIRTLTVRIRLVNQQLKAAHRKLDELCAQLVPSEEDEPGQQCEQRDVVILRSMPGLGRTILAVLLAEVWQPLRRRDYHALRSLSGVAPVTRRSGKTCVVVRRYACNKRLANALYHWARVATQHDALSRRRYAALRQRGHSHGRALRTVADRLLSVACTLLEQQTLFDPTYEVREAAGA

SEQ ID NO: 98616 - protein, 320 aa, unidentified
MTGSGLTAAAARAMAVAPAAVQVKVGVEAAGHYHRPVLDHQWPDGWEVLELNPAQVAEQRRVQGRRRIKTDVIDLEAITELVLAGYGRPVTDRDVVIGEISAWAVHRSRRVATRTATKNQLLGQLDRAFPGLTLALPDVLATKIGRLVAAEFTDPARLAGLGVNRLIRFAATRDLQLRRPVAERLVAAAHDALPTRDAVIARRILAADLVLLGDLDDQIQSAETALGSLLPRSPYATLTSVPGWAVVRASNYAAALGDPKRWPGPQQIYRASGLSPMQYESAHKRRDGGISREGSVALRRALIDLGIGLWLNEPAAKNYA

SEQ ID NO: 98617 - protein, 393 aa, unidentified
MICVGIDVAKDKHDCFILSSEGEVLADVFTIPNNAEGFDTLLQTIRRCARPADKIKAGLEATGHYSYNILGFLLNEGLDTYVINPLHTNLYRKSLSLRKTKTDRVDARTIAAMLMSDVDLKSYTDTAYHNEELKSLTRYRFDNVRERAKLKQSVSRLVTILFPELEKLVSTLHTASVYALLSEFPGAKQVAGAHLTHLKAVLYDASKGRYGRDMATTFRDAARCSVGSVMPAKSLELRHTIRLIHELDAEIEDIEAAIQSMMDEIQSPITTIPGMGVRMGAMILAEIGDFSRFDSPDKILAYAGMSPSTYQSGQLSLSGAYSHMEKRGSRYLRYALYNATKYVCLWNPTFAAYLAKKRAEGKHYNVALSHAAKKLVRLIYALEKSKRPYNTAA

SEQ ID NO: 98618 - protein, 359 aa, unidentified
MIVIGIDPHMKSHTAVAVDAASGRTLAEKTVSADAQGHEQLLLWARGLGPERCFALEDCRHLTGRLERHLLPRGERLVRVPPKLMARARSSARSYGKSDPIDAAAVARAALREPDLPEAVLAGPEQEVRLLADHRDDLVGERGRIQKRLRWHLHDLELGLELPPRVLGRYVWLERVEAALRGLPPSTRRRLALEQVRRCRELTVEVRVLEREIDALMRALAPELLALPGCSALLGAQLVGQVAGASRFRSEAAFAMHSGTAPLPVSSGKSTRHRLNRTGNRRVNAAIHMIAITQARMHPPAVAFMERKKAEGMSPREARRCLKRYIARTVYKTMLRSERARAGEVVQAEFGAEELAVAV

SEQ ID NO: 98619 - protein, 337 aa, unidentified
MTIIRIGLDTSKHVFQVHAVDESEQPVLRRQVRRSEMQKFFGKLPATRIGLEACSASHHWARVLRGLGHAVVRMPPQYIKPYVKRSKNDAIDAAAICEAMSRPGMRFVAIKSAEQQAGLMLLKVRDLLVKQRTMLINAMRGHAAEFGVTAAKGPVNAAELLRRAQAAAAGLPALACEMLGMLSAQLDALDAKLEALEARLMALHKADPVSQCLATQPGIGPIGALSFSLKIADPQGFRSGRHFAAWLGITPKENSTGGRHRLGRISRQGDETLRRLLVLGATAVIRFAKPGRASPWLLNLLARKPKKLAAVALANKMARILWAMMVSGEIYRHPKEA

SEQ ID NO: 98620 - protein, 386 aa, unidentified
MGSESDCPPVLRALSRRSGRTPALPYPPPKSGHYNTEDASAEKAENTVYYCGIDLHSNNNVLGIIDSTGNRLSIKKNPNDLETVKKVLKPFAANLEGVVIESTYNWYWLVDGLQEEGFKVHLANPAAIEPYSGLKHGDDETDTWWLAELLRLKLLKEGYVYPRAERAVRDLLRKRAQLVRMRTQNILSIQNLTCRNTGGRVSGDQVKQLTTEAVKEFYGDETERALAVNCSVNVIEVLERQIEAIGKKVKSKIKLAEPYQLLKTISGIGEILAMVIMLEAGEMSRFPGVGNFSSYCRCVKSVRLSNNKKKGNGNRRNGNKYLAWAFMEAANFAIRFEPVIQKFYQRKSAKKGSVVARKAVAHKLARAAYYVLRNQTPFEVNRCFGC

SEQ ID NO: 98621 - protein, 415 aa, unidentified
MDVHRDFCEVAVAEDGAVRAAGRVATRVKALEMFAQSLVAGDVVAVEATTGTDKIVSVLERHGIRVVVANTRKLKAISEAKAKTDRLDARTLARLLMSGLLDEVWTPDERTRMLRRLTNRRERVVRARSRAKNEAQAVLARNLCERPPVTDAFGKGGRRWLATLELPVDERLTLDGCLRQIDFLDGEVAALDTEIAKQALAWPEALRLMTVPGVNVQTAATFMASIGDIGRFSSPRKLVSYLGLDPRVRQSGNGPARHGRISKQGASETRHMLGEVAWKVMMTPGPLRAFFERVRARRGPQIAATATARKLAVLFWHMLSRGEDYAFARPAMTRNKVRRLELLAGAPPQKGRKGIAGNKSARVFDAERELSRQAEQAYRRLVSDWQAAGPTVGAGATRGRASQEPSKGKAARQTR

SEQ ID NO: 98622 - protein, 419 aa, unidentified
MSNFKVFVGIDISKESFSACAIHSPEEIIFEEKFPMDSHGFKAFIRKLSAFPKESILIGKESSGCYYVNLFVYLSNKGFSCVVLNPLIVKGVQSMEIRKTKTDRSDARRIAFALYTAQHSLPQKSFLSHEFRELARERERLSQQIARLKNDIEKALVVLFPELERRVNIYTEGILRLLEKYPSAWALKAAKTSDIERLLCSKRGRARSVTAQQIKQWAQDSIAQFFPIREILLQSKIKELFFLEEQLEVITEQLKRSCEEAALCQDIEILKSIKGIGDTTAMHFIAEIENINRFSSPKKLIAYCGVDPTVYESGKFKGSSRLSKRGNRHLRRVLWLMAVSVVMYNSYFREYFNRRRQQGLPYKKAILAVAHKLLRVIYAMLKKKTTFKVSHLPSPCRGCSKMKEFKPYRFLGGSFESHK

SEQ ID NO: 98623 - protein, 482 aa, unidentified
MKRKSIFKKDSQKIDAAFIEAGHPEKILLVPLDFAKSTHYACFCDGLGRYQRQAFTVKNNREGLDYLVDLIEAARKSRSIKNKQHIIVGGEDSASYTRNFMQRLKELGYLAVRLSSCEVHRQAESTDSSTDKTALRAIAKTMLNRDAQLIDGHDIYAELRALTRQRRRIVHLNTAVKNRIHTHSDRLFPGFLSKGSALSPFSKGSLELMSKPSFGAASISGKNEKILARQLSRQGTPRSSEVAIALKQQAKEAIFADKNSAHISSHILDGELQLFRALQSNLEGLDQGCARLLARTPEAFVTSIKGIGITLISSICAESGSLAQLTRADSLNAYAGIVPKVKQTGGPESEAKIRGRRRSFNRVLKDYTLQAGNHLYLHGPEELMHDAVHRKLGGRVVDAAMARRFFRISRALCKKHYIYLPSGLRGQDTLPAARAQYILDSWPDLLIKWKRLGMHEEAFAPERPLGQWRLLMQEIYKIELSL

SEQ ID NO: 98624 - protein, 360 aa, unidentified
MKYVGVDLHKQTITITVVDASRKVLVRRRFSNQQSAGIVEFLRGLGEFEITVEATAGYEWFVQLVEPLARRVVLAHPGKLRVIAESTRKSDRVDARVLAEMLAKDEIPPAYRPTPRQRAHRRLVRHRAYLQRRITAVRNKVRHVLTDYNLDRKDLFTEVGQEYLRGLPLDAEDRFVVEQLTVEWTHHLQQRRDVERRLRAFAAAGSAQEQADRHHLRTIPGVGEVTTEVLLAELAGPRRFASAKKVVAYVGLAPGQRESAGKRQNLSIEKRGSPLLRWVLVQSAWQLVQRSPKWGLIYARLEQRIGRRKAIIAVTRRLLCVAHSLLQRQEDYREFTVTPLPSKARRRASRTRPVTAEATM

SEQ ID NO: 98625 - protein, 343 aa, unidentified
MDHFAGLDVSVKETSLCIVDDAGRIVREVRVASEPEALLAVLTSPTWHFKRIGLEAGPLSQWLFNALAEAGLPVICVETRHMRAVLKAQINKTDRNDARGIAQMMRAGLYRPVHVKTLRSQKLRMLLTHRKLLQSKAIAIENDLRATLRNFGLKVGVVGTAKFEARIKELVESLPDLALLVEPLLVVRRALREQIGVLHRRLLAIVREDEVCRRLMTVPGVGPVVALTYRATVDVPSRFRNAKAVGAVFGLTPSQHQSGESNRTGGISRCGDEMMRAMLYEAAQILLVRSTRWSWLKAWAMQIARRRGMKKAIVALARRLAVIMHRIWVDGTEFRWTREAVAT

SEQ ID NO: 98626 - protein, 361 aa, unidentified
MAGTMTWVGMDVHARSTHAAAIDSMTGELVRRKFGPGVDEVVGWLQGLPAPVRACYEAGPTGYGLYRAAIAAGIAIEVIAPGKTPRGSSDRVKTDRKDAELLARCLLAGSLTRVVVPPPEVEAARELTRAHDACRRDLGAARNRVSKMLLRHGVVYPDASTWTARHRTWLSRQQFSETASELVFADLVAAVDGITARKLAIAGRLSELATDEQWWPTVSRLRAFRGLDTLTAFTVHLELGADWQRFERPTALSAWLGLTPSLSQSGESSHQAGITKTGSMLARRLLVEAAWHYTREPRLGVTLRNRQEGQPAHVLQISNRAQQRLYRVHKKMRARGKPGNVTVVACARELSCFLWAAATAD

SEQ ID NO: 98627 - protein, 290 aa, unidentified
MDTQKKEHKVALHYPCNEEIVRFAIKNNARDIKRMVNKIKKKAPADIQFCYEAGVCGFTLKRRIEALGCKCAVIAPSLTPIKPGDHIKTDRRDALKLLMMFKAGLLTEVHAPNAQQEAARELTRCRQTAQENLKRIRHQLLKFLTRHGYVYTDGNHWTQKHITWLRNLEFDQPLLADVFDNYFTQMNHCLQRLDSLDKQVKNLAESNCYKEIVGFLKCFHGIDTLTAITIITEIFDFGRFSSPGQLMSYLGLTCSEDSSGQKQRKGSITALSKKMRFDLCGPDSLHKEIL

SEQ ID NO: 98628 - protein, 385 aa, unidentified
MMLIGIDPHKSTHTATAIAPDTNREAASIRIDATLREYRRMLTWARQWPQRRWAVENAEGLGRHLTSWLLARGEDVVDVPTTATARVRQLSRGGGRKNDRIDAGAAACVAALQGDARPLAAEGYVDAMAVLDERRVNLAQSRVRAVNQLHALLRALIAGGAPRDLSATTAAALLRTVRPNGVVEQARKAVAKDLVTEIRTLDTQLKANAQAIARLVAATGSTLTEVVGVGPIMAGRLISRTGRASRFLTASAFANYAGAAPVEIASAEKSRHRLSRHGDRQLNSALHTIAITQIRIPSSRGHRYYKSKIAEGKTPREAARCLKRRLADHLWRTMINDERRAAGPGGQLGTTLQSSVAGPTPTTNSSDKSLPGPANHDSTTAKPAA

SEQ ID NO: 98629 - protein, 484 aa, unidentified
MIGSFACEPVRSDAPCSTRAQERSPAGSEASVQKSERTTSREDPVSGRLRTEAKADATRNSSRTFKLNSRMHLESLFANFGAIDWAKYNHHAVIVDRTGQIVAEFSFPHTLKGWQQWRQQAARYVPLAVAIETSQGTVIDQLLQTPDCTVYPLNPKAARAYRNRKAPSGAKSDHLDAWSFADALRLDGSAWRPLSKQDPLLEQLHLLCRDELALIEERTALVNQLIAALHEYYPTALAAFEDWTLPAAWAFVEAFATPQLLASSGKRRWEKFLHTHKLARPETYEKRLELFAKATEFHASDALTQAKSRLAVTRTKQLRVLQTQLEDYRRQIENLFGQHPDHDLFGSLPGAGPKIASRLLAELGDNRQRFESSQALQCYGGTAPVSYQSGPVHKVRVRTQCNKVLRHTVYLWADLSRRTCPWANIYYQSLRKRGQSHACALRCLGQRWLKILWKMWQTRTRYDASLHQQNQIQHGSWVLKLTNP

SEQ ID NO: 98630 - protein, 360 aa, unidentified
MVMLAEQYEYVIGGDPDRDTIDLAVVDVGTGAALAFYADRADGPGYHRLLEWAVNQAPGRRVWALEGTGSFAAGLAATLAEAGEDVVEVGAGKRQRGAKSDRIDAVRAARTALSCDHQAQPRARGLREALRQVLVTRQGILVSRTKAINEMKSLIVVSPEYLRASLRGLSLAKQLQRIRALGSPEQATVEHRITVLTLQSIAARVEFLQAQTAQLEPELLELVTEHPAGPALLAEPGVGPVVAAQLLVSWSHRGRVRSEAAFASLAGTAPLEASSGQRSRHRLNRGGDRDLNRALHTVAITRLRCHPESMAYEVRRIAQGKTHRDVRRSLKRSLARRLYRRMQAATKPLEAPRQPTPTAA

SEQ ID NO: 98631 - protein, 416 aa, unidentified
MNERGTVAAGTGTRKDTHALCVIDLVGRVVATGAYAADGEGRDRIAAAIGDPRDCVVVGVEGTGSYGAGISRRLAELGYDVVEVVRPKREKRMAGRDKNDPADAERAARDALAGKASGAPKAGGGWAGALRFRMVARDAAVSESTRAANSAHALIVTAPAPIRGELGGMKTPALMKALSRRRRARDVVESSLWESLRSLSLSWIGAKKAAAAHEEAMREILLANAPALPGIHCCGTISAARLAVTAGDNPERVSGESAFASLCGASPVEAPGGKVKRHRLNRGGDRQANRALHAIARQRMKRDSRTKPCVDKRTKEGKSRREIERILVRYIAREVYGALMRPMDAACEPYRASARAAKSERLRAGAAQAQASRALGVASARISEMERGRLADAPLLQRYRSWLESLSAGERRESPE

SEQ ID NO: 98632 - protein, 402 aa, unidentified
MTYDYVIGMDVGKYFHHACVLDIDGAQVLSKRINQNEKSLRTLFSTFIANDHKVLVVVDQPNNIGRLTVAVAQDIGIDVRYLPGLAMRQLSRIHAGNAKTDIRDAYIIAHAAKNLPESLRSVDRVEEAFLQLKVLNGIDEDLARSYTRLINQIRSALVGCYPQFEQALRGQVIHRKWVLHLLARYGGPTKIKRLGKAKAAAFARRYKARNPEPVIDAIFAAISEQTVAIAGAQYAEMGVAMSAKDALLKLEHRKQIEQEVIELINDIPHTQILLSMPGIGPKTAAQILMTAGDMSDFPTAGHLASYAGLSPRTNQSGTSIMSNSLNRAGNKKLKNALWQSSFASIRFHERSRQFYERKRREGKRHNAAVVALARRRLNVLYAMMSNHEYYRDPDQSQEIEAA

SEQ ID NO: 98633 - protein, 420 aa, unidentified
MLSVKHFVCCGMDVHKKFVVATIAITDYRGVTSYIKRKFATFNSDLKTLKKWLFDHNCSEVCMESTGKYWIPVFNILEDSCHVVVANPKYVRTIKGQKTDDKDSAWIADLFKCDIVPSSYIPCREIRALRELFRYRQKLIGHRSSEKNRFQNALTVSNIALSSVLTDTFGKSATAIVDYILTCEVFDPEHCKSLLMKKAKDKAEDVVRSIIGYELRGDQSLKMKVCRKHFDFINACVDTLEETISDLAQPYHKFIELATTIPGITQKSASFIIAEIGVDMAVFKSSKRLCSWAGLTPQNNESAGKKKSVHISRAGIYLKPLLVQCANAAIKDKKNPYFKYKYDRIKKRRGHKRAIIAIARMMLTCLYHMFSKQEAFNPADTDYSAIPEEMYQKFQEQYDKNAIKRLEKRGFTIIPPAVTA

SEQ ID NO: 98634 - protein, 437 aa, unidentified
MEGAGDEPLFCERAAGIDIGKAVVSVTIRVPSDTRRGGRQQETREFGTTRRQLLELADWLRCWGVERAGMESTSDYCKPVYFLLEREGFDCVLYHSSQVKALPGRPKTDKLGSVWLAKVTEQGSLAGSFVPPEEIRRLRTHTRYRRRLIQARTAEKQRCEKLPEDGHLKLSSVISDIHGACGRDMLRAIIAGERNPRVLAGLARGVMRRKTARLEEALDCSFFTGEHAFVLQMMLDEIDHFTARIAGLDERIAVLCEPYGRQIAQLDAVPGFGVTAAQELIGEIGTDMTAFPTPGHLCSWARVAPRVTESAGRRKGKNATGRGNPYIGGTLGDAAAAAARTQTFLPAKYRRMCTRMPKKKAQGALMRTQLVIAHGLLSDPQAGYRELGPGYYEHRAGTRRQARNHVRSLERLGYKVTIEHAPEAGPETGELITRTAS

SEQ ID NO: 98635 - protein, 352 aa, unidentified
MRHPKHQVTGEEDLFVGIDLHKDRWHVTIRTMDLELFSASIPGTWEALQRVLARYHGHPLQAVYEAGYFGFRLHDRLVEHGIPCIVTPPSLVPQEYGNRVKTDRRDSSKLAHLLAKKMLKRVWVPSEEELFHRQVIRRRRQLVRDRVRTQSRIKAELRFYGIHMQEPRGRWTQIYFETLRDVRFGNRWMQESFNRLLEQYEFLSAQIDKQTQLLRELSETALYRERVEILQSIPGIGMISAMEILLELQDVSRFRRAEQLAAYVGLTPSQYSSADKVRMGRITGIGKNTLRAILVEASWKLITKDQVMREKYERIKIRSGGKRAIVAIARTLLLRMRRMLLDKQAYALQLAA

SEQ ID NO: 98636 - protein, 423 aa, unidentified
MKNSTAKKRQQVPAGYLVVGVDPHKKKHAAVFMTQDFMTRSKLKFDNSREGFEKVLERVRTEMLKTGCRGAIFAIETGAHHWRNLAYFLDEKGIPLRLINQFTLKRRREGKDLNHRKNDYRDSEVAAQLLCTGEFNAARLSQGVYAELRAAYGSYRRLVKEKTRTVNLVKSLLDGVFPEFTEVFKNPCGQTAASVLCTCAVPQAIAGMTESEFVGAIKAACQGRVMKGKLRVLHDVAMTSIGIGAGAQSVSSEIAFLIEKLRLIAQQLRQINEALTRLVHETMEGKYLLSIVGLSYVSVAGIIAELGSFSSYQNAKQLIKMAGSNPTESESGGKRHSHTPISKQGRPVLRHCAWTAVIPMLRFNPDFRDWAKKLRERPTGANPLTGREVMVAAVNKLLRLAFALVKNQTLYQIPEPQPVEIAL

SEQ ID NO: 98637 - protein, 392 aa, unidentified
MKEDPPAEFAKRRIRVDRQNGIRYTGEPSMLLVGIDQHKRHLTICARNQQGEIVLRRQVSTQWEPVDRFLETLQKCGAEHGGYVAVVEVCGFNRWLIKRLAQWGCRRTCVIKAPERTRQKTDRRDAARLSELLWTNRDRIAAGQSLVHIKEVYQATEQEQYDRQLTHLRYQQGRALTKIKNRMTSILRRHNLEQECPTKGAFTKAAVRWMEGVELPDPERYELDIHLEQYRLVAKQVDKLEERIHERAHPDETVRRLRTLPKIGAYTALALVAHIGPIERFPNPRSLSNYFGITPGCRNSGRSDRPGGITKAGHPFIRFLLAQLVLHALRGDPGLRRWYQRVKRRRGSKVARVAVMRRLCESIWQMLSKREDYLPVDKRSVDGRDPLRRTAA

SEQ ID NO: 98638 - protein, 400 aa, unidentified
MLSIGIDVSKGKSTVCGMKPGGEIVYAPFEVQHTRKGMSELVSLLRSSGEEVRAVLESTGSYHCPVVAALLENGIFVSVVNSLRMKRFCSQSIRKVKTDRIDAMQIALYGLAYWQELQPARLPEDTYRELQLLARQYYQMTSLLIKAKVDFNAICDQVLPGMQELMSDHAGRHKLSDFVLRYRHTTHILEMGETRFRKDYCKWAEKKGYRNCERMAALIFATAQNGIPVLPNAPSTQIVITEAIRVLHTVEASRDAILTQMQALAKTLPEYSLVREMPCIGDTLAPRLIAEIGDVRRFHSKRALIAYAGIDAPPYQSGKFCANNRHISKRGNRYLRKTGYEVMQSYVMHKPANDPIFTFIEKKRSEGKSGKLAMVAGLNKFLRVYYGKVTELYRSLPAIE

SEQ ID NO: 98639 - protein, 334 aa, unidentified
MGLDQHRAQITADWLNTETGEVSRARVTPAHRDRVGQFVGRFAGQDLEVALEATTGWRFVVEELQAIGADVHLAEPAETSTLRGSKKRAKTDRADARHLRELLMVGRLPEAWIAPGHLLDLRARVRLRHTLVDQRGEWQQRIQAVLYHHGVAQRRDLLTAGKRQWLEGLELPAAAREQITVALTVIDALDAESAPLTRELRAYGRRQPGCRALMRHYGIGALTAVTILAELGDARRFSSSRHAVRYAGLDITVHQSDQRRAPGHLSRQGPPALRWALYEAAQLARRPGSPDHAYYEQAAARLGGNRACLAVARKLLKRSYHTLRELGDEALQPA

SEQ ID NO: 98640 - protein, 412 aa, unidentified
MLHPKMRKLFVGVDIHKRTHVAVIINCFTEKLGELRFENNKKGFEKLIEFVKSHLKRGISPCFGLEDTSGNGRNFAIFLLNLGYTVKSVDASLTYTERRNQAIAHKTDGHDAFCVAKVLLNQLDTLPDASIHDDSWTLQLLVSRRNSIVKVRAASKNQVHSYISHHYPSYTKFFTVTYCKAGMEFFQNFPSPSKLKGITKEELAEFLSIHSSGFFGIEHAERILMLVAKDGDTSTEYQETRDFIVSHCIKEIKHCNEELEVIEAEIKKHMKQFPYKLETMPGINTITAAMLISEIGDIRRFSSSDKMCRYSGISPVACSSGDKDKNFRNKQGNRRLYEIFRDIASRNICRGRDKKSPINETFLEYYNKKISQGKTKRQALIAVMRQIAKVIYSMMIHQREYIKPTVSKTENA

SEQ ID NO: 98641 - protein, 340 aa, unidentified
MRKLYAGCDLHSNSNFWGIRDETGEKVFHKKLPNDLALMLAMLEPFREELVGIVVESTYNWYWMVDGLMEKGYQVHLANTSAIQQYEGLKHADDKHDAFWLAEMLRLGILPEGYIYPKEERPVRDLLRKRGHLIRLRTSMVISLENIICRNLGRKVSANDVKRLGEDRVTPYLEGQEDLALAGQVSKNTVDFLSEQIQEIEKAVLKRVRLKKSYRLLLTIPGVGKILALVIMLETGPISRFAAVGDYGSYCRKVPSQWTSNEKKKGSGNRKSGNRYLAWAYAEASEFARRSYPEPRAYYQRKIQKTNAAVAHSALAHKLARAAYYIMRDQVPFRMEKLFG

SEQ ID NO: 98642 - protein, 348 aa, unidentified
MEITTVGIDVAKSVFQAHGVDRHGKVMLRRQLRRAQVALFFGNLKPCLIGMEACGSSHYWGRKLMALGHTVRLMSPQFVKAYRKNDKNDGNDAEAICEAVQRPSMRFVPVKSPEQQAELAVHRIRRRLMGERTALINQLRGLLAEYGVVLPQGASHVRSKLPALLENSSESLPPLAIELFRDLYEELVQLDQRIGVCDRRVERLYRGNSVCQRLGRLEGIGALTATAFVATVAHAAQFKNGRQCAAWLGLTPRQDSTGGKPRLLGITKRGDVYLRTLLVHGARSAMRHSAKRDDPKSRWVEQLRRRRGDNVAACALAAKHARILWALMVREEGSHPEGQAAYTDARHT

SEQ ID NO: 98643 - protein, 405 aa, unidentified
MIEPVVKRVAGLDVHKMVVVGSVLIEEIDGSIKQETREFGTFKRDRRQMCQWLKSHEVELVAMESTGIYWKSIYATLERAEILTYVVNARHVKNVPGRKTDVSDSQWLAALARMGLLRPSFIPTKDLRELRIISRQRMKINGTLSAEKNRLNKVLDDAGIRLGGVASDIDGVSAQKIIEGIIDGKPIEELIACARGRLKAKADDLRACLDEELSERHIFLLKALQKHIQFLKSELEDIDAYLFAAMSPYQKQWEILQTLPGVDKVAAMVLIIEIGIEMERFGSADQLSSWAGMCPGNNESAGKRKSGKTRKGNQAVRSILCEIANAARRTKSQFKSKYESLVIRRGHKRTIIALGHKILRVIFVMLKNVKPYFDPGIDYEELMVDRNAPRWLQALKKFGYLPQTV

SEQ ID NO: 98644 - protein, 343 aa, unidentified
MNYLGEIANDPGAIRKLCDRLRRSGKPLAFCYEAGPCGYGVHRQLTSLGHRCDVVAPSLIPTKAGDRVKTNRRDATMLARLHRAVELTPVWVPDADHEAMRDLIRLRSVVRHIVTRARQHLQGFLLRHGRKHGRGTAWRMAYRRWLSTLAFEHPAQQIAFQDYVDAVMDAERRLKRVEEQIFSLLPEWTLRQVVDALQAMRGIALINAVVLVAEVGDFTRFSNPRQLMAYFGLVPGERSSGETVRRGAITKTGNTHARRALVEGAWAYRMKARIGRHKVDRVEALPKIVRDIGWKAQVRLCARYRRLSARGKTANVVNVAIAREMVGFIWSIACTIQSTPKAA

SEQ ID NO: 98645 - protein, 349 aa, unidentified
MLYTGVDLHRSSSYITTMNDKGEILGQKRLPSNGEVIDFLREFNESMEVAIEASPSWYWLYDSLEDEGFDVKLSHPLKTKAIAYAKVKTDKVDSATLAHLLRSNLLPLSYVPERPVRLNRELLRYRASLVKIQTGIKNKIHTVLAKNNIDHSYTDLFGKEGMTFLHSLSMAENYKIALEGYLTVLDTVRREIKRASTKVQQLAEEDRDAMLLMTIPGVGYYSALLIKSEIGDVRRFPSAKQLCSYAGLVPSTHASGNTCYHGHITKQGSRWLRWILIEAAIHAVKRPGVLRRFYYKVARKRGGQIAKVATARKLLEWIYHILKDGKTFHEVEKIAESFGRGEPANCPGL

SEQ ID NO: 98646 - protein, 356 aa, unidentified
MSKSNTKSAKSKGMLVTAADRVVVGLDVHKREIHAAVRMNGQEVGTHVLPARPAAVEKFLAPYRAGLRHVVYEAGPTGYGLARHLRSAGVAVDVIAPSKTPQAPGDAAKSDRLDCRDLARLAEAGLLRPVAVPTEEEEADRQVIRLRDQAAGGRRRVRQRIKSFLLMHGLPEPRGLEYWSQEAVAALGTMEIKNGRLRFCLDLLLEELANADEMIAKIKHEMKEMSQEPRHAATFKALTDHVGVGRTTALAFETEMYRPERFSNERQVSAMLGLAPRVRQSGERRREGPLLKAGRGRLRALLVEAAWVWIQHDAEARKVYQRLVRNTGSTQKAIVGMARRLGLDLWRSLVKARAAA

SEQ ID NO: 98647 - protein, 358 aa, unidentified
MGKVTRRKVSSKRLQVTDSDVVHVGLDVHKRSIHVAVWLNGRVERHWVMPADDRKVLAKLEPLRVALKRAVYEAGPTGYGLARLAHSAGLPLDVVAPSRTPQPADRSAKSDRLDCFQLAEYSAAGLLRAVAVPSRQQEADRQLLRLRDQVIRKLRRVKQQIKSLLLQYGIAEPAGLTYWSIAGVEALSDLALGDELRFCLDELLEELEQLQARLGRVNRRIEQLADQPRHAAAVVVLTSHPGVGTITAMTFRTELHHPERFRSPAEVARYFGLCPRVRQSGATRRDGPISKTGRGHARAILVLAAWRWIAGDPLAKTVYERLVHNTGLPQKAIVGMARRLAIRLWRMMTTGELCRQAA

SEQ ID NO: 98648 - protein, 426 aa, unidentified
MSEIEVFQQEPGFAAFVGIDWADQKHVWCLQAAGAAQRESGELEHTPEAVEAWVGQLCQRFGNRPIAVAVEQVKGALVFMLCKYEPLHLFPVPSAMAANLREALYPSGAKDDPRDADLLLELLLQHRDKLRRLSPDSEATRRIQNLVEERRNLVDEKTAQTNRLTNHLKIYFPQMLDWFERLDTELVCALLERWPTLEELQKVPSARLRAFFLKHRCRDQELIDRRLVGIRQTIPAIRDRAVIEAKSAVVKVSAQLIRSLVRGIADLDRKIEEAAAAHPDFFIFDSLSGAGAALAPRLLAAFGSQRERYGSAREVQSYSGIAPVTVRSGKKKWVHFRWACPKFLRQSFHEWAGHSIAHSEWARIYYQQQRSKGKEHHAAVRSLAFKWIRVVFRCWKDGVAYDESKYLAALAKRSSPLSAVVAGKIL

SEQ ID NO: 98649 - protein, 369 aa, unidentified
MGKSIMYVGLDVHKNSIEVALADGGAGGEVRFYGRICGDTGSLDRVVRKLVSTGSDLRFVYEAGPCGYEVYRHLRGLGHDCDVVAPSMIPKRPGDRIKTDRRDALSLARLHRAGELTSVYVPRSEDEAIRDLVRGRTDAKANERRAKQRLGAFLLRHGYRYSGRTNWSVAHMRWLSDIRMPHPAQQVVLQEYISAIGECGDRVSRLKVQIEELVSSWRMLPVVQAYQALRGVSLIVAVTTVAELGDLGRFGNPSELMGYLGLVPSEHSSGGRRRQGSITKTGNGHARRALIEAAWSYRFPPKVSRALLKRQEGLSRRICDISWEAQLRLCSRYRAMVGRGKLSQVAVTAVARELAGFMWAIAREVTVED

SEQ ID NO: 98650 - protein, 361 aa, unidentified
MRIIGCDLHARQQTLAMLDTETGEVQNLTLMHEGNNVREFYSQLPHPVLVGVEATGSTQWFLRLLEELKIECRVGHPAMIRASEPRKQKHDQRDADLILKLLVENRFPTIWLPTQELLDLRALILHRHQWVRMRTRIQNALQSIALANGLRRGPRLGSHDGQEKIARLPLMPHTAGRRSALQAMYQKMESEIENLTRHVAEQAEHRAGARLLMTHPGVGPVTALATDVFLGDPKRFMDGKALASYVGIISREYSSGERQRLGGVTKQGSPLLRFLWGEAGAHAARRDPELQRFYRRKLVQKGLGKARVAVARKLGIRLWIMLRDKIDYPEFCRRGQKQQSGAACAGMPETRYGATSHRPVD

SEQ ID NO: 98651 - protein, 385 aa, unidentified
MRKEPVVKKVRFVGLDVHAETIAVAVAEPGRDGEVRALGVIPNRLESVRKLLKKLGPADQLRTCYEAGPTGYALYWQLTELGVKCEVVAPTLVPVKAGDRVKTDRRDAAKLARNYRAGELTPVWIPDAAHEALRDLVRARLAAKKDQLRARHRLSKFLLRHGRRPPTGVKAWTLNYITWAKKEVHFEQPAQEVTLADYVYEVEHAHERILRLERGIDAAVETMPARMRAVVEALQALRGIAKISAVTVVAELGEISRFKKPRQLMGYSGAVSSEDSSGERTRRGAITKTGNAHLRRIVVEAAWAYRHRPSVGTTLAMRQKQASPEVKEIAWKAQHRLHNRYRKLLAKGKDKQKVITAIGRELLGFIWSIGVRVECEFPTSRQHQA

SEQ ID NO: 98652 - protein, 428 aa, unidentified
MNIEDTIRRKQFCQIKDEIAGCDDYLVVGIDVAKDKHHAFMGNTTGKTLSRKLVFENSLDGFRKLMEHSKAVKARGALSKVVFGLEPTGNYHKPLAAYLIRCGCHVVLVTGKAVKINREQLDGRWDKNDDKDAANIADLVSRGRCLYYDLPSPDLGQLRQVLSLRKRLKKEEHRLRMNIRNNLLAQYFPELDAYYSACESETLAIVSRCLDPHQIAGKHFDEFFTQVASKRRGIAQKLRLQKIHRAASQSVGCEMGPAVQVEAQLVVNKLGEVRRQLKEVEQWMEDIACGFAEYPYLLTIPGFGPYVAATVLAAIGNPKRFNSANQVLKLAGYDLSASRSGKNSHRAIAVISKKGNGQLRYALYQAARVASSRSADFINYFTGLLRGRERERGIKTKMRVKLAAKMLRIAWAIMKKKQVFNPDYLFIK

SEQ ID NO: 98653 - protein, 388 aa, unidentified
MDILYQSCAGIDVHQATVVVCILHGPLTSTRPKREMAQFDTTTKGLKACHDFLSQFHVEAVGMESTGVYWRPVWHELCDDFELILAQPAHMKAIPGQKTDKKDAHWIAQLTRIGLLPRSFVPDETIQELRELTRQRKHYVESRNRETNRIHKILQSGGIKLTTYIEDIMGASGRNLLQLLIDETPLTPRMIHQSVYTSLKRKVPQLLEALDGYFSAHHRFMLGQSLEIYDFYQKQIDCLEERMNGYLNLYERPVEILDSIPGMDLITASVIIAEIGVDMSQFPTAGHLASWAGLCPGNNESAGKKRSTKIRHGNSYLKRCLCQAVFAAKRQKGSPLAERYYQIQSRRGPQKATIALAHQLLKIAYILLKENLTYQEFVLQKRLLETSQ

SEQ ID NO: 98654 - protein, 401 aa, unidentified
MKYGVGIDVSKGKSTVAILSIEGEVIEMPFDINHDVEDLEKLDKKLQKFSKEDLKIVLEQTGTYHLPILTYLLDKKYCVIAENALKIKKYLDRSLRKAKTDKKDSLKLAEYACDNWYKLKVNFIEEEKYKELRFLSRQYFSLNSMKVQQKVDFSDLTDMLFPGYYQLLEECNFVVGLKIFEKFSDPEIIRKKKLETFLNDVEKIAQKIGQQRAGRNLAIKVYELAKKSVPSCPSNSSTQLILNKRVVALINLIETTNEIIAKMNEIAKSMDEYKEVRNMKGVGDRLAPLLIAEIGDIRRFKNAGSLIAYAGIDSPPYQSGKYEATNRHISKRGNKYLRKTGFEVMQSIKSFCRVDCEVYDYIVKKETEGKCKKSAKIAGLNKFLRQYYGILKKKYIELGTW

SEQ ID NO: 98655 - protein, 415 aa, unidentified
MSDPFRFFVGIDLGSASHQVCVVDASGQTLGERGVAHSGADMAALFQWLATLTQGADPQSIAAASEMPHGAMVEAFLERGYAVFAINPKQLDRFRDRFSVAGAKDDRRDAFVAAHALRTDRYAFRPLALGDPRLLRLRELGRAEESLQQDLRRAANQLWQLLQRYFPGLLTLVPAADEAWLWDLLENAPLPEKAARLRPSTLQRILKKHRIRRVSAQQLSELLAQPALPLAPGASAAIAEQVLLLLPRLRLLRKQHTQLGRNIETLLEQLAGDESFKQHRDVQILRSVPGVGRIFTATVLAEAAEPLAQRDYRVFRTVSGVAPVTQQSGKTKLVSIRRACHPRLRHAVYHSAARYAQDDPRGQQHYARLRARGCSHARAVRGVADRFLALIFALLTHNQLYDPCRRALLDPAPTC

SEQ ID NO: 98656 - protein, 349 aa, unidentified
MPGQVQHASVLGIDTHKLTHVAAIVDALGRMQGTFAFAATDAGTAELLTWARANGSPMIAGVEGTGSYGYQLTRALQGAEITVFEVNRPDRANRRRKGKSDPVDAEAAARAVLSGQATAIPKNREGAVESLRALTIARNSAVKATTVASNQMKAILVGADEELRDALKVQSLLQLATRASNLAPLTGHHLALASLGRRWLQLHAEVLELDTMIRAIMRATAPALLTRPGIGIHSAAQLLMTAGANPERLRNDAAFAALCGASPVQASSGQTHRHRLSRGGDRAANNALWTIANNRMIHDTKTREFAARRKTTGDSRNDTLRVLKRYIARETFGLIRDALRHQNVSSTAA

SEQ ID NO: 98657 - protein, 321 aa, unidentified
MEPATPETFVGIDVSKARLDVAIGDEPPFAVDNDPAGHAALAGRLAPRRPRRVVMEATGGLEAAAAAALAAAGLPVMVVNPRQARDFAKAMGYLAKTDAIDAKALAHFAAAIKAEPRPLPDEAARGLDALLDRRRQLVGMRTMEENRKATARGRVLRDLEAHLRWLGEHIEEIDRELDERIRSSPAWRERDDLLRGIPGVGPVLSRTLLAGLPELGTISHRRAAALAGLAPLADDSGRRSGPRRIAGGRGQVRAVLYMAALSARRFNPALRALADRLEAAGKRPKVILVAVARKLLVIANAILKAGKPWDPEIAAKLAQNA

SEQ ID NO: 98658 - protein, 314 aa, unidentified
MSAAIFVGLAVAKAHLDLAARPGGTHERHQHDEAGIARICGHLRAQAPTLVVMEATGGLDVPLAAALAAAGLAVAVVNPRQVRDFAKAGGPRATTAALDAHLLARFAAVVRPEPRPLPDAEAQNLSPLLARRQQVIAMLVAEQPRLPTTASALRPRVEAHIAWLRQERDELDRELRRQRRASPAWREDDDLLQRGPGIGPVLATTLIAELPELGRLNRKQIAALVGVAPLNCARGILRGRRIIWGGRARGRAARWMGTLVAVRRNPAIRTFYQRLVAAGRPQKVALTAALHKLLLVLNALLRQRTPWHDAIQPA

SEQ ID NO: 98659 - protein, 402 aa, unidentified
MYNAVGIDVSKGKSPVAVLQPAGVIIRKPFNVNHTSSELDELAKYIGSLEGETRVVLECTGRYHEPVVKTLSEAGLFVSAVNPHLIKNFGNNSIRKVKSDPADAKKIARYTLDNWIELRQYSSMDNTRTKLKTLNSQFSFFMKQKVAAKANLIALLDNTYPGVNKLFDSPVRDDGSEKWVDYAYSFWHVDCVRKIGLKTFTERYQAFCKKHHYNFQPAKPAELFLASKDLIAVFLKEASYKLLIQQSIQQLNLASSHVEELRSKMNELASTLPEYATVMGMYGVGKTFGPQLIAEIGDISNFSHREALTAFAGVDPGVDQSGTHNSKSNKASKCGSNRLRKTLFQIMSTLLQTAPEDDKVYQFLVKKRAEGKPYYVYMTAGANKFLRIYYGKVKECIRNLEQ

SEQ ID NO: 98660 - protein, 358 aa, unidentified
MATTTAVDTTKSGDVVVGIDTHKYVHVGAVFDTTAGLLSTISVPADSHGFIQLLSWAESFGQPIAFGIEGTGSYGGALTSFIRRRGYRVIEVARPDRRIRRLVGKSDTIDAQNAAKAVMAGFATAEPKTADGTVEMIRQLKVAHDTAVKARATTMVTLKAMLVHAPEVLRAEMAGKTQITLARHCAALTVEHLDSPDDSMQITLATLAHRWLMLDHEAAELNEHIERLVKTTAPQLVQSYGIGTDTAAEILIVFGDNPERIKSEAALAKLAGISPIPASSGTTTGKYRINHGGHRQLNAAIYRTVIVRMRFHEPTKIYVARRTAEGKAKRDIIRCLKRYVIREVYHLVNNPVTSANAI

SEQ ID NO: 98661 - protein, 349 aa, unidentified
MVVVGADVHKRTHTFVAVDEVGRQVGSKTVAATTAGHHQAVAWARERFGVEVLWAIEDCRHLSARLERDLLTSGQSVVRVPPRMMAEQRRVARTRGKSDPIDALAVARAAQREPDLPVASHDETSRELKLLVDRRDDLVKHRTATINRLLWRVHELDPAIAPPERSLALAKHQQALAAALEGFDGVVAELARDELADVIGLTTRINDLERRITLRVRDVAPTLLAMPGCGPLTAAKIVGETAGVARFKSEAAFARHAGIAPIPVWSGNTAGRVRLTRSGNRQLNAAIHRIAITQARLDGLGKTYYTKKKAEGMSTPEALRCLKRRLARIVFNHLTTDQAAAATGLAAAA

SEQ ID NO: 98662 - protein, 326 aa, unidentified
MPSNGERFNRVIAFEVSKADLVVYCAPQDVSSTIPNTKSAVRRYLKKQTRTKPGPEVSDLLVVCEATGGYERFVLEAAAELGLACHRAHGSRVRAYARYRGTHAKSDAIDARLLADYGLHGENLKLYQPPSPAQDRLRALLGRRTELRRAMEAEQCRLDHALDKDIAHSIKALIAVLQRLLAGIEAKIVLLMKEDADLAEKARLLQGVKGIGPITAATLLGYVPELGSLSRGAAAALLGVAPFDRDSGKIKGKRHIFAGRGEARSCLYMAAISAMRYNPKFKEFATRLKQRGKPFKLVAAATMRKLATVVNAMLRTGTPKTAQTLA

SEQ ID NO: 98663 - protein, 338 aa, unidentified
MTVVTVGIDLAKNVFAVHGVNAAGKAVLVKPLVRRAKLLELIATLPACLIGIEACTGAHFWAREFQKMGHTVRIMAPQLVSPYRMGGRHGKNDAADAAAICEAVTRPNMRFVPIKSVEQQGQLFVHRAHQGYVSERTALINRIRGLLSELGIVLPQAFKAFLSGVAQVLEDLPGYCNQVIGDLLNELYHIEEKIKNSEKLIQQLARDNSAAQLLMQFRGIGPMTATAIVASIGNGHDFKNGRQFSAWLGLTPRQQSSGGKARLGRITKAGDSYLRTLLVLGARSVLLGAAKNDDPVSRWALQLKKRRGYGRALVAIAAKNARMCWAMLHLRDEFRFPA

SEQ ID NO: 98664 - protein, 297 aa, unidentified
MTQYKRVGIDTSKAVFTLHGVDQQDRPVLRINLRRAQMIPFFAKLPPTEIAIEACGGAHHWARELIALGHEVHLIPPQYVKPYVKRSKNDRNDAEAICEAAGRPGMHFVPVKSVAQQAQGMVLKVRESLVGQRTLLVNTLRGHAAEFGVIVGKGLGKIGPLLAAFEQEIAIPSEAKDMAALLGQQIAELDTRIKNIEAKLTAAHKANPVSQRLATIPGVGPVTALTLAIEIDPAAFESGRHLAAWAGLTPKEHSTGGKQRMGGISRAGNERLRVLLVTGATSVIKSAMKSGSKQMTE

SEQ ID NO: 98665 - protein, 349 aa, unidentified
MTMVGGFDVHRKQITFDCVDDDGLVRWGQIRPATRMTLRGWLAEHCPAGDAEFALEGCTGWRYVSEELAAAGVGVHLGDPAEIAALRGPKKRAKTDRADARLLRSLLLEGRFPESWIPPTHVVEARTLGRLYCALMDERRAWQQRIHAQLFHQGCPPITALLSAAGRDALACAELSAAGRQYVDTALRRIDELTGEIDPLRTQLVNFARRQAGCRALQARQYGIGWLCAAIIWAEIGDARRFARSDKLVRFAGMDVTVYSSDGKRSPGHLSRQGSPELRWATFEAAKCAARRGSPDYAYYHKVAARPDSGKIPTLAVERKILRRCYHTLRELGDAALAMPVAEAKEVAA

SEQ ID NO: 98666 - protein, 329 aa, unidentified
MKLRHFLGADLSKNSIALFCYELKSHIQIKNSSAGFKELLYWLTRLQLDKDSVFLVMEHTGFYSYHLEKFLHQHRIKFAKVSALEIKRSLGLVRGKNDKIDAERIARYAFEKKDRLVAEKPVHPVIHRLQMLHSTRERLMKYRTSLSCAIKQYRCVLSSADPIIKTQLTLVKQVTERIQLMDQQIRECLAKADESVKQNFNLLISVTGIGNVIAAATIVKTKNFTTFKNGRKFSCFCGSAPFDHSSGKSIRKKTRVSHLADKGMKTLLTMGARTAIQHDKELKAFYERRLAMGKSKNSTINIVRNKLILRMFAVINRQAPFIQQYSKAV

SEQ ID NO: 98667 - protein, 318 aa, unidentified
MNTNNTQEEINIGVDTSKHKLDIYVRPLDIYFSVSNDEKGINQAILEVNKYHPKRIIIEATGRLEHAFILACSNANLPFVVANPLHIKKFAGAIGRLAKTDQLDAELIAHYGEAIKPTLSQLKPENIRLMSDLLSRRRQLTSMQTMEKNRLQIMPKNLSGFIKPILTAIKNQIEKLDKKLLKLIEECPEYHIKNDILQSVPGIGNVVAFSLLADMPELGNISSKQAAALLGVAPFNRESGSYKGQQRIKGGRYQVRTVMFMAMMSAIQCNPVFKTKYEQLVADGKPKKIALIACVRKMIVILNSMLRDGVKWEVNYAK

SEQ ID NO: 98668 - protein, 425 aa, unidentified
MNYKQNEKINQVKESTLVVGIDIGSTTQYARAFDWRGIELGKVFPFSNSREGFESFKAWMQHLQDKYKKLDAIVGIEPTGHYWFDLGAYLEDEGILLVMVNPYAVKQTKELDDNSQSKNDRKDPKVIAKLVTEGRYSAPYTPDGVYADLRIMVANRKRLIREMTQIKNRFARWFAIYFPEYTDVFGDYEAQSSMLLLKKVCTPEAIVELGAEKINQIWRDAKLRAVGMKRATTLCETAKRSIGLKKGSSAARYEMKLLLEDYEYKKAQLDAVMEEIEKLCRKIPESEQMLAIKGIGVITVAGFLAEVGDVRRFESPRQIQKLAGLSLRENSSGKHKGQTTISKRGRSKLRAVLFNAAIPLIAKNPEFKSLHEYYTTRANNPLKKKQSVIAISCKLIRVFYAILANGVTYDSQKLLSDIHRQPQVE

SEQ ID NO: 98669 - protein, 478 aa, unidentified
MVTARPSHLNRKQRRELARRLRVEDPGLTVMHPHAAGIDVGNSAHYVAVRPDRDPDSVRRFECFTADLHRLADWLVHCGVTTVAMQSTGVYWIPVYEILEARGLEVYLVNARHTKNLPGRKSDVQESQWLLKLHTYGLLRNSFHPTAEIRVVRTSWRQRGDHVRAVSTCIQRMQKVLTQMNIQLANVISDLSGWTGQRIVRAMLAGERDPEQLAALSHPGIHATRQTIARSLEGTWQPDLLFVLQQEVAMYDAYLQRIAECDQALEQHLKGVADKVADTPSGAEPQPPARETRRAGPKRRRKAGSHAPQFDLGRELHRISGVDLTRIDGIDVGVAQTMISEVGLDMARWEDEDHFASWLGLCPDNRITGGKILRRGTRHVINRAATALRLAATTLLRSQSYLGAQYRRFRSRLGAPKAITAMAHKLAVLVYRMLKWGHEYVDRGMQYYEERHRDQQIRLLKKRAAKLGLQIVEPQAAA

SEQ ID NO: 98670 - protein, 316 aa, unidentified
MTTAGGFVGIDVAKAELEVVVRPSGARWTVTNDGSGLAQLQERLQVLAPSLIVLEATGGYEVAVVAALAMAALPVVVLNARQVRDFARATGRLAKTDAIDAGVLAHFAEVVRPPVRPLPDAMTQSLQAWLMRRRQLVEMLLAEEQRRSRAPRPIQRQIDQHVRWLRAQLGAVEKDLAQTLRESPVWREKDNLLRSVPGVGPVLTTTLLGDVPELGQLNRKQIAALIGVAPLNRDSGTYRGRRAVWGGRARVRATLYMATLTAARYNPVIRAFYERLVAAGKPKKVALTACMRKLLTILNAMIARRTAWKPPVAVSA

SEQ ID NO: 98671 - protein, 345 aa, unidentified
MDHFAGLDVSVKETSVCIVDDVGKIVREVKVASEPEALLAVLKNPAYHFKRIGLEAGPLSQWLYSALAGAELPVICVETRHMRAVLKAQINKTDRNDARGIAQMMRAGLYRPVHVKTLRSQKLRMLLTHRKLLQAKAIAVENDLRATLRNFGLKVGVVGTVKFEARIKELVEDVPDLAVLVEPLLVVRRVLREQISVLHRRLLAIVRDDDVCRRLMTVPGVGPVVALTYRVTVDVPVRFRKSKSVGAVFGLTPSRHQSGESDRPGAISRCGDEMMRSMLYEAAQILLVRSTKWSWLKAWAMKIARHRGMKKAIVALARRLAVIMHRIWVNGTAFRWTQEQAAAAT

SEQ ID NO: 98672 - protein, 320 aa, unidentified
MSDSPVMVGIDVASEHVDVAAIGAAIPLARYGNDPEGHSALAEALVAIEAALVVMEATGGYEAALACALQAAGLKVAVINPRQARDFARSMGRLAKTDRVDAQTLAELATTLARRPDAERFLRPLPDAVQQDLAALVTRRRQLLTMLLSERQRLRLAVAVVRPSVEAVIEMIRKQLDDIEAQMTDHVHRHYAELDTLLQSVGGIGPVASASLIADLPELGRLNRRQIAALVGVAPYAKDSGQHRGRRRIAGGRFELRRALYMATLTATRHNPAIRAFYERLLAAGKLKKVALIACMRKLLTILNAMAKTRTTFDPDHTHA

SEQ ID NO: 98673 - protein, 413 aa, unidentified
MKSSAITAVGIDVSKNKSMVAVRRPGGEIVMHPFEVCHTNDDLNWLASTLKKLGGDIRIVMEHTGNYWRPLALTLKKAGFFVSVVNAMLIHEFSDNSIRKLKTDRADSLKIANYALTFWNELPPFNDEEETRLLLKTQSRMYERITTTATALKNGLIALSDQTFAGVNLIFDDATKSTEGHFKWVDFFMHYWHRDCVCKFTFEAFMESYRSWCKKKKYRFRSEIAQKVYESAKKSVLTLPKCESTKILITQACKSLNAICEAKQACQCEMQRLASLLPEYDIVMSMEGAGPVTGPILMAEIGDVRRFKNKKALVAFAGVDAPPFQSGAFESKSRHVSKRGSPHLRRTLFTVSGIILQLSHRENQVFCFMDKKRSEGKHFYVYMIAGAAKFLRIYYATVTRYLKTVGNPGFANS

SEQ ID NO: 98674 - protein, 332 aa, unidentified
MGEVVVGLDVHLKSTQVTVMKNDLIGEIVKKERVDTSKSELRKSLESCPKGTKVALESVGFCWPWIDFLEELGYEVLLANPVKLKLRAEDIKNDKVDSKTLAELVRINWLPTCYVPPAELRWLRSLLRHRAYRTKLSTSVSNRSRSEFRKRDIRLNANLGTIKGRKEGMELDIFEVSQNMELLDLIERQSKEIERLLWKKYGKIKPVELLMTIPGVGFLSALTLYSEICDIKRFSNPEKLAHYAGLVPKVRQSGEKMRIGRETKQCDKWLKWILIEASWSFVRFCPESHLTRVYEDACRRKKDKRKAIKIVARKLVNVVWAVWTYEKEFTVK

SEQ ID NO: 98675 - protein, 411 aa, unidentified
MGYRIAGIDVHKRVLMVVVLDVETGQPEVGQRRRFGATTSELIRLRLWLEAQGVKEAVMESTAQYWRPVWMELEPHMDLQLAQAYSNRAPRGRKHDFKDAERLVRRRLADELILSFVPQPEQRAWRTMTRMKTQLARDRVRLHSQLEGLLEEMRIKLSSVVSDLLGASGQRILRALADGQTDAQKLAALASSQLQCGQQRLIDALNGTPSAMHRQLLGLYLERLGVLDTQMDKLNQMIATAMKEHEDAVMRLAEVPGFGADSAQQVIAEVGPEASTFDSAAQFTSWAGTCPGKEESAKQNHSSRSAKGNKYLRRVLTEVAQAAVKTKGSHYQIVFRRLLPRLGYKQALWAVVHRLCRLVWKILHDRLTYIEQSLQRDPKANQQRARTLARQLRRLGYNVNIQPIQPNTATA

SEQ ID NO: 98676 - protein, 315 aa, unidentified
MTDGSVFIGIDVAKAHLDVAVRPDGDTWQAANDASGIAALVAHLDQLRPTLVVLEATGGYERPVTASLVAAGVPVAVVNPRQIRDFAKATGKLAKTDTLDAHVLAHFADAVRPTPRPLPDADTQMLAAILGRRRQVVAMLTAEQNRLHTAPTTIRERIGAHIVWLEEDLKEIDTALAQAIADDPTWRERDALLRSVPGVGPVLAVTLLAELPQLGALTRHQVAALAGVAPLNRDSGTRRGIRTVWGGRARVRGALYMAALVATRYNPVIRAFSARLCAAGKPKKVALTACMRKLLTILNALLAHHTPWQSSPSTT

SEQ ID NO: 98677 - protein, 354 aa, unidentified
MGFVAGVDSHKDSLSIVVIDSVGKDVDRFSVGNDLASFEAAFKRVRRHGKAVWGIEGTGAYGRLFADYLVGVNAMVYEVPGRLTKRHRRFGTRTGKSDPIDARAIAEVVLREKDRLGRYYSDDVHEELRLLYDHRDQLVNARVQAINRLRTAAFRLQLGNMPRDLYREKALYLIEQRARRIKTSSTVVAAVLKEIEFAIAAIRLYNEQIAEVESAIHPLASRFSSLLEMTGVSSIVAAGIVGHTGDVRNIRNADAFAMRSGSAPLPCSSGRTDRVRLNKGGNRQLNRMLHTMAIVQRRIAGHPGQEYYRKKLSEGKSPAAALRSLKRRLATVVYYRLLDDYKGLSAHLGSRSAA

SEQ ID NO: 98678 - protein, 366 aa, unidentified
MKKISTVAIEGIQVFKQNQLTIGLDLGDRSSRYCIVNEAGEIILEQELPTTPKGIEQGFGKIPRSRIALETGTHSPWISRQLTELGHEVIVAHARNVRLISQSSRKDDRLDARTLARLARIDPGLLGPVRHRSVKAQIHLTVIRARATLVSARTALVNAVRGLTKSYGARLPKCGTAQMNRESAKELKPELREALDPLLAEIESLNARITEYDTRIEQLAKEVYPEVARLKQVKGVGPLIALTYVLTLDNPHRFRRSRDVGCFVGLRPGRRNSGMSEPQLHISKEGDRYLRTLLVQGAHYILGPFGQDSDLRRWGLKLSERGGRNAKKRAVVAVARKLAVLLHRLWVSKEVYEPLRNNRKQMAQVA

SEQ ID NO: 98679 - protein, 386 aa, unidentified
MQKLNDLSRSLIAFEPDGTLIAVIEMSLTSWLVAGILPGVERQPLKKLAVDETALLKLLHRWRDESEKAGRGIERIAVAFEAGRDGFWLARWLKARGIEAYVIHASSVAVSREHRRAKTDRLDTELLKRSFLGWLRGERDHCKMVEIPTMKDEDAKRPNREHNSLIGERSRIVNRMKAALVRLGIRGFNPKLKRANTRLDGLRTPEGEPIPPNALAELRRDMERRRLVNNQIRQIEEERLERIERAPCDGPHVMVRLLARVMGVGIETADMLVHEVLSRNMRDRRAVARYAGLTGSPDESGRKRREKGLARSGNVRVRRGMIQLAWRFLLHQKDSALTKWFRSRTENARGTRKPMIVALARKLLIALWRLVREGIVPDGIVLRPAQ

SEQ ID NO: 98680 - protein, 321 aa, unidentified
MAKRTTICAGIDTGKRKLDVALDGSSEQLQVENTAEGHKALLQWLGRHKVKRVGIEASGGYEQTVVAELRCKRFVVVVFQPAQVRAYARYRGQRAKNDRIDAALIAACTAAVSKIHPAPDARLSPLAGHLTLIDQIGEDIARFKNRLESCRDVRIQRLWKEDIARLAKRERVEFKALLAAIRAHRDLATRLDLIYSVGGAGLPTAVAVLVRMPEIGQVGREQAAALAGLAPYDDDSGDQIGARHIDGGRKRLRQALYAAALAASFRWNPQLMALYKRLIAGGKGHKRALIACARKLLVFINAVVARGTPWQADTPVAAAAA

SEQ ID NO: 98681 - protein, 362 aa, unidentified
MMRHIFVGIDLGDKNSVARIAVDRDKSERFGFVNDVRGRARLFEKVKVKSEEAEGAKIIMAYEASSCGFILRDEAEARGNQCCVLAPTKMEKSVEQRKHKNDDRDAVDVLEKIRAHVLAGNRLPTVWVPDPQMRDDRELVRARVELVEKRTRLKSQVQMLVKRQGLEKPSGCGSGWSLQHRRWLEALTKSDALGSGARTALTSLLRQLQFIEEEIERIEKPLLELASQARHQPIIEELTLEPGVGVITAMVYRTEIGYAGRFRRSRQVGKFVGLTPTSHESGQQNDRKGHISRQGPARLRKMLCQASWVHVNHDADAKRIYQQLVSRNPKKKKIAIVAVMRRLAVRLWHRMLRVELQMTQAG

SEQ ID NO: 98682 - protein, 335 aa, unidentified
MDNIDYAGIDVSNKTLEVALTRKGKLVRKEFANTPAGHRKLKKFLEMKTDRFVRAVFESTGVYGLDMAILLSDSRNVQICEANPRAVRRFAEASMRRGKTDTMDAMVLSEYAKKMEFRPYNPPSEEARSLRCIARRIHALSEMKVEERNRLHAAERTKTTPEAILRSLKKSIEQIEQSICELKAAAMEIISSSDELLRMFELIISISGIAETSGTLILGEIACMPADIDARQLVAMAGLDPVEYKSGTSVNVIKGISKQGNKYLRTALHMPAMVAHQHDPHIKAYFDHLVGMGKKKPVANTAVMRKLLHAIWGMLKNDQPFDGSKFYKMPEPPAA

SEQ ID NO: 98683 - protein, 344 aa, unidentified
MTTFDYIGFDIHKKTISFCAKAQDGKILGEATIPARRDTLVAWAKARPRPWIGAMEATLFTGWIYDVLKPLTQELKVAHPAMLKAIAASKKKNDKVDARTIADLLRCNLLPECYMAPSAIRDLRRVLRYRNLVVRQATRMKNRIAGLLMETGTPYNKGRLHGKAYFNELLGSLREVPRSVVELLKLSRGQLEFFATIQRRLLKGLGEHPDLSERVARLQTIPGVGEIMALSWALEVGEVDRLASIAQAVSYCGLTSAQHNSGGKEQRGPISKQRNRHLQTILIEAAKLAPRHNPQLAVVHERELQRGNRNQATLAVARKLVAYLMAVDKSGKPFEIRTSREEAA

SEQ ID NO: 98684 - protein, 345 aa, unidentified
MFHIGLDCHKLSSVAVVLNWNGKKLTTKSFPTSSDELLEFIKAYTVLDETRLVFEAGRQSSHLYNKFQMPDLECYVVCPRQVKLIAETKKKNDRRDARTLARLSYTDGLPERVYIPDDKGRRQRHLVSQREALVKQRTSVINASYGLAAANGIIVPKGYFTRQSGWSDVMKRAMNSNVYDIFVTNYAVWKHLSESIAFTEGQLKEIFHDDDRVRLMQTMPGVGDAVAWSILAYIQNINRFAKQNQLVAYAGLNASQRSSGETERRGHISKEGPAIMRKMMVQAALGALASEQPNAEPLKKFCNRIKVRKGWPVARVALATHMLKILFYILKNEKAYNPYNNPKAV

SEQ ID NO: 98685 - protein, 362 aa, unidentified
MIGQRTSVGLDVHARSVIGCGLDVQTGEVLRTRLTPAHEQVIGWLRSLPEPIKVTYEAGPTGFGLARALAAAQIECVVAAPSRLLRPSGARVKTDAKDALHLAQLLAVGQVTAVTVPDEETEAARDLVRARDDVRGELVRARHRVTHLLLRQGAVYPGGTPWTRIHESWLRTQRFPRPALQMAYDAALAALAAAEDRRDRLDEAITEMAAGSRFTPVTDRLACLRGISTLTGFGLAVEIGDWHRLSPATIGAYLGLVPGEESSGESRTQHGVTKTGNGHVRRLLVEAAWHHRPPYRPSAQLQRRWQRAPGVVAAHAAKGNRRLHARWRSFDARHKRPVVANTAIARELAGWCWALAVMNPDH

SEQ ID NO: 98686 - protein, 411 aa, unidentified
MDVVNPRCCGVDVHKASVCACISIKDGGQMLKHKRRFDTNTAQLRELAAWLREWKVAQVAMEATGVYWKPVWNVLEEEFELLLVNPQHLKSIPGKKTDFKDGERIADLLQHGLLRGSFVPPRPIRELRDLTRMRATLAQERSSVISRIEKTLEDPNLKLGVVASDVVGASGRAILHAIVQGETDPAKLAELAKGTLRNKIPQLKLALEGNINEHHRFLLRQWLDMLDFLDRKIVVLDQQIVEKGRPFDPTLQAWMQVPGLRRVNAYSLLAEIGADMKQFATAGHLASWAAVCPGNRESGGKQTSGKTCQGNPWLRRTLCEAAWAASRTKNSYFRSLYQRKVRTRGKNRALIAVAHSLLVTVYSFTIAGIPFQDLGLDYFDRLNKQNLERSLVKRLEKLGNRVTIESLQPAA

SEQ ID NO: 98687 - protein, 360 aa, unidentified
MSAAPAPEVEISNNPDVVVGVDTHKHTHMAVALSANGGWLGSLKLEAKRSGYQELMRWAAEFGSRPVFAVEGTGCYGAGLCRALQTAELEVVEVNRPDRSTRRRLGKDDTIDAEAAARSFISGKATVIPKAGNDLVEMIRMLKVVKDSASGNRTAALNQLHAIVVTAPAALRERLQRLKGKELVDCCSGLRSGEISTPLAAAKWALRNLARRIQQLDQELKDTVAQLDRLTMQHCPELRNTYGVGVDISATLVMAVGDNQERMKSEASFAALCGVNPLPASSGKVVRHRLNRSGNRQANCALHRIVVCRLRWHQQTKEYAERRMAEGRTIKEIIRCLKRFVAREMFGILRGGPAVRTAAA

SEQ ID NO: 98688 - protein, 313 aa, unidentified
MSYTSRFVGIDISKSSLDACVLPDGQTVTYQNTAAGIASFLAFLATVDDIERLVLEPTGGYERLVVAALQTARLPVAKVNAKQIRQFARACGQLSKTDRIDAFILADYARRMETRILPQRSSQERALADFVSRYRQLSHMIVQEKNRREKLTGRTKVWIEESLRFLLDQRQAIVDEMTACLKADAELGRKAEVLMSLKGIGLRTACFILADLPELGHTDKGQIAKLVGVAPLNRDSGLMRGKRMIAGGRRHLRDALYVAALPAIRFDPDMKAFFTRLKQQGKPGKVALVAVMRKMIIILNARMRDANATVLDA

SEQ ID NO: 98689 - protein, 336 aa, unidentified
MKKIFIGIDISKMWIDVCVTADGKTITHQQFENNKKGFKAMVKWIIQFSSLKEEWLLCMEHTGIYALPLWYFLTEQKIAYCVVSGSLITSGLEIRRGKNDKIDATDIARFALRYADELKPHQLPTQVLQRLKMLFAYRERLVKASVLIKVPAREAKDFAATQSKEMRTDSSSLVQIIEARISKVEKLMLEIINSDEQTAKCYQLIISVKGFGIVTACYLLIITQCFTVLTKSRELSNFGGMAPHPHKSGKSVKGKTRVSPVADKKLKGLLSRGASSLIQYDEGTKNYLSRMMAKGKHENLVRNNIKNKMLHTVCAVVKRGTPYIENYVSPYAQHVA

SEQ ID NO: 98690 - protein, 640 aa, unidentified
MSQVCSSSNVVIGVGIDTARYGHHVSFLNPDRSTAFRGFRFPESRAGYQRLHDTLKQLADKHQNQVLFRIRIDAAGQYATNLETFIRSLPFNLAFSVGEPKRNQDYKNAHYPKSKSDPVDSAACARFAVVEQPPHVAPTPQQFLVIRDVVATLISQSRHTTRCTNQLHKLLARVFPELPLLANNINEAWVLSLLERYPTPARLAAARSATLCQISHVTPERAANLQQAARSTTGSFTGHFAEKLVIQAVQAVRDSLTREAQTLAWIELALEELPSGGHRHVISIPGIGPRTAAVLIAKIASIERFQTAAQLVSYFGIFPELNSSGVDKSGAPISRGQQRMSTRGCDFVRQMLWMAALSAIRANPPIKALYQRQIAAGKPASVALGHCMRKLLHQVFAIWKTDRPFDKCFQSRPRRTGHSPLPQAPVTQVPVTQTPIHPTPEESAVRDTPSKCQHDDRKQKAAAGRKGVEPQGKAVTATATLLRTRKLSAAAAPCNSKPAPPKDRPLQQPSPNGLVDYADLRQRVSIAQVLIELGRFDQFTGVGYQRRGPCPVRDHSGTQVGARHFSVNLERNVFRCLHPDCQVKGNALDLWAAVKKLPLYAAALDLAEALQIPLTKPSGEHAPDTHSNLQPPTDSNSQVS

SEQ ID NO: 98691 - protein, 309 aa, unidentified
MEITVGIDVAKDRLDVALRPSGDVFIAERTPAGIEALIARLLPLAPNVVALEATGGFETLAAAALAAAGLPVVVVNPAQIRAFAKAIGQKAKTDPIDAAVIAHFAEATKPGIRPLPDEETRLLADLVARRRQIIEMIGAERQREKRATASSLKKSIARLIKALEKELTSADTDIGEAMRSSPVWREKEDLLASVPGVGPTIARTLIAQMPELGRLNRKEIAALAGLAPFTRQSGQWRGKSFIGGGRTSVRTVLFMGAMAARKHNPVLKAFFERLVVAGKPKMVALIAVARKLLTILNAVLRDRKPWQTA

SEQ ID NO: 98692 - protein, 449 aa, unidentified
MSRPQVIDDEQHEQVHERVAAIDVAKDSGMVCTRTPHPARPGARRSTVWTVKARMNAVRALGRQLHKDGIEIVTLESTSDYWRIWFFILEACGLAVQLVNAAQAKNLPGRPKTDKLDAQWLARLTEMGLLRASFVPPKAIRDLRDYTRARTRLIQERTRCWQRLEKLLEGALVKVSSVASKLTTVSAQDMIKAMIAGERDPHVLAGLARTRMRAKHDDLVQALDGMFDDHHGELAGMLLDQIAFLDGRIARLSTRAAELTAAMPEAWGINADGTTGPDAGATPDAPVLPAVIRLAEIPGISEDLARAIIAETGLDMSRFPTAAHLVSWAGLCPSARQSGPRTRAGKKGQGNGYLRGSLGQAATGAARTATFLGERYHRIARRRGKAKAQVAVARSILVIIWHLLADPAARYTDLGASYYQTRTDTDRKLRNHIRQIQALGFEVTLTKTL

SEQ ID NO: 98693 - protein, 416 aa, unidentified
MSVALPEALFFTGIDWACAEHAVCVLDAAGKITARFTIKHSAEGIASLVRRLARYGDPADLPVAIERPSGRLVDLLLEAGHPVVPVSPNAIKTWREGEVLSGAKSDAGDAAVIAEYLRLRYHRLAPAAPYCDQTRALRAAVRTREDLVQMRVAATNQLSALLDAHWPGARAVFADIESPISLEFLTRYPTPAAARRLGHKRMAAFLARHGYSGRRPAAQLLARLHGAPAGTAGRALTEALQDAVLAVVAVLRALNGAVKDLDRSVAAHLGEHPDGPVFTSLPRSGQINAAQMLAEWGDCRPAYDGPDCVAALAGVTPVTKQSGKYRGVEFRWACNKRFRRAVTTFADNSRHASPWAAQIYAEARAAGKDHPHATRILARAWIRVIWPCWVNRVPYDPARHRAAAALAGQTPNQSAA

SEQ ID NO: 98694 - protein, 341 aa, unidentified
MAIVGGIDIHRAQLTYDYVDLATAEIHTGRVMPAHRAQLRAWLQRFHGRDDVAFALEGCTGWRYVVEELVQAGVSAHVAEPAETAALRGKKSRAKTDRADARHLRQLLVDGRVPESWIPPAHVLDARVLVRLYKDLVDERTGWLQRVHATLFHHGVPAVAKSLVTAAGTEQLASITVPAAAHYAVDAGMRQVDRLTAEMLPLRKQIVALGSRQPGCRALQQHYGIGPLLGVAIWEELGDCRRFTSSDDAVRHAGLDVTVWSSDGKRTRGHLAKQGPPVLRWASYEAAVYAARPSSPDYAYYRQLRHRLEAHIALITVARKLVRRCYHTLHDAGDIAFTAAA

SEQ ID NO: 98695 - protein, 390 aa, unidentified
MQPTQVQDVTRNDEVLAVSLELASKSWKVGLDDGKRNSPAVHGVDHAQPEGRLDEAVAVIEKTKKKWGLAPGVRVVVVYEAGQDGFWIQRALSERGYEALVVDPASIPVERRARRAKTDRLDAIRLVVALRAWLRGERDRMKVVRVPPVEAEGQRHLVRDRGVLQKEIGQHRDRLRKLLGTVGCWGSIESDLTGRLERGEVTGYGGSALPGWLQERLVRECARLKLVEAQLAELEKTLPARLPEAVRQRIVQLMQLKAIGRVGAQRLMLELFWRQFANRREVGACVGLVPQPYDSGESRVDQGISKAGNRRVRALLIEMAWMWLRWQPQSELAHWFAQRTRGSGSNKRSKRMAIVAVARRLAILLWRYLKDGVLPKGVEFKPVKVTLKAA

SEQ ID NO: 98696 - protein, 331 aa, unidentified
MKKQNWVGVDVGSRELVVAVERNGKRDEALSFENTAEGHRKLIHFITKRGASARVVLEATGVYGLDLALALERASRVEVMVANPRAISHFGRASLQRSKTDALDAEVILEFAKRMPFEPWTAPAREILDLRSISRRMEALTKTATQEKNRLHASDQSAELSEVVREDIAFSIEQLATRVAQLRDQALQLIASHPYLRDAFGHLTSVKGIAEVAGIQILAELAILPKDMNVRQWVAHAGLDPRQFQSGTSVHKPARISKTGNAHLRRALFMPALVAVQHEPHVAAFYEKLLGRGKTKMQANVAVMRKLLHAIHGMLSHDQDFKGEKFYAMKA

SEQ ID NO: 98697 - protein, 343 aa, unidentified
MIAVGIDTHKESLAICAVDDLGRQLGELSVRNSPQGFRRLERFLAGLPSPRRVGIEGAGGLGAPVAHALAAAGEEVVEVPARLTARQRRRLRRLGKSDPADALAIARVVVSEQDLPAAIHGELTTDLKVLCNYRAQMLGERTRQSNRLHADLAALSPGYGAQLPAFDSAVRQRRAATLLAAQGGVRARLAERRLARILAITLEIDALEGQITALVGSCGTRLTAICGIGSLTAARLLAECGDARRFRSAAAFAMAAGVAPITASSGKVQRHRLNRGGNRQLNLALYTIAFVQSRCDTRAQDYLERKRADGKSWREAMRCLKRQLANVVYRQMVADLNEGRLTT

SEQ ID NO: 98698 - protein, 369 aa, unidentified
MKKRIKNIGLDVHKNSISVGIADDGRDGEVRYYGKIDNDMSQLDKVIRKLISEGAMLRFVYEAGPCGYGIYRYLISNNMDCVVVAPSKIPQQSGNRLKNDRRDCLSLARLHRAGELTPVYVPTPEDEALRDLVRARIDATRTLRVAMQQLGAFLLRHDIVFPGKTKWTKTHFIWLSTVTLPHSAQVFVLQEYIDRVTDCINRVQRFTEQIRLQSRQSSRHELIKALQAMRGISLIVAATIASELGDLTRFETPGKLMAFLGLVPSEHSSGEKVKKGSITKTGNRHVRNALVEAAHAYRFSARKSRIIRKRQEDLPKNVIDISWKAQCRLCARYQYLMAKGKKVNVTKTAIAREIAGFSWAIAMELARAA

SEQ ID NO: 98699 - protein, 343 aa, unidentified
MQTVTTIGLDIAKSIFQVHGIDAAGQVVIRRQLKRRYVLAFFERLPPCLVGIEACASSHHWSRELETLGHTVRLMPPAYVKPYVKRPKNDTTDAEAICEAVTRPNMRFVPTKTIEQQSCLMLHRARHLFIRQQTAVINSIRAYLAEFGIVAPVGRRGVEQLLEVVADAADRRLPEIARVCLAALGSQLRKLKAQILEFDRRIMAWHRSNSTSKRLDAIPGVGPALATALVASIADPRAFRSGRDFSAWVGLVPTQNSSGGKDKLGSISKQGDRYLRSLFTAGALAVIRYAKIHGTRHRPWLTALLARRPTKVAAIALANKLARMAWAMMARNERYKEPAALTA

SEQ ID NO: 98700 - protein, 407 aa, unidentified
MISIGIDIAKEKFTACALEQGSKIIWKPFDIHLNKTKVEEFLKKLDSLNEEVKILMEATGKYHLPILYELKDKGYFVTVVNPLKMKQFCRVLNFRKAKNDNIDAIQIAEYGLMYWKELQEYKVDAESFRVLKELNRSYQHYMDLRINQMNFIDQTISQTFPGIKKLIPHASGDFSKDKLLDFLETWWHKDLVLEKPEEKFIEDFKNWAKEKRYHPNADKAKSIYKLAEESISTQPSSSSYIKMNIKEGIELIKRINQILNTILSQMIEIAEPLEEYKEAKKFSGISDKLAVQITAEFGDLSKFKNKKSLISFVGIDSPPFESGNFKADQRKITKRGNAILRKVGYQAMKCMMSAKNPENEIYLYMLKKEKDGKAKKVCKFAGLNKFLRIYYVKVIASKQEKKLLKVA

SEQ ID NO: 98701 - protein, 420 aa, unidentified
MAKTITNPELLAYRVAAEADPTRGQLWVGLDVGLKSTSVCVIDATSKIIHHCSMKSSATEIGRYLRKNYTSNVVCIGLESGGTSGHLATHLRRQGFQVAVLDALQVHRVLSIKRNKTDTNDARGIAEITRTGRDYLTEVYVKSAACFEIRAQLIMRQRLVQQRLANEAMIRGLLRVYGGRVEAGAKLPATFRERVVEQLLLIQDHEDINLRPRILPILDLCVRLHADAERIEAELEMLARQNPVCRRFMEIPGVGAITALSFFTAIEEPARFRRADDVAAYLGLTPRIYQSGESLIRGSISKMGNRLTRTHLVNAATVLMAATKTFSSLKDWGIRLSKKIGFHKAHRGCPQARHHHVRPVARWHPLPVQGRHRRRSPRDDAGSAGLTSSTAGAAGKILPGGGGIGDFGYNIRAAMTLSYG

SEQ ID NO: 98702 - protein, 307 aa, unidentified
MHHAHYVAVDVSKAMLDVALPAPWRTPNTPSGLVALRRQLDRIERPHVVCEATGRYGRLLARSMGEAGIAFSAVNPRQVRDFARAAGQLAKTDAIDAAVILRFARAMEPAQTPRTPENQARIAERVRRRRQLVDMLAVEKQRLSGLDDAVSIASIQAHLAFLQGQIATADSQIQSEIAADLMLARRAMLLQSIPGIGAVTAAILIAELPELGFVDKKQIAALAGVAPMNRDSGQWRGQAHITGGRLSVRCALYMATLPAIRFNPSIRNFYQHLRAQGKAPKLAITAAMRKLLIMANSIIQQDRPWHA

SEQ ID NO: 98703 - protein, 353 aa, unidentified
MTDTPSIAWLGLDAHSRNCVLAQLDDQGNEINHWRFPTDPRQLLKHLQAIPAAVKRLMLEESNLARWISQLLRPHVQQLIVCDARRNRLISQDAHKHDRRDAFALARLLRLNEYRSVWQPTDDQRVLFKRAAQAYENSVLRQTRLKLQLKSLFQHWGLFPTGATVFSKAGRSGWLQKLPYHALRSQALLLYELLDQALAGQSQARRLLCQAGRLFPEVQRLRSAPGVGLVGAHLFVAYVQDPHRFAKFSRLTRYCRLAILDRTSDNKPLGFKQLDRQGNGVLKAISYRAFLQAAKRRSGPLWDFYQASLRQTGSNTHARLNTQRKILLVLWTLWLKGEEFDPNKFSHPQPINV

SEQ ID NO: 98704 - protein, 422 aa, unidentified
MQVLYERCAAVDAGKDAIAVAVRLPGKGPDGRVTVKRTYKTFYGVPREMARWLVAQGVTHVAMEPAGSYSLPVYHALLEFGGLRAGAGGQRGAREERAGRAKTDLADAEWLAQLLECGLLAGSFIPPADVKAVRDVVRYRAKISQQRVSEIARLGNVLQDAGIKIDSVASSISTKSGRLMIESLIDGERRGAVLADLAKGKMRSKIPDLSMALEGRFGEHHAMLCRLHLDHLDHLDGMLAKLDAQIEAMTAPFRGARDLLITIPGIGVLSAAAVISEIGADVRAFFPDAEHLASWAGLCPGNHESAGKRRSGKRRPGNKHLQPVLVECAWAAVRHDGYLKALYHRHVMKWGGYRSGAAKGKAIVVVAHALLVIIWHVLATGKPYGELGSDYFARRQDPERETLRLVAKLEALGHRVTLEAAA

SEQ ID NO: 98705 - protein, 344 aa, unidentified
MDHFAGLDVSVKETSICIVDDTGRIVREVKVASEPEALLAVLKNLAYHFKQIGLEAGPLSQWLYSALAEAGLPVICVETRHMRAVLKAQINKTDRNDARGIAQMMRVGLYRPVHVKTLRSQKLRMLLTHRKLLQSKAVAIDNDLRGTLRNFGLKVGMVGTVRFEARIRELVENVPDLAALIEPLLIVRRTLREQFCILHRRLLAIVRDDEVCRRLMTTPGVGPVVSLTYRATVDVPARFRKSKSVGAVFGLTSSKYQSGEVDWSGKISRCGDEMMRTTLYEAAQSMLHSKKWSWLKAWALQIARRRGMKKAIVALARRLAVIMHRMWIDGTEFRWTREQAAAAA

SEQ ID NO: 98706 - protein, 409 aa, unidentified
MELVYERCAGLDVHATTVVACARIATGRTVAYEYLTVSTSTRGLLQLADWLDAKGITHAALETTGVYWKPVWHVLEGHVSLTLAHAQHIRNIPGRKSDKNDATWIADLLAVGLLRGSFVPPAAIQELRDLTRTRKQLVREIARHTQRIQKTLEDTNIKLTEAISDILGATGRAIIRALIAGETDPERLADLTKGRLKASRSQLVEVLHGRVTAHHRFMLKLHLQQIESIEQAVAQLEAHIEETIEPFRAAISLLTTMPGLSTTAARVIVAEIGTDMSVFPTAGHLVSWAGLCPRLDESAGKRRSTRTRPSAPWLKPTLVQAAWAATRKKDSYFHAQFMRLKSRRGPKKAILAVAASMLTDVYYMLRDGTEFQDLGGQHFAQRDKEHLTKRLLRRLRDLGVEVEVKEPAA

SEQ ID NO: 98707 - protein, 338 aa, unidentified
MSLYGGIDLHANNSVIVVLNEQDQVIYQQRLANHLPTILEQLAPYHADLKGVVVESTYNWYWLVDGLMEADYRVHLANPAAMQQYSGLKYTDDYSDAHWLAHVLRLGVLPEGYIYPKAERAVRDLLRKRAHLVRQHTANVLSVQNIMARNTGLRFSVKQIHEFTKQDLEGVLPEANQVLAVTSSLALLACLSQQIKTLEKAVTKYLKHTPAYEQLLTVDGIGTILAQTIGLETGDIGRFPTVGNYASYCRCVKSTKISNGKRKGQGNVKNGNPYLEWAYMEAAQFAIRFNPTVQRFYQRKHAKSHLMVARKAVAHKLSRACYYIMRDLMPFDVHKAFG

SEQ ID NO: 98708 - protein, 337 aa, unidentified
MKYSGIDLHSNNSVVVVSDEADRVLVRRRLPNDAAAILALLAAHREELVGVVVESTYNWYWLVDALQAAGYRVHLANTAAIKRYEGLKHSDDEDDAGYLAQLLRLGILPSGYICPPAARAVRDLARKRMQLVRSRTAQVLSVENMLSRETGAGMRSYAVQRLTAQAVEEFGFNPEVEQSMCANVAVIKTLNREIDKLEHRLHQCVRLRPEFRLLTSVPGIGPTLATLIMLEVGTIERFAAVGNFASYARCVDSARLSNGKKKGQGNVKNGNAYLAWAFVEAANFARRYCVEARRFYERKKARTNGVVATKALAHKLARACYHMLKENTPFDVKRCFA

SEQ ID NO: 98709 - protein, 391 aa, unidentified
MFYVGIDIAKINHQACIIDNFGNIIEESFTFSNTQSGGEKLVSKLVKNNIMKDNILIGMEATGHYWLSVYTFLNDLGYPLVVINPIQTDAFRKFSIRKAKTDSIDSKLIANIIRTQNYEQSSFTEENLFSLRQLSRYRLSLVDNCSDLKRQTIALIDQVFPEYDKQFSDIFGVTSKELLSKCPTPEDILSISTKKLSALLTKNSRGRFGVEKAQELKESAGKTFGIKFAKDAFSFQIKQLIAQISFIEEQIGDLDQQLNELLHTLNSPITSIPGIGPVTGAIILSELGDITRFSEPSKIVAFAGLDASVCESGNFSGNQNHISKRGSPYLRRAIWTAATVAAFHDPVLKEYYQKKRSQGKHHGTAIGAVATKLVRIIFAVLTTNKPYEPRI

SEQ ID NO: 98710 - protein, 391 aa, unidentified
MIYVGIDVAKDKHDCFITNSDGEVLFKPFTISNNREGFENLFQRIESVSDDFTKVKVGLEATGHYNYNLLGFLIDKGLPTFVINPLHTNLFRKSLSLRQTKTDKVDAHTIALMMMSGVNLQSYSNTSYHNEELKSLTRYRFDKVQERAKLKTSISRLVNILFPELEKLVPSLHMVSIYALLAEFPSSAQIASCHLTRLTNLLANASKGHYNKEKAIEIRNAAKHSIGSNMPAKSLELKHTIRLIQELTSEIDEIECFIKSIMDEIRSPILSIPGINYRMGAMIIAEIGDFNRFSSPDKILAYAGLSPSTYQSGQLDGCYSHMEKRGSRYLRYALFNATKFVCIWDNQFSAYLAKKRSEGKHYNVAISHAAKKLVRVIYQLEKSGQLYHRAA

SEQ ID NO: 98711 - protein, 361 aa, unidentified
MSFKIIKNNCCGLDVHKTWIFACIGITDSNNRTEYKQARFSSFTKGLNELCDWLAKYNCNDVCMESTGKYWIPVFNILEQRSLWVTLSHPKYTKPMKGNKTDRKDAKWICDLYMCGMVKPSFIPPADIRELRDLVRYRFKLTCMITGEKNRAQNCLTVSNLKLDDVFSDVFGKSSRSITEQILQHPGETFDVAPFVNSRCKTPIVEIQAAIDGAISKEQAVKLRQCLDHIDELNKHISEVEQEILRLSDKYEVALNLIRTVPGFDKNPLTAIQVLSEIGGDMSVFPTAKHLVSWAGCCPRNDQSNQKIKSTRISRAGSYFKPVLVQVANALIKSKNHSEFTNRYKRIKARRGHKKAVIAAV

SEQ ID NO: 98712 - protein, 482 aa, unidentified
MSKQTAEWRKSERLTRKQRRELGRKIRSDKPGLEVVHRDAAGIDIGSREHYVAVGPDRDSEPVRMFGCFTSDLQRLAEFLTQCRIKTVVMQSTGVYWIPVYDVLEEAGFEVWLVNARDTKNLPGRKSDVQESQWLLKLHTYGLLRKSFRPTPDIRALRTCWRERAEYVQQAGTCIQRMHKALTEMNVQLGTVLSDLSGVTGMNILRSIVAGERDGNKLAQFRDARVKASPETIAKSLEGTWRPEQLAILTRQLADWDHVQQQIQACDRDLQAMMQQMPDAAAVPPTKPPADSDQKPPKRRRKKNGKSSRNEPRFDLESELKRMTGVDLTRIDGVKANTVQTVITEAGLDMSRWETERHFVSWIGLSPRNDLSGGKVLNRKTRKVVSRLATALRMAATTLRESDSYLGAQFRRFRTRLGAPKAITAMASKLARLIYRMLRYGQEYVDRGTAHYEQRHRQQQIQFLARKAAQQGFALVEIGKPA

SEQ ID NO: 98713 - protein, 351 aa, unidentified
MRKIAYLGMDVHSNHCVLGDMDAKGNFRGAQTFCTSEQSIIKALQDVKATEKYLTLEEGNLAYWVAQVAAPYVTEVIPCDPKENALIYKGSNKNDKVDTKKLCRLLRLGELKRVYHPETDERAIFKAAAQHYIDLRDQQISLKQKIKAMYRHWGVIDVAGEAVYSPKKRDNYLCQIKHLAIRNEISRLYYLMDQTESMQQRALKAMKQLGRKYPEIKQFQKMPGIGEVLSHIFDAFIQTPHRFPDKHKLWRYSRLGVTDRSSDGKPLGFKRLDRSGISELKSLTYQAWMSALRSDNEVKRFYKNSLERTFSRVHARLNTQRKIIATMYGMWKRGEPYNPKLFLDSPQSGVV

SEQ ID NO: 98714 - protein, 386 aa, unidentified
MKLVGIDIAKYKHAAFIMDASTGESLCEPFFFKNNKEGFQKLYMELNKYAKDELLIGMEDTGHYNFTIESSLLAEGYKVALINPITTKNLRKASLKSVKSDKEDALLITKALLDKDYYRIISIQDEKLNEAKQLTRYRIQLTIEMNRKKNILQRHMDIVFPEFNTLFKNGYTITYLNILRKYGDAYTIAHTDIRSLRKCFKYCSSFTAEELKELASNSVGIHDVSISFIIQSIVSSIDLINSQIEELDKKIEELAITQDSSITSIPGISKISGTSILAELGDISKYSNAGKVIKFAGVNPYISESGEFSADKTAITKKGSKYLRTTLYRVIIPVIRHNPAFNNYYHLKRSQGKGHLCALGHCVRKLLRIIYHLETNNLSFDINLLK

SEQ ID NO: 98715 - protein, 372 aa, unidentified
MNYQSIDIDGRPNHWPQNQDNTSPAVSTIKMGLDVHQASVVVVAQWDHATPKPPQRFNADDLVAWMGRLKTQGHRLVSVYEASGFGFTLHRRLEALGVESYVTTAQILDTSFRGVKTDGRDAHELCLRLDRYVQGNHQSLTMVHVPTPEQEQQRSVSRQRQQLLRQRVALEITGRSLLATQGRFEAGSWWRPLRWNQLEGHLPGWLQIRLQTLRPVLSLLQHQIDGLGAELEASVERSTLPKAVGELSAAIVNREVGDWRRFHNRRQVSSYTGLCPREFSSGNQRRQGSITKHGNPRLRQALIEMAWRMVRFQPNYHAVKKWKDKMVEAALTNRPRRKKMIVAIARQLAVDLWRLNTGQTTPEKLGMTLATI

SEQ ID NO: 98716 - protein, 366 aa, unidentified
MDTIYIGVDFHARQQTICYLKTETGELVISELKHQDKEQLRVFYQQFQGRVIIGLEASGYSPWFEAMLEQIGHEVWLGDASEIRRRARWRQKSDRRDAELIWDLMVHEEFPRLHQPTAQSREVLRMLRYRQKLIKVRTMTKNSLQAIALQAGLAKGKGLFTKDGQAEFKIAAMSPALQWQRDHWCDLLKPLNQQLLETMVWFKAQSKGDAVITRLRTHPGIGLLTALCLWHTLQPVSRFRNQRKIVAYAGLDPMVRSSAERAIYLGISKAGSRMLRYLLVEAVHTAIRYDDDLKRFYKRVAERRGRPKAKVAAARKLLIRAYIMLRDEIDYAEFRRRAVAVDLPDEVKGQSKVPEVLIGQSASPGA

SEQ ID NO: 98717 - protein, 446 aa, unidentified
MSKDEKKSKKKSKVSMLLVNPNAAGIDIGDTFHCVAVPEGRDAVSVREFGAFTTDLESIVKWLKQCKVDTVAMESTGIYWKNLFALLVHHGFEVYLVNAKHTRNITGKKDDESDAQWIQKLHSCGLLKTCFLPDEHTDMLRTLVRHRRSLTQDSTRYVLRMQKALESMNIKIHAVINDITGKTGTAILKAIIGGERDPNSFLSYVDPRIKADKQSILKSLEGNWRSEHLFLLQQCYNLYQHMQTQIEICDKQIEKVLKLSMNETNTEQSVNSQVKYKTKNQPKFNTRSYLKNLHQVDVIDIYGLSEISALEILSETGTDLSKWANEKKFVSWLNLCPNNKITGGKLISSQLMKKKPNAAAQAFRMAANSLKQSKHWLGDYFRRMRSKGGQKYAIVATARKLAIIYYKMVRFKKPFTPFDIYEYNKKYRQAKIAYLEKLLKRLKIAA

SEQ ID NO: 98718 - protein, 357 aa, unidentified
MEQIVRLGVDLAKRVIQVHGVAAHGRVVLRRSVSADRFAEFMVQLPHCLVAMEACSTAHHWARKLAAFGHAVRLIAPQFVAPYRKGGVSGKNDAADAEAICEAASRPSMRFVPAKSVQQQCILTLHRMRQGWMEERTALINRIRGLLAEFGIALPQRTQGLRGIPEILEDGSNELPGPARVVLMAGWQHLGLLNERVAELDREIRTHAKADERARRIMEMPGVGALTASALVAAVGDAREFKNSRQFAAWLGLTPSQNSSGGKVQLGRITKRGDSYVRMLLIMGARSALLTAPRRSDRISRWLVELHAKVGWRKALVALANKHARIIWNLLAKREAFVANHVPAAFTTRPREMVTSA

SEQ ID NO: 98719 - protein, 451 aa, unidentified
MRSYRSYQKKRGKAAEKTIIGIDPGKSRHQAVIIDADGIPEGKTFSFAVNYKGYYEKLWNEINKQITSYTSSDLLFAVEASCNLWQTISNYLRSAGYAVVLVSPMCTKQSRVMLNNDFSKTDPKDALLIALNAQRGYYIEMRNYSERSNDMHTLSIAYNKLRKDHSSYRGRLRAAIELIFPEFLEVITLGTKTSFYLLEKYLFREEYLNMNIEVESLQIGNISRRQYGIKHLHKLQELAKHTIGIPSNNELYDRTIVLTWLEGMKEIGSRMKVILAQLIKLASSMKEFSILTSLMGISAETASLFLAEIRDISAFDNYKEIEKYAGYNLRLTQSGKHIGSRRISHLGNTRLRWVLYRMTEETMKYIPEVRIKYLKRQLKKQIYRKNLVSCVPQLLKLIFSLVKENRYYEYYEDRVTEMEKLNIQYQVVKAERAAKHRKHRSTIKEELRKTA

SEQ ID NO: 98720 - protein, 424 aa, unidentified
MIKDKCGRPPITAKGKETVFIMISIGIDVSKLKSTFCILNEYGEVLQTAREISHTETDLNELIRQVKSFGGKDDVRVIMEATGAYSKPVLYSLIEEGIFVAEINPLAMKKYRSNINFRGVKNDPIDALAIASYGIDKWHRLKEYQKADKEYAAMKALSRQYLSYMKPHVSLTQNLDHLIDQVMPGIKDEFDGYDPATGKDRLTDFLEEFVHYDCIRSLGPKRFDERFKRWAKKKGYRPRQGKSGKIYSLAKEGIPTLAYDPISRLLVKQAAEALRSMNHVLNEILSQLRSLAKQRPEYPIIRAMSGVGDVLAPLLIAEVGDPRRYHSGSALIACVGIDVPPYESGQFKASERGITRKGSKQLRKLGYLMVKNLRKIKPVKDTSVYDYYLKKKSESKKDKQAIVAAMNKFFRIYYARAMEAYKTE

SEQ ID NO: 98721 - protein, 492 aa, unidentified
MSRHKRPPAQAKSSANEAPPRPASRPPRAQPVTLPVLNPNAAGIDVHSDMHMVCVPADRVSSAAAEAASGPANVRRFGANSCDLRAIADWLAECGVTTVAMESTGVYWIPLFELLESRGFEVWLVEPGQLSRCGARPKTDVLDAQWIQRLHSYGLLLPSFRPADSVMALRGYHRQRQMQIRYAASHTQHMQKALEQMNVKLTEVVSDITGLTGQRIIAAILDGERDPRRLAALRDPKCKNGAATIAKALEGTWRPEHLFALRQAYDLYQFHHRQIAQCDAAIQAELAKLPDRSGDKPFMAKPRRCGRKPNDLSFDACGPLFKALGVDLTEIEGIDVGTALVILAEIGVDVSRFPTEKHFASWLGVCPRQHESNQTKKKRRPRQGKNRVAITLRMAAQALGRTLSPLGLFYRRIKSRIGGKGAVTATAHKLAGLVYRMLKYGKDYVRRSTEEYEGKIREQLERSLQRRAAALGYELVPKPPSPPEPTACPLLT

SEQ ID NO: 98722 - protein, 401 aa, unidentified
MQDTQQRDAVDVFVGVDVGKGQHHAVALDRNGKRLYNKALPNDEAKLRALIAELKTHGRLLFVVDQPSTIGALPVAVARAEGVLVAYLPGLAMRRIADLHAGEAKTDARDAAIIAEAARSMPHTLRSLRLADEQLAELTMLCGFDDDLAAQVTQTSNRIRGLLTQIHPALERVLGPRLDHPAVLDLLERYPSPAALAATSEKTLANRLTKLAPRMGKSLATEIVQALSEQAVIVPGTQAATIVMPRLAQQLAALRTQRDEIAAEVERLVLAHPLWPVLTSMPGVGVRTAARLLTEVAHKAFASAAHLAAYAGLAPVTRRSGSSIRGEHPSRRGNKVLKRALFLSAFAALRDPVSRAYYSRKIQQGKRHNQALIALARRRCDVLFAMLRDGTIYQPKSAPNA

SEQ ID NO: 98723 - protein, 315 aa, unidentified
MTTVFQGYVGIDVSKEILDIAVLGEGRVTQVGNTKRGIAKLARQMGELEPKVIVVEATGGYEEAVVLGLYEAGLPVALVSPQRVGQYAKARGLLAKTDKLDAQNLAEYGKNIQPRLFVAKSEEGRRLSALVGRRRQVGELRRAEKSRLRSANAEVKASLKTVLACLDGEVKRLDGEIREFMKDHADFREQEKLLRSAKSVGRVTAATLLADLPELGKLDRKQIAALVGVAPMNYDSGRKRGYRKTKGGRSEVRSVLYMSALSAIRHNPLIRVQYEQLVRRGKEKKVAITACMRKMLTILNAMVRDQQPFRASGLA

SEQ ID NO: 98724 - protein, 489 aa, unidentified
MSRASQQQQGKKDATLNAKALKRKARGSHRPQGEGHQRRSQLRITNRDAAGIDIGSQVHYVAVPEERAERAVRSFGAYTAQLDEIAHWLKECAVKTVAMESTGIYWIPLYQKLEEAGFEVLLVDARQAKHVPGRKSDVQDCQWLQQLHTYGLLRAAFRPEDWVCRLRTLQRHRKSLVEYAAMWVQHMQRALNEMNLHLHHVLSDISGCSGLAILDAILAGERDPRKLASLADYRVKKSQAQIEAALTGDYRPELLFVLNQSLQDYRQIQQQIAQCDLSIEKQLAQMADCTNPSQNSGPRQQGPESAGGKRGKIKPKDGLEVSLAGHLKRILGIDLTTIPGLNVLAILTLISEIGTNMSKWRNEKAFVSWLGLSPNNKISGQRLLSSRTRKVVNRAATTLRLAAMVLGHTNTPLGSFYRRKRAQLGAPKAITATARKLGCLIYRLIKNGEAYQEPDLHVYELKYKDQILNSLRKRANSFGFDLVEVPKAA

SEQ ID NO: 98725 - protein, 360 aa, unidentified
MFTERTSVGLDVHARSVAAAAIDGVTGELFQTKLTPAHDHIRGWIQELPGPVAVAYEAGPTGFGLYRSLTAAGIRCEVAAPSKLQRPSGERVKTDAKDAVHLAKLLRLDEITAVAVPSVEQETARDLVRAREDCRGDLMRARHRLSKLLLRHGIVYHDGDAWTGRHDAWLRRQRFDQPALQLAFESDYETVLTTTARRDRLDVAIEAMATDSQFTAVVRRLSCLKGVSTLTSFALAVEIGDWNRFTGNSIGSFVGLVPSEHSSGTTRTQGPITKAGNTHARRLLVEAAWHHRGRYAPGKTMLDRWELAPPAARVRGDAGNRRLHARWVRFTNRKKKPSIANVAIARELAGWCWSLAVMDE

SEQ ID NO: 98726 - protein, 361 aa, unidentified
MGHSSWLVAGIVPGVERSPLKKLAVDESALLKLLNRWREEAEKAGHRVERIAIAFEAGRDGFWLARWLRARDIEAHVIHASSVAVSREHRRAKTDRLDTELLKRAFLGWLRGERDHCKMVAIPTLAQEDAKRPNRERESLVGEQSRIVNRMKAALARLGIRGFNPKLKKAVERLDGLRTPEGEPIPPNTLAELKHDMERRRLVRSQIRDIEGTRLERLVQGHGEGPHVMVRLLARVIGVGVETADMLVQEVLSRNLRDRRAVARYGGLTGSPDESGKKRREKGLARSGNARVRRGMIQLAWRFLMFQKDSALAHWFYARTKNAPQTRKTMIVALARKLLIALWRLVREGAIPEGIVLRPAL

SEQ ID NO: 98727 - protein, 351 aa, unidentified
MNQHKYIGMDVHKATTVNAVRDSKGEVIAEGIIQTKSATILDSIRGQRGILHVVFEEGTHAAWLYDLIRPHVASVVVCDTRKIPAQGNKNDRIDAKRLAELLRIGALMPVYHGEKSTRAVKELSRSYIGIIGDCTRIKNRLKSIFRGRGIDCSGSAVYNPEERKSWLRQLKDEAVCARADSLWDQLKFLEPLVEKAAKDLMVEARKHRADMKILQSIPGIGQFRAAIILGIVGTPHRFRTRKQFWTYSGLAVVTKTSAEYEVVNGRLVRSNKRPLVRGLNRNYNRALKEVFKGAAQSAASGPWKSRFEAMVANGAKESSARLTLARKIAAITLALWKRGERYDEKKLKHAA

SEQ ID NO: 98728 - protein, 461 aa, unidentified
MKKKRSNFRRRHPGRGRVIEVARKEQAWERINHHAAGIDIGAESHFVAVPPESTPTPVKQFGVFTRDLYALADWLEECGVKTVAMESTGVYWVPLYEVLEERGFEVKLVDAHKVKNVSGRKSDVLDCQWLQQLESYGLLAGAFRPADEIVVLRGYTRQREMLVKSASTHIQHMQKALQQMNLRLDNVVSDITGETGMRILKAILSGERDVEKLGEMRNYRCHASAREIAESLVGNYRQEHLFALKQAVELFEFYQAKISECEAEMGKYLQSLPHQREDEPPPLPKGEKHSRVSFNVREEAWKLTGVDLFRIQGLNAETVLRITSEVGVEVASRFPTEKNFSSWLSLSPNHKISGGKVLSSKTKVSRNRAAQAFRQAAVSVERSESELGAYYRRMKARKGPAQAVTATAHKIARIYYHLLKTGEEYVDGGARAYEEKYRERVVSNLKKRARGLGYELVAVAP

SEQ ID NO: 98729 - protein, 314 aa, unidentified
MILPFRCVGIDVSKYRLDIFDDAVGVAESIANAPQPITEQVARWRCGEVFVVFEATGIYDRELAEALHRAGIRFARINPARARDFARAGGRLAKTDAIDARMLAAFARTMAPDPDQPPKPHRNALALLAKRRDQLVQMRAQEKNRRSEAADRAMKESIARVIDCLDGEIEAIEDQIKALIKSEPEIAEQARLMRSAPGIGPVACMQLIAQMPELGLVGPKQLAALAGLAPFNVDSGIYRGKRAIGGGRKRVRDALYMAALNAVRRDGCFKTFYQKLRAAGKPAKLALIAVARKLLTVLNAMLRDRKIYLQPQST

SEQ ID NO: 98730 - protein, 339 aa, unidentified
MEPTIIGVDIAKQVFQLHWIDRETGEVVDRQLKRGAFLEHFANREPCLIGMEACGSSQHWARRLSELGHQVKLMPGKLVKAFVTGNKNDVADARAIWAATSQPGIKTVAIKTEAQQAVLALHRMRQQLVIFRRSQSNCLRGLLSEYGEVMALGRAAMSRAMPDVLAQLESRLPAVLIDSLREQWQRLSNMDEEIARIERRLRAWLQESDACKAIADIPGVGFLTATAAVAAMGNAKAFKSGREFAAWLGLVPAQIGTGGKVRLLGISKRGDRYLRTLLIHGARSVMKHVKDAESWAAKLRQRRPLNIVIVALANKMARTIWALLAHRCSYRADYTAAIA

SEQ ID NO: 98731 - protein, 331 aa, unidentified
MKKCNRVGVDVSARELVVAIEASGRREAPIVFSNDAAGHRRLIQRATKRGASAQVVLESTGTYGLDLALALHRSKRVEVMVANPRAIAHFARASLRRSKTDRLDAETILEFAVRMPFEPWSPPAPERLELRALSRRIEAMSKTVVQEKNRLHANDQSAGLSEFVKQDIRELVDHLEGRIARLRAQARLVIDQSETLAKAFAHLTSIAGIAEASGIALLAELAVLPADMTTRQWVAHAGLDPRQYQSGSSVHKPARISRTGNAHIRRALFMPALVAVQWEPHIKAFYEHLLGRGKTKMQANVAVMRKLLHAIHGMLEHDQDFAGEKFFAMRG

SEQ ID NO: 98732 - protein, 346 aa, unidentified
MLYAGLDLSRKRLDFHLLDAEGATVEVGAAAPDADGLRGLTKRLDRHGGPIRAAIESMNGARFVHDRLELAGWQVEIADAQKVKGLAPLACKTDRIDAWVLAELSRRELVPAIWLPDPRVRAERERARWRLHLVRHRSSLKQRVHAVLLAHGKPCPVSDLFGVRGRQLLAGLPLPEPWYDNVQVSLRLIDELDREIDHCQSELRRLGADHRYVPLLCSVPGISWVLAYTIAAEIGDIGRFPTPGKLAGYTGLCPRVYQSGESDRRGPLAKQGPRYLRWALVEAATHACTHRVYRERYQRTKARVGKQRGAKVAQVDLARRLAEAIWHMLTRNQPFAPAGATDPLAA

SEQ ID NO: 98733 - protein, 421 aa, unidentified
MKAWNEVTHFAGFDWAKDHHDVLVLDSTGKITSEFRFDHNATGWTLCQEKLKQFPELAIAVEAGHSAAIERLVALGYRVYPVHPRSSKSYRTRKLPSGTKTDRRDCWALADALRLEGESWRVLTTPEPLVQQLRLLCRDEVTLIEQRTALINQLQQALYEYYPSALEAFEDWCAPSAWAFVECFPTPQALVQAGKRKWQNFLHAHKLFHPELNQKRLEIFARADQFCGPAPAIAAKSVLAVAVAKMLQTLDAQLARYRSLITECFKQHPDHALFTSLPGAGPKLAPRLLGELIALKPLADTPQALQCLAGMAPVSYQSGKVSVVYLRHQCNRFLRHTVHLWVDLSRHYCDWARIYYEAHRKKGQSHACALRCLGMRWLKIIAAMIRNQTPYDAAVHTRNQLQHGSWVMQLQPVQIIKKDAS

SEQ ID NO: 98734 - protein, 350 aa, unidentified
MVILGIDAHKQTHTVVVVDEHGRKLGERTVKTTTTDHLDLLVWAARFGAERRWAVEDCRHLSRRLERDLLGAGQQVVRVPPKLMANARTAARTYGKSDPIDALAVARAALREPELPVARLDGPAREIRLLVDHRDDLVAERTRVINRLRWHLHELDPSWHPPARSLSRAPATHLAATEAFISRLDGMVARLAGELLARVQELNAQIDQLEADLVPRVRRLAPSLLALRGCGVLTAAKLVGETADIRRFHSKDAYARHNGTAPLPVWSANSQRHRLSRTGNRQLNLALHRIAITQARHHPDAQRYLTRRRANGNTPTEAIRALKRRLSDVVYRALLADTGLTDQASQAAAA

SEQ ID NO: 98735 - protein, 347 aa, unidentified
MTTVTIGMDLGDRKHQICVLDEAAGKVAEVTIDNTATALRKYFRPYAGALVAMETGTHSPWISRLLGSLGCRVLVGNSRKLRAIWNSPNKSDLHDAEMLARIARFDPQLLYPVQHRSEQAHADLERIKARDALVRCRRSLINHVRGAVKAFGVRLPACSAESFAGRVKPQVPKVLAEAIAPLLETTERLTEQIRDYDRQVATISRARYTCSERLQQVSGVGPLTALAYVLTLEEPQRFEKSRAVGAYLGLTPKRDQSGQTDKQLHISRAGNGYLRQLLVTSSHYILGPFGPDSDLRRYGLRIAERGGKNAKKRAVVAVARKLSVLLHYLWKTGADYVPLRGADAPVV

SEQ ID NO: 98736 - protein, 314 aa, unidentified
MTDNDVFIGIDVAKTELVVAAHPTGAPWRVPQTEAGWAGLTTQLQALAPALVLLEATGGLELPVASALAGAGLPVAVVNPRQVRDFAKATGTLAKTDGVDATVLARFAAAVRPIPRPAPDAATQALDALVTRRRQLVEMLTAEQNRRASAPLAVRPRVDAHIRWLRRELGTVEADLQQAIRRHPCWRVQDDLLRSVPGVGPVCSVTVLAGLPELGHLSRRAIAALVGVAPWSRESGSWRGPRRCWGGRADVRAVLYMATLVGIRHNPVLRAFYERLRLAGKLKKVAIVACMRKLLTILNAMMKHQTPWAATAAV

SEQ ID NO: 98737 - protein, 347 aa, unidentified
MGMLADRAEYVIGVDTHRDSHTVAVCTPTGAVVAETTVTADAGGYRRLLQFVRARTEGHRVWAIEGTGSFGAGLTGFLLEQGEWVVEVDRPARPARRDGAKSDRLDAARAAREALTRQHLAQPRRRGDREALRVLLASREGAILARTQAVGQLKALIINAPDQLRRQLRQLTTHGQLHRCARLRTNPTHSTEHRATIIALRSTARRALALTAEAAELESELHQLVRTLAPALLAEPGVGPITAAQLLSSWSHPGRFRSEAAFASLAGAAPIPASSGQSIRHRLNRGGDRQLNRALHTIALSRLGHHPETKRYAARRSAEGKTTREIRRCLKRHLARRLYHILEGSPT

SEQ ID NO: 98738 - protein, 348 aa, unidentified
MHIVVLGIDLSKNTCSVAGLDASGRVVLRRRLHRDSVVKLASRLPACVIAMEACCGAHHLGRLLQAYGHVIRLMSPEYVQPYVKAQKNDERDAEAIAEAATRPTMRFVDLKSEDQLDMQTLHRARSRLVGQRTALINQLRAMLLERGIAVAQGRHRLARYLAQALDDGNAEPVPLSLRIRLLIEDMRAQWSELDRRIASFDAEFVAATRSDEAARRLSTIPGIGALNATALVAAVGDARSFARARDLAAWLGLVPRQATTGGRPRLLGITKRGNKYLRTLLIHGARAALPSLATTEGVLGNWLRGLSARAHRNTVIVALANKLARIAWAVLRSTAIYSARISDRPTAV

SEQ ID NO: 98739 - protein, 348 aa, unidentified
MKYYVGLDVSMKTTFISIVNQEKKIVFESEVITDPCTIFSAIKGTKLDIENCAIESGAISHWLVKELLKRKIPVVCVDSRKMAKILSININKTDKNDARLTAEALRCGFYSEVHQKNQEDAEMQILMGTRRTLIEVSTKLKNTIRGHLKIFGIRLGTASNKKFDNLVRSALQNKPEVVQLGLKSLLETFKCTNNEIEFLGKKIEEMAREDEDVKLLTTIPGVGVITAFTFKTCLGDPSRFKRSRSVGAYFGMTPTQYSSGDIVKQGKVSKCGNSEVRSLLNEAAFSIIYSTKSWNRIKAWGLKIKKKKGHKKAMMAVGRKLSVLMYRMLISRKQFEYGVPKDNSQKTA

SEQ ID NO: 98740 - protein, 391 aa, unidentified
MDRAWAGIDAGKEMHWVHVLDVSGEKLLSRKVKNDEADLSALIDEVLSLAEEVVWAIDQPGGGATLLLGLLWQREQRVLYVPGLTVDRSRDTYPGESKTNACDAHVIADQARMRPGLQELTAGQEELAELEILLSRRRDLLTDQSRCVTRLRETLLSAFPALERALNLNRRGALTFISHYQRPAQIRRAGRKRLAAYLRNRSVQGAEDIADKALEAATAQSVTLPAEEVAARIVAELAEEILSLKNRIDTLDEELEQRFFALPEARVLASLPGMGPILGAEFLVAVGVLSAFASADQLAAYAGLVPAAHDSGKRVGNHRRMRGGNKVLKRVFYQSAFASLRSAPESRAFYDRKRREGKKHTQALIALARRRVNVLWAMLRDGTTFEDRSAA

SEQ ID NO: 98741 - protein, 239 aa, unidentified
MFDETKEYEVPNKKGLKTFKKLLKKDYGKEWIETKLIYEPTGPYSNYLREFASTNKLKVYEVNPKKSANFAKVLGNRSKTDAVDAKMLYRFHLLLKESELFIPEIDKITEQLGSFIHSYEIIQKTRTMLLNHLHSMEYKSGADTKIKESIKKEIKHLCEMEENLEKETEAFVENNPETREDLNNLLSIKGIGVISAINLLYLFRKYSDTNRNEITALAGLDPVQRQSGSSLNGGRKITC

SEQ ID NO: 98742 - protein, 360 aa, unidentified
MADLSRMAPRMTIGLDIGDTYCQVCTLDARGEIVEEGRVRTSAKALAHRFPSARPVRVALEVGQHSPWISRLLRDSGHEVFVANARKLRLIYENDRKNDRIDAQYLARLARLDPRLLSPLRHRSVQTQRDLELLKARDLLVAARTRLINHVRGAVKVFGLRIPKYSSGTFTTRAAGHLPPEHHPALQPLLDMIGALTLRVRDYDRQIEQLCEQSYPQTQLLRQVTGVGALTALTYVLTLEDPRRFPCSRSVGTYLGLTRRESRSGGHDPELRITKSGDRTLRRLLVQSAQYILGPFGPDTDLRRWGLALAARGRKNAKKRAVVAVARKLAVLLHRLWITAEVYEPLRQAAKNSRAGVPAA

SEQ ID NO: 98743 - protein, 366 aa, unidentified
MLQVAELSAQADSDFNLGGSSKTMYYIGLDVHKKTISYCVKDAAGQVHGEGKIRSTRQELKAWVNALPEPRMIAMEATIFTGWIYDCLLPHAEKVKVAHPLMLRAIAAAKRKNDRIDAAKIADCLRCDFLPECHMASTAIRDRRRVLRYRNLVVKQSVQMKNRISGLLMETGVSYNKSRLHQRGYFKDLMWMHPEVSDSIRPLLKFCRERIEHSQELDHRLVGFLERDPLLSKRLERLKTVPGVGSITALTWALEIGDYTRFTSTKEAISYCGLCSEEKSSADKVMRMPISKQRNKHIQRVLIEAAKLAVRRNHELALVYDKELQRGNPNRATLAVARKLVAYLLAVDRRQQNFMPAEEFRSSSAA

SEQ ID NO: 98744 - protein, 347 aa, unidentified
MKEQNNGSEFTIGLDLGERRHRFCVLNGKGEVVEEGTLGNDRASLARLTARYRGVLAVMEAGAHSPWVSRYLEGLGWQVIVSNPRKVRAIYQQERKSDRRDALMLARIGRMDRALLYPVRHGSEEAQQDLLRIKLRDSLVRARVALINSVRFSLKSLGYAVSNPSSERFHKVAMESLPEVVREMIAPSVQALAELSARIAVLEREISVLARTKYPQTLWLQQVPGVGAITALYFVLKIEDPKRFKKVRDVGAYTGLCPRRDQSGESDPQLRISKRGDGYLRRLLVSAAQYIVGPFGPQSALREYGLRLAADGTPRAKKRAVVAVARKLCVLLLSLWKNQTPYQPYPA

SEQ ID NO: 98745 - protein, 339 aa, unidentified
MVLIAIDPHKSTHTAVAVDEQGALLEQRRVGAREQRELLRWAHRWPQRRWAIEGAHGLGHQLAQWLVAEGEAVVDVPASLVRRVRLLAVGDKTDLLDARATAEAALRAEALHPVLAEDERMVLRLLSDRRDDLTEERTRTVNRLHRLLRELVPGGAPVKLTADVASRLLRGRRPRGVADGMRRELAQQLVEDVRRLDRELKKNEQRLAKVLSEQGSELTRHVGIGVILAAKLVGRSGPIERFPSVDHYVAYTGTAPLAASSGETTRHRLSRRGDRQLNRALHMAALTQARMPSSAGYAYMQRRRAEGKSYREALRCLKRHLARVVYRQLVADQRLAAAA

SEQ ID NO: 98746 - protein, 355 aa, unidentified
MIIIGADYHPGFQQIAFVDTDTGEFQERQLQHREEAEKFYRELAAQGGKVRVGMEASGHAGWFERLLAELNFELWIGDAAEIQTKRVRKPKTDREDARLLLRLLLEDRFPRIWVPSWENRDLRQLLWHRHRMVQARTRIMNQLPAVALNEGLRAKKKLWRECGRQQLESFPLAPWASRRRQDLLALLDRLNPTIAELNQAVDLEVERCPAAQRWMTHPGVGPLTALAFVLIIGEAGRFGCGQQIASYVGLVPLEKSSGNRRRLGHITKQGNSMLRFLLVEAAQVTARSIPEWRSRYFHLRMRRGRKIAKVAMARRLAVRLYWMMRQQWDYEQLKKFGSQGRKLSSHVVQTRGSTR

SEQ ID NO: 98747 - protein, 456 aa, unidentified
MSNSTGIKRQPRSKLTVVNPRAAGIDIGSRFHVVAIPCELEDQSTRQFGTFTGDLLELATWLKGHGITTVAMESTGVYWIPAFEILVKAGIAVELVNARHVKSVPGRKSDVNDAQWLQQLHSYGLLRGSILPEGSLAHLRSYVRTRENLARGRARYLQLIQKSLMQMNLQLHHVVTDVMGETGRRIITSILAGERDPLVLSEHRDARCKQTQQTIAKALEGNYEDDHLFELENAFSLYNYYSDRISRCEDKINELLQALVESTSQKNMHFLSDKKLSSAKHDARNRVRSLNFNPRPLCAALCGRDMMQLPGMGHGTLLTVISECGTDMRRWPTAKHFTSWLGLAPRNKVSGGRLLSSGTAVGANPARTAFWMAAQVLARTQTSLGGFQRRLAARIGRPKAIIATARKLAELYYRALRDGISLVDPGLGHYEAEQRQIQINAIKRRAQRLGLTLTQA

SEQ ID NO: 98748 - protein, 356 aa, unidentified
MNKRSKLDFSGQPIYIGLDVHKKSWSVSIFTQHGEYKTFSQPPEAEILSQYLQHQFPGAQYHSVYEAGYCGFWIHDQLKDRGIQNIVANPADIPTRDKERKNKRDRVDCRKLARALRGDEIEGIYTPPRWKLEDRSLIRTRLSMGRKQTRCKNQIKSMLLFYGVGIPERREMGHWSRRFIRWIEEIRMERASGDMALQSHLEELCHLRQLIAKLNRAIVALARTEQYRSWISLLKTVPGISTLTAMIVLTELHEITRFGSIDPLCSYVGLIPDTQGSGEKEHVGGITQRRHSQLRWLLIEASWIAVRKDPVMMEAFQQYCKRMRKTKAIIKIARKLLNRIRYVLKNQVEYVTGVIE

SEQ ID NO: 98749 - protein, 344 aa, unidentified
MSNLDTCGIEVSAKELVVRLRRQEDLEPLRNFTNTPEGHLIILRYLRRAGRVVRVCMESTGLYGLDLALALSGQEGIEVMVANPRAVRHFAHALMKRSKNDQIDAGVLEQFALHMPFKPWQRPSVAMLALHALARRLRELVEMQTAEKNRQHAAGLSKAIPAVVRRDLARSLRAQERAIERLTRQARKLIAQDPQLAERFELLDSVPGIGETSAVQLLGELGVLAPGLEARQWVAYAGLDPRQYTSGTSVHKKPRISKAEKKHLRHALFMPALVAVQHDPHLGAFYQHLLAKGKFKMQALVAVMRKLLHALHAMFKTHQPYDGSQLFRLNPAPAQEVTHVLVAC

SEQ ID NO: 98750 - protein, 349 aa, unidentified
MRFYNQPHRFYCGVDLHARTLALCILDDQGQVVRARSVPADPGAFLDAVAPCREGLVVAAECMFAWYWLADLCHDQQIPFVLGHALYMKAIHGGKAKSDRIDAEKIARLLRGGNLPVAYVYPKGMRETRDLLRRRTFLVRRRAELLAHLVNTNSQYNQPALSVKLRYAANRTALDLPGRFADPSVRKSVTADLTLIDAFDEQVRDLELYLTRTAKVDDPQAYQRLRSMPGVGPVLALIFLYEIHDVRRFEEVGQFLSYARLVRCAHESAGKKVGSGGKRIGNAHLKWAFGEAACLLVRESEQAKRWLARREKKHGKARALGALSAKLGRAVYHMLRKQEAFESKRFWAS

SEQ ID NO: 98751 - protein, 411 aa, unidentified
MEAIYRRCCGLDVHKEIVVACLLVREGGKVVKEIRTFLTMTVDLVVLHDWLKAHQVTHVAMESTGIYWRPVFNLLEGDFTILLVNAAHIKTVPGRKTDVKDCEWIADLLSHGLLRGSFIPPEPIRDLRDLTRYRKSLTDERVRQVQRLQKFLEGANIKLASVATNVMGVSGRAMLEALIAGSTDPQVLSELAKGRLRKKLPELKKALEGRFRSHHGFMVAEILTHLDFLDEAIERVSQEVSNRIIPFSRKVELMDLIPGINQRVAEGVLSEMGADMSFFPSHRHAASWAGLCPGNNESAGKRKSGRVRKGNQWLRRYLIEASWAAVQKRGTYLSALYHRLVPRRGKKKAIVAVAHTLLVMIYHILKDQVPYRELGSDYFNKLNAAYVQRHHVKRLESLGFKVILEPHSEAA

SEQ ID NO: 98752 - protein, 366 aa, unidentified
MKKISTVQTFKSEIFKEQKLTIGVDLGDRWSFYCVLDEAGKIILEQKVSTTPEAIKQTFGKIPRSLVALETGTHSPWVSRLLTELGHEVLVAHAQKVELITKSNRKDDRHDARTLARLARIDPELLGPVRHRSAKAQIHLTVIRARAELVSARTALVNAARGLVKSYGQRLPKRGTYQVSRELATGLSAELRDVLGPLLKEVESLNERIQEYDERMEKIAKEEYPEVSLLQQVKGVGTQISLTYVLTIEDPYRFPKSRAVGCFLGLRPGRRNSGESEPQKGISKEGDRYLRTMLVQGAHYILGPFGEDSDLRRWGLKLAERGGKNAKKRAVVAVARKLAVLLHRLWVSGEVYEPLRNSQKAMRAVA

SEQ ID NO: 98753 - protein, 412 aa, unidentified
MKRTPRRCCGIDVHKATLSACVRLHGKGGKVSEEIRSFGTTSDELLALHDWLKGHGVSHVAMEATGVYWKPVYYVLEDGLRVILVNPADIKRMPGRKTDVSDSAWLAQLLDNGMLKASFIPPREIRELRDLVRYRTSLKHDHTRIANRLHKVLQDADLKLSSVMSDILGVSGRQILSQLAKGHTEPAALADLARGSLRQKLPALRQALTGRFNPHHAFLLSRLLADLDNVEESMVEVAERIEVQLGPFEAQLKRLCTIPGVKQVGAAAILAEIGTDMSCFPGTTDLDSWAGMAPGNNETGGKRRRAKARKGNRWLRTILVECGHAAGRTRNTALAALYRRMIVRGGRKHAAFVVGRHILNIAYHLLAERTTYRELGATYFEQRHAEQLKRRCLDQLRNLGFQATLTPTAKAA

SEQ ID NO: 98754 - protein, 344 aa, unidentified
MNTTTIAVDVAKSVFEVAVSIHPGQVRERHRLSREAFGRFLGAHPPATVLMEACGSAHHWARHAQSHGHRVVLVAPHVVRPYVVRNKTDRTDAKGLLEVFRNEDVQPVPVKSPTQQALAALHRLRSTWLATRTARLNTVRGLLREFGLVIPVGARHVVPHVRAVLEDADAAIPGLLRPALAAAMEEIGDLDTRIRAIERQLEAAAADSVAVGQLRTIPGIGLLTATALVATVGDVQRFPSARHFASYLGLTPREHSSGARRHLGAISKRGDTYVRMLLIHGARAVLWHAKAKAASSPDRLRTWALQLERLRGHNKAAVALANKLARIAWAVWRRGTPFAIVPAV

SEQ ID NO: 98755 - protein, 356 aa, unidentified
MALASVSPITGIDLFCGIDVDSKSFSFTVNDRDGMIRKSKKIPADPELLWRYLQRSFPEKKVLCGYEAGPTGYHLYDCLSAKKVPCVVIPPASLPKSPDSRVKTNRIDSNRIALYLQSGKAREVRVPDEAYRELRHLVDIRQRYAHDIGQTKQRIKALLLYTHLDIAPAADSRWSQAHIARLKALKASPAVGERLALLLEDLDYGRGKMSRAIKSLRGFCRANPDIDRYRSYLESIPGVGLATALAVLARIGDPRRLKNVRELGAFFGLVPTERSTGDDIRRGFITHLGNDEAHALLVEASWVAIRSDAELAQFYYRIRSRHHQNCASKKAIVAVARKLTNRIYAVLTEERPYIRR

SEQ ID NO: 98756 - protein, 391 aa, unidentified
MFYMGIDIAKFKHDFCIIDDDTGEVIVPPRTIANDKEGFQEMLEILTNLHCSQKIKIGLEATGHYGTLIKTFLTSNGYEFIELNPLQVSRFHSQTSLRRTKTDKIDCQVIARHLMAIATKTYQPQVYHLEALKSLTRLRETLVDQRSRCLVKLTNVLDITFPEFKKFFTAKLRSETALFIIRKYKTPSRIARWTDEDITLVHNVSRNIPTSKLLEIRKSAVDSIGIAPKYLLDEIPSILNVYETVNEEVSKLEEKIKSIIFELDPPSLSIPGMGPISLATILGEFGDLSRFPSAEQCIAYAGVDVGISQSGTKCHRGKMVKRGSSHLRYALMNVVRTVCIHTPTFNEYWAKKKVTGHKFLRVADSHAAKKLVRVIYYLETHNTKYNPSRCK

SEQ ID NO: 98757 - protein, 474 aa, unidentified
MTTGVQVISNMLCEQIKEAPRVQELRLGIDLACRESHRAALADETGKILWSNRRLFTTSVDLQSLWTAVRAAGDVPVLVVMEPTRNAWVPVAAWLRARGADVRMVPPEQSADLRKYYNKHTKTDRLDCELLARLPLLHPDGLVATPGLGPAEALRRSVAHRQSLVARRTAGLQRLDALLELLGPAWTDVLGTDFGKAALTVLERYADPDALFRLGRARLTQVLIRASRGQWRQDKADELLDAAAQTRLLWAGGGLVFAELADDIAVEARLVRQLGAEIDQLDDRITTHYQDADPTGIVASAPGVGPVLAPLLLGRLGDAKRFRDLAAVRNYTGLVPKVNQSGTSDHTGGLTKAGDPLLREALFMAADHARKVDPTLAARYWRLRAADKHHNSALCTLAAVLVTRIAACWRNDQQYILRDLNGNPITETQGRAQCADLKPTPTAKAGTGRRNKESHSAPSTGPSTKQATKLRKSA

SEQ ID NO: 98758 - protein, 357 aa, unidentified
MRVTHGSATDSVAEVMIAVDPHKASWTAVAVDRQQRSLATIRVPVSHDGYRRLRRFARRFPQVGWAVEGAGGLGAPLTARLRADGIEVLDVPAKLARKVRMLSTGHGRKSDEADAYSVGVAALTAHRLNATPTDDAVAALGALTEHRDDLVRTRTQTANRIHALLTQIISAGHPRGLTADDAAQALRSVRPRTTLGRTLRQLAVELVAELRRLDRRIAAVTEQLSDAVAASGTTLTAVYGVGAVVAAKLLARTGPISRFRSADAFASYAGVAPIEVSSGDVVRHRLSRAGDRQLNYALHVIAITQIRRDTDGKTYYQAKRAAGKSHKEALRCLKRRLADVVYRIMIRDTETSLIAAA

SEQ ID NO: 98759 - protein, 344 aa, unidentified
MEGYVGQQFVGVDLHRRRSVVVRTDVAGLVLEAVQIVNDADRLVEVIGRAGRAPEVVLEATYGWYWAVDALRSAGARVHLAHPLGVKAFEYRRVKNDFRDASDLADLLRMGRLPEAWIAPPATRELRELVRHRAKLVALCSHCKAEVHAVLAKCGVQVPMSDLFGVGGTGLLDRLELPAPYAARIASLRRVMDHLDFETDLFTGMVRARLGADPGYTAVRTIPGIGAVLGAIFVAEIGDIGRFGTAPQLACWAGLTPKHHESDTHVRRGPITKQGSRLVRWAAVESVQTLPKTTAVGQLRDRVAARRGRNIGVVAAARRQIEYVYYALRDHHVRALHPIPVAAT

SEQ ID NO: 98760 - protein, 328 aa, unidentified
MHKQNQFILGIDISKNHFDVALLLPSGKRKNKKFRNQPPGFEELETWLDKWGVESLHACLEATNIYGHRLAEFLYDQGFDVSMVNPARVKGYAQGELLRTKTDKQDAALIARFCQAMSPSLWVPEPKNVRELKALVRRLDALIEMKQQEVNRLDVADDVVQQDIEEHIILLCERIKQLRDAIKQHIDDDPDLREQRELLLSIPGVGEKTVAMVLSYFATIERFSSAKQLASFCGVTPRQVQSGTSINRYGRMSKVGPAQLRKALFFPAMVALKYNPLLLSMGERMLAAGKPKMVIIGAAMRKLIHLIYGVLKSRTPFNLDLVQKNLAC

SEQ ID NO: 98761 - protein, 419 aa, unidentified
MNKLFVGMDISLDDVKVHILDQDGNDACSRFSVDNNPSGCNILVSHILDCCNKYNVQKVFIGLESTSVYGWHIQYYLADHASLKPFNPSVTTFNANTVKAFKKSLGDLPKNDWVDAFVIAEKLRFGRLPKSCPVDFRYLALQRLTRHRFHIVDSIVREKNYFLSNLFLKFSGLCQIKVFSNNFGAAATEIFNEFLTLDDIAARPLEDLIAFLVDKGRDHFNDPNATAKLLQDAVRKSYRINANVNDSLNFVIKSCLDNIQYLEKQKKASEKTIANEVKGFKNQFLCLTSVNGIGPTIAAGLISEIGGISRFDNDNALAKFSGIYWSEYQSADFKAEDTYLKRTGNEYLRYYFIQAADQLRKYCPEFSQYYARKFNESKTHKHKRALVLTARKAVRLVFALLREEKLYKPPAMKGDDCKY

SEQ ID NO: 98762 - protein, 380 aa, unidentified
MASMHDSVRFKTTVYAAIELSKKSWVVAIALPDRDRPSIHRIAGGNLADLIGRLRKAAGEKQRIVVCYEAGYDGFWLARSLAKIGIDRRVLDPASIQVNRRARRVKTDRIDSLALLRALIAIDRGERHVCAVVRVPTVEEEDARRSHRERQRLVRERTGHINRIKGLLFAQGIRGIEPKRRRTRIDFGKLTTAEGRPLAERLRRELEREYQRLELVQSQLRIVEKERDTADAQDPAVERKRELLCALQGVGGASAAILAREVFARPFASRRQLGSYLGLTPSAYDSGSTTRCQGISKAGNSWARRVLIEVAWLWRKYQPGSPLSHWYARKTADQSPRIRRIMLIALARKLAISLWRYVETGLVPDGAVMAKTTPHMAAAT

SEQ ID NO: 98763 - protein, 383 aa, unidentified
MRTPASLRSDRLCLTCKGFPSSRAQKGRLAMTKRSTAALTVGLDLGDRFSEVCVVDTASGETERELRVRTTPAGLARQFEGRPAMRIALEVGTHSPWASRLLASWGHEVLVANPRKVRLISHSRRKSDRFDGRTLARLARLDPELLAPIRHRSAQCQRDLGLLRSRAALVRARTLLANHLRGALKAVGVRLPKCSAESLAARATGSLAEPLRAGVAPVLAALGELSEQIRAYDRQIETLAKSHPEVESLRQIAGVGPLTSLAFVLTLEQPSRFSDSRKVGAYLGLTPGRRQSGLRDPQLHISKQGDPFLRQLLVQSAHYVLGPFGPDCDLRRHGLRIAQRGGKAAKKRAAVAVARKLAVVLHRLWTNQQRYEPLRGELDRRVA

SEQ ID NO: 98764 - protein, 317 aa, unidentified
MTESTSSPFVGIDVSKAQLDVAVGQAGEAWQAGNDPLGIQRSVERLRQLSPTRVVVESTGGLELPLVVELYAAGLPVALVNPGRVREFARSLGQLAKTDRLDARLLARFAEAIQPPVVRLRAEVEQHLAALMARRRQVLDMLTAEKNRLATTRLNLRARLEKHIDWLQQELQALNQEIDEFIQQTPEFRHKDHLLRSVPGVGPVTSAILLADLPELGRLNRKKIAALVGVAPFNRDSGGRRGQRWVKGGRVAVRNVLYMATVAAVRFNPVLKAFYTRLVAQGKPKKVALVACMRRLLTILNAMMRDLQPWQLCPSLP

SEQ ID NO: 98765 - protein, 401 aa, unidentified
MNAVGIDVSKGKSMVCVMRSFGEVVLEPFEVLHTAQNLNDLAGKLKALDGETRVVLEATGNYHKPVAFVLHDAGLFVSVVNPVLIHDYDNNSLRRVKTDRKDAVKIANYTLDKWTRLRQYLPEDDTRLALKNCYRQYQQAVAVRTMLKNNLISSLDLTFPDANKLFSSPAKSNGCEKWVDFIGDFWHSECVSSLSSDAFAKKYLKWCQKHGYNFTRSKSDTIYACAVNAASLPKSPTSKLLIQQQVAQLKAVSQSVAAFQQEMLRLSQQLPEFDTVMEMYGVGPSLGPQLMAEIGDVRRFSSKKSLIAFAGIEPQPNDSGKIVGNDSGISKVGSAVLRRTLFLIMTVILKTQPQDEPVFQFMNKKRSEGKPYKVYMMASANKFLRIYYARVKAVMDSKHSK

SEQ ID NO: 98766 - protein, 376 aa, unidentified
MHEKLRFLGLDVHAETIAVAVAEPNGEVRSLGTIANREDSIRKFVRKLGSPEQLRACYEAGPTGFVLYWQLTQLGVKCDVIAPSLVPKKPGDKVKTDRRDALKLARSHRSDDLTAVWVPDEGSEALRDLVRAREAAKQDQLRARHRLTKFLLRTGRRPPLGVKAWTERHAEWLQQVRYTHPAQEATLLDCLHEVQHMDERVKRLEKSIVEVIQEAPAPMQEVVRGLQALRGIAHISAVTIAVELGNITSRFEHARDLMGYSGAFPSEDSSGKRIRKGGITKSGNAHLRRIVVESAWSYRHRPAIGAKLRRRQEGLPAEITEIAWKAQNRLHKRYMTLTARGKEQRKTVTAIARELLGFIWAIGIKAEAACKQQLAA

SEQ ID NO: 98767 - protein, 386 aa, unidentified
MKQNSTRRQSAKQTPKQTPKQSLKQSPKQSPKQSQKICAGPITIGVDLGDKTSRYCLLDDRGEVAKEGSAATTKKGMAQTFGPLKRCRIALEVGTHSPWVSRLLKSLGHEVFVANPRQLKLISQSSRKDDRVDARTLARLLRADPELLRPIQHRSEAAQLDLMAVRVRAALVEARTALVNSARGLAKSVGERLPKCDADNLGIGQLESLPQPLQALLKPLLKQVESLTAEIKARDEQIEQIARTKYPETKLLRQVSGVGPLIALTFVLTVADKQRFEKSRDVGCYLGLRPKRSQSGRSEPELRITKEGDVYLRKLLVQGAHYILGRKGPDTDLKRWGARLAIGGKRAKQRAVVAVARKLAILLHKLWSCGEVYEPLRNNPARQAVA

SEQ ID NO: 98768 - protein, 400 aa, unidentified
MNVVGIDVSKGKSTVAVMTPGEGTIDPFEIAHDKDGFESLAGMVERLEGETKVVMESTGRYHVLLAEYLSSRGLFVSVVNSKLVCGFGNNSIRRVKNDRIDAVKICNYGATYWNELPRYESEEETRRDLRELGRQRNDLLKIRTSLNNQLISLVDVAFPGINVLLDSTKSDGSTKWVDFISRYHSASNVAAMSLWNFRTSYRVFCRRNGYCHSPSKADALHAEAVRLSPGTRVSEATCMMLDIHAGQLQTVSRSLAQISTKMHELSERLPEYGIVMQMYGVGKNLGPQLMAEIGDVRRFHSKKALVAFAGIDPPPYQSGRFEAKSRRISKRGSPQLRKALFLAMTIHVRTCAEDQDVYRFIRKKMDEGKHYHSALVAGANKFLRQYYAKVKEVLVQNGTD

SEQ ID NO: 98769 - protein, 374 aa, unidentified
MKNSITYVAMDTHKKQHRVAIAYPNDEVIVEFSVKNTTPEIRKMVRKIKRNAPGEVKFCYEAGVCGFTLQRRIEALGCKCSVIAPSLTPRKPGERKKTDRRDAKKLLGLFMADMLTEVYPPDEQQEAARELTRCREAAQENLKRIRHQLQKMLVRHGYVFIDGQHWTQKHYRWLEAIQFDQPLLQEVFDCYFTEMRHCLQRVKTLDKELEKLAQSEDYREAVGILCCFYGIKTLTAISIIAEVFDFGRFASARDFMSYLGLTPSESSSGEKEHKGPITKTGNKRVRRLLTEVAWHHRHAYGVSKVLRKRREGQPQWAIDIADRAGIRLRRRYRRLVHKGKLPCKAVTAVARELAGFIWSALIEYEARKKRKKAA

SEQ ID NO: 98770 - protein, 351 aa, unidentified
MMIIGVDYHPGFQQIAFLFKETGECGERRLNHSDGEAENFYRDLKARGISVRVGMETTGFSRWFERLLAELGFEVWIGDAAEIKTRRAKKQKTDRLDAELLLKLLLEDRFPRIWVPSPENRDLRQLLWHRHRLVQMRTRIMNQLQALAMNENRYWKGKLWSERGRAELEKLPLAPWTSRRRQELLELLDRMNPTIEELTAAATLEAKKRPEALRLMTHPGVGPLTALAFVLIIGTPERFGCAKQICNYVGLIPSEDSSGGRQRLGHISKQGSSLLRFLLVEAAQAAVRCNADWRRRYRHLAMRRQRNIAKVAMGRRLGARLYWMWRNGCEYSPSLEFGSHAGKLGTGNGGQ

SEQ ID NO: 98771 - protein, 348 aa, unidentified
MSQEKYIGMDVHQATISVAVMDGNGKLLMECLLETKAATILEFVQGLRGTLSLTFEEGTSAAWLHDLLKPHVSRLVVCDPRKAALLKEGNKSDRIDARKLAELLRTNQLKAVYHGEHGIRTLKELGRSYLTVSKDVTRTMNRIKSLYRSWAIPCPGTTVYAPSHRLEWLAKIVQPGVRVRAQHLYEQLDNLQPIRQQARRELLLESHKHPAVKLLRQIPSIGPIRAALLVALLQTPHRFRSKRQLWAYSGFAVETHDSGEYRYVRGKVQRNRERITVRGLNDNHNPDLKNLFKGAAISASTRPGPLHDFYVARVAKGMRPTMARLTLARKVAAITLTMWKKGASTHNS

SEQ ID NO: 98772 - protein, 413 aa, unidentified
MLKIVYPICCGMDVHKSFLVACIASTDERGVTTYKSRRFSTFTKDLKLCADWLKGNNCRDICMESTGKYWIPIYNILEPSCKIVLAHPKYVKAIRGKKTDKKDAKWIADIFKHDLVSGSFIPPADIRQLRDLVRYRWKLNNFIVGEKNRAQNCLTVSNYKLDDVFSDVFGKAATNITSYLLEHPNEPLPDVSNFRTRGMKATDAEIRAATDGNMCAEQAEKLRIIRSHMHDLNRCMANLESLIISTAEKYTSQLSLVMSVPGIQTFSAISVIAEIGVDMSVFPSSKHLCSWAGLTPQNNESAGKKKTTRISRAGAYIKPLLVQCALCAIRAKRNPEIRNRYLSIKKRRGHKKAIIAIARMLLTAIYNILKKNEPYNAELYRKADVPPAHRSVTMEEAVFILQRQGYLITPCTS

SEQ ID NO: 98773 - protein, 461 aa, unidentified
MRAKKPTGPQKGSVQKKVDWKALEIVHPDAAGIDVGGSEHWVAVSPDRDPEPVRRFGCFTADLREMGQWLVQKGVRSVALQSTGVYWMPVFEVLEQHGLEVYLVNAQHTKNVPGRKSDVQECQWLLKLHAFGLLNNSFQPTDEIRIARTLWRQRGNLVAEASSVIQRMQKVLTEMNVQLSNVLSDLSGVSGMKIIGAILHGERDPWTLAALVEPGVKATPEDIAKSLEGNWREELLFVLRQHVELYRIYQEKISDCDLQLRKHLESLSSKRDLKTQPIGPKPKGKKGSRNAPQFDLRTELYRITGIDWTQINGIDVLTAQTVIAEAGADLSAFPSEKQFASWLGLCPTNEQSGGKILNRRTRKVVNRATVAFRNAALTLLRSQSYLGAQYRRLRTRLGAPKAITAMARKLACLFYRLIKHGQPYVDKGTEYYEGRYREQQIRSLTKRAQKLGLQLVIPTTA

SEQ ID NO: 98774 - protein, 277 aa, unidentified
MQIASIGIDLGKTTFHLVALGERNKLLVRKKFSRTQLLAYTAKLASTLIGLEACAGSHFMGAKLREQGHEVRLIPAQFVKPYRKSNKNDFKDAEAIAEAVRKENMRFVQIKTQEQLDIQAMHRVRDRLVQRRTALINEIRGFLLDRGLIFAADPKHLRKNLPAVIEDAEQNLTPRLRWLLDRMWQEWKQVELDIEAVSDELERISEQNELCRRLRKIPGFGPLVSTATVAAIGTGAAFRRGRDFAAWVGIVLRSTPLGVSRSCSASASVATGICVAC

SEQ ID NO: 98775 - protein, 345 aa, unidentified
MKYYAGLDVSLKETSVCICDEGGEVMREGKVSSCPEAIVAFLQETGLRFERIGLEAGQLAPWLWRGLREAGLPALCIETRRMKAFASASPVKTDRKDARLIAEAMRVGFYRAVHVKSRESQELRLLLRNRWTLQHKRHDIENEVRGTLKGFGIKLGRVGKGKFGARVCGCLAAEAGRLLDLIEPMLGAREALLFHERDLDRRVVSEARKHEACQNFMTTPGIGPVSALGYMTGVDDPTRFAKSRNVGAHFGLTSRLYQSGEIERSGRISKCGDAMVRSLLYEAALSLLTRSKKWCALKAWGLRVAKRRGMKRAVVAVARRLAVILHRMWLDGTAFQWGQSEQTAA

SEQ ID NO: 98776 - protein, 366 aa, unidentified
MQKLSTRRVTGNEILKGHQLTIGIDLGDRWSFYCVLNELGEVLQEEKLPTTPDAMKRTFEKLPASRIVLETGTHSPWISRLLAEWRHEVIVAHAQKVQLITKSSRKDDRHDARTLARLARIDPQLLGPVRHRSAQAQIHLTVIRARAELVSARTALINAARGLAKSYGERLPKRGSEQVGRELATALSTALREVLEPLLREVESLNERIGEYDQRMEQIAKQAYPEVALLKQVKGVGTQIALTYRLTIDDPHRFAKSRDVGCFLGLRPGRRNSGQSEPQKSISKEGDRYLRTMLVQGAHYILGPFGEDSDLRRWGLKLAERGGKNAKKRAVVAVARKLAVLLHRLWVGGEVYEPLRNTNRAMGAAA

SEQ ID NO: 98777 - protein, 343 aa, unidentified
MKYIGLDLHKKSIFATVLGEDGKILSRTKIGPTTRDIQYYLKKQGRKSELSVAMEASYNWPYFYRAVEDAAENIILAHPLKTRIIGEAKIKTDKIDSKVLAYMLKADMLPKAYVPSREIMENKMILRSRISLVRIRTQIKNKIHSIVDRNRDSYPGLEHLADIFGRAGRSILKETKINPTDYRILSGYLELIDEIGKKIKDLEKQIDKKSLEDSDIKLLKTIPGVGSFLAFLIKSEIDDITRFRSKEKLCCYAGLVPSTHGSADRLYHGRIIKQGNKFLRWGLVEAAQTSIRYSSYFRYHYSRIKSKKNANSATIAVARKIAEIIYFILKEKRGYIEKPIDIK

SEQ ID NO: 98778 - protein, 410 aa, unidentified
MKRDKYIYIGLDLHKFQHTAVILNCWNEKLGEMTFQNKTSIFPSLLEYVNRYLTEGLTPVFGLEDVGGYGRGLALYLIEQGYNVKFVNSSLSNAERNSYAMTQKNDSWDAQCVARVLIRDLPYLPVATPSDIHWIIAQLVGRRNALVKAQTALKNQLHIQLNYHYPSYKDFFSEVDGKTALAFWESYPSPSHLEGKTMEGLRKFLLEASNNACSTRKAEQILSLVQADGEVKREYQTTRDFITQSMVRDIRFKKQEIKKVDKELKLTIQTLGMQLETMPGIDTVTSSALIAEIGDIHRFANSDKLARYAGIAPIRMGSGGKETMKKTKQGNRKLYETFYNLAVQQVQVCKGSKIPRNRVFYAYYNQKLSEGKSKSQALLCIMRRLVRIIYGMMKNKTAYIMPDQVDTKAS

SEQ ID NO: 98779 - protein, 388 aa, unidentified
MFFLGIDIGKNTHVASLLDEKAKIIFKAYSFANTLDAAEALLVKLEPYKDSLEIGMEATGHYWLSLYSFLAEHKFIVHVLNPIQTDGWRKGIEIRKRKTDVIDSVLIADLIRYGNFLETSLADEDILSLRNLSRFRVYLVNSVSDLKRKAIAVLDQIFPEYASVFSNVFGQTSKELLKSLSLPSDYENLSATKIEEVLSNITQKKKASKTISTLSDKASRSFGISFCKDSFAFQLKLIIEQICFIEEQIASVELEIDQLMSKLGTNIKTIPGVGSVIGAVILGEIGDIERFDNPSKLVAYAGLDASVSQSGEYEASSGKLSKRGSPYLRKALYMAAQRAGFFDPVFHAYYEKKRNEGKHHLVATNAVARKLCHTIYAILKKDVPYEVQ

SEQ ID NO: 98780 - protein, 367 aa, unidentified
MTNIAKLRSGEAVFSALYKTAVGIDVHEKKMVACYQSSRFGNGELKTEHRDFGTTQRQLEELTAWCKNLNPEIILFESTGVYWVSLYEKLEQSGLAPDKVAVLNGRDVKAVRGRKTDWADAKRLTEIGRYGAFKASFIPSKQVRDLRFMFRSLSALKKEKQRTVNILHKLFTCSGLRASQVFSDIRGKAATVIMNAVIAGVQGAELMKVIRSNCSRLKASAEDIYAALQGDRASPLWHIIKIFSEHYRHTLEQYQALFELIEDLIKPFAQTTALLGTIPGIKQTTAMGLVCELGDDLSKFTSVKHFCSWLGICPGNSESAGKRYSGKCAKGNKYLRTLLIEAAQGVALSKKRLFIRTVSNVKRTSRT

SEQ ID NO: 98781 - protein, 419 aa, unidentified
MQRIETKNAKNINGQALVVAVDIGKSVHYGYFRAPLGEEVKPFPFANTHKGFQEFWQKLSQFQRQQGLEECVIGFESTGPYAEPLFHYLRSQEAKLVQINPLHTKRLKELTGNSPNKTDRKDPRVIADVISLGHALTLVVPEGAAAELRRLIHARERAMKRRTALFNQLHYLMAVVFPEFLEVMKKISTKTAMYLIKNHPTPQHIVAMGLESLRKVLKKMSCGKITEERARRLFEAAQESIGIREGQQGILIEIRYLISAVEEENGFIADLEKQMFFSLNQIPYSHSILSIKGIGKITAAGLIGEVGDFRKFKTIAEITKLAGLDLYEISSGKHKGQHRISKRGRSLMRKLLYFAVVNMIRSHGLLHKPWQQMVQRGMPTMKAMVALSRKLLRVIFALARDNTIYQENYTQTNTYKLAA

SEQ ID NO: 98782 - protein, 320 aa, unidentified
MPKILNVIHKSCCGIDVHKRNVVACILKADEFGEYTDTVKTFSTMTSDLENLRDWLKEQNCEKVAMESTGIYWIPVFNVLEEHFEIILSNARQIRNVPGKKSDPNDSRWIAKLLALGLVNSSFIPPKDIRELREMTRYRTKVVSMRTSEKARAHNILESCNIKLASVATDIYGASGMAIMQSLIENAEESNPEELAELAKGVLRNKIPDLIKALTGKMDKHHAMMLQMVLDHLAYLNEQLVELDYMIEEKCKPYQQEIELLDGIPGVDVTSAQAIVAEVGADMSVFETPERLASWAGLSPGKNESAGKKKVSEPVQVINI

SEQ ID NO: 98783 - protein, 367 aa, unidentified
MRKISTVAAKESSDFSQPKLTIGLDLGDRSSWYCVLDERGELQGEGKVSTTAKAMRGAFHGMPRSRIALETGTHSPWVSRLLSELGHEVIVAHARKVRLIGESRRKDDRRDARTLARLARIDPQLLSPVKHRSAQAQADLTVIRARAGLVRARTALVNTVRALAKSYGERLRSCNVRNMDPEKAEGLSPELQAALQPLLGTIESLSAGIREYNQRIEALAERSYPEVALLKQVKGVGTLIALTFLLTLEDPHRFRKSRDVGCYLGLQPGRRNSGQSEPQMHISKEGDPYLRTLLVQGAQHILGPFGADCDLRRWGLKLAERGGKSGKKRAIIATARKLAVLLHRLWISGDVYEPLHNSRQLVVSAVA

SEQ ID NO: 98784 - protein, 426 aa, unidentified
MFVESDEDEQIIERVAALDIGKAEIVCCIRLPRPDGRKGRVEEVSTHSTMVPSLCELANRLVELGIQRVVMEATSDYWRPPFYLFEAHGLDPWLVNAKDVKHLPGRPKTDKLDAVWLCKVAERQMLRPSFVPPADIRRLRDLTRYRADLVGVRTAEKNRVEKLLEDACLKLSVVASDIFGVSGRVMMAALIDGQRDPKMLAAMARARMRVKISRLEEAFAGLSLGTFDDHHRFLLARMLARIDAVDADIAAVDDQIGDHLAPFADAVVRLDEIPGIGPTAAAIIIAEIGLDMSRFPTPAHLSSWAKFAPGINSSAGKTKGNGSTGHGNRYLARVLGEAAVGAGRTDTFLGARYRRLARRRGKKKAIVAVGRSILVIIWHLLADPNTCYHELGPHYYDRHVNTAAKRRNHIRQLEALGYKVTLEPAA

SEQ ID NO: 98785 - protein, 339 aa, unidentified
MELYSAIDLHSNNSHVAIIDDQQNRVFYRKLANDAELIANAFAPYRERLKGIVIESTFNWYWMADLLIEKGYSVHLANPCGIQKYSGLKHADDKHDAFWLAQMLALKILPEGYIYPKEDRPLRDLLRKRVHLVRVRTSLVLSLQNIVMRNHGIKIRSNDLKKLTQDPVAKLLKDQEELALAGRASKETIDFLSRQIQRIETAVRSKTLLKEPFCKLLTLPGVGDILGMTILLETGPIERVTAVGHYVSYCRKVPSRWTSNEKTKAKGNTKNGNRYLSWAFSEAADHARQTHGPSRNFYNRKLNQTNASVAHNALAHKLARAAYYILRDHVEFEEAKMFR

SEQ ID NO: 98786 - protein, 410 aa, unidentified
MNTLYVGIDVSSKNNVIYLMKPDGSKHSNFKVANSLNGSKELVKRIISALNSLELTALSIGLEATSVYGDNLVYFLREDGSIAPYNKQIHVLNPKQVKKFKDSYNDLPKNDYIDSFVIADCLRFGRINKEVYLDDYRYKALQNLTRARYFAVQNLTKEKQRFLNYLFMKYSSMTQEKVFSCKYSTTAFAVYEEFESAEQLAEMDLHDLTEYIKNTGKNRFPDPDAVAKAIQKAARGSYRLPKTINDSVNQVLSISISSMRALESQIKEFDKAIEEQVKLIPNTLQSIPGIGPVYSAGIIAEVGDINRFKNQASMAKYAGLAWSQYQSGDFEAEHTHLIQSGNRFLKYYLCEGAWSHVCCDTEYKRFYDIKYKEVNRNQHKRALALTARKFARLVYSMLKTNQLYKAPVSK

SEQ ID NO: 98787 - protein, 343 aa, unidentified
MQAITTIGLDIAKSVFQVHGVDAGGQVVLRRQLKRRYVLAFFGKLAPCLVGIEACASSHYWARRLQALGHNVRLMPPAYVKPYVKRQKNDSTDAEAICEAVSRANMRFVPTKTPEQQSGLVLHRTRHLFIRQQTSVINAIRAHCAEFGIVAPVGRRGVEELLNVIANAKDEQVPAIARACVVALGAQLHRVKQQILEFDRMITAWHRCCDTSRRLDEIPGVGPALATALVASVANPRAFRSGRDFSAWIGLVPKQNSSGGKPKLGSISKQGDRYLRGLFTAGALAVIRYAKIHGTRHRPWLTALLARRPIKVAAIALANKIARMAWAMMTRGEHYREPIALGA

SEQ ID NO: 98788 - protein, 371 aa, unidentified
MEHTRFIGLDIHKERISVAVAQSGRSGAVEYLGEIINEPGAISKLCDRVRRSGKPLAFCYEAGPCGYGAHRQLTGLGHRCDVVAPSLIPTKAGDRVKTNRRDATLLARLHRAGELTPVWVPDADHEAMRDLIRLRSVVRQIVTRARQHLQGFLLRHGRKHGGGTAWRMAYRRWLSTLAFEHPAQQIAFQDYVDAVMDAERRLKRVEEQIFSLLPDWTLRPVVDGLQAMRGIALINAVVLVAEVGDFTRFSNPRQLMAYFGLVPGERSSGETVRRGGITKTGNTHARRALVEGAWAYRMKARIGRHKVDRIEALPKVVRDIGWKAQVRLCARYRRLSARGKTANVVNVAIAREMVGFIWSIACTIQSTPKAA

SEQ ID NO: 98789 - protein, 356 aa, unidentified
MEKLTTVGIDLAKDVIAVCVLDVHGAAIERRVFRRDAFERWAEQLPASNVAMEACGSAHHWGRWFAARGHTARLIAAEFVVPFRKGGKNDTADAEAVAIAARQPTMRFVPIKTIDQQAILAWHSAREGWKEERTALLNRMRGLLAEYGVVIARSADRFLAALPKLSEDSRLPDPVRVLVLEAREQFAALHARLARCDAQIAAHARNSPAARRAGEVLGVGPVTSSALAAMVPDARVFKSGRQFGAWLGLTPRQHSSGGKTRLGRISLRGNVYLRTLLIQGARSTLQAAINTQPSRASRLQRWIIELYARKGYYKTLIAIANKHARILWAMLAKDEGYDAAAWQHHPMHQPPLTGNA

SEQ ID NO: 98790 - protein, 349 aa, unidentified
MIARSDAACFVGIDLHKDTLTACVVRGRDREVSYVKIACKCRDQIRSFFGSLPQPSAVAIETVGFYRWLWTELEPLAGQLVLCDARGARALAGRRIKTDREDALNVALLLADGRLPLAWAPPENVQVLRNWTRHRNGLTRQHAKVLHHVRSILNRLNFPGPVRLDAAALQRYLLAGVERLPDDDVTMLWQHQRRLVEIEQDRAQSERRISELMRAPEFVRMRVILESVPGVGLVTAATVIGEIGDFSRFPNSKAIGRYAGLAPTVYASGNSSRLGHISKTGAPDLRWVLQQAAWTAIRCDAGFKKTWLKIAKTAGKKAAAVAIARKMLVLMWTLVRKDEPYKSREPVAA

SEQ ID NO: 98791 - protein, 332 aa, unidentified
MHYAGVDLHRRFLVVATEDESGRKGVVVKFKCEEPELIREYFSQLGEFKAVIEASSSYRWLYDLISSYGAVVLAHPYRLRAIVSGRAKTDKLDARMLARLLRADLIPTAYIPPVDYQALRDLARARARLSREATHAKNELHALLGKANLHSPYRDALCKRGRKWITEQELSPVARMISDELFLRLAHFEVELKKRDAQLEDMSEHFPEAEALQVLYGIGLYSALLIIGEIGEPWRFADSRKVGAYAGLTARVSQSGDSCRHGAISRQGSPWLRWILVEAAMKLVRRDRQLGNFYQRIRKRSGVKIARVAAARKLAEICWKRLIRWHRERQIA

SEQ ID NO: 98792 - protein, 331 aa, unidentified
MKNVNQTIGIDVSKLTLDVYIKTEKVHHQFSNDSKGFKQLINWLIKRKVNLEQTLFCFEHTGWYCLLLSYFLYENNYAYCCVNAIEIKRSMGLKRGKSDKADAWEIAHYAWLRRDELVPSTPPAKNIIELQRMMSLREQLVKQLTASKNLYKGMLDLVHDEINDVTLGILKENMVQLKLQIHAIEKAMNQLVTSDKTLKDNYKLSKTVKGVGMILAMQMLLHTHNYTRFENSRQFSAYCGLVPYPHQSGTSIHGRNKIHSISDKKMKSLLSMSAISAIQHDKELKLYYQKRVEEGKPKMVVLNIIRNKIVSRVFATVNRGTPYVELSKFSA

SEQ ID NO: 98793 - protein, 352 aa, unidentified
MLIIGCDFHPGFQQVAIFDNRTGEIEEKRLQHRAEAEQFYRSLAGQEVLVGMEACGHYPWFERLLEELSMELWFGDAARVRASEVRKQKTDRRDAEHLLDLLRADRFPRIWVPSLEVRDVRQLLVHRHKQVQARTRTKNQLQAMALSCGVQKQRKLWTKAGRAELEQLPLLPYAAQRRQRLLEALDALEAEISELDRRVAEEAGQRPEAVRLMTHPGVGSVTALAMVLTLGPAERFGSAKQVGSYFGLIPSEDSSGGKQRLGRISKQGSSFLRFLLVEAGQTAARYDPQLKRFYRRLAARKNRSVAKVAVARKLATRLYLMLREDWTYAQLSQAVMQVSPSHSVAGEQEPSV

SEQ ID NO: 98794 - protein, 391 aa, unidentified
MIFVGIDVAKDTHYAAVSDDSGAVLVKPFAFQNNAEGFCLLLKKLSEFDRSKLLIGLESTGIYSENLICFLYESGFRLAVINPIQTATLRKTAIRKTKTDKVDTMLIIKSLMVNSYRLYSQRDADSLKLRTLCRFRQNLKKSKARMKIQLAEYVNLVFPEFGKFFKSGIHIAASYALLKKYSSPKEIAALRTSTLCTLLSNASHGRFGKDTAEALKSLALSSVGVKNPYISIQIAQTIAQIELLEQQIKDLNSAIEEAMESINSVLMTVPGIGAVNAACILGEIGDIKRFSKPCKLLAYAGLDPTVRQSGQFTAKSTRMSKRGSALLRYALINSAWQLTLNDTTFKAYYDLKRSQGLNHYGALGHVAHKLTRVIFKLLTSDTPFNPAKLLA

SEQ ID NO: 98795 - protein, 341 aa, unidentified
MDHYVGIDLHADNNYIAIIDHDNKRVFKKKTKNDLRLVRQALKPYRDQIQGIVVESTYNWYWLVDGLIEEGYTLHLANPTAIKQYSGLKHSDDVTDAFHLANLLRLGILRTGYIYPKEERPIRDLLRKRMQLVRQRTLQIQSFQNLVSRNLGKGMNGNAVKKLSEDDVEHLFQDKHLVVAGKASIATIVFLSDRVRELEKTIHKVAKLKDEYRLLMTVPGIQKILALTIMYETGPIERFEKVGNYASYCRCVGSRRLSNDKVKGKGNRKNGNKYLCWAYVEAAHHAQRHYECVKRYYQRKMAKTNLIVARKTIAHKLARACYYIMRNQTKFKPSRVFGMWQ

SEQ ID NO: 98796 - protein, 368 aa, unidentified
MWCGVSETLEQEESEMNATTVAVDLAKNVFELAIADVHWKILERARLTRAQFERWFDNREVDLVVMEACGSAHHWARTLRARGIEVRLLPAQYVRAYVKRNKTDAADCLALLEAARAQDIKPVAVKSIEQQGLQALHRTRSGWMSTRTRRINTLRGFCREFGLVVPEGAATGLAQIARYLADERSGLPAMLRPSMRLVLEEIRLMEARIGQLEQQLAALAKQSPACQVLLSVPGIGLLTSTAMVAAVADPRSFDSGRRYSSFLGLTPREYSSGNTRYLGRISKRGDRYIRMLLTHGARSILRAATVARRAGRQIDRLKTWALQVQARTNHNKAACALANKLARIAWAVWVKHEKYRAEPAPATPSFSD

SEQ ID NO: 98797 - protein, 337 aa, unidentified
MKVTLIGLDLAKNVFQVCGVNQAGKLVFNRQVRRNKLMTLLLQYPDAVFAMEACSGSNYWGRELEHRGIQVMLIPPQHVKPFVRGNKNDRNDAFAITEAARRPGLRTVAPRSLAQTDVMLAHKILDRRVRARNALINQCRGLLNEYGLVVGQGKARLKRELLLILEDAENGLTELGRTHLHQQLAEWQQLDDGIDALEKAIKQQVRRSEQGRRLIKIKGVGDRIASAAEAFIGRGEQYRNGRHFAANIGLVPKEHSSGGKQKLGGISKRGNRYFRRLIIQGAWSVVRYADRGEDRLSRWARQLIERRGKHKAAVAVANKLARIIWSMSYHQTEYRMM

SEQ ID NO: 98798 - protein, 336 aa, unidentified
MGQYVGIDLHRRSTTIHRMTEDGETLGVEKILSQPFELAQAIAAAGPEPEVVLESTYGWYWAADVLKDAGAHVHLAHALGNNWGNRRVKNDKHDAQDLALLLRIGRLSEGWIAPPEIRELRELVRYRHSLGRHRTSAKAQIHGVMAKNGILPVVAELWGPIGQAQLDGLELPEAYALRMRSLRELLAHIEREITKIDAQLHHRLKSDPGYQALVRLPGVGKVLGAVFVAEIGDISRFDSAKKLCSWAGLTPKHRESDEVVHRGKITKQGSRLVRWAAIEAVGNYRAKGNEKLRADYRRIAERRGKYRARVAVARKLLVLVYYGLRDGEIRCLEQAA

SEQ ID NO: 98799 - protein, 343 aa, unidentified
MSTYYYIGLDIHKRTISYCIKAIDGSLIGQGKIEADRKSLGEWVQGLPGPWIGAMEATIFTGWVYDFLKPHAVALKVAHPEMLKAITAAKKKNDRADAEKIADLLRVNLLPECHMLSEEIRELRRILRYRNHIVRTAVKMQNKISGLLMEVGVSYSKKRIHGKKYFHEILERVEEIPPSVKELLKLSRSGYEMFRSFQKRLVETLRTDSLIHDRVQRLMTIPGVGEITALTWVLEIGDSGRFTSIRKAVSYCGLCSAQRESAGKEQRGPISKKRNKHLQTMIIEAAKLAPHWNEQLAIVHERELKKGNRNRATLAVARRLVAYMLAVDKKQADFKLPAEMQAA

SEQ ID NO: 98800 - protein, 346 aa, unidentified
MKITTIGIDLAKEVFQIHGVDMHGKAVLRKQLRRSEMAKFFANLDSCLIGMEACGSSHYWARKLGEYGHTVRLMSPQFVKPYVKTNKHDVADAEAICEAVSRPNMRFVPIKNVEQQAILSIHRARQGFVKARTAQANQIRGLLSEFGIVLPLGIQSINKRMPDILEDAENGLPGILRKLLERLNDHLKELDHQVEELELQIKWWHKKNEASQKLEAIPGIGPITASAIVATVGEAKEFKNGRQLSAWIGLVPKQCSSGGKQILLGISKRGDTYLRTLLIHGARAVIRFAENKPKPENWLSKLIMRRNRNIAAVALANKNVRIIWALLAKGSTFRPDPASAACAAAS

SEQ ID NO: 98801 - protein, 356 aa, unidentified
MMKKVLKEVLGVDVAQKELVVTVGRMFDDLSIDLYAHKVFKNNEAGFVALLDWIKKLASNELKVRFVMEATGIYHQKFAFYLYDHGREVTIVLPNKISNYIRTLENKTITDKSCSEAIAQFGLERNLDQWHRPKKIFHMLQQLTRERDQVVSERVIVKNQVHAEKSEVEPNERSLQRLNERILLLNKQEKEIKADLGMIVNGDADLNTEIKRICSITGIGKLTAIIVLAETNGFELVRNKKQLTSYAGLDVKEKQSGTSVKGKPKISKKGNRHLRKAMYLPALVAVKHDKNFGEIYLRIVSRHGIKMKALVAVQRKLLEMVYVIYKSKQEYQKEYSVLKESSALNLKDQHATLASS

SEQ ID NO: 98802 - protein, 354 aa, unidentified
MMIIGCDYHPGFQQIALLDTETGELRERRLAHREEAETFYRELVAQGVGVRVGMEASGQARWFERLLAELQIELWIGDAAEIRTKRVRKQKTDRQDAQLMLKLLLEDRFPRIWVPSGENRDLRQLLWHRHRMVQARTRIMNQLQAVALNEGLRRKKGLWREAGRKQLEGFRLAPWASRRRHDLLELLDRLTPTIAELTQAIEREVEKCPEAQRLTTHPGVGSLTALAFVLIIGRAERFQCGKQIASYLGLVPAEESSGDRQRLGHISKQGNALLRFLLVEAAQVTVRSNPEWRRKFFHLAMRRGRKIAKVAMARRLAVQLYWMWRQEWDYEQLKKFSPHAGQPGTGVGVQSNTE

SEQ ID NO: 98803 - protein, 404 aa, unidentified
MHRDSLVATILSRNGTKVQREFGVTISELFDFREWLASNECKAVAMESTGTYWIPVYTVLEDSFEIAVANPYVIKHIRKKKTDQVDSEWIAELCLNDQIVPSRIFLKEDRALRALTRTREGLVKTRTDYKNKIHRDLASANIKLSSVVADIFGKSGMHCLAGKLLGMDIEDIISTIPHKRVRKNADSIREAILANLNSVQILSINIALSIIETINEKILEIDEAIKIRILNRQKDLEIVMSVPGINFVSGVTILAEIGNYRDFSNPEKLAAYFGLVPYVYQSAGKLNTGCITKQGSKHIRWIMVQVANAASRVKNSWFRKFYLRVKARRGHNVAIVALARKLLCIIHHLLINQEWYSEDIKNSKNSKRSSCRRSLIKENTVEEMIEIVKRSGYQVIKMENGACS

SEQ ID NO: 98804 - protein, 343 aa, unidentified
MQTITTIGLDIAKSVFQVHGVDAAGQVVIRRQLKRRYVLAFFQKLPPCLIGIEACASSHYWSRELQALGHTVRLMPPAYVKPYVKRQKNDATDAEAICEAVARANMRFVPTKTPEQQSCLMLHRTRHLFIRQQTAVINSIRAHLAEFGIVAPVGRKGVTELLHIVADPSDKRVPEVARVCLAALGNQLLSLKEQIVEFDRMIMVWHRSNETSKRLHYIPGVGPMLATALVASVADPRTFRSGRNFSAWIGLVPKQHSSGGKDRLGSISKQGDRYLRSLFVAGALAVIRYAKIHGTKHRPWLTALLARRPTKVAAIALANKLARMAWAMMAKGERYRQPVALAA

SEQ ID NO: 98805 - protein, 405 aa, unidentified
MKLYIGIDWSQIKHDICFVNTKGAIQSQLVIPHSQTGFWEFEQRRKRLGVPAEDCLVGLETSHSILVDFLWDRGYANIFVLPPTLVKGSRTRMRSSAAKDDTGDAYLIADILRTDHGRLQAWQPDSGLTRQLRTKVRFISFLTRNIVRMTNRQRAVLLRYYPVAAKLFSSLSTLISQHFILAYPTPQAAAALDLESFRKFARQHGYTHKHKLASILAKLDQDDPQADIDIIGACQDEAQGLAHVLLDMIRLKRDNLKQLQQLLDLHPDQNIFASLPGTGVYLQAALISKFGDDRGRFPAPGRVQAIAGTSPVTIRSGKSKYVRFRKSCDYEFRHIVQQWAKQSLRSSVWANAYYARVRPNCDSESHAFRCVANRWLAILWRLWQDHNTYDETYHLKQRALRSQPR

SEQ ID NO: 98806 - protein, 342 aa, unidentified
MFYAALDVSLRSVAICIIDQDGKVRLERSVPSEVPDLVRCLREFGEPIHQVGLEAGTLTQHLTYGLTEAGFDVVCMEARQVNAALSAMRNKTDKHDARGIAQILRSGWYSRVHVKSIESHHLRALISCRKVMQRKCIDLENEIRGLLKIFGVKLPLRLSRGAFDIAVRDTIQSDPALSHALLPMLQARLALFDTFTELDRRVRKAAHADPVCQRFMGVPGVGEITALSFKAAVDDPARFKSSRTVGAHFGLTPRRFQSGEKDNPGRISHAGDADVRATLYAAANAMLMRSIRWTSLKAWGVKLMKTKGRRRAIVAVARKIAVILHRMWVDGSDFRLGSEAAA

SEQ ID NO: 98807 - protein, 312 aa, unidentified
MYYVGLDVHYRTSTYCILNAHGRELKCETVRGHWPKLLDRLATIKGKWTVCFEASCGYGYLHRELSRMAKRVVVAHPGQLRLIFRSKRKNDRVDSRKLAKLLYLDEVPPVYVPGEDVQSWRELIEHRRRVVDRQTACKNAVRTLLRGHGIIAAKGLWTKKGLAWLSQLPMPTAASQLKRDMLLAELADIKRLVRTVTKSLDEMGRRHPGVALLRTIPGVGMRTAETIVAYIDDPKRFRRSSQVAAYFGLIPCQDASAGVNRLGHITKQGPATARKYLVEAAWQGVYRSPKISMEEQRKGKQDQETSEGKTDM

SEQ ID NO: 98808 - protein, 365 aa, unidentified
MKKGSTAAATSKRNFDQKLTIGLDLGDRSSWYCVLDEAGEVIHEQKLGTTPKAMKEVFAAMPRCRIALETGMHSPWVSRLLGELDHEVIVAHARNVRLIGESRRKDDRFDAMTLARLARIDPQLLSPVKHRSAQAQADLTVIRARASLVRARTSLVNAARGLTKSYGERLRGCNPRNLDKEKAQALSPELQAALGPLLQALESLSERITEYNRQIEAVAQQRYPQTALLKQIKGVGTLIALTYMLTLEDPHRFRKSRDAGCYAGLQPGRRNSGQSEPQMHISKEGDPYLRTLLVQGAHHILGPFGTDSDLRRWGLKLAERGGKAGKKRAIIATSRKLAVLLHRLWVSGEVYEPLRNTNRAMSAAA

SEQ ID NO: 98809 - protein, 387 aa, unidentified
MPQPNDLSRSLVALDQDSTIIAVVEMSQSSWLVAGMLPGIERQPRKKLEPSAERLLGLLHRWRDEAVKAGRKITRIALAFEAGRDGFWLARWLRARGVEAHVIHASSVAVSREHRRAKTDRLDTELLKRGFLGWLRGERGHCTMARVPTIAEEDAKRPNRERECLVGERTRIVNRMKGTLARLGIRNFKPTLRKAAERLATLHTPEGSALPPNVSAELQRDIARLGFVISQIKEIEEARQERLEQEPETGPHAMVRHLARVVGVGIETADMLVNEVLSRPMRDRKAVARYAGLTGSPDESGAKRREQGLARAGNARVRRGMIQLAWRFLRFQKESALARWYQARTADSRAGTRKTMIVALARKLLIALWRFVTTGETLQGVILRPAG

SEQ ID NO: 98810 - protein, 372 aa, unidentified
MKEHSELFIGLDVSKLKISVALAEDGRGGEVRFFGDIDASPASIAALATKLAKREARLHFCYEAGPTGYDLYRQIIALGHDCAVVAPSLIPQRPGDRIKTNRRDAVSLAKLHRAGELTPVWVPDVGHEAIRELVRAREGAMEALRRARQQLLSFLLRHGRVYTGRTPWSKAHSSWLCGQTFEHPAHQIVLAEYRHAIEDAEVRLKRLTAQVTETAASWSMAPVVKAYQAMRGVAFMIAVTFVAEIGDVRRFDNPRQLMAYLGLVPSESSTGERVRRGGITKAGNSRARRVLIEGAWTYRFPARMSRLIQGRQDDLPKAVREIAWKAQVRLCGRYRKLIAAGKLKAVTVTAIAREMAAFLWAIGQLVVPVLAA

SEQ ID NO: 98811 - protein, 342 aa, unidentified
MDHFAGLDVSVKETSICIVDETGRIVREARVASEPQALLKVLGNPIYRFKRIGLEAGPLSQWLFSALAEAGLPAVCVETRHMQAVLKAQINKTDRNDARGIAQMIRAGLYRPVHVKTLRSQKLRMLLTHRKLLQSKAIAIENDLRGTLRNFGLKVGMVGKARFEARIQELVEHFPDLGVLVEPLLIVRRALREQIVLLHRRLLAIVREDEVCRRLMTTPGVGPVVALTYRATVDVPARFRKSKSVGAVFGLTCSKYQSGEIDWSGKISRCGDEMMRVMLYEAAQSMLRSKKWSWLKAWAMQIARRRGMKKAIVALARRLAVILHRIWIDGTEFHWTRETAAA

SEQ ID NO: 98812 - protein, 350 aa, unidentified
MEYIAFDAHKRYTLASVARPDGQLVREERIEHERGALRRFLERCEQGSPVAVETIGNWYWIVDEIEAAGCRPRLVHARKAKLMMGEINKTDRLDVRGLNRLQRNGTLPTVWIPPGELRDQRDLPRTRMVLVRQRTQLKNRIHATLAKYALHDLEVSDFFGERGRTLLRERFALLPTHTAYASRQLLAQVEALGRQVRAFEKRIQATFKPTPAIQRLLTVPGVGLTLGVVIALEVGDVARFASAEKLAGYAGTTPRVHASGGKTRFGPSRPDVNRYLKWAFVEAANAICLTRGRAPHRHVSRLYERIARRKGHAKAIGAVARHLAEATYWVLSKQEAYREPKGVGCFVHGG

SEQ ID NO: 98813 - protein, 385 aa, unidentified
MAPPARPEIVIGLDVGKSSHWACVVTRGGELLASEPVLNRENAIDGLYAQYPGALVVVDQVRNIGSLALSRARLAGIPRAYLPGLAAHGASKLFAGDAKTDERDAMVIAKTALGIPDALLPVADRPPEIEAARSLAAQRDFLTCENTRSKNRLRSILLESCPEFEAHADLSDPATLKLMAAVGGPWSISEASPQAVGALTRGCGRAKVAALVEFVGSSSRPHPAAVACEDRAVRLLARRISENAAEIESLTSEISALLSADETYRCLLTVPGIGPRTASELVVSIDIADFPSHDRLASYCGLAPRNRRSGTSISSVSASRQGNKRLKNLLVFSCNCLARSRNRWGGYYARCRDRGMPHGKALKAVARKRLKVIYAIMRDKVPYSA

SEQ ID NO: 98814 - protein, 353 aa, unidentified
MPQKLNTAIVVIGIDIGKNWFHVVGHDVRGAIVLRQKWSRGQVAARFANMPPCLIGMEACVGAHHLSRRLKALGHDARLMPAKYVRPYSKGQKNDFRDAETITEAVQRPTMKFVATKTADQLDLQALHRVRERLVSQRTGIINQIRAFLLERGIAVRQGQRFLRAELPRILAAHFDVLSPRMARLIEDLAGDWRRLNERIEGLSGEIETIARQDAGCERLMSVPGIGPIISSAMVAAIGTGEAFSKGRDFGAWLGLVPRQMSTGGRTILGKISKRGNRYLRVLFVQAAWVVLIKPKSWERHGLKSWIEAAKKRLHPNVLAIALANKLARIAWGVLAHGRDFEVRKISEAAQSA

SEQ ID NO: 98815 - protein, 412 aa, unidentified
MKKHIYRAKNVNKINWDKVAKQLSGEASVFAIDVAKEKQYALLTNADNSVSELIWWNHPEQTREVLTALEGLSCTLDIVMESTGTYGDALRHQFRQSGFSIYQMNAKRVSDAKEIYDGVPSMHDAKSVTVITRLHAEGLSKPWVELTDEERDMDALRREYDMHHTQYQRNQNRLEAFLSRHWPEIGNLLDLDSVTLESLLIEYGSPACIAADAEGAAKKIRRWGKSLLSDEKIERVIKSACHSLGQPCTAIEISYLQALAEEMRHSRLQQKQAKEALESFVQRDDGLKELSNIIGIITTGILLSCHLDPRRFDSAHSLQKALGLNLKEKSSGRHVGQLKITKRGSSTARSYLYFAALRLIKSNPVAKAWYLNKVDPRAKNKTVIAVMRKLAKALWYVGRGEPFDANKLFTIG

SEQ ID NO: 98816 - protein, 387 aa, unidentified
MPQPNDLSRSLVTLEQDSTLIAVIEMGQSSWLVAGIVPGIERQPLKKLAADQDGLLQLLHRWRKEAAQAGHPIKRIAVAYEAGRDGFWLARWLRAREIEAYVIHPSSVPVSREHRRAKTDRLDTELLKRAFLGWLRGEPKHCSMAAIPTVEDEDARRPSRERESLVGECTRIVNRVKANLARLGIRGFRPRLAHAPKRLETLRTPEGTAVPANTLAELQRDMAHLRFVKQQIKEIETARAKRLEQASEGGRDAMVRLLARVVGIGIETADMLVQEVFSRKLRDRKAVARYAGLTGAPDESGQKRRERGLAKAGNARVRHAMIELAWGHLLHQKDSALAEWYQKRTVDARGGTRKTMIVALARKLLIALWRLVTTGEAPAGLLLRPAA

SEQ ID NO: 98817 - protein, 345 aa, unidentified
MSEFYEGRQFVGMDLHRRRSVLVRMSETGEHLETVRILNDREVLADVMSRAGESPEVVLEATYGWYWAADALAELGATVHLAHPLGVKAFSYRRVKNDQRDAADLADLLRMGRLPHAWIAPPETRELRELVRHRAKLVAMRSQCKAHVHAVLAKGGIWVPMTDLFGVEGNLLLDNVTMPAPYKARIASLRRFIEAFDAEIDLFTGLAQRRLTHHAGYTAIQQIPGIGPVLAAVFVAEIGDVHRFPGPAQLTCWAGLTPSHHESDTTVRRGRITKQGSCLVRWAAIESVKSLPDTSHIGAIRDQVAHRRGNRNIGAVAAARRQLELVFYGLRDHHIRALHHPPRAA

SEQ ID NO: 98818 - protein, 332 aa, unidentified
MHGRRLERQPAVQGRSYIMANIEVHIGVDVSKETLDIFNPSDSKWSKSRNTKTATLAFVRKIKARHPGAMICCESTGGYERTLMDACREEGQPFCIMNAQQVRHYAQHLGLLEKNDKVDARTIAMAANDKKPAAFVHPTQEQRERKELWTLRATLMAARDAASNQLEHLREKGAIAAVKRLVRAYDKEIEKLGGLCRGLIVKDERDSGFVKRAQKVKSVGELTALGVVTLMPEIYILDDKKLSKLAGVAPLCDQSGKNDGARHIQKGRTMVRHILYMAALSASRHNEILSALYKRLLKAGKAKKAALVAVMRRLLCLLRRIAQDPGFIPLET

SEQ ID NO: 98819 - protein, 322 aa, unidentified
MAMLSFGGIDVSKDRLDVVVLPEEECSSVPNDAAGWAELVERLRCFSITAIGIEPSGGYERGAMRALLAAGMPVRQVNPFKLRQFARASGVLAKNDPLDARMIASFVTIMPTRPAQRQTPAAERLAEMLAIRRQLSAEKVAAENASRLLEDAMLQRLSRRRIVRLAADIDLLDKRMVEIVATDDALVHRYRLLTSMPGVGAVLACTLIALLPELGRMSRKQVAALVGVAPYAFESGTLKGRRCIWGGRAHVRQVLYMAAMSASNWNPVLKAFHDRLTAAGKLPKVVIVAVMRKMITTLNAMVRDDIAWADRLSGRHSVTTAR

SEQ ID NO: 98820 - protein, 350 aa, unidentified
MIIIGADFHPAYQEIASVNTDTGEYQEKRLAHPKEAEEFYRSLASEGHAVRVGMEASGHGRWFERLLEGLRIELWRGDAEVIRAKRGRKQKTDREDARHILKLLRKDDFPRIWVPSWENRDLRQLLWHRHRMVQARTRVMNQLQAVALNEGLRCKKRLWRAGGRQQLESFQLASWASRRRRELLELLDRLNPTIAELSQAIEQEAEKSPQAQRLMTHPGVGALTALAFVLIIGNAERFGCGKQVASYLGLVPLEKSSGNRRRLGHITKQGSSIMRFLLVEAAQVTVRSQPEWRSKYHHLLMRRGKKTAKVAMARKLAVRLYWMWRKGWDYEQWKKFGSYVGQPGNRYGVQ

SEQ ID NO: 98821 - protein, 343 aa, unidentified
MTHPRQLILGIDTHKDVHVAVVLDRLGRYLAAASFGTTDAANSELVAWTQSYGQVTSAGVEGTGSYGYRLAQHLTDQGINVVEVNRPDRARRRRKGKTDPVDAEAAARAVLAGDAHAVPKDRNGAVGELRALVVARRSAIKARTQATNQLRALLVDGDDELRRRLGPLRKAQLARACAQLAPSAGLRLALSSLGRRWLALAEEITGLDAAIATTLRRTAPRLLERHSVGVQTAAQLLITAGDNPHRLHSEAAFAAICGASPVQASSGKTTRHRLNRGGDRAANSALWTIANNRLMHDPRSHAYAAKRTALGNSRKEILRCVKRALARELYPLILDALALPRLP

SEQ ID NO: 98822 - protein, 345 aa, unidentified
MKKVVKQVAGIDVAQKELVITLGRMFDDFTIELFSYKVFKNNGSGIKLLVDWVNKLTDYEVPVRYVVEATGVYHQKFAYYLVDNGYEISIVLPNKISNYIRTLELKTVTDKSCSQAIAQFGLERKLDKWAKPKSIYRELQQLTRERDQIVQERSIIKNQLHAENVEAIPNQRSLERMQSRIMFLNSQEKEIKEDIAALIKMNPDIKSTIERIKSIPGVGELTAVIVLAETNGFELIRSKSQLSSYAGLDVKEKQSGTSVKGKPRISKKGNRNLRKAVHLPALTAVKWDDNFRNIYARLISKHGIKMKALVAIQRKILELIYILFKNESIYDKEYITKNSVQTQLV

SEQ ID NO: 98823 - protein, 337 aa, unidentified
MEYFAGLDVSMAETQVCVMGRNGAVIHKAKVPSTPADIAAELARLPTCRRIVFETGRMAPMLYHGLRQLGLPVICIESRQAYQALKLLATHKTDHNDARGLAHLARTGFFKPVHVKSLPAHAVRSLIIARKKLVGQRVTLENQIRGLAVVFGVRLPRALSSTFIRQALRASEGIPGLSAAMQGLVAARTAVLAAIVAIDGDIRRMVRASDACRRLMSIPGVGQLTALAFTAAVDDPGRFRRSRDIGAYLGLVPRRHQSGEIDYTGSISKCGDRRVRTLLYEAANVMLTRYKGALKLKEWAFAVAKRSTMRKARIALARRLAIIMHAMLRHGTEFKPA

SEQ ID NO: 98824 - protein, 339 aa, unidentified
MKAYAGIDLHSSNNYTGVIGDQDQRLFGKRLPNRMDSIISALEPFKQTLEGVVVESTFNWYWLVDGLKEHGYKLHLANPSAIKQYEGLKHTDDRWDSFWLAHMLRLNILPEGYIYPKEERPVRDLLRRRLLFVKHRTAHILSLQSMISRNRGTRMSCRAIKRLDQGDAEIFFDQPHLVLAAKSNIAVIHFLTEKIRGIEKAVKSHITLREEFSYLLTVPGIGDILALTIMLEVGDVNRFPKVGDYSSYCRCVKSERLSNGKKKDENNRKNGNRYLAWAYVEAANFANRFCPHAQAFYQRKMAKTNGIVAIKSLSNKLARASYYIIRDQVPYDPKKLFAQ

SEQ ID NO: 98825 - protein, 352 aa, unidentified
MRRPKHQTTSGEDLFVGIDLHKIRWHVTIRTSDVELFSASIPGTWEALHRVLDRYPGHPLQAVYEAGYFGFRLHDRLMDHGIPCIVTPPSLVPQEYGNRVKTDRRDSSKLAHLLAKRMLKRVWVPSDEELYHRQVIRRRRQLVRDRVRTQSRIKAELSFFGIRLEEPRGRWTQVYFETLQSIRFGNRWMQESFNRLLEQYEFLSAQIDKQTQLLRELSETELYQERVKILQSIPGVGLISAMELLLELQDVSRFRRAEQLAAYVGLTPSQYSSADKVRMGRITGIGKNTLRAILVEASWKLITKDQVMREKYERIKIRSGGKRAIVAIARTLLLRMRRMLLDGRAYALPLAA

SEQ ID NO: 98826 - protein, 315 aa, unidentified
METGPLYVGIDVSKAQLDVAERPSGERAVIPHTEQDIAALVEQLGARRPACVVLEATGGLQAPLASALAIAGIPVAVVNPRQVRDFARATGQLAKTDAIDAQILARFAEAVRPAPRPLPDEATQAFSALLTRRRQLIDMLVAEQHRMRTAPFPIQRQIQAHLTWLKQQLAMLDEDLTHRIQATPLWREQEDLLRSVPGIGPVVSRTLLGELPELGRLTHKQIAALVGVAPLNRDSGSLRGRRIIWGGRAVVRGVLYMSAVVAARRNPIIKAFYQRLRTAGKAPKVALVACMRKLVTILNAMVKHRTPWRLSAQST

SEQ ID NO: 98827 - protein, 296 aa, unidentified
MNEISIIGLDLAKNVFQAHGAGVDGSVVFRRKLSRAQLLKFLGEQPPCIVAMEACANAHHWGRAIGDLGHEVRLIPPAYVKPFVKRQKNDMADAEAIAEAASRPTMRFVAVKSEEQQAAAMVYRTRDLLVRQRTQTINALRAHLAEQGIVAPIGPAHVGRLAAVADGEDGALPAAVRDLARLLLNQISDLSEKITGLDTELRRRAGTDDTARRLTTIPGIGPITAAAITTFAPPMETFSKGRDFAAWVGLTPKQHSSGGKERLGRTSKMGQRDIRRLLIVGAVAVVRWAARKRSRA

SEQ ID NO: 98828 - protein, 466 aa, unidentified
MKIYVLGWLGAIKLYPYNVPGSVFIVFMEPYRKELTMYNKNYISVGIDVGSAFSFMTIVAPDGSVIQKPFKITHNKPDSLEKAVSAIKKAEELHSLESRTFLESTGIYHFPLFCYLVDCGFHVSIINPIITHSANNTSIRKVKNDKVDSIGIAKLGLSGDIPVSQFPAKLVLEIRSLTRKYYDLTDERSAHINKLKGDLHTVFPQYLDIFCDVTGKTSTMILRQYGTPDKILRGHKKTMIEKISKASRKGLSKAAERYEKLCAAATAAKTFGCQIDSIYFNISLTLDLIEKLDSALDSILQRIHQLVTFNKSEKFIQQIKWLDTIKGVGFLTAVTIMCEIGDFSAFRNPKQLFAYFGLDPEVNQSGKFVGTEMHMTKRGSRIARRAVFAVALASIRTKRNGEGINPYLREYYEKKSGQKPKMVALGAVMHKVCNIIFAVLRDEKEFELRSPEEHCRQYQRPALQAA

SEQ ID NO: 98829 - protein, 346 aa, unidentified
MNYIGIDVHKSICTAVVMNDDEKVIDQIIDFGTNDEGCSFIVDHYSPEDSYILFENLTTAHRVYHFFKDRGYRVEGLHTGHGCVAEISKTDFKTDLEDATKLARMCKDHFTGRREYALAHFADIDSMKAKELCRVMNDCSEQRDKLNLRIQAYMDLFDIHLPKGLKNVYTNKAMTYLKSLNHPALTIMVEEMGSAMAHIMTAREGLESLFKDNEDVKNLMSIKGVAIQTAATIYTAIDGIERFETPESLVSYFGLKITRHESGGDRDLHGHINKRGDPLVRKYLANVVVKHSMYYPDSDLAGFYKRKKEVMPHWKAVTAAMRKLVCIIWAMLTRHQVYRFSSPVKA

SEQ ID NO: 98830 - protein, 346 aa, unidentified
MKVLIGVDPHKASVAVAALDEATGELLERGAFPQDRAGLRALERWAERFPERRWAVENAGGVGRHLAVRLAGSGESVVDVPPKLSARVRVLSTGNARKNDRVDALATALAASRNERLAVVDPEAASEALRLLSERREDLVAERTRALNRLHGLLRDLVPGGVARTLSADRAARILRGIRPKGTSARLRRQLASEVLRDVRTLDRKIADLNGRIEAEIEASGTTLTEIFGIGSILAATIIGTVGEVGRFPTKAHFASYSGTAPLEASSGEVVRHRLSLAGNRKLNYALHMVAVCQARSDARGGTYYRKKIAEGKSRKEALRCLKRRVSDAVFRSLMTDSQAPSRSAA

SEQ ID NO: 98831 - protein, 388 aa, unidentified
MNKIIYIGMDVHSSNFTLCSYEPGYGFEADKIFGQIQIKEDIFNSTVKYINKLKSMRPDVDVVCGYEAGCLGYDLHRKLKTKKIESVILAPTTMAVARNSSKKKNDYRDAITIAKCLASSAYKSVYIPDEKDEDVRDFIRMRDDHKTALKQIKQQLNAFCLRHGHHYDKTKWTGLHLNWLRKLELSKLQRETVEEYLATYETLTSKIAALDVRIEDIASEERYAEKVNKLKCIKGIKTHTALSFVCEIGDFNRFKSADKFAGFIGLVPGECSSGNTERMLGITKAGNRHLRRLAVEISNTYRRGAVGRKSAALKERQKDMPKDVVAYADKATNRCQRKYQRMMFKGKNSNQAVAAVARELCCFIWGMMTGHHSRTAQAEASVYRSELD

SEQ ID NO: 98832 - protein, 473 aa, unidentified
MAKKGKKNKPTPENMPMIHPHAAGIDVGAEEHWVCVPTDRDAQPVQKFSAFTCDLHRLADWLKACGITTVAMESTGVYWIPLFHILEARGFEVALVNARHVKNVPGRPKTDRFDCRWLQKLHTYGLLAPSFRPPEDVCQLRSLLRHRDNLIRMTVKHIQHMQKSLDQMNLHLHHVISDLTGVTGMRIIRAIVAGERDPRTLATYRDYRIQSSEDTIAKALEGDYRPEHVFTLTQSLALYDFTHQHIAACDQEIERVLSTFDSLVDPDEHPLPPPTTAHRQPQRNEPAFDLRTHLYRITGVDLTQVPGLQAPTIHIVLAEVGLNMHKWPTDKHFASWLGLCPDNQISGGKVLSTGSRRVQNRASRALRMAAQSLRNSPSYLGAFFRRMRSKLGPAKATTATAHKLAKIIYHMLKEKTPYQERGAAYAIQKEQERKIRQLRKQAKHLGFALVPQTSHEHTSRSKRRVKRMQKHPL

SEQ ID NO: 98833 - protein, 347 aa, unidentified
MVHAGLDLSRRKVDVCLIGGDGEVLGEFACPCDHDGLRQLVERVGLGLRVRAVIESMSGARFVHDSLEQLGWEVLIADAQKVKGLAPLTCKTDRIDAGVLAVLSHRDLVPAIWLPDPRVRGERELARFRMHLVKHRSMLKNRIHSALINWGKPCPVSDLFGVAGRRLLDELEIPQPWRGSIDASLLLIDDLDAQIAKAAAELKASGVDHPYVPLLMSAPGIGWVLGFTIAAEIGQIERFASAQKLVGYTGLCPRVYQSGDKDRRGQLTKAGPKYLRWAMLEATMHALRHRAYHDRYQHTKKRLGRQRGAKVAQIDIARRLTGAIWHMLTRNQPFNPAAGGAAFRLAA

SEQ ID NO: 98834 - protein, 340 aa, unidentified
MEKRYIGIDLHRNRFTCCIRLENERTYLTEWELEDLGKFVKKLRPSDEVAVEITGNTRLFFDAVAEHVARVVVVNTNQFRVIRQSVKKTDPNDGRTLALYLSKNLLPEVRMKDKERGQLASLAQTRDTLVKLRTALKNKINNILSARGLNLPKEALSSEKKLAEVLELPFDAIVRIELRVIVEQIRSLNKSIAELEKVIGEEGSKREGHKSLSSIKGIGKITGAILLSVIGDVNDFADEGHLASYFGIVPRVSNSNETERTGRIHERGTKLGRTALVQSALIAANYSPYLKRFYEQVKARRGAGKAIIALAKKFLGIIYRTLKNKWVFEDFANFVLAEES

SEQ ID NO: 98835 - protein, 352 aa, unidentified
MKQKRNISYEGKQVFVGIDVHRLSYSISCLLEKELVFQGKFPADKVALVEFLSSRFKGSKLYTAYEAGFSGFVLHRYLEANGMSNIVVNASSIEISARDRVKTDKRDSLKLATQLVDGRLRCIAIPTLEQERKRLITRTRAQLIKERTRIRNQLRMKLNQFEYLSVHFTGVLTYQRAEEIIKSIEEAELIVVTDEYLKLWKAIDTRIRKMDTELVNQAKADKLEKVYRSASGIGKVAARVLSNELGDMSRFPNERSLFSYTGLTPAEYSSGERRRQGHISRQGSSRLRAILIECAWTAIKQDSKLKMDFERISSRAGGKRAIVAVARKLVGRIRAALRKGELYKPGHSAALA

SEQ ID NO: 98836 - protein, 378 aa, unidentified
MGWTAPRSITASMGHDGTFDHQPQNEEGPKMGVTIVGIDLAKNVFRLHGCNEQGRAVLRKQLTRGQLLAFVAQLPACTVAMEACASAHYWAREIEQLGHRVRLVNPRFVKPYVKANKNDASDAEAICEAASRPSMRFVPVKTAAQLEVQALHRVRQQLVKSRTALVNQVRGLLAEHGIVIPQGRAQLQRALARILEDADHRLSNIMREILSESSERLKFIEARLHQYELHIERLFRQDQRCRRLGEVEGVGPLIATALVAAVGNAADFKHGRELAAYLGLVPRHRATGGRTIMLGISKRGDRYLRSLLIHGARAALWAMARRGEQRNAWAGRLKLRRGTNVAAVALAHKNARVLWALLRSGQAYRAAPPSPRLVQAAG

SEQ ID NO: 98837 - protein, 407 aa, unidentified
MDMLHSRCAGLDVHKDLVVASARITEGEHIRRESARFGTSTRELLRLREWLLSRGVTHVAMESTGVYWKPVWHILEGSVKIILGNARAMRNVPGRKSDQSDSSWISDLLAHGLIKSSFVPPEPIQALRDLTRTRTQMMHERGRQVQRLQKVLEDANIKLASVLSDITGVSGRKMLLALANGASDARAMAKLADPRVKASEQEIMYALEGCLNEHRRFMISFHLRHIDELDALVASLERRIEKELEPFRRVVEHLITIPGVKEDAAAAIVAEIGVDMSVFPSAGHLAVWAGVSPGLNETGGKKKPARTKKQRWLKAKMTQCAWAAVKKRDSYLCARYHRIRARRGKQKAIVAVAATMLHAIYQMIQNDVDYQDLGADHFNRFDRERAAKRLRKRLEKLGYAVELRKAA

SEQ ID NO: 98838 - protein, 414 aa, unidentified
MKEGVTLNQTLFVGIDVAKLTNHVYCLNLNRDKLLSTNIPNTQDGANQIESLLLKLLEKYNLTKVIVILESTGVYSAHIATYLSASKYLSLFETKVYIINPKISKNYRKSFADMDKTDPKDAYVLADIARVGRCNELTPFKGGQRLALERLTRHRLHIAEKLSNEKVYALNNVFLKFSNFETLFSNNFGTTAVDLLLEYKSIDDIINSSLEDLADFVAKSSKNRFDSSIDVATNIQKAARASYRLDKVAYDPINLSLASSINVIRCYQNELKEIDNAISNQIAGFNHDHFQVLTSIPGIGKVYAAGILAEIADINQFDSHSALAKYAGITWRKNQSGKYTADDTHMTKTGNKYLRYFLMEAANLARINIPEYRDFYHKKFNEVTTHQHKRALALTARKLIRLIFGLLSTNRLYK

SEQ ID NO: 98839 - protein, 426 aa, unidentified
MSITQNEKISQVKNTTLVVGIDISSETHYARAFDWRGLELSKIFKFESTSYGFENFSEWLAEICKTNQKDNIIIGAEPTGHYWFTLAEYLKEHDIKFVFVNPMHVKRTKELDDNHPSKNDRKDPKVIAKLVIEGRYLIPYIPEDIYAELRIMNENRMRINREMIAIENRIKRWFAIYFPEYKNVFGNWECDSSIEVLINAPLPADAVNMGAEAINGLWRAKKIRAVGMKRANLLVETAKSSVGVKHGASDARCEISMLIEDYLRKKEQMQRVVEILETLCIQVPNAEKLLNIKGVGILTVASFFGEVGDIRRFDSPKQIQKLAGLAITENSSGKYKGRSCISKRGRKLLRYTLFQAVMSMTMHLPEFRELHRYYTTRDKNPLKGKQSKIALCCKVIRIFYALLIKGTEYDSQKLMKDIVRPELMAA

SEQ ID NO: 98840 - protein, 366 aa, unidentified
MKKTSTVQAFRSEIFKEQKLTIGLDLGDRWSFYCVMDEAGQIILEQTLPTTPEAMKQTFGKIPRSLIALETGTHSPWVSRLLTELGHEVIVAHAQKVQLITKSNRKDDRHDARTLARLARIDPELLGPVRHRSVQAQLHLTVIRARAELVSARTALVNAARGLVKSYGQRLPKCGTYQVSEKLAEGLSAELREVLVPLFKEIESLNGHIQEYDVRMEKIAKEVYPEVSLLKQVKGVGTQIALTYVLTIEDPYRFPKSRQVGCFLGLRPGRRNSGESEPQKGISKEGDRYLRTMMVQGAHYILGPFGEDSDLRRWGLKLAERGGKNAKKRAVVAVARKLAVLLHRLWVGGEVYEPLRNSQKAMREVA

SEQ ID NO: 98841 - protein, 336 aa, unidentified
MCKRIWIGVDLAKASFHAALAPVEAHPQDWARLLNREFEHSAEGIEALCAWVERLGYGREQIAGLCVEATGRLSWSFAEGLGHRLGEVSIVNPARPVQFAKSVGLREKTDRSDACVLALFGVALRPKPRPLPSERQHQLRELAGLYTTTRRDLTAVINQLKEPTRSPFVRRRLRLRRRQLERDLAAIEEEMDCVLAQDPQVAEDARRMQTIPGVGPKTARMLLAHLGDLRQYTRAELTARAGLYPRQYQSGTSVHKRPRMVKGGGQAIRTALYMASLNARRFCPHLRDFAQGLKRKGLSNMAILGAVMRKLLLLIRTLIVGEIDYNPNYQPNQTNT

SEQ ID NO: 98842 - protein, 396 aa, unidentified
MYSFFVGIDVSKDSFSVCGLDTKEEVIFSLVAAMDRIGLSECIKIISSHSEDPSRVVVAMESTGSYHVNLFSFLTSQGIRTIVVNPLLIKNFSRLSLRKTKTDKKDAHTIARFLFGQRGSLDTFFTHQHKDLKDIARERESILKLIGSTKNDIKRMLKSTFPEVERICNVFGDVMLLFLKKYPSARCIRDANPENVIQAFQHKDKRLRITTPKEEIVKAAQDSIASLHPAIEQILPGKIETLLFLNDRLDEVTNMLVVWCESVMKEDLAILMSIDGINTKTAAPFLAEMGDHRNYETYKRFIAFSGLDPSIHESGAFTGISKLSKRGNRHLRRVIYLMTFCVIRIKGPFKSYFLKRRNEGLPFKKALFATAHKLIRVIFAMLTKRTHYVSGEMITG

SEQ ID NO: 98843 - protein, 320 aa, unidentified
MLSFCGIDVSKDRLDVMVLPDEYSSSVPNDPAGWAILVEQLRGFSITAIGIEASGGYERGAVRSLQAAGMPVRQVNPFKLRQFAKASGVLAKNDPLDARMIASFVGIMPTRPAQRTTPAAEQLVEMLAVRRQLSAEKIAAENASRLLEDPMLQRLSRRRITRLAADIELLDKRLVEIVATDATLAHRYRLLTSMPGVGPVLACTLIALLPELGGMSRKQVAALVGVAPYAFESGTLKGRRCIWGGRANVRQVLYMAAMSASNWNPALKLFHDRLKGTGKLPKVVIVAVMRKMITTLNAMVRDDIAWADRLSGRHSVTTAR

SEQ ID NO: 98844 - protein, 351 aa, unidentified
MIILALDLGKNKTVGCIFDTADNKFRYKKIKTVAFALINLVEEAKPERVIFEIGTSAGWVYDIVHGQGIGDIQVANPNHEGWRWRNVKSKTDRLDALKLAKLSMVDQLPLIHMPSAKVREHRALIHYRGQLVSRRTRIKNTIRSLLHRIGLEMPAGKNGWSKKAVAELAEISCPTEECDIAQLWRCELHEELIGLEAAEQSLARVEKRLDAIGESDERIQRLRTMPGVGPRLSELVVAVLDDPHRFQNGGKASSYVGLTPRQYQSGQMDRKCHISKQGHRQLRQMLVEVSWIALKYNPQLRAFYHRVCRGQKSRRKIAIVAVARKLLVYCWAMLRDGTNWTPVVTDMQQAS

SEQ ID NO: 98845 - protein, 357 aa, unidentified
MTQSNRISFKGQNIYVGIDVHLKSWSVTILSETSVLKRMSQGADPDALHRFLTSHYPEAEYYSVYEAGFCGFWIHDRLTELGIHNIVVNPADVPTMSSEKLRKTDAVDSKKLAVSLRAKQLKGIYTPDREALEIRSLIRLKNSITKDMTRQKNRIKSQLRYLGIAMPTAYLEPYSHWSKRFLNWLREVEMSTPSGRHTMDILIMQLEALREQKAEMTRKLRALSHTERFEETLHLLMTIPGIGQATGLALMAEIVDITRFSNAEQLAAYVGMIPMCHSSGEHEGVGDITLRKHAILRSNIIEAAWVAIRKDEAMQLCYLNNCKRMVPSKAIVKVARKLVNRIYFVLKRHQPYVNAVA

SEQ ID NO: 98846 - protein, 343 aa, unidentified
MDEYDGRQFVGIDLHRRHSVIVRQTDTGERLSAVRIVNDPVALGLQLEEAGPDPEVVLEATYGWYWAVDVLQAAGATVHLAHPLGVKGFRYRRVKNDVRDAADLADLMRMGRLPEAWIAPPETRELRELVRYRAKLVAIRSGLKAQVHAVLAKAGVLIAVADLFGVTGRQRLAKVALGPAYAQRIRSLLELIDILDGHVARFAAMIAERLDTHRGYHAIQHVPGIGPVLAAVFVAEIGDVHRFTDPAHLCSWAGLTPTHRESDTVVRRGHITKQGSKLVRWAAVEAIQRQPDTTKIALDRQRIEARRGRNIAKIAAARKLLTLVYYGLRDGHIRAVAHRQVAA

SEQ ID NO: 98847 - protein, 330 aa, unidentified
MKTNLIVGIDVSKDDLDYAEKSLSESVKMYAGQGKISNTVSKIKKYLSQYDPLSVRIVLEPTGTYSNKLQTVLDQMGFQYHCVNPKKSHHYALSKGIINKTDDQAARMLAEMGQVLDLPIYVASSQSYQQRKQLLKAIAGLEDEVRRYKNKLHALTQLAQSNEVLEQMCIEMIASFCKQKKILEKEIKQLDDQEFAKKKELATSVKGVGDLTATWLLTITNGLENFEKDKQVIKFLGLAPGSHRSGSSVNKKSGINKGCAGKIRGLLYMASQSAIRFNPACKALYERLRAKGKNYYQAIVAVMCKLIKQVFAVVKSGKTYDEKYHLKFQK

SEQ ID NO: 98848 - protein, 338 aa, unidentified
MALYCGIDLHSRDCWLAILDGGLEVVREAKISNDLEAILEVLEPHREDLEGIAVESTFNWYWLVDGLMQAGHRVHLTNTWAVKQWEGLKYSDDRHDARWLAHLLALGILPEGYIYPKQERSVRDLLRRRAFLVRKRTSFLLAMRGAFECRTGLRTTSGEVKQWTASDVESYLDDPVEALGITCLLEPMKALDGQIRIIEKEALGRARLRNEFAPLLSVWGIGKVLALTVMYEVGEITRFKKVGNFASYCRLVKTARLSAGKRKGSGNARNGNPYLSWSFSEAAHFAVRYHPVAKKYFQRKMSNTNGIIAIRALAHKLARASYYVMKDQVDFEPEKVFG

SEQ ID NO: 98849 - protein, 357 aa, unidentified
MDGFKQLLQTIRDCTKKSDKIKVGLEATGHYSYNILGFLLDNGLPTYVINPLHTNLYRKSLSLRKTKTDRVDARTIATMLLSDVDLKSYTDIAYHNEELKSLTRYRFDKVRERAKLKQSVSRLVTILFPELEKLVPSLHIASVYALLSEYPGAKQISEIHLTKLTNLLATASKGRYGKDKAIQIRDAARTSIGSVMPAKFLELKHTIKLIRELTSEIDEIEVSIQKIMDELNPPILSIPGVGIQSAAMILAEIGDFSNFESPDKILAYAGCSPSTYQSGKLTNCYAHMEKRGSRYLRYALYNATKYVCHWNPVFAEYLAKKRAEGKHYNVALSHATKKLVRLIYALQKSGKAYLVAA

SEQ ID NO: 98850 - protein, 317 aa, unidentified
MIYLGIDIAKLKFDVALLTQGKFKTKVFTNDPAGISACLKWLATHASEPVHACLEATGPYGEALGCALHDAGHTVSVINPARTKAYAQSLGLRQKTDAVDAKMLARFVQTQQPLAWTPPPAALRALQALLRRLDALGEMRTQEKNRLGVAEPTVATSIAQHLEYLEAQIDALKAQIESHIDQHPGLKQQQDLLDSIPGIGSATSAWLIGELNLTRFESARQAAAFVGLTPRKDTSGTSVRGKPRLCKQGNSLLRKLLYFPAVVAMTHNPLVRALCLRLKAKGKHTMAIISAAMRKLIHIAFGVLKSGKPFDPTLADT

SEQ ID NO: 98851 - protein, 324 aa, unidentified
MIDGILGIDVSKNTLDASMSSCNKVLAKSFANSPDGWRHLLDWLIGQKIRRVHACLESTGLYSLGIACKLNEAGHVVSIVNPAQIRDFSRTKLGRNKTDAVDASHIREYCELFKPPPWSPPSHAHRQLGELQTIRAGIVAGLTEWKNRKNSGMIDVVAQSLADATISHFTRQLGAVEKAIAQAIDNDTDLRRKRDLLLSISGVGETLASVVLAELPGPDVLRSSAEAVAYTGLNPRRHQSGTSIDRLTRISKIGNAVLRAALYMPAMSAMRYNPAIVALVTRLKARGRLNPKQIVVAAMRKLLVLCFGVLKTGKPFDPALAMGC

SEQ ID NO: 98852 - protein, 452 aa, unidentified
MRASKLAKSKKMKLPKHLQHINPYAAGIDVGCRSHFVAVPEGSCEQPVREFSSFTDDLHQMADWLLSCGVTSVVMESTGIYWIPVFEILESRGLEVRLVNARHVKNVPGRKSDVLDCQWLQRLHSYGLLEGAFRPAEHVCTLRAYVRQRMTLVRYAASHIQHMQKALAQMNLQLANVVADITGATGMRIIRAVLDGERDPLVLARLRDRRCKNSEQTIARSLNGNFRPEHLFSLKQAVDLYEFYQGQIAECDRQILDQLTRFDAADPSIAVRTQSRPASLGEALQRMSGVDLTRIDGIDTNSALKIIAEIGIDMSRWKSAKNFASWLGLCPGTKVSGGKVLSAKSKPVANRAAAALRMAAFTLFKSKSALGAYLRRQRSRLGAPKAITATAHKLARLVYTMLKHGTAYVDAGQEYYEERYRTRVVQNLKRQAQKLGFSLVKIAGLQPQNANS

SEQ ID NO: 98853 - protein, 407 aa, unidentified
MDKLFVGIDVGSRDNAVYIMLPDGDKHSSFSMQNSHSGAETLVKKVVAALEKNSLSAVTIGIESTGVYGENLMHFLRADGSLGQFERNLFVLNPKQVDKFKASYSELPKTDPIDAFVIADSLRFGRITTSPYKDDYRYHALKTLTRARYHAVENLTREKQRFMNYLFLKCSGLAQEKVFSNTYGATALAVFEEFETPDDIIDMDLEQLTAFIAERGKNRFANPDEVAAAVQVAARGSYRLPKTISDSVNQVLSISISSMRAMQAQIKALDKEIERQFENIPNTLTSIKGIGLVSSAGIIAEIGDINCFAGQAQLGKYAGLAWRKHQSGTFEAQNTRLIKTGNRYLKHYLCEAAFSLVRCDTEYKRFYELKYKEINKYQHKRALVLTARKFVRLVFRLLKDNRLYITA

SEQ ID NO: 98854 - protein, 431 aa, unidentified
MQTAAFAAVHKSSRRRQSQSLLDSAIIDLETHSSTLGGAKNKNNKTQGGADMEYCTTIGADVSDRTTKICVMTKAEGGERRIVLETTCATTKAGFEEAFAKFDRSWPVVFETGTHCRWMDRLFRGMGFKAIVANPGKIPSITKSNTKNDRNDARELARLAIADPAMLHPVFLRDEVYQQMLRFHNARNVLISQRTQTINQIRGFAKSMGHRIECSSTEKFHELGKADWPKELEECAWPLMGSLKTINQKIKAYDKLIARLAERPEFKSMVERVRVVYGVGIVGSTVFIAAIGGRPGRFDHTRDIGAYLGMIPKQDQSGDKDKQLHITRAGADVVRTALVECAGVAMMSTAKDTDLKLKGLRIAMRGGRIARKKAKVAVARGLAVTMLALLQHPEREYVPLSDEGKRGFERYRAEMEYLAMQRASRMDRKVA

SEQ ID NO: 98855 - protein, 410 aa, unidentified
MIKENYIYVGIDLHKETHTAVMIDCYNQKLGEITFPNRPADFPKLVAKVKKCNTDGKTIVFGLENAYGYGRPLAVWLIDKGYFVKDVNTAISHRQAKHRGAMYRKSDSDDAEAIALATLNMLDKLPDACPNDAYWSLGQLVHRRDNIMKQRTRLVNQLHEQLCIAYPSYKSFFNDISRPTALYFWEHYPSKKYLKGKSVEDLRAELVPVSHNKCSTKTCEKILDAVASDKVKNNAYQDARDMVTLSIVSDLQHYDSQLAEVDKMLEQMYKMLGCTLTTIPGVNVITAVKILAEIGDIKRFGNANKLAQFAGIAPLHLSSSGKGKDVATKQGNRRLQATIYFLAIQMVQVSSKGTPRNSVVRAYYEKRKAEGKTSQQALICISRRLISIIYGMLKHGTEYRMPVVESAGEK

SEQ ID NO: 98856 - protein, 338 aa, unidentified
MSIIGCDLHSRYQVIAMLDTETGEIVRRRLEHEKGEARAFYAALPKPSLIGIEATSYTQWFERMAGEQGHQLWVGDAAKIRASETRKQKYDGRDAEHLLDLLLTKKFPRIWVPTRQERDLRQLLKHRDKLVHMQTAVKLQLHFLAMSQGICRKRKLWTEQGRALLERLSLDPWASRRRQELLELLDSLAPRIEPLDQAVEREAQQRPDAVELMKQKGVGPVERFPNSRKLVSYLGLNPAEHSSGGRQRLGHISKQGNAMLRWLLVEAGQSASRFDPQLRRKYQRLKSRRGANVAKVAIARHLAVHLYWALRQMKDASPPVRMPGSPVSSVVEATPSIL

SEQ ID NO: 98857 - protein, 315 aa, unidentified
MSKHNIVCAGIDTGKNKLDVAIAGSDKEACFANCPHGHAGLVAWLRRHQVERIGIEASGGYERAVVAELRRNGFVVIVFQPIQVRAYAKFHLRRAKNDKIDAALIAACTAATEKIHAPPDPRLVALADHQTLIDHIIDDIAKLKNRRESCRDERFRRLWKEEIARLKKMERAEFKRLVAAIRQHTDLGQRLDLIASVDGVGLPTAVAILVRLPEIGRLSREEIAALAGLAPYDDDSGERSGDRHIAGGRERLRKTLYNATLAAAFHWNGQLIAFKDRLLAAGKLHKVMRVACARKLLIFINAVVARGTPWVSSPV

SEQ ID NO: 98858 - protein, 330 aa, unidentified
MKQYKYYFGVDISKKTIDITLAKEMQLTHRQFSNDSIGMDELMQWFKALNLDYGSTLFCMEATGLYCFTLTQFLATHSIDTWIEHAAQIKKANALDRGKNDKIDSRRIALYATKNADRLRLWKPMGSTIEKIKHLASLRERLVETKKRLVTPIKEFEQVGNTAMAKLLTKTIKKSLAAIDKDLKNVEASIIDIVGEDEHLKQLYKLITSVVGIGFVTAINLMVYTNGFTVLKDTRKLACYCGVAPFEYASGSSVRGKTKVHYMANKKLKCNLHMASLSAVKLDADLKAYYERKVAEGKNKMSVLNAIKNKLLARVIAVVNKGEEYVKKTA

SEQ ID NO: 98859 - protein, 353 aa, unidentified
MNNSRNKAEVILGVDTHLDTHVGVLLNAQGHLLGCLMVTTNISGYERLVTWTNSFGCLKRAGVEGTGTYGAGLACVLRKHGVEVFEVNRPDRSKRRLQGKSDPTDAENAARSVLSGSATAIAKTQSGAAEMMRVVSVARRSAVKAKTQAMNQLRAQLVSAPQDVRERLWKSKPADCAKGCARVRSLGTTELLHTLTTTLCLLAKRWLLLADKVEKLDAILDALTHQHARRLREQFGVGPQTAAVLLSTAGDNPERLRNEASFAALCGVNPLPASSGKTVRHRLNRGGNRAVNNALWTIAMVRMRGDPQTQSYVARRSAQGLSSKEIQRCLKRYIVRELYPLLLADLADSARAC

SEQ ID NO: 98860 - protein, 346 aa, unidentified
MEHYAGINVSLELSSVCVVDTQGKIVKEAKVASEPETLVAFFKALSIAVKRIGLEAGPLSQWLHAGLRQAGFETVLLETRHVKAALSAMMVKTDRKDALGLAQLIRLGWFRSVHAKSIASQEVRALLVARKQLLGRLIDVELSIRGILRGFGLKVGQVTRKAFEARIRELVTGQPTLERIAGAMLSARASLKVEYEKLHKAVLAIVREDAVCRRLMTVPGVGPLVAITFKSAVDDPSRIAKSKSVGALFGLTPRKYQSGEKDVTGGITRVGDEMVRTTLYEAANVLLSRITRFSKLKRWGMDVAKRRGSKRAKVALARKIGVILHRMWVDGTTYRWAAAEPIAAQT

SEQ ID NO: 98861 - protein, 349 aa, unidentified
MRFYKQPHAFYCGIDLHARTMYLCVLDHAGKKMLHKEVPSEPASLLEALAPYRTDLVLAAECMFAWYWVADLCAREKIAFVLGHALYMKAIHGGKAKNDRIDSEKIANLLRGGNLPQAYVYPAGLRETRDLLRRRMFLVHQRGKLITHIQTTNAQYNLPPFGEKLIYAKNRRALKIAERFDDPSVQKSMAVNLALVDRYEELIADLELHLERTVKVDDANTYYRLRSIPGVGKILALVLLYEIHDIRRFPTVGDFISYARLVRPSHESAGKKCGYGQKKIGNAHLRWALGEAVTLLLRESDQAKRFVARFEKKRGKGKALGILAAKLGRAVYWMLRRQQAFDVKRFWSM

SEQ ID NO: 98862 - protein, 347 aa, unidentified
MVIIGCDFHPGFQQIAMMDMDTGEVRQLRLGHREEAQGFYAGLRGRELLVGMEACGYTQWFEQMLEEMGHRYQIGDAAAIRASYVRKQKTDRRDAGHILRLLLEGRFPALWVPRAGERDARQLIVHRHKRVQMCTRVKNQLHALALNQGLRLRWKLWSREGLEQLRALPLLPHASARRADLLKQLEEMNAEIERLDGAVRQEAASRPAAVRLMSHSGVGPVTALAFVLTIGDARRFEKSRQVASYLGLIPSEHSSGGKQRLGHISKQGNSLMRFLLVEAGQSAVRKDVELRRFYMRVQHRHSTGVAKVAVARKLALRLYWMLRHTTEQAQLQPGPYAGKPVSFCGRN

SEQ ID NO: 98863 - protein, 465 aa, unidentified
MNNNKKKVRIQNKKVNGKTIDSFEVIRPNTAGIDIGSSEHWVSVHPDSAEQSVQKFGTFTCDLYSIADWLAKCNVKYVAMESTGIYWIPLFQILEEKGFDVSLINARQIKIVEARGKTDRLDCEWIRRLHSCGLLTPSFRPEPEICKIRTLLRHRDNLIKMKTKHVQHMQKSLELMSIKLTNVISDIIGVTGLAIIRAILNNQRDVHKLADLKDRRIRASKDQIAKSLQGHYREEHLCTLQLALDAVEFTKKQMCQLDRRIENILANFDSQHQDHQLSFEFDDQPLRKKKRKIQSHDADYDIDYYLRQITGVDLTAIKGVKDSALAIVSEIGLDLNKWPTAKHFTSWIGIAPKPKISGGKVITHRTSKVKSRIARIFRNAACTLRSSDCYLGAFYRHIARRKGPACAVTATARKLAVIVYHMLKNGSSYKDLGSDYILKQREKSVLRNIQRQAKSLGYSVSLTKN

SEQ ID NO: 98864 - protein, 339 aa, unidentified
MSEHNLISVDLAKNVFQLCAMTDRMKIVFNRQLKRKDLTRFMATQKPVDVVMEACYSSHYWGRCFAAMGHQVRLLPAQHVAPFVRGNKSDHNDAVAIAEAAHRPNILPVPIKTLEQSDIQSLHRMRERYVTHRTGLINQTRGLLSEYGVVALQGHRAFTQLLREVSEPEYEDLSVCLKEQLSSIADEYHYQSKRIDEITRTLSDIAHHHPLCRILLSIPGIGPINATAIYCAIGNGSQFKNGREFAVWLGLTPKQSSSGDKMSSAGITKRGNRYLRKQLVHGARAVLSRSKNKSDRLSRWTQQLVARRGVAKASVALAARIARLSWVLLQKQELYQPKD

SEQ ID NO: 98865 - protein, 408 aa, unidentified
MKTLHSRCAGLDVHKTEVVACLRRVGKRKVEREVRRFPTTTRGLFELGDWLERGGCTHVAMEATGVYWKPVWHILEDRFALVLANAAHVKNVPGRKSDVNDATWLADLLAHGLIRASFVPPPAIQELRDLTRTRKQLTREIVQHAQRIQAVLEEANVKLASVISNVLGPSGRRILRAMIAGETDAAKLATLGSERLGCPRAALVETLTGRVREHHRFLLAQHLRTIEQLEESIAAFDARIEAALAPFQDAVKRLIAVPGIGATAAQVIIAEVGDDMSRFPTAGHLLSWAGLVPRLDESAGKRRSTRIKKGAPWLKPTLVQCAWAAARKKSSYFQAQFLRLKARHGAKKAAVAVAASILTTVYHMLGDGTCYHDLGPHHFARRDPNKTAARLANRIRNLGYHVEIRPAA

SEQ ID NO: 98866 - protein, 338 aa, unidentified
MKAYAGIDLHSSNNYLGIIDDNDKRLYGRRISNDLNRVLRALEPFRNQLEGIVVESTYNWYWLVDGLQDHGYNIHLANPSAIKQYEGLKHTDDKWDSFWLAHMYRLNILPEGYIYPKEHRPIRDLLRRRLLFVRQRTSHILSLQSMVTRNLGFKMSNNDIKKLKVNDAEGLFDSSNLAFMAKNNIAAIEFLKKIIKGIEKQIKSQVKLRKEFVMLQTIPGVGNILALTIMLEVGDINRFVKVGNYSSYCRCVGSKRLSNGKKKGENNKKNGNKYLAWAYVEAAHFAKRHIPKAQRFYQQKMAKANGAVATKALANKLARASFFIMRDQVSFDENMLFR

SEQ ID NO: 98867 - protein, 356 aa, unidentified
MRYDGTVVCGVDLGDRFSRVCVLSEVSGETVREWRVATTPTALRASFGSYAPMRIALEVGTHSPWVSRLLAELGHKVFVANARKVRLISQNRRKDDRIDAEYLARLLRVDPKLLAPIRHRGAHAQVDLAVLRSRNALVKARTGLINHVRGVVKATGRRLPGASSESFAATANAALPTDLVGALAPLLEMIAGLSAAIRGTEERLSALATAAYPETALLRQVHGVGLLTSLAFVLTIEDPTRFRRSRSVGAYFGLVRARQQSGDTDPERHITKEGDPFMRKLLVGCAHHILEPFGKDCDLRRYGTSLAAGGSKRAKKRAVVAVARKLAVLLHRLWVDQATYDPFYNLNRSTRGTHAA

SEQ ID NO: 98868 - protein, 360 aa, unidentified
MLKYSVGLDISASTFNACFSVIDATQKVTAKASRKFPNNRQGFSGLVEWVQKYSHQKVLPLVITMEATGVYYEMCASYLVKKGYSVAVVLPNKAKKYLQAAGLKSKNDSIDAQGLARMGAEQSLEPWSPMEEYFYQLRSLTRQHQSLQELKTNIGNQLHADESGMYQNKLVAMQLKKLINTLDAQLSTIEKAINEHILSSKEISAKVEKICKIKGVGVLTVAIVLAETNGFGLFKNAPQLISYAGYDVVENQSGNHTGKTRISKKGNGRIRRAMSMPAFSVVKYKQAPFINLFERTIEKHRIKMKSYVAVQKKLLIIIYALWKKDEAYRPEYQMTTTREQEQESPSLSGFTEAERKLEVA

SEQ ID NO: 98869 - protein, 405 aa, unidentified
MNAVGIDVSKGKSTVTIRRPGNEVLLPPCDFPHTQSCINGLIEQIKSLDGETKVCMEHTGRYYEPVASWLSDAGIFVSAVNPILIKEFGDDSLRTPKTDKADAKKIARYTLDRWANLKQYNHMDEIRNQLKTMNRQFGFYMDHKTAMKNNLIALLDQAYPGANDFFDSPARSDGSQKWVDFVHTYWHVDCVRGRSPEAFTQHYQDWCRRKGYNFSASKAEAIYSRSSDLIAVFPKDNTTKMLIRQAVAMLNATSATVESLRQKMDETASALPEYPVVMAMHGVGPTLGPQLMAEIGDVTRFTHREALTAFAGVDPGSRQSGKHEQKSVRTSKKGSPNLRKTLFQIMAGLIKRSPADDPVYAFMDKKRAQGKPYYVYMTAGANKFLRIYYGRVKEYLSTDTEADNA

SEQ ID NO: 98870 - protein, 337 aa, unidentified
MEYFAGLDVSMAETHVCVVTRNGEVIHNAKVPSTPADIAGELAQVPLCRRIVFETGRMAPMLYHGLSQLGLPVICIESRQAYMALKLLATHKTDRNDARGLAHLARTGFFKPVHVKSLPAHAVRSLIIARKKLVGQRVTLENQIRGLAVVFGVRLPRALSPAFIRQALQASEGIPGLSAAMRGLVAARTAVLAAIVAIDGDIRRMVRASDACRRLMSIPGVGQLTALAFTAAVDDPGRFRRSRDIGAYLGLVPRRYQSGEVDYTGSISKCGDRRVRTLLYEAANVMLTRYKGPLKLKDWAFAIAKRSTMRKARIALARRLAIIMHAMLRHGTEFKAA

SEQ ID NO: 98871 - protein, 318 aa, unidentified
MNIIGLDISKNTIDATLHKTNGSIHYIKFKNNDDGLKQFRLWIKGNRIRKAYIGMEATGIYYEKAADMLSSYYTVYVINPLKIKDYGKSRFNRTKTDKADSNLIADYIKRHQDTLIPYQIPKNKALQKLINLKNQLQQHQKQIKNRLHSTEEDFIRNIHQDLIDTIQDKMEQVKIAISEQIKKQTDYNHYRNLQTIPSIGKDTASVLYAQLTEKHFKTANQFVSYAGLSPAIIQSGTSVRGRGRLSRYGNRRLKSTLYMPALCAYRFNAFPKLINNLKKAGKPKMVIIVAIMRKLAKLAYYIVKTGQPYDAERHRLNQ

SEQ ID NO: 98872 - protein, 394 aa, unidentified
MKLVGIDVGKNSHHFCVMDKENGEFNVTPTSFSNNKEGFDFLINSLKPYSKKSILLGMEDTGHYHVALLKFLLSNGYTVALINPKTTDLTRKMEGGITKNDKLDTITICDVLDTPERKKQYRITKVDRFDLYEQRQLTRHHHNLKEELNIYCNRLQKSIDLVFPEFNTLFGSKYGVIYMNLLKTFGSAEAIASTDIRTLRKCFEIKGRGNRISLTPEQLKECAKNSIGISSEVETIQIKHLVSQITLIKEQIAEIDKKIEEFSIKNNSPILSIPGISHFSGTSILAELGDIGNYSKPSQIIKFAGVAPYHYESSQYNAQHTAITKKGSKYLRKTLYQIILPVIKYNPVFKKYYLLKISQGKGHRCAQGHCIRKLLRIIYHLLETGQSFDPALLR

SEQ ID NO: 98873 - protein, 423 aa, unidentified
MKGGPYSMKLFVGIDVSSEKLDVCFLTDDDQLSILSETSIANDIEGASLTREMILEFNQNYYFDQIVIGMESTSMYSFHPSMFFHEDAELKKLNTLMTIENPFRIKQFSRMFDEDKTDRNDALRIADFLRIQRFTTSPIKEEKYMALQRLTRTRYQLIKQLTRTKQHFLENLTYKCNTLAREMRDESTSLLSATIVSLMTEDFTLDELAELPLEAFCDLLQEKGRGRFKEPKKIAKAIQRAITMNYRLGELAQESINVVLSVLVREIRALEKCIKDLDKAIEQLVVAIPEYQCLTSIPGIGKVYAAELLAEIGQIERFEDQKKLAKYAGLSWKVKQSGNYQSQNTPLTKQGNRYFRYYLVEAASSVKNYLPEYKAFYQNKYKEVPKHQHKRALVLTARKFTRLVDTLLRNHQLYTPPRSVIDK

SEQ ID NO: 98874 - protein, 392 aa, unidentified
MVVSVGIDVSKDKHDCFIVSSEGEVLADAFIIPNTMDGFHYLLQRIRHCTAPQDKIKVGLEATGHYSYNLLGFLLDNGLTTYVLNPLRTNLYRKSLSLRKTKTDRVDARTIASMLLSDAGLKPYTDTAYHNEELKSLTRYRFDKVKERAKLKSSISRLVCILFPELEKLVPTLHIASAYALLEEFPGAKQIASAHLTRLKALLESASKGHYKRDMALEIRDAARNSIGSRMPAKSLELQHTIRLIRELDVEIAEIEEQIQSIMDELHSPITTIPGLGFRMAAMILAEVGDFTRFDSPDKLLAYAGMSPSTYQSGQLKNCYPHMEKRGSRYLRYALYNATKYVCHWDPTFAAYLAKKRAEGKHYNVALSHAAKKLVRLIFAMEKSRRTYYLAA

SEQ ID NO: 98875 - protein, 410 aa, unidentified
MKVAGIDVHKKVLMVVVVDATAPEEKPTRRRFVTMPSELHRLLTWLREQAVEEAVMESTAQYWRSVWLELEPHMRLHLAQAFSNRAPRGRKHDFKDAERLVRRLIADELILSFVPSGEQRIWRSLTRMKLQLTRDRVRLQNQIECLLEEMRIKLSIVVSNLLGASGLRILHALANGETDPKRLAQLGGERLQCTEEQLVDALTGRAQPVHGAMLALQLERLQLIDQQMERLNSMIAAAMKPQQDAVMRLAEVPGLGVDSAQQIIAEVGAQAGTFASAAELTSWVGTCPGKEESAEQNHSSRSAKGNKYMRRVLNQAAHAAAAKKGSHFQIVFRRLLPRLGYQSAIWAVAHRLCRLVWKILHEGVRFIEKGVEVHPREKKKRAQMLARALRKLGYEVTITPLNQLVPKPAV

SEQ ID NO: 98876 - protein, 429 aa, unidentified
MNVYETVNCVGIDVSKGKSTIAIMRPLGEIVQSPHEVKHTLSDLKALETTLRQLEGETRIVMEYTGKYYQPIARFLNNAGFFVCAVHAKLIHDFANNSIRQIKTDKADAVKIANYGLTNWNLLRRYTNEDETRLLLKTYNRQYNMFMKQYVASRNNFISLLDQTFPGINDLFSGHRRPDGHEKWVDVAARFWHAECVSGQSLNAFTKVYKDWCDRNGYRGRDDKAEAIYLLAKESIPSLPKNDYTKAVIQQAARELRNTCLTLAELQQQMNFIASTLPEYPVVLDMGGVGTTLGPQIMAEIGDVRRFPRREKLVAFAGVDVPPYQSGQFEAKDRHITKRGSSDLRKNLYQVIGCLMQHSMEKDPVYRFVAHKKAEGKHFYSYMVAGCNKFLRIYYARVKACLNLLEQQEPDSLGDGSDGSEVVLQPLDC

SEQ ID NO: 98877 - protein, 368 aa, unidentified
MKQQTSAATETKIKGRNIIDFTGKTIYVGIDVHEKDYQVAKVFDGICLGNHRMAANHQMLIDHLNSRYPGATFKCVYESCAWGFTLQRALNSAGIECIVVHAADVSSSDKEKKRKTDKVDALKLARNLASGDLTGIHVPDEDLQKERNLIRFRKKLVGDLNRSKNRLKSLLKYQGIKIPEHLGKKNNWSYNFMNWVEQEANKDVLLKDTLLLMLEEIKLLRQLLLKTERALRKLMKERHNEKATLLMTAPGIGRTIAMQFVLEVGDIKRFHSFDALNDLIGFCPDTDSSGDMQRDRGITSRRHKQLRSALIEAAWTAIRIDPALTDAYQKLTKRMEGKYAIIRIARKLLRRMRAMLLTGQPYQTGVVA

SEQ ID NO: 98878 - protein, 391 aa, unidentified
MIYVGIDVAKDKHDCFITNSDGEVLFKAFTITNNLDGFNELHQKIASVMDDVTKVKVGLEATGHYSYNLLGYLIDKGLPTYVINPLHTNLYRKSLSLRQTKTDKVDARTIASMLMSDVNLKSYSDISYHNEELKSLTRYRFDKVKERAKLKTSVSRLVCILFPELEKLVPTLHITSVYALLSEFPGAKHIATAHLTRLTNLLSEASKGRYGKDTAITFRDAARASIGSNMPAKSLELKHTIKLIQELDSEIDEIEKEIKIIMDEINSPIVSIPGINYRMGAMIIAEIGDFNRFDSPDKILAYAGFSPSTYQSGQLDGAYAHMEKRGSRYLRYALYNATKYVCHWDPTFAAYLAKKRAEGKHYNVAISHAVKKLVRVIYHLEKTKQQYIKAA

SEQ ID NO: 98879 - protein, 451 aa, unidentified
MGKKQMSLEVVNPNAGGIDVGSKSHWVAIGQDAEDIREFGVYSEDHQELCRWLSENGITSIAMESTGTYWQTLFSALTAYGFEVILVNGKQTKNVKGKKTDIKDCQWIQKLHCLGLLSHSFLPDSTTEIIRTYSRHRQNLIKQTGQTVLKAQKYLRLMNMRLDVVVNDIVGLTGTKIITAFIAGETKGKDLAKYRHYNCRKPEEEIAKALQYNGRADYLFALKQEWETYLHIQKQISEVDVQIKKLLEDIIDQDDNKKQQVANKKSYKRKNKNTIRGTDMNQISYKYFEGIDLMEIEGVNDATIMAIISEIGLEGIKKFSSAKQFTAWLRLAPNNKISGGKVLSHHIPKGSSRLKIAFRNAANAIGNLKEGHLAGFFRRINYKKGRSTAINATARKLAIIIWNMLVKGQNYSPPTQYMFLDEKRRLGLVKRLQNQITKFDIQPEQLGFTTA

SEQ ID NO: 98880 - protein, 354 aa, unidentified
MKGTAVTIVEDKPVITGGVDTHADLHVAAALDPIGGLLGVRQFPATAAGYADLLEWLGGFGDVGLVGVEGTGSYGAGLARHLAAAGVAVVEVDRADRQDRHRQGKSDPLDAVSAARAAQSGRASGVPKGRDGAVEAIRALMVAKRSARHERTQAINQARALIVTGPDELRARFAGHTPAALAGAIAALRPRPGDVPGYATRVALRELGRRVQFLDAQLERLDELIGPLVTARAPGLLSLFGVGPDTAALLLVAAGDHPGRLRSESSWAHLCGAAPIPASSGKTSRHRLNRGGNREANHALWRIVITRMGSRPGHPATRAYVERRTKEGLSKKEIIRCLKRYVAREVYHQLRDGT

SEQ ID NO: 98881 - protein, 402 aa, unidentified
MAEGPSRFFGLDIHKEYFVAVGFNPQREVVFGPQRVSNYQLDEWVARVLTTQDAVALEMTTNTYLFYDTLEPQVHSVIAVHPPNVTLVTGAQVKTDKKAALALAQLHAAGMLEGVWIPPHPVRDLRALIARREKMVHLSTMAKNRLHAALHRNHLIVPEKPFAPEQRSWWEALSLSATEQFLVRSDLDTLAFAQKQVEQAEECLKKASAEDERIPLLVQLPGVAMLTAITILAAIGDVTRFPNAKKLVGYAGLGTRVHDSGKSHNSGRITKTGRRDLRRSMVNAANHAIEHHPHWKKEFERLEPHLGRSKAVVAIARKLLVAVWHVLSEKAADRFADPANVARSFFTYAYRVGVRNLPEGRSALSFTREQLDRLGIGQDLLEIPWGSKPHKLPASKLLPENK

SEQ ID NO: 98882 - protein, 366 aa, unidentified
MSVKNVISVGCDSHEKTLVNLIAVNREAPEQVTVSNSRRGRQKLIALLLQMAERLGGARIVFVYEASSQGFILYDELTAAGIECYVLAPTKIERSHQQKLNKNDKKDGKRLLDIIRSHVLAGSELPAVWVPDLQTRDDRETVRTRHDLRKKQTAIKTQIQMLLKRWGIEKPSEVGGSRTKSYRRWLKALSQDTRRAIGLRTALSSLIRQLEFQELELKQIDGSIDDLCQQPHLKLIVDALDAETGVGRLAAVTYATEVGDFGRFRRRQQIAAYWGVTPSSNESGEIKDRKGHITRNGSPRVRRMLCQSHWVRVKHDAHEREVYQRLVGKNPKRKKIAIVAGMRRLSVRLWHVGHRAQLQLKGLATK

SEQ ID NO: 98883 - protein, 446 aa, unidentified
MEHPRLSPTVGSTVEHVYETSLTRSLAGGTLEDVMELLHQRCAGLDVHKETVVACVRLALDGKVITEVRTFATTTAGLLALADWLSENDCTQVAMEATGVYWRPVWHVLADGELELVLANAAHVKNVPGRKTDVSDAAWLAELLAHGLIRASFVPDGATQDLRALLRTRKQLVREKTRHTQRIHKTLEDANIKLDAVLANVLGRSGRAMLDALVAGESDPERLAALAHAGVKCPPEKLRAALHGRLREHHRFLLRLHLGQIDALDAAIATIDREVEANLAPFRTAVELVSTIPGVSTLSAQVIVSEIGTDMNHFPSARHLLSWAGLCPRNDASAGRRRSTRLRKGALWLKTLLVQCAWAAARKKQSYLQAQFLRLKSRRGPQKAVCAVAASILTAAYHMLKNGTPYADLGPDHFLRRSKTTHVQHLVRRIHHLGYRVELTPLATSA

SEQ ID NO: 98884 - protein, 320 aa, unidentified
MTSKGAEKMQNDTIGVDVSKDHLDAHRLADGASRRFANDKCGHRAFMKWFAQTPVQRVVFEPTGPYHRAFERALGAAGASFVKVNPRQARRFAEAIGSLAKTDRLDAAMLARMGAMLELKARPPRSEALLELKELHLAREALVKDRTAAKNRGKVLGAPLLKRQNAQRLEQIKRQITAIEAAILERVQADPDLAQRFAILTTIPGVSAITAFALLIEMPELGALEPGQAASLAGLAPVARQSGRWTGRAFIRGGRASVRQAIYMPALVATRFNPDLKIRYTQLINDGKPAKVALTAVMRKLILLANALLKANSRWTPKPA

SEQ ID NO: 98885 - protein, 441 aa, unidentified
MEKIRKNAAGIDIGAKRIFVAIENEPVRSFETFTEDLILGKDYLLLHGIETVAMEATGVYWIILYELLERAGVDVWLVDGRQTKQVPGRKTDVKDCQWIQQLHSYGMLNRCFVPDEQVKEIRAYQRLREDHIRSGAMHINHMQKSLTEMNIRLKEVISQIHGASGLAIIKAILSGERTPERLLALCHKSIREKKADLVLKSLEGHYTEPGLFSLEQAYNAYLFYQRQIQQCDQKIQETLERLNGYHEEEGTKEEIESAKKRKPIRHNKPDVACLGGHLLKLFSGRDATDLPGITDYTWLQLYGETGSDLSKWETEKQFTSWLGLAPGQHRSGKLNKRSNKKYRPKAGQIFRQIAQSLIESKKIALGAFGRRLKGKRGSGIATKATARKLAVLYWRLMVKGLDYTERGIKAYEEKMKLNQERWLSKTAKNLGYQLIINQHDM

SEQ ID NO: 98886 - protein, 346 aa, unidentified
MTVYCGVDFHARQQTVCYCDTADGALHLSELEHEGDNVRGFYSRFTTDVVVGIEASGYSTWSVELLEGLGHRVLIGDAAEVRRLAKRRQKNDRRDAGLILDLLLRGEFPQVHRPPFESREVLRLLRHRHKLVQIRTRAKNGLQALAFSAGSSGRSRLLSREGRAQFLRLEMSEAMTRQREEWLSLVDDLNRRIKSLDAWLDERARRDERVLRLQTHPGIGLLTSLALVHALEPVSRFAGGRKVAAYVGLDPMEYSSGEKQRFGSISKGGSRLLRYLLVEAARITVRRDEELKGFYQRLLGRRGSQKARVAVARKLLIRGYILLRDGIDYAEFLRRGVEARPARPAT

SEQ ID NO: 98887 - protein, 315 aa, unidentified
MSDKPCFVGIDVAKAQLDIALRPSGERWAVPNDTNGVTTLVDRMQTLQPTLIGLEATGGLERLVTSALATGGLPVVVVNPRQVRDFARATGQLAKTDALDARALAHFADVIRPTPRPLPDAQTHELRALLGRRQQLVAMRTAEQNRLAGTSARLMKDIAAHITWLNAGSTTLDDDLETMLRASPLWREHDELLQSAKGIGPVCAHTLLLELPELGTLTRQQIAALVGVAPLNCDSGTLRGRRTIWGGRAHVRTVLYMGTLVATRYNPQIKVFYERLLAAGKVKKVALTACMHKLLTILNAMLKHRTPWQPQEVQN

SEQ ID NO: 98888 - protein, 349 aa, unidentified
MNMTILAIDLGKYKSVACIYATEDQTHQFRTIATLPPTMHDLIVAVEPDRVVIEVGSAAGWVKDLCEALEVEIEVANPNHEAWRWKNVKRKSDKDDALKLAQLSAMGQLPTTTLPKAKVRQWRSLIAYRHTLVGRRTAIKNSIRAILDRQGLTHTYGKSGWTASSVAALREVARGLDDVEADDLWRGQLHVELQALDQVRQLIEQVEAKLEALAEADDRVALLRTIPGVGPRLAELVVAVIDDPKRFANGKQVGAYAGLVPRQIESGTMKRSGRITGRGHKLLRALLVEVGWLMRRYNPALCALFDRICRGSRTRRKIAVIAVARKLLITCWAMLRDKRPWDASRWATA

SEQ ID NO: 98889 - protein, 346 aa, unidentified
MNYISVDCHISSLDFAVVNDTGELLKSNRAATSVNNLIGFVKSVPRPRQVYIEEGALAARVLETCVQYGEKVVITDPKRNRWIGSSGEKDDPIDKLKLAQLARGGYIKEIHHPVGQRRRFRELMEAYHDTVRSTTRIKNKIKAEFRHNGIQCTGTTVYLEAYRQQWKQKLPQDATLLLILDGLWRQLELSEQTEKELLAAAKIQAKQYPEIKRFKALPGIGFIHAATVSAILETPHRFANKRKVWMYAGLGIMKRSSGGKLYTEKLTTDYNRLLKYTVKQAAGAAIRDTHSNPFRRKYLDMTLSGIAPHRARLTIARDMLATMWAMWKKGEKYNPEIREKASHKQG

SEQ ID NO: 98890 - protein, 316 aa, unidentified
MNTFQNNEINVGIDTGQAQLDFNVRPTGESFSYPNTPKEALVAAKRLAGLNPTRVLIEATGRLEANFVQAARKVGLPLVVCNPSQVRNFAKSTGRVAKTDTLDAQDIAHFGEALKPRLTLVKSAKLQEVSDLIAVRSQCLSMSTMQKNRLTRMPKSVHGPIRRILKAIQSEVAKIDQQLDKLIDRCPQWAEKRDLLLSAKGVGKVLAFTLLSELPELGQLNRKQIAALVGVAPMNRDSGKFEGKRIIRGGRHKVRTVLFVSIMSAIQCHPKLKPMYERMVAAGKPKKVAMVACMRKQLTILNVMMRDGTHWQENMI

SEQ ID NO: 98891 - protein, 347 aa, unidentified
MDYYAGIDVSLEQSSICVVDASGKLLREAKVSSEPEALIAWFCGLPFGLSRIGLEAGPLSQWLYAAMKEAGLAVELLETRHVRDAFKAMPVKTDRKDARGIAQLMRLGWFRPVHCKSVPAQEVRALLTARKLVQSKLYDVEMSLRGILRGFGLKVGPTNVKSFAGRIKELAAGHPTLQAIAEALLSVHTVLARELAGFEKKVRSIARCDARVRLLMSAPGVGAIVAMTYVFAIDDPARFKSSRMVGAHFGLTPKKYQSGETDVTGRISKIGDSSVRAALYEAAHVILTRAVKGSDLKSWAMRLAKRAGMRKAKVALARKLAVVLHKMWVEGTKFIAEKACRPVATAA

SEQ ID NO: 98892 - protein, 383 aa, unidentified
MKSVCGLDVHKDSVYLCILSEFGELIEKVFGVLTYQLEEMRDLMLHHHVVEVSMESTSVYWIPIWRVLSPHFKLNLANPYFIKQLPGRKSDVKDAQWIAECTMKELICGSFVPPETIQQLRQYDRRIFDLNEEIVRKLSKLDAVLQRCNIRLSNYVSNVGSKSYKAVVRAISQGITAPEELVKLIHGRIINHHGIDVITASLKGVVSLAEIDMISQLRDELDMAEAHKEKCQAKMLEICEREFPEELKRLQTIPGIKERAATSLIAEIGTDMNKFETANHLASWSGLKPRNDESNKKIKSRSITHGNVYLRKTIIECAWAASRTKDCFFSRFSYHQTQVRKKNKMKVLVAVARKMLIAVWHVLHDNTIYIDFTTDRKTSRTKG

SEQ ID NO: 98893 - protein, 351 aa, unidentified
MSHKSAPPTVSTIGIDLGKNSFHLVGLDQRGAIVWQLKCSRAQLERRLANIPCCLIGMEACSGAHYIARQLAALGHDVRLLPAQYVKPFLKGHKNDYRDAEAIAEAVQRPTMHFVAIKTPEQMDLLALHRVRSRLVGQRTGVINQIRGFLIERGITVRQGIMPLRKALPDILSSNNDALSPRMVNLIAELIQDWRRLDERIAAVSAEIESLAEQDEGCQRVMTVPGIGPIISSAVVAAIGNGAGFTQGRDFGAWLGLVPRQESTGDRTILGKISKRGNKYLRTLFVQAAHVVLARRPKAAMRSLWPWIEQAARRLHRNMLAIALANKLARIVWAVLARGRSYQPKIVADVA

SEQ ID NO: 98894 - protein, 311 aa, unidentified
MEQSTVIGIDVAKDHLDVHLRPTDEAFRVSYDDAGLATLLTRLRSGTPTVIVFEATGGYEVPLAATLASAGLPVAVVNPRQIRQYARALGQLAKTDRLDARVIALFAEAVHPAARPVPDEQARALGELIARRRQLVDMLGAEQNRRRLLRDRGLQRHLEAHIAWLEEALRRLDHDLTTLVRSTPAWREADDLLRSVPGIGPVTACTLIADLPELGHLDRRRIAALAGLAPFARDSGVFRGRRMIAGGRPHIRRVLYMATLSAIKYNPAIRVFHQRLVTAGRPGKVAITAAMRKLLTILNAMLRDRRPWQPA

SEQ ID NO: 98895 - protein, 341 aa, unidentified
MGRAIGVDLHKNSFTVCFYQAEDAYTFKTYRVSRVGLAAFRKQLTVDDELAVESTGNTAFFVREINAHVKRVRIVNPVQFKVIANSVKKTDSIDALTIARFLSRDLIPEVRMRSKEDSQRSSLIGTRDKFVKLRTALKNKLHNILNANGIVSQPEMVSSEKGLEKILRVALEPSYRFEVELLVTEIRHLNEAIKKLDEELKRQGEQLPGHQNLTSIKGISDTGATIFLTAIGNLADFKDEKALASYFGIVPRVYQSNQTIRYGRITKRGNKIARTTLVQSTLVAIRYSPYLRAFYEQVKARRGSGKAIIATSRKLLGIIYNTLKHHWVFEDFATFKLATSS

SEQ ID NO: 98896 - protein, 341 aa, unidentified
MNYVGVDLHKQTISVCVVGQALDRRQARRFRCDDELRIVEFFEQLGPFEVVVEATASYEWFLQLVEPQACRIVLAHPGKLRVIAESTRKSDQLDARVLAEFLARDMIPEAHRPTPRLRAHRSLVRHRQYLQQRITAVKVKLRRILSDYNADRRNLFTRAGRRALAQFELSPTDRFRVDELSQLLDFLVSGLERANKRLREFAVEGAAAEHESRSLLRSIPGVGEVTSEVVLAELGDVRRFRSAKQVVAYAGLAPGWRESAGKRKELPIEKKGSRLLRWALLESAWLFVRYNPRWRGVFERLASRTGKKKAITAIARRLLCVMVAILKTRQPYTRQAALANN

SEQ ID NO: 98897 - protein, 344 aa, unidentified
MPCYAALDVSQETTAICVVDEEGHIQAEKKLPTCPDAIAGFLARGAPGLVRVGMETGPMAVWLWNELAERQLPIICLDARHANAALKMRPVKTDRNDAAGLAQIVRTGWFKQVRIKTRSNYQIRSLLTSRETLVRIRVKIENELRGLLRTFGVLFGKRVGSFTRCAGEIISGELDAAPEMRLVAEVLMKARASILDQIKVLDRRLSAIARETPVVRLFMTAPGVGVITALSVASVFDDAARFRRSSSAGAYLGLTPRRYESGETSRNGRISRQGNQLTRTHLYEAATTLLTRNLRFSTLKAWGMRLARASGFKKARVAVARKLAVILHAMWKTNTPFRWSEADA

SEQ ID NO: 98898 - protein, 368 aa, unidentified
MENDITVFVGLDVHKDSIAIAVARAGRDAPRFVGTVGPGLAELLKALRKLGEPERMLLAYESGPSGFALARKLIAAGWRCQVVAVSKIPVRPGQRIKTDRRDALALAGYLRAGELTPVIVPDAGDEAIRDLSRAREDAVRARLKARQQIKAMLLRHGMHYPGKTSWGPAHERYLAEIAFDHPAQQIAWAEYRHAIVDAHERVLRITAALREQIEHWRFGPAVRALMCFKGIDLVVAVTLIAEIGDLHRFEHPKQLMAYLGLVPSEHSTGETRSRGSITKTGNSHARRVLVEAAWCYRHSARMSRPVTDRNKGQPKPVRDIAWRAQLRLCERYRRLAARGMHSNKICVAVARELAGFVWEAARHTQPAD

SEQ ID NO: 98899 - protein, 341 aa, unidentified
MSDFSYFCGIDLAKNHFSLHAVDQNGKVILHKSVTRSKLLTTIANMPLMRIGVEACGGAHYWARTLNKLGHDARIMAVKYVIPYRTKGKNDLNDAVAICEAVQRPSTRFVPVKSPEQQAILSVHRMREHWVRERTALMNRMRALLSEFGLIIPVGRSSLMKHVPLMLEDAENELPHLARTVIADAYHHLGELNQRIADTEQVFESFAKVSANVQRVMKVRGIGPQAATAILASIGNGSQFDKSRDFSAWLGLVPKQYSTGGKPRLGRITKHGDKYLRTLLVHGARTVIANLGDKQDKLSQWCRGVLERRGMNRAIVALAAKNARIIWSLLHNQTEYENYAA

SEQ ID NO: 98900 - protein, 359 aa, unidentified
MAMLSEVIDAVIGADTHRDTNQVEIAYPSGAVIATGSFGNDRAGHAEALAWVFEHAPGPRLVVSIEGTRSYGVGLARAAKAVGLPVIEAEQPSRKARRGKGKSDPIDAHLAVLFALGLDADKLPTPRADGDREALRILLCARQELTTTSTAQTNRLKALLRDGSDADRRLACGKLTAKTLSELVKRRQPREASRAQTVRHAEIRRLALALREAGRALKANKAELTAIVNDLVPGLTDQCGIGPVSGAQAIVSFSHPGRCRNDAAYASLAGTSPIEASSGRTVRHRLNRGGDRALNKALHTIAVTRMRDDPTTQAYVARRRAEAKSDREIRRCLKRYIARQLYRALTAAMEPARYPTAAS

SEQ ID NO: 98901 - protein, 343 aa, unidentified
MKTKAQSQVATLYVGVDIAKDDFAAATVWGEEQPRYLGKAKNTATGCQAFTSRIAEQHQACGAAQVHLVVEPTGGLEAELVATAYRCGWLVTVVNLVVVRKWAQGQGKRAKNDRQDAIMLAEYGADEHPEPQQELPEEIVELGSLLDRKADLAKLLQSERNRYGRLHRHTAPAVRQSLEHVIAALEQELKTIEAAIKQLQHAQPTIRQQLAWLRSVPGIGEAIGPLLLVQLYRFRARTNGRGTAKQLVAYLGLDPVPYESGSSVRRRATISRQGNTLLRSKLFLGALGGVSGKNQLNLFYKSLLARSKPKKVALIACARKALTWAWAVFAHNTYFDPALAAKA

SEQ ID NO: 98902 - protein, 338 aa, unidentified
MKTYAGIDLHSSNNFIGVINSKDKRLYGKKHENNIQHALTALSPFRKTLQGVVVESTYNWYWLVDGLQEAGFKVLLANPAAIQPYTGLKYTDDKWDAYWLAHLLRLGLLAQGYIYPKEERPIRDLLRRRLMFVRQRTTQILSLQSMITRHQGLNFPGSSIKRFEDEFVERLFDDPYLLLLAKKEMATIRHLGNVIHEIESVVTAKISLREGYRMLLTTPGIGQILGLTIMLEVGDICRFKKVGNFSSYCCCVESARISNTKKKGENNRKNGNRYLAWAYIEAAYHAARNSPQAQRFFQRKMSKSNRTLATKALANKLTKATYYIMRDQVPFNPEHLFR

SEQ ID NO: 98903 - protein, 431 aa, unidentified
MEQETEWTAKWDHLVAFTGLDWAKDHHDIVMVDASGRMVLDLRVDDTAEGWCCLRGVLSEKAGPDLSLVGVAIETRSGPVVERLLELGCTVYPLNPKAAGRYRDRKAPSGGKTDRLDAWSFADALRTDGRAWRCLRPEDPLVQELRLVCRDEARLIAQRTALVNQVQEALHEYYPAALRPFDDWTLPAAWAFVEQFPTPADLAEAGRRRWEKFLHTHKLYRRQTYEKRLAVFEEATAFCGGPAVTRAKSRLAVALARQLRTLEAQLKEYRTYIEALFGQHPDHDLFGSLPGLGRKLGPRMLGEVGDDRSRFETPQAMQCYGGSAPVSYESGQIRKVQFRRACNKHLRHALHLWANLSRVDCPWAEAYYQQKRSEGKSHACALRCLAQRWLKILWKMWQTRTPYDERIHLRNQIQHGSWVISLVSQTGLTPG

SEQ ID NO: 98904 - protein, 359 aa, unidentified
MIVIGIDPHMKTHTAVAVDAASGRTLAEKTVSSDARGHEELLLWARALGSERCFAVEDCRHVSGRLERHLLPRGERLVRVPPKLMARARSSARTYGKSDPIDAACVARAALREPGLPEAHLAGPEQDVRLLVDHRDDLVGERQRIQKRLRWHLHDLEVDLELPPRVLDRYVWLDRIAEALQAVSPDTRRRIALEQTRRCRELTAEIRALEREIRTMMRALAPELLTLPGCSALSAAQLVGQVAGASRFAGEAAFAMHVGTAPLPVSSGKSTRHRLNRCGNRRLNATIHMIAITQARMHPPAIAYMERKRAEGMSSREARRCLKRHITRMVFKTMLRSERARAGQVLQAKFGPEVLAVAV

SEQ ID NO: 98905 - protein, 321 aa, unidentified
MHKFDLGIDVAKAKLDCALRLPDGKFKSKVVENNSKGFQALIEWLGKQGAPAPHVCMEATGVYWEAVAEYLATQGMTVSVVNPAQIKAFGASQMVRTKTDKVDARLIAGFCFERSPAPWQAPTPSEQTLRAMVLRLEALQTMRTQESNRLEVARDAVKPGIASHIEWLDKEADALIEMISDHIDKDPRLKNQHTLLDSIPCVGDRTNATLLAFYANFERFGNARQAVAYAGLDPRQHESGSSVKGKPRLSKIGHAFLRKALYMPAMVALYKTDWGKRFRERLEAAGKPAKLIIGAMMRKLVQVAFGVLKSGKPFDPALHGG

SEQ ID NO: 98906 - protein, 492 aa, unidentified
MPGPSLGIDLSINGAHDCTILDATGQVTQRFTFDSSESGLRKLEGHIRAVEASHGTPVVVMEPTGLAWFIPCLCLRAQHPKIKLVRIKTSKVAALRRYLKQDAKSDRLDSLTLAKMPFVDPEKLYAVDLPPAALHGLDRMTRQRARLIEDITRRKNRLQALLRGYLPGLMQVVGKPWEPEFRAVLAESLNPFILADQDTATLRRALQGKLSRTARLEELMPQLRTICMQLAQLYRPIVEAGRLTAGFFEDVQDEVARELRLMDGAEREVKELEAAIARRYEEAVPEDHLGTMKGLGDVTAPTIVAAVGTPQRFQSQAAFRGWTGIVPHASQSADSDVKGLTMTKAGPKRVKLALYQAAETARQWDPQLAKIYYDQMVNKGKPHHKAMGAVMSHLASRIHAVLTEQRDYVLRDVDGREVTTREARAIILTRYQVPAEIRAERRTSKRRRKQDVSIGAHRGSAERSSRRSSPSSTVHSTRAQEVPQIEAAAVSR

SEQ ID NO: 98907 - protein, 366 aa, unidentified
MKKNSTVTTIRNEIFKEPKLTIGLDLGDRSSHYCILDEAGKVILEHHLPTTPKGIHQVFSKIPRCRIALETGTHSPWVSRQLSPMGHEVIVAHARNVRLIGESSRKDDRLDARTLARLARIDPGLLGPVRHRSAKAQIHLTVIRARAALVSTRTALVNAARGLTKSYGERLRKCGTGQMNREIAKGLSQELRDALDPLLREIESLNERIADYDRRIEQIATEVHPEVARLKQVKGVGTLIALTYVLTLDDPHRFRRSRDAGCFLGLRPGRRNSGQSEPQLHISKEGDRYLRTLMVQGAHYILGPFGQDSDLRRWGLKLAERGGTNAKKRAVVAVARKLAVLLHKLWVSGEIYEPLRNNHKVVSAVA

SEQ ID NO: 98908 - protein, 320 aa, unidentified
MQTATVVLNIGADVAKDEIVVASSGGSFPVRQVANQRAAVLAFLEGLPVGSRIGVESTGSYHELFAGLAHQLGFLVFLLNPKDTRHYAKAVGLRGKTDRVDAELIARMIAHEHTKLHPWIPPTPQQRELDRLIKRRATLVSLRGALEMSLHELDGFGADLKALRTRFNQLIARIDLRVKALVEASPDRKQNFTRLCTITGVGPVVGTALVNTLERVPLKSADAFVAFTGLDPRPDDSGQHRGKRRLSKRGPGELRRLLYLAALSAIKTKTWRPLYEHYRAKGLSSTATLVILARRIARTAWSIYTHKTEFDPARLTKSLT

SEQ ID NO: 98909 - protein, 390 aa, unidentified
MLRKNIVQTLDAATSWKVFGLDLAKHDLAVVAIPADGSEVQYVKRYSYADFLEFTAQIPSATMVFEPGNGANHFALRLQAQGHTPKTVSGASVKSWITLHMSGQKTDLNDAYALARLSEDPDLKTVRIKSVDQNRLQSLQAMRKQLVEQRTKTIVSIKGIFQCWGILFKKDSRSLKKFKEAADNNKELLGEEVVEAMILQIDRIADLDKDIKHVEELLKKVTMQDPRAQPMLDIPCVGLQTVSRLCAIMGDIKDFETPRSFVAFIGLVPKNMISGNKTTTPSGYEQVGQGKVNRRGDKMARSLIIQCASSMYMNFHKDNFPECALKDWIQKQKDAHKPYGKIMVSLAAKLLRIIYAVLKHGEAFSYEKAGISRSALAALKAAQPAEVGNA

SEQ ID NO: 98910 - protein, 371 aa, unidentified
MFFIGIDVHKKQSQICILDEQGKLKYETRVPTTRPDLADVLGSYAPARVVIEASTPSEWVARHLESLGLEVVVADPNFAPMYATRQKKIKTDRRDARMLADAAWKQTYRAAHRISDEKRRLRHELGAREALVNNRTKLICYVRAQMLGEGLRLPDCSAENIVEHLRAVKLEPQLAATLEPLLQVLTVLTEQIQLQDEQVKSLAHAEPQARLLQTIPGVGVITALAVIVAIDGATRFRGAHQLASYLGLVPRENSSGEKQKRGRISKAGNARARRMLVQAAQRILRCQNEATRPLWQWAEGVNERRGKNIAAVALARKLTGVIYAMLRDGSEYRAAVPPSAEPAAGKRPVSKPLRAKKTTKPRATAAQASAA

SEQ ID NO: 98911 - protein, 310 aa, unidentified
MGTIGIDVSKDHLDWADGPEASVSHCANDGRGIAQLVRRVRRLDPERIVIESTGGYERPLLHALADAGLPVVLVNPWRVRRFGEAFGILAKTDPIDSRLFSRYGAVAAPPVTPVRRGIHRALADLVARRRQLIAMMAAEKNRLSMAPKALRREIAGLIAILQQRIDQLDRRVDAALAQDPERGQVGKLLQTAPAVGPAVARTLLVDLPELGTLSRRQISSLVGIAPFARDSGKHRGQRRIRGGRASVRTALYLAAMTGARFNPVLRALYQRLRNHGKPAKVAFVALARKLLTILNGMVRDGTAWREADAT

SEQ ID NO: 98912 - protein, 346 aa, unidentified
MEHYAGIDVSLEWSSICVVDALGKIVKEAKISSEPATLVAFFEALGFAVKRIGLEAGPLSQWLHAGLKRAGFEAVLLETRHVKAALSAMTVKTDRKDARGLAQLIRMGWFRPVHAKSIRSQEVRALLVARKQLLGRLIDVELSMRGILRGFGLKVGPVTRKGFEARIRELVRGQATLERIAGAMLSAREALKAEYERLHKTVLAIVRDDAVCGRLMTVPSVGPLVAITYKSAMDDPNRITKSKAAGALFGLTPRKYQSGEKDVTSGITRAGDEMVRTALYEAANVLLSRITRFSKLKRWGIDVAKRRGSKRAKVALARKIAVILHRMWVDGSTYRWTETQPIAAQA

SEQ ID NO: 98913 - protein, 400 aa, unidentified
MRAVFGIDVSKASSEVAILVNGEKVHGYTISNDALGFARLLGDLKTVHKPEIIFEATGVYSRRLQSFLDEHGYAYTRLNPLEAKKQLDSLRVRKTDQIDAEKLAQSQFVLNRKTTYVQEEIYQNLRDLSRFYQNLTEDIVRAKNRLHKALQVTFPELENILSTPSGEQYWNLVIAFPCKDFVLDLSKDELSESIRQSTSKRISDKRVAYLAEKLIALANQSYCAVKKTSPMLEEVRYYAKELFRLSEQRQTILDQMVELAQPLPEYDILLSIPGIAETTATSIIGELGDIRRFQSANQINAFIGIDLRHYESGNFLAKEHITKRGNPYARKILFKCIHNIASASHTNPCHIADFYEKRKRQSQTTSTKPHTIASIHRLIRTMYYLIMHNKLYDYASTQNR

SEQ ID NO: 98914 - protein, 341 aa, unidentified
MQITTIGLDIAKNVFQVHAIDNEEKVVVRKQLRRGQVIRFFEELPPCLVGLEACATAHYWARELTKLGHEVRLMPARDVKAYVKRNKNDAADAEAICEAVRRPTMRYVQVKSAEQQAQLMQHRARDLLMHQRTQLINGIRSHLAELGIIAPQGREGVKELLAIIAKDANTELPNNARASLIVLAAQLQALQTTIGAIEKRIVVQHRANKESKRLQTIPGIGVIGASAIASTVTNPKIFRSGRDFAAWIGLVPREDSTGGKRRLGPISKQGDRYLRRILVVGAVSVLRRAKLNPEKFPWLTRLLARRPFKVVAVALANKMARIAWALMISGKTCRAARFAAA

SEQ ID NO: 98915 - protein, 409 aa, unidentified
MCFYVGLDWASREHAVCVVDERGAIVMTFTAAHTAAGLAELVAQLVKIAPAAELRVAIERPTGLVVDTLVERGFVVVPIHPNAVKASRPRYTAAQGKTDLGDAYLLADVLRTDGHRFRELKPLSDETKALRGFVRVRDDLVAQRVALANQLRCLLEQFWPGAATLFADVESPIALDFLDRYPTPSAATGLGEKRMAAFLARHAYPGRRSAAELVERLRAAPKPVAGEAEADAKGECVRALVAVLRPLVAQIAALTSAVEHAVETHPDARIVTPLFRSGRVCAAQLLAELGDDRGRFVSADHLAAEGGVVPVTRESGKHRAVTFRYACNMRLRAALSTLADTTRHTSPWARALYQCARDRGCEHAHALRILARAWCRVIWTCWQKRVAYDPAKHRAARAFTLRAVDQEAA

SEQ ID NO: 98916 - protein, 344 aa, unidentified
MDHFAGLDVSVKETSICIVDDTGKIVREVKAASEPQALLKVLGNPTYRFKRIGLEAGPLSQWLFSGLAEAGLPVVCVETRHMQAVLKAQINKTDRNDARGIAQMIRAGLYRPVHVKTLRSQKLRMLLTHRKLLQSKAIAIENDLRGTLRNFGLKVGMVGKVRFEARINELVESLPDLAELVEPLLIVRRTLREQIVILHRRLLAIVRDDEVCQRLMTTPGVGPVVALTYRATVDVPARFRKSKAVGAVFGLTCARYQSGEIDWSGRISRCGDEMMRVMLYEAAQSMMRSKKWSWLKAWAMQIARRRGMKKAIVALARRLAVIMHRIWVDGTEFRWTREQAVAAA

SEQ ID NO: 98917 - protein, 475 aa, unidentified
MSKRLFAGIDVSLENNQLCLMDYDGNTVGKSLSFANNLPGALAMVEYLNSLMDAGDFEKLTIGMEATALYWFPLFNFLASSASFGDKDAEVLPLNPKVVSNFRGSYPDMDKTDIKDSFVIADRLRFGRIPQGQVPNVDFLALQRLTRFRYHLTQHVSQLKNYAKSFLFLTFSEWSRTKPFSDMFGATPRKLLKKFHSAEGIAEVSTGELRKLLHEFSKGHFRDVDEKANLVYQTARDSFPIPRELADQVHMLIKQTLQQLELLEKHIARLDKKIAKKMRKFSTVLESIPGIGPVLAAGILAEIGDISRFPGQAQLAKYAGLTWRKNQSGNFSGDVTPLTKTGNSYLRYYLIQAAQCMVNHNAEYREYFNRKFKETARHPYKRALSLTARKLVRLVYALLSRNQLYMAPEIREHRKLVHKEVSRTSVPKVQSENSQASQKPKETATKKVKTLTVAARPKRTLPRQQEHARGRAVNT

SEQ ID NO: 98918 - protein, 426 aa, unidentified
MEQHEHYAALIGIDWSDRKHDVCLVDAATGSRELSVISHTPEALNEWARALRARFSGEKVAICLEQSRGSLIYALLKYDFLVLYPINPQTLSKFREAFTPSRAKDDPSDAEYMVELLIHHRERLRAWTPDDERTRTLQLLVEHRRRLVGDQTRISNRLTALLKGYFPQVLQWFPDIRTKMVCDFLLRWSSLDALAGVRRATLLKFFREHNSQRTETVEKRLAAIKAAVPLTTDKAVINSSVVMVRALVSQMKATLAAVKEFDAQIEELCQTHEDFELFACLPGAGKVYASRLLTAMGSNRERWATASELLRFSGVAPVIERSGKSSWTRWRYFCPKFIRQAFVEYAGESIRHSEWAKAFYASQKAKGKSHQAAVRALAYKWIRIIWKCWQTREKYDEARYVECLRKKGSKLVAEPASAEAGTGELA

SEQ ID NO: 98919 - protein, 428 aa, unidentified
MDETDRNRIERFRQFKREVRGSEEYLLVGIDIAKEKHHAFFGTAAGKTLLKRLIFDNSREGFERLLIQVEALKVHHGLKRVVMGMEPTANYHKPLGEYLIRKGYEVVLVGGVAVKKNRELLDNRWDKHDTKDAANVADLISQGKCLFYEYPTLALRELRDLLSLKRRLKKQEHGYQVRIRNHLLAQYFPEMDSYYEQSKVGSLGIVKWCLSPLKISEMGLDEFVRLVGSRRVGIVQERRLRVIWEKARESIGCEAGESVVFGASLMVDGLRQTREALKATEAKIEEVCKGFSEYECLLSIPGFGPDISSKVLGAIGDPFRFNSGKQVLKLSGFDLSADRSGKDSEEGLPVISKKGKSDLRYALYQAALIASVKNRDVMIYYTNKLRGRERERGIHIKMRVKLAAKLLLIAWTLMKKKEKFDPAYLNID

SEQ ID NO: 98920 - protein, 359 aa, unidentified
MRSLQISERGPPVEHVSRIGMDTSKHIFQLHGVNSAERAVLRKKLRRKDMVTFFERLAPTAIVIEACGASHHWARLLQSFGHEVKLIAPQLVKPYVKRGKNDAADAEALCEAMSRPTMRFVPVKTAERQAALMLVGLRDRLIRNRTQLANAIRGYAAEFGLTAAKGIVHLAALLDRIQADESLPGLARELFAIHATEYAQLHAQIEEVEAKLMAWHKTDPCSRRLARIPGVGPIGAAMLSMKTPAPEMSRSGRQFAAWIGLTPKDHSTAGKVRLGVITRAGDAGLRSVLVAGATAVIRHLRNARSQSVLTSWLEQLLKRKPPKLVAVALANKLARIAWKLMVTGETYASKPAPALAGAV

SEQ ID NO: 98921 - protein, 345 aa, unidentified
MESMYYIGLDVHKKTISYCVKDASGRIHAEGRIPATRFHLDLWMKTLPRPWTAAMEATIFTGWIYDHLRPHAAAVKVAHPLMLRAIAAAKKKNDRIDAHKITDCLRCDFLPECYMAPTEIRERRRTLRYRHLLIRQTVQLKNRISGLLMEAGVSYNAQKLHHVGYFRELMKTNPDIDESLRPLLGLCRETLVRLQKTESALVRSLERDPLLAERVRRLLTIPAVGPITALTWALEVGEVSRFSSIKKAISYCGLCGAQKSSGDHTQRTPISKQRNKHLQSVLVEAAHMAPRLSPELALFYDRERQKGNANRATLAVARKLVAYLVAIDRSQRDFLVVEKENQAAA

SEQ ID NO: 98922 - protein, 439 aa, unidentified
MSTNYPDQLEFAAFVGIDWADRQHVWALREIGSSTIEQGQMAHTPEAVDQWAVELERRFAGRPVAVALEQSRGPLVFMLSKYAHLVLFPVHPSATANYRKSFRPSGAKDDPYDASLLLDLLLRHGEKLRPLQPDTTETRTLQFLVEERRKLVNEKSRYSNRLTAHLKLYFPQVPDWFEQVSSEIAGDFLERWPTLEKLQRAKPVTIHRFLCDHNSRDPEKIESRLAEIRRAVPATHDVAVVTASSTAAIALVRILKQVRLAIAGYDQQIEELARTHPDFALFDSLPGAGPVLVPRLIAALGTQRERYQSAQEIQCYSGVAPVVARSGQQHWVHWRWSCPKFLRQTFQEWAVHSLAQSQWARDYYEQKRAQGKSHQSVIRALAFKWIRILFRCWKDRAPYDERFYQRALAQHRPHAKAAPTVELQWKTVAGFSKLSALPS

SEQ ID NO: 98923 - protein, 347 aa, unidentified
MAHFVGLDVSVKETSVCVVDDAGKVILEQQVPTEPADIIALLTSLGVPFGRIGIEAGPLSQWLVNALTAADLPVICVETRHMKALLTAQQINKTDRNDARGIAQMMRVGLFKPVHVKTLVAQQQRMLLTSRKLLQRKLLDVEADLRGTLRNFGLKVGAVSGSRYEARVRELVEGFPGLAAIAEPLLNVRRVMRQQFAVLHKMLLDRVRGDPVCRRLMTAPGVGAVVALTYRATVDQPQRFVHSRAVGAHVGLTPKRYQSGEVDYDGRVSKCGDALLRTMLYEAAQSLLTHSTKWSWLKAWGMRVAQRRGIRRAIVAVARRLAVILHRMWVDGSEFRWRKDSAVPAAA

SEQ ID NO: 98924 - protein, 430 aa, unidentified
MLRNYSTKWEKIERITDETLIIGIDIASRRHYAKALTWRKAEVIKGLFFDNERQEFMRFLEWMNRAKEKMGATNIIVAMEPTGHYYFALEEYLEALGIEVVIVNARDVSYMGKTYNNDNSKNDPRDAYLIGYLCSDGRYSVTTRPKEGEYAEIRELTNHREHLVKRQSGSINELHCILTQIFPEYKEIKKSGLSEGLLAVFLELKNLDNIIEAGWEGVYEALKKHKKHQIGRVKAKQIHKLAKESIGVKRKVKTTQTVLISLIQEYQFYQNQINAIDDQINELIKGMDAAQRLMEIDGIGPVIAATFLAEVGDIANYKSAKQIQKLAGYAIRTNISGDTEGSTRTTKMGRKRLKKILYQAALSTIGTNKEIKQIYGYYTQEREQPLKKMKAVTTISCKLIRIFFSLLKYNHHYDGEKMLRDIKRPKGQVA

SEQ ID NO: 98925 - protein, 408 aa, unidentified
MFCGYSITIFPSEVFIMVVSVGIDVAKDKHDCFILNSEGEVLADVFTIPNNMDGFNCLLQTIRDCTTPQDIIKVGLEATGHYSYNILGFLLDNGLATYVLNPLRTNLYRKSLSLRKTKTDRVDARTIAAMLLSDIGLKPYTDTAYHNEELKSLTRYRFNKVKERAKLKSSVSRLVCILFPELEKLVPTLHGASIYALLEEFPGAVQAAGAHLTRLKYLLSDASRGRYGRDMAVEIRDAARNSIGSRMPAKSLELQHTIRLIRELDAEIEEIETAIQTIMDEIHSPITTIPGIGYRMGAMILAEVGDFSRFESPDKLLAYAGLSPSTYQSGQLINCYPHMEKRGSRYLRYAIYNAAKYVCLWDPTFAAYLAKKRAEGKHYNVAISHAAKKLVRLIFALEKSRQPYNLAA

SEQ ID NO: 98926 - protein, 346 aa, unidentified
MKTVALDVHSETSQMTVVSPAGEILLEMKLLTRPEDLRRVIAGIDGPKRVVFEEGPMSGMIKDALAGAAEEIVSCDPTQNALIARAEDKNDERDALRLAVLSQAKAIHPVYVPPEPYRTLRSLVRYDHALARSIAGAKNRIKALCRRLGIRCRGIRVYSEAGRKEALGQITDAGLRWQAKSIYRQLKVLRTERLRARKVLIRQSGKFPEIERLKSIPGVGPVVARTIVAWVVDPLRFKSRNALSSYGGLGLGQGWTNWQPIGRARASKKGQRELKRVLFIAARGALLGENSLTRRYQARTRSGWEDRKAIRDLARCILMTARAVWITGKEYDDAMVSVPEVQSRCR

SEQ ID NO: 98927 - protein, 350 aa, unidentified
MNILALDIGKYNTVFCYYISQSGEHEFGKVKTKPQAIHDLIVDKEPETVVMEVSEIAGWVVDIARALGKQTETANTSHDAWRWKNVKRKNDKEDALKLAKLSAMNQLPTVHVPSKQVRENRALIKCRQRLVKHRRSIQLAIRAIFSGQGITAVPRGKSAWTKEGLSWLRSHAQALEEITDMNQLWRGQLQVELETFEAVTVSLRKVEDKLNKLGSCDARIRRLQTIPGVGPRLAETVVAFLGDPKRFQSSKQVGNYAGLTPRRYQSGNIDHQGRISKQGNKLLRNLLVEICWVSLRCNPWARDTYNRLLRGSPSRKKIAITALARKLVVKCWAMLRDEQDWKYGIQEEAA

SEQ ID NO: 98928 - protein, 401 aa, unidentified
MNAVGIDVSKGKSMVSIMRPFGEIVSEPFEVKHTSSEIKALIALINSVDGESRIVMEHTGCYYEVLAHQLAEANLFVSTINAKLIKDFDNDSLRKVKSDKADSIKIARYALDKWTGLKQYSLMDEIRNQLKIMNRQFGFYVKQKTAMKNNLIGILDQTFPGANTYFDSPARNDGSQKWVDFIDTYWHVDCIRNMSLNAFAEHYKKWCKRKKYNYSQSKAVEIYEKAKEVVPVLPKDEITKLIIKQAISQLNNASATVESLRQLMNETASKLPEYPVVMSMKGVGPSLGPQLMAEIGDVTRFSHKAAITAFAGVDPGVNESGTYAQKSVPTTKRGSSELRRTLFLVMDALIKSMPQDDPVYQFLDKKRLQGKPYYVYMTAGANKFLRIYYGRVKEYLSKLEK

SEQ ID NO: 98929 - protein, 412 aa, unidentified
MEVVHERCAGIDIGKKFAVVTIRLAGSGRRKVEVITRRYEAMTPSVLALREDLIAAGVTGVVMESTGQYWKPFYYALEGAGFDLVLGNAREIRNMPGRKSDVSDSRWLAELGAHGLVRPSFVPEPAVRQLRDLTRDRTALLRLRAKVLTRIQEVLEDAGIKLTSVASDINGVSSRAILNAMIAGERDPVTLAGLARGRLKAKHETLVEALAGRLEQVHTFRLEQLLAEADHLQVTADRYTEAIDAALGPYRPFRDLICTIPGVSTIVADVITAETGADMSQFPTPKQLCSWAGVTPGSNESAGVVRQGRTGHGNKHLKGVLGIAAMSLSRNRNTYLAARHHRIAARRGRMRALVATQHKILETIWHMATTNTPYHDLGGDYFLRPDPARATRRALAQLHHLGYDITLTPTAS

SEQ ID NO: 98930 - protein, 409 aa, unidentified
MEVLYPHCCGIDVHDDFVVACFSRVEQGQRKKEVQRFRAVTGDLIALRNWLLERGCTHVAMESTGVYWRPVYDRLFGFFELTVANAQHMKAVPGRKTDKQDAEWIADLLQHGLLKNSFVPHREQQDLRGLTRLRTTLVQERARLVNRLHKTLQEANIKLSGVLSDIVGVSGKAILHALAAGETDGHRLARLAHPSVRCTQDQLAEALESEIGEHHQFLIHELLTLIEGLDRSITHLEHKIEERLQPFEQTLERLEEITGVSRLILQVLFAEVGTDMSRFPDDAHLASWAGMCPGQHESAGKRLSGRTRKGNRWLRAALIQAAHAAGRTQTYLGEQYRRISKRRGKKRAAVAVGHSILVIYYHMMLTGEHYQEKGVEFFQQRDKHQHERRLVQRLEHMGYQVILQPRPAA

SEQ ID NO: 98931 - protein, 340 aa, unidentified
MSNLDTCGIEVSAQELVVARRQEGRLEPLRSFANTAEGHQALVRYLRRAGRGVRVCLESTGLYGLDLALALSAQEGIEVMVANPRAVRHFATALMKRSKNDQIDAGVLEQFAARMPFQAWQRPSPAALGLHALARRLGELVQMQAAEKNRQHAAGLSQAIPAAIRRDLARSLRAQARAIERLTREARKLIAQEPELAERFALLDSVPGIGETSAVQILAELAVLAPDLEARQWVAGAGLDPREYRSGSSVQKKRRISKAGNKHLRRALYMPALVAVQHDPHLRAFYQHLLAAGKLKMQALVAVMRKLLHAFHGMFKTHQPYDGSKLFRLSSHPVQEVTRA

SEQ ID NO: 98932 - protein, 408 aa, unidentified
MKTYILRNVPTVQRQPQAQPPARTGTILGRPAHTANGPVLFIGLDVHTESIAVSLAPSDFSEVRRYGLIGGTHDDVLRLARKLQAAHPGTELRFCYEAGPHGYPLCRCLRAHGYEGRIIAPSKTPRKPGDRVKTNRRDADQLARLFRSGDLTPIYVPDSQDEAVRDLVRGRWQVAKQQHRARQQLKMFLLRHNFRYAGTKAWTQPHLRYLATVKLPFPEQQFVFQEMINTITEAGERLERYDTQLPRVLAGWRWEPVVRALMGFRGLALLNAITLVAELGDLHRFATARQLMGYLGLVPSEDSTGDERHQGGITKMGNGIARRALTEAAWNYCRPARISRDLLKRQEGLSQAIKDLSWKAQTRLHHRYKHLTTVRHKKSPVAAAALGRELSGFVWAVGQLVAPHAPKP

SEQ ID NO: 98933 - protein, 374 aa, unidentified
MRDHSEAFVAFDTSKLRNAVAIADAGRTGEIRFLGEIENTGAATAKLVRKLAAKYARLTFCYEAGPTGYGLYRQIKSLGHECMVVAPSLIPKKPGERVKTNRRDALGLVKQLRAGDLTAVWVPDAGHEAMRDLTRARETAVEDLRCKRQQVSGFLLRQGLHYPGERAWTKTHRGWLASQKLEYAEQRIAFEEMLLAMRQAQERIERLEQAIRVAVPDWSLADVVTALMAMRGIDFISATAFLAEIGDLSRFPTPRELMGYLGLVPSENSTGDTVRRGPITKAGNRRARRILVECSWSYQHPPRVGKQKQERVSAAPRAVAEIAWKAQCRLTARYRAMIRKGKLKTVAVTAVARELSAFIWAINREIASPRAAAR

SEQ ID NO: 98934 - protein, 401 aa, unidentified
MIPHLCVGIDVGCRAHRVGIATPDGSILEEFDISHTDAGFSEFFRRVEAHRFELSLPVAVAMEGYNGYARPLDRLVQDKGYRLFNVNNLKLARFKEVFPGAAKTDPIDTRKILELFQLKDQLPLAKAAIQEVIPSSQANEKLKRLSRRRRRLVIEKMRVLNRMQADLQAVCPELLAATNDADNKWFLRFITSREDLRQLARLRTSTVMQIRAVGAKYAEHIRTWQRKARFSNEVEYVGPMIIQDARRILELHEQIRALDDAMEELADQSEIARRLSTIPGFGKTSIAELAGEIGTLARFDTEASLALYLGMCPLTHQSGDMSRARIPRQVNTRCKAAMMTTVARHIGCVPESRAYYDRKRAQGKTHNQAIRALGRHMVRVIWAMLRDDRDYELREDVHPLT

SEQ ID NO: 98935 - protein, 347 aa, unidentified
MSIVGGFDVHRQQITFDYVDTGTGQLCRGQIRPATRMVLRDWLSERFTGRADVAFAVEGCTGWRFIAEELAQAGAQAHVAEPADTATARGRKKRAKTDRADARLIRELLAEGRLPHSWVPPQQVLEVRTLGRLYCALMDQRRAWQQRIHAQLYHQGVPAVRGLLTEAGRSALAVADLSPAGRQSVDTALRATDALTDQIDPLRKQLVNFARRQPGCQALQRLYGVGWLCAAIIWAELGDCRRFTKSDQAVRFAGLDITVYSSDGKRSPGRLARQGSPALRWALFEAAKSASRQSSPDYRYYTCVADRLGGKRPALSVARKLTRRAHHILRNLGDAAFTPVAGQEVAA

SEQ ID NO: 98936 - protein, 337 aa, unidentified
MHYVGLDVSIARTAVCIMDAAGQVVREQSVASTPEAISKAIRASGEVERVGLEAGINSAWIARGLDEAKLPVIVIDATHAAAALKTGFRNKTDKNDARGIADLMRVNKFRVVTVKSVAAQRDRALLTVREQLRRQSLDARNIIWSILQVEGLKPPKLSSPAFQVLVQQSLEDEALAPLLRPLVTVVEQIDSQVAGLDREISTRAKASTACKRLMTVPGVGPLVALTYAAGVDDPARFKDSRTVGAHFGLTPRRFQSGEMDWSSGISRAGDAGVRRALYQAANVLIHHSRGWCALKSWAMRVAKRRGLGKAKVALARKLAVVMHRMWIAEEDYHLKAA

SEQ ID NO: 98937 - protein, 342 aa, unidentified
MKITTVGVDLAKNVFQIHAVDERGKAVLRKQLKREQVAPFFAKLPACLVGMEACASAHHWARKLQGFGHTVRLIAPQFVKPYVKANKNDAADAEAICEAVSRPSMRFVAVKNVAQQALLAMHRVRQGFIKARTAQANQIRGLLGEYGLIIPQGIGNIARRVPQLIEDASNELPGTFRALIDRLLEHLKALNEQLAELEAQIKAWHRENEASRRLEQIPGIGPITASALVATMGEARNFSNGRQVAAWLGLVPRQHSTGGKTTLLGVSKRGDAYVRTLLIHGARSMILAMRRKANPNGWLNDLLKRRNPNVAAVALANKNARIAWALLAHERSFQADYACTPA

SEQ ID NO: 98938 - protein, 367 aa, unidentified
MSSVASAAGLIHLGMDTSKNTIVVATLLPGEQDPVTDRIANEEAAVRRLVGRFADRSALRCWYEAGPGGYELYRLLASMGVACQVVAPSLIPKGSSDKVKTDRRDSRRLARLGRAGELTPVRVPSAAEEAVRDLVRARDAVLADRKRAQQRLTAVLMRHGRIWRGATYWTRAHREWIAAQRFGEPALATAISYYRATLAVREAELAAVEAELAPWAAREPLAGPVARLGCYRGIAELTALTLAAEVVDWHRFPAARAFMSWTGLVPAEYSSGDRTRRGHITKAGSEPVRVALTEAAWSYRHAPAIGARLRRRQAGAGPATLARSWTAQRRLHARYTHLLHAGKAAPEAATAVARELAGFAWAEMTAA

SEQ ID NO: 98939 - protein, 338 aa, unidentified
MKHYGGIDLHSNSSYLGIMDEDDRKVFQKKLPNELCEVLKVLKPYKKKMEGIVVESTFNWYWLVDGLMENGYKVHLANPSAIKQYEGLKHSDDSRDAFHLAHLLKLDILPEGYIYPKEGRPVRDLLRKRSQLVRQRTMNILSFKNLVSRNLGKQISSNEIKRLKEEDVENLFQEEYLIIAGKANIATIRFLTERIKEIEKAVLNKAKLRDEYKNLFTAPGIGTILALTIMLETGDIKRFSEVGNYVSYCRCVRSSRISNGKIKGEGNRKNGNKYLSWAYVEAANKAVSDYAYVRRYYQRKSAKTNKVVAIKAVAHKIARACYYMIRNQEVFNPKKAFG

SEQ ID NO: 98940 - protein, 337 aa, unidentified
MGGYLGGDLHGNCFVVCTIEEGGRNYLRRWKLKDLGAFVSELRSTDEIAVEVTGNTRLFYDAVVERVRRVVVVNPSEFKVISQSVNKTDDNDAQRLALFLWKGLLPEVRMKDKAHAQLASVAQTRDKLVKLRTALKNKINNIASAHGINLKKEELSSEKGLEKVLGMRFEPLVKLEVEVLVNQIRSLNKSICELDKAIKDEGSKLKGHKNLKSIKGIGDLGAGILLSVIGDVNDFANEGKLASYLGIVPWVSNSNETQRSGRITKRGSKLGRTTLVQCCLIAKRYSPYLNRYYERIKARRGAGKAIIALARKFLSIIYKTLKNDWVWADFPNGVLAK

SEQ ID NO: 98941 - protein, 419 aa, unidentified
MSFKILKFNCCGLDVHKTWIYACIGITDSNNRTEYKQARFSSFTKGLNELCDWLAKYNCTDVCMESTGKYWIPVFNILEQHNLWVTLSHPKYTKPMKGNKTDRKDAKWICDLYMCGMVKTSFIPPTDIRALRDLVRYRYKLTCMITGEKNRAQNCLTVSNLKLDDVFSDVFGKSSRYITEQILQHPGEKFDVAPFLRKNCKTPVEEIQAAVDGTISKEQAVKLRQCLDHIDELKKHISEVEQEILCLSDKYEAALNLIRTVPGFNKNPMTAIQVLSEIGCDMSVFPTDKHLVSWAGCCPRNDKSDRKIKSSRISRAGSYFKPVLVQVANALIKSKKYPEFITRYKRIKAHRGHKKAIIAICRMILTAIWHILSDLKPYTPEGFLESRPVKEEKIISTSQALNLLRQRGYVIKDEPLTVS

SEQ ID NO: 98942 - protein, 400 aa, unidentified
MRSIGMDVHRSFAQVAVLDRGKVTEEFRVELDYDAVVAFGQKLRKDDEVILEATGNTSAIVRLLTPFVAKVVIANPLQVKAIAHARVKTDKVDARILAQLHAAGFLPEVWAADDDTLNLRRLVSERAALVRSVRRVKSRVQAVLHANLVPKYSGHLFGKDGRDWLLTAPLPKAERDLLARHLDELDWLKGKLEKLDGAMARIALDDTRTRKLMTIAGINSVVATAVIAAIGDISRFPTPDRLASYFGLTPRVRQSGDRGAIHGRISKQGNATARTMLIEAAWSAASVPGPLRAFFLRIKDRKGLNVAAVATARKIANLIWQLLTKEAPYRWARPAFVAMKMRKLELRAGAAKAHGPAGPARDYWIKEIRHREMELVAQAEAAYAAMVEAWRDRPPKPQKS

SEQ ID NO: 98943 - protein, 343 aa, unidentified
MEHYVGLDVSLKQTSICVVNQAGSIVREGVVDSDPEAIAAFVRSKAPGAVRIGLETGPTATWLWTELKQLGLPVICIDARHAKAVLKMQINKSDRNDAAGIARIMQTGWFKEVRVKDLDSHSVRALLASRALLVKIKRDLENQIRGLLKNVGLVIGRAKFNVFTARAEELIADRPELIAVVGPLLKARQAIEQQTDDLDRKVLKLARYDAQVRRFMTVPGVGPITALCFKATIDDPTRFKRSRSVGAYVGLTTRRHASGEIDWTGRISKWGDAMLRSYLFEAAGVLLTRVPKWSALKAWGMRLAKRNGLRKATVAVARKLAVILHRMWIDRTEFNWSKKEVAA

SEQ ID NO: 98944 - protein, 363 aa, unidentified
METIYIGVDFHARQQTICYLTTETGEFVTHELKHQDKDEVRTFYSQFVGCVIVGLEASGYSPWFEQLLEELGHEVWLGDATEIRRRARWRQKNDRRDAELILELLIHDEFPRLHRPSLESREILRQLRYRHKLVKMRTIIKNSLQALALQSGLSRRTKLFTKAGQQELRAAPMSPVMKQQQEQWLELLLVLNQRIVETTLWLKQQSLNDARIRLLRTHPGIGLLTSLGLVHTLAPVSRFRNQRKVTAYAGLEPMERSSAERKRFLGISKAGSRLLRFLVIEAAHTAVKKDDDLKRFYRRLQERRGRPKAKVAVARKLLVRSFIMLRDEIDYAEFQRRAVAARLARQSSRPSVPDRLIGQPASA

SEQ ID NO: 98945 - protein, 446 aa, unidentified
MEILYTHVAGLDVHKKTVVVCCRIAGPNGQPRRETRTFSTMTADLLALSAWLTSLEITHVVMESTGEFWKPLYNLLEASFIVLVVNAQHVKQVPGRKTDVKDAEWLAELLAHGLLRGSFIPPLPQRDLRDLTRQRTNLVRERATVVNRLHKVLEWANLKLTSVATNIVGVSARAMLEAIVDGQGDAAALAELAQGRMRSKRKALEQALTGRVRDHHRFLIAKHLIHIDFLDEQIAEYDEQILEHIAAQSPTPTPVDAPSPADGPELSMSAAVPTDEVVPLTWEEAVTIWDDIPGIGRRVAEQLVAEIGTDMSRFPSAAHLASWARIAPGNNQSAGKNHSGKTGRGNQWLRSALIQAAHAAVKVKESYLAAFYHRLVGRRGKKKAIVAVAHKILTIAYTLLQKRERYQEPGATYWDERQKDQLMHRMRKRIERLGYTVQVEPVAVTA

SEQ ID NO: 98946 - protein, 344 aa, unidentified
MKVTRVGLDIAKQVFQVHGVDERGNPRVRKQLARAKVLEFFAQLPSCLIGIEACGSAHYWGRELTKLGHTVKLIAAQFVVPYRKRGKNDANDAEAICEAVGRANMHFVAIKSEEQQSVLMVHRARTLVVANRTAQVNQIRGLLGEFGLVVPKGVVRLRRELSGILEDAENGLPDLAREVLAELREQFHELDARVAAYDRQIRALAAASEPARRLMRVEAIGPQTATALVASMGNPHVFKSGRSYAASLGITPRQHSSGGKERLGQITHQGDRYLRTLLVHGARAYLRVVDKKTDAKSAWARRLKERRHVNVAAVALAAKHARIAWAILAHGTEYRPAGPEVVTA

SEQ ID NO: 98947 - protein, 391 aa, unidentified
MILIGIDVAKDKHDCYIMTSEGEVLFKSFTIANNMDGFNQLYEKILSVTDNLDKVKIGLEATGHYSYNILGYLLDKGLTPFVINPLHTNLYRKSLSLRKTKTDKIDSRTIASMLMSDVSLKPYSDTLYHNEELKSLTRYRFDKVQQRARLKTSISRLVTILFPELEKLVSTLHMKSVYSLLYEFPNAKAIAKAHLTKLTNLLYASSKGHYGKEKATSIREAAINSIGSYMPAKSLELKHTIKLIEELTSEIDEIEQEIKSIMDKINSPILTIPGIGYSMAAQIIAEIGDFKNFDSPDKILAFAGLSPSTYQSGNLYSSNAKMEKRGSRYLRFALFYSAVYVCHWEPTFALYLAKKRAEGKHYYVAISHVVKKLVRLIFHLEKTGEHYVALS

SEQ ID NO: 98948 - protein, 339 aa, unidentified
MELYGGIDLHSNNNVIAIIDDKDHVVFQKRLQNDISIVLKALETYRDVLVGLAVESTFNWYWLVDGLMDNDYKIHLANPAAMKQYSGLKYSDDKASSRWLAHMLRLGILPEGYIYPKQNRSIRDLLRKRSQLVRQKTTNLLSANNIFARNTGSSLKVADIKKLSDKDINAMFTDEYQALAMNSNVSMVRCLEREIKEIERVVKYKIKNTPEYNLLLTVDGIGEILAMTILLETGDIKRFPKVGNYSSYCRTVSSEHRSNKKKKGQGNTKNGNKYLAWAFIEAATFAIRYNDKARRFYQRKSAKTKPVVAKKALANKLARACYYIMRDRVPFDNERLFGS

SEQ ID NO: 98949 - protein, 331 aa, unidentified
MRHCGMDVHLRSTTVETLDADSGEVCRRVLRTDRETLRRWLMMEPPMRVVLEAGASSHWVAETVEELGHEVVVVDPRRTSAVAVAGGCKKTDALDASTLAWLSSKGALVPSFRSSPAMREWRRLLTTRQRIVRSRGDLVRTVRSALAAQGIVLPVRRLKKFVARVRELPEALSLGGLLHLIELFDEQLALANREVLARAHTDAIVQRLMTVDGVGPLVASAFRVVIEDARRFRSGRQVAAYVGLTPAVYNSGSSERLGSITKHGDKLLRTLLIEAALVLLNRTRKPSQLQHWGRQVRVRVGQRKAAVAVARKLCSVMWAMWKRETEFKRTA

SEQ ID NO: 98950 - protein, 455 aa, unidentified
MEKYYLGVDVSKGYADLVILDGNKQVVEENFQLDDTFDGHCRLYEILCKFFANHPQCMLYAAVESTGGYENNWFNALVGFQATLNLKTARLNPLGVSANSKADLKRNITDKISAQNVAEYMIAHPEKVSYEQQDHLASLRKQWSFIKMLTKQSTQLLNQLEPLLYSANPELLTYCKGGVPGWVLKLLKRYPTASKLAKAKAVSVARIPYISSARAQQLILDAKESVASVTDKVTEQLIRATVKQILHLRELIASQTEIMAKHCSVAEVDLLKTFNGINDYSAVGLILEIQTITRFSTVKKLASFFGLHPVYKISGDGSGSFRMSKKGRKEPRRILFMVALSAIRSNPLIRGIYLDRIKQGMQKMAAIGLCMHKILRILYGMLKHNQAFDPEVDRRNRERMDQFRPLPHKDKNRRYQDFDPNAPVSRRQDIKRKERKQSHSDNITKRGIIAPVPPS

SEQ ID NO: 98951 - protein, 308 aa, unidentified
MEVYILGVDVAKAKFDVALLLGERVAHHQFPNNANGFAVLKGWLRKRGATQLHACMEATGRYWEALAAYLHEMDITVSVVNPRQVKSFGESELQRQKTDRVDAGVIARFCRATNPAAWTPPPAELRRLQELVRWLDALKRMQTQEKNRLSNPGVTPLVEADIEDHLAYLRERIKEAERAISGHINAHPQLREQRELLTSIPGIGETTAALLLGELGEVGNFTNGRQVAAQAGLTPKQFQSGSSIKGKPRLSKMGNVHLRKGLYIAPSSPNTATPSSKPSVNASSPQESPPRSSSPPPCVNSSSSPSPS

SEQ ID NO: 98952 - protein, 433 aa, unidentified
MKGPIVSIDVSKGKSDYQAFKNLNVKYTGSRSIKRTKEGFDEIVNLVREMEKKLETEVCVVYEATGVYHRVLKKVLEDNNIKQFIINPLLSAKTRKNDSLRSPKTDKLDPKSIAKTYYSHSLHNSHKPETIYHELRELSRYYEDILVHIRKDKVAFIAQLDIVFPGYDALFDDLYSPVSLTIIEKYPHPEMLQKKKINTVSKVIQSKTCHRQAASDTMADKAIEYSKTIYSGCDKDDIEVLILQRFIKKLKEDMAEAERTIGEMIKLAQELPDFSIIKSIPGIGDNLAARIIAELGDMTRFKKKNELVAFAGLDPRISESGKNDGDHMHITKKGNKRLRCLLYLAVTCSIRLKRDDNSIKDFYIKKKQQSNPMCSKAAKTACASKLVRIIYSMCKTGELYQYNNNQIIHLNHPEKKHFFFRGFQHAVKTMKNY

SEQ ID NO: 98953 - protein, 331 aa, unidentified
MGACHFVGVDVGAKELVVAMDRNGVRESGMVFDNDREGHRQLIRFATKKGATARFVLESTGVYGLDLAFALHRAKRVEVMVANPRAIAAFGKASLQRSKTDALDAEVILDFAMRMPFKAWCPPDPEILELRALSRRIEAMSQSMTQEKNRLHASDQSEELSDFVKQDIRELVELLEGRIGRLRKQALGVIERSEKLRKAFGHLTSVKGIADAAGIQLLAELGTLPKDMTTRQWVAHAGLDPRQHQSGSSVHKPARISRTGNAHLRRALFLPAMVSARWEPNVKAFYEKLLARGKTKMQALVAVMRKLLHAIHGMLRHDEDFDGEKFFATKA

SEQ ID NO: 98954 - protein, 457 aa, unidentified
MAASNQANTMAKRRNKNKTKHLLAQNIHTNAAGIDIGAEELVAAIPQERDDRPVRSFGTFTEDIHSLCKWLLSAGITTVAMESTGTYWISPYEILEDAGIEVCLVNAQHVKGVPGKKTDVCDAQWLQQLHTAGLLKASFRPTREVVSVRQLVRHRSNLVKDTSRHLLHMQKALTEMNLKIHHVFSDLDGASAMRIIEAILDGQRDPEVLWKLRDIRCRTSRTTFFKAIQGDWQTSQLFILKQCHQAWKQTREAITQCDDTIQELMTKVPSETQEQVPKIPRSRTKNHMCFDVYQEAYRFYGVDLSSIDGISAGVLPVIMSELGNSQDILSNFRSGKALASWLGLCPDNRISGGKVLGSKTRRVSNRIANALRMAAQSLTHANSALGEHCRRMKARLGKTEGTTAVAHKLARLIYALIKSKEPYDESKAFQTTGKVRERRLKKLKKLAESMEMKLIPA

SEQ ID NO: 98955 - protein, 321 aa, unidentified
MTETQKPSSRPFIGIDVAKYRFDGASSSGPIIGLHVRELPRLVDWVESQNPQLVTLESSGGYERDLVAALVEKDIPVAVVNPRQVRNFAKASGRLAKTDVVDAKVLAAFGEAIRPVVRDPKSPELMELRDLIARRRQLVEMRKVEKTRLEGARTPALVKAITRHIDWLSGEIKSADKDLDGAIKANSSFQEDDEILQSIPGVGPILSRTLIGDLSELAFMNQRQAAALVGVAPFNCDSGMMRGKRAIWGGRGEVRSALYMATITAIKKNPIVKTIYDRQRAQSKPFKVALAAAMHQLLKLAQALLKSRQKWNPHLANLTVA

SEQ ID NO: 98956 - protein, 454 aa, unidentified
MRQGKASTKVDVECGFPLLRPNAASIDIGSREHYVAVPEGRGTPSVRSFGCTTSELKEMAAWLHSCGVDTVAMEATGVYWVPVHEVLEDAGLKPFLFDGRQTRHVSGRKSDVLDCQWSQKLHSYGLLTQAFRPAKDIASLRSYWRQREGIVDSCSRQVLLMHKALEQMNVQLHKAVSDVTGQTGMRIVRAIVAGERDVHALARLRDRRVKATEEEVARALEGTYREEHMFALAQALEAFDFFQRQLMACDQALERYLAQLPSAPDPASVPPPPQRRRKNQPHFDLRKELVRIAGVDVCQIEGIAALTAQTLISECGTDMTPFPTEKNFTSWLGLCPNNRKTGGRIRSRRTRRVNNRAACALRVAAQALHHSNSGLGSYARQMKARLGAGKAITATAHKLARLYYRLMKHGEAYFAQTQAQYEALRRERDLHALRRRASHFGLQLVNTTTGELIG

SEQ ID NO: 98957 - protein, 426 aa, unidentified
MSERDALSALIGVDWADQHHDVALQETGTTRIERLRLPHTPEAIAEWLRDLRRRFGNRPVGIAVETSRGPLIHALLDYDWVVLYPVNPRSLKRFRETFAPSGAKDDVPDADLLRELLVKHRDRLRAWVPDGVETRALRRLVESRRRTVDLRTKLTQQLTAALKEYFPQALGWAGEDLSSALACDFLLTWPTLKAVQRARRKTVEAFYTTHNCRRPERIAQRLEAIQEATPLTHDPAIIETSVFLVQMLAQQLTTLRDSLARFDAEIARRFAVHEDAALFKSLPGSGAALAPRLLAVFGTDRTRFRQAADVQQYSGIAPVLQRSGHSSIVHRRWAAPTFVRQTFHEFALQSIRWSAWARAYYALQRSRGKGAHAAVRALAFKWIRIIWRCWQERTPYDEARYTRALLQHTTPLTSRLALHVAPTTTS

SEQ ID NO: 98958 - protein, 427 aa, unidentified
MAKGKIDPEPEFAAFVGIDWADRKHVWCLQAAGSAKRETGELEHKVEAVEAWVAELCQRFGHRPIAVAVEQVKGALVFLLNKYECLHIFPVPSTMTAKMREALYPSGAKDDPRDADLLLDILWQHRDKLRRLSPDNEATRRVQNLVEERRKLTAEKTAQGNRLTSYLKIYFPQMVEWFEKLDMPLVCDLLERWPTLEELQKVSTEELRTFFRQHHCHRGLRERRILAISGAIPAKGDRAVIEAKSAVVKVIVQLIRSLLQGIAELDGKIEEVAAEHPDFFIFESLPGAGAVMAPRLLAAFGSQRDRYRCADELQTYSGIAPVTERSGKRKWVHFRWACPKFLRQSFHEWAGHSIVQSAWARAYYQQQRDRGSDHHAAVRALAFKWIRIVFRCWKDRVAYDESKYLAALAKRGSPLDKLVVVGIGTSL

SEQ ID NO: 98959 - protein, 350 aa, unidentified
MIVGIDVHKHQHAAALIDDRGGEIGTLTIANSPEGYRRLLSWLAKHDAADAVVGVESPGSYGRRLVGALAAAGHEVLHVPAWRTHRERHRQGPGKTDPGDALAIADVVRRKRPELGPALEPELVRALAMLELQRKRFVRDRTQAIQRLRSDWTQIDPVAEAEVIRCDRPTVLRRLKRLRFGDSLSEQIAARCIRELARDIEDLNARIAALDEQIAELLAEHGNPVADLLGAGNQVAATLIAHAGDVRRFKDAAAFARFCGTAPIPCGSGQTAGRHRLHRGGNRQLNAALYRIAIVQQRHHPQAKAFLARKISEGKTPREARRALKRHLANVVYRRLLAWAETCPSMQLLT

SEQ ID NO: 98960 - protein, 399 aa, unidentified
MRIRGLGRQCECLIRTGGGHATSMERGSLMLNTTTFVGLDVHARSIKAVALDAMTGEVRSATFGYDAAEVAGWVSSVDPSAKCVYESGVTGFDLQKRLASMGIDCVVGAVSKMIKPPADRKRKNDRNDAEFLARMLSVGNVVEVWVPDDGCEAARDLSRALDDAREDLKRRKQRLSKFLLRHGYVFSETTPTGRRKGSWTAAHWAWIKSISFPEKADDDVLAYYVDAVRQATEDKARLERLVEAEASKPRWKRRIDSIRCLKGIDVTSAADLVFEAGEFSRFKSARSFAAWLGLTPSEHSSGESVRQGGITKAGNKHLRRVLVESAWHYLGCSPRSKDLAKGQVPDPAARRHAAKGVRRLVERRRAMLERGVHKNKANVATARELACWCWAVGRMIENG

SEQ ID NO: 98961 - protein, 394 aa, unidentified
MGKLYVGIDISKDKSSANGIDDHGKSRFEISFSMDGTGFAELLKAIEANSESNEGVVAAMESTACYHINLYSFLSAKSIETIIINPLLIANFAKLSLRKTKTDKKDARTIAQFILTHRNSVTQLAISQDLQDMRDMARERESLCHQISAAKVEIQRVLQTTFPELMAMTNPLTKVMLHFIQRFPSARLVSMSKPSAIEKTLKEKPCSCRLRFTPEELIEAARTSIATVSPAKELILSGKIETLVHLQKRRDELTKALIKYCESTIVDDLRIITSIDGINNETATTLLAEIGYIGNYPSHKNLIAFAGIDPTVYQSGKYEGASRISKRGNRHLRRVIWLMTISVIHHNPLFRNYFLKRRNEGQPFKKAVFATAHKLMRVIFAMLSKKTYFQEKCV

SEQ ID NO: 98962 - protein, 434 aa, unidentified
MEEVTDEPLYRDRVCGIDIGKAQLYATIRVPSDSNPARRASETRSFATTKRGVLALADWLRSWQVPAVVMEATGDYWKGPFYRLEAGGFECVLADARQVKNLPGRPKRDPSDSSWLAQCFERGAIRSCFVPTPEFRVIRLHTRYRRDLIEERTREKNRTEKLLESAAIKISSVVTDLHGVTGRDIMDHLIAGERSPKVLAQLARRRARRKIAELEEALEGAEFFTGYHAGLLKTMLARIDQIDAEITRLSEVIEQLLAPWEEQLQQAESMPGWGRRSAQDVLAETGPDMTKFPTGGHLVSWAGRAPLDHQSGKHQGRSRHKKGNKYVAAATGETAISAGKTGTREGARYRKLARSRGKAKACVALGNTQLKVYHKLLSNPGMRYHDLGPDYYQRRAQTRRKITYHVRELEELGLEVTLCRPGPAQDDPEPTRAA

SEQ ID NO: 98963 - protein, 357 aa, unidentified
MVMIGADSHKRTHTVVALDEVGRRLGTKTVRTNSDGHLALVEWSAQFAAHDDEGVRFALEDCRHLTRRLESDLLAAGQRVLRVPTRLMAGARRSSREPGKSDPIDAEAVALAALRHPDLPVAELDGPAREVKLLSDHRHDLVVQRSRIAQQVRWHLHELDPDLLIPSRGLRRKKVVRDLLAELERFDGVVARIARQLLVRCQELTVQINDLERELRDLVRQLAPSLLQIPGCGVLSAAVIVGETAGVHRFRDKDAFARFTGTAPVPVWSGSSKGKVRLNRGGNRAVNCALHMIAVTQARGVGPGRAYLDKQIARGKDRVAALRLLRRRLSDVVFTALRADLRAAAAASDSELVQRAA

SEQ ID NO: 98964 - protein, 371 aa, unidentified
MKKHTTFVGLDVHKDSIDLALADSGRDGNVRHYGTIGGDLESLHKVVRKLQSTGSELRFVYEAGPCGYEIYRFLINQGFDCIVVAPSKIPRRSGDRIKNDRRDALSLARLHRSGDLTGVYVPTVEDEAMRDLTRGRGDAVKALRVARQLLLAFLLRHGHRYSGKAYWTNAHKNWIAGIKMPHRAQQIVLQEYVHAVQEQLERVQRFTRQIQELVPQWQLAPLVTALQALRGVSLIVAVTTVAELGDLSRFDSAKQLMAYLGLVPSEHSSGGATRRGGITKSGNGHVRWALTEAAHAYSHPARESRALLARMEGLPREIRNIAWKAQVRLCGRFKKLIARGKNKKAVITATARELAAFMWAIACATLPGATA

SEQ ID NO: 98965 - protein, 404 aa, unidentified
MKGPIVSIDVSKGKSDYQAFKNLNVKYTGSRSIKHTKEGFDEIVNLVREMEKKLETEVCVVYEATGVYHRVLKKVLEDNNIKQFIINPLLSAKTRKNDSLRSPKTDKLDPKSIAKTYYSHSLHNSHKPETIYHELRELSRYYEDILVHIRKNKVAFRAQLDVVFPGYDTLYDDLYGPVALAVIEKYPHPEMLQKKKINTVSKVIQNKTCHRQATSDTMADKAIAYSKTIYSGCDKDDIEVLILQRLIKKLKEDMAEAERTIGEMIKLAQELPDFSIIKSIPGIGDNLAARIIAELGDMTRFKKKNELVAFAGLDPRISESGKNDGDHMHITKKGNKRLRCLLYLAVTCSIRLKRDDNSIKDFYIKKKQQSNPMCSKAAKTACASKLVRIIYSMCKTGELYQYNK

SEQ ID NO: 98966 - protein, 312 aa, unidentified
MVDHCYGGIDVSKDRLDVQVLPQGRCFSVDNTAAGWKQLVDRLRGLSIAALGIEPSGGYERGVIRALLDAGLSVRRINPNKLRQFARARGVLAKNDRLDARLIAEYVAIMPTRVVHRDPAAEQLAAVVTMRRQLSDEHVTVENQTAHIEDAMLRRLNKRRLARLKADILLLDKRMAEIVASNANLARRYDLLTSMRGVGPTLAFTLIALLPELGQMSRKQIAALVGLAPYDFDSGRLKGHRCIYGGRMPVRNVLYMAALSAARYNPVLKTLLYRLAATNKKPKVVIVAVMRKMITTLNAMLRDNLAWQPKSA

SEQ ID NO: 98967 - protein, 413 aa, unidentified
MKKHTYRAQKVNNMNWQQVNEQTAGEALVLAVDVAKVQQYALLTNQEHTQTWLMQWSHLEHTQYLIEQLKALEVPITVVMESTSTYGDSLRYQCRQAGFSIYQANAKKVHDAREIYDGVPSLHDAKAAWLIAKLHKDGATKLWCEPTEEARRMNALRLEYELHQDQHLRNKNRLEAYLSRHWPEVLTLMPLDSITLEQLIKAYGSPQEVGTQSEQAASDMRGWGKSGLSADKIAKVIACAKNTLGEPCIEAERQFLMALASELQHSREQKRAAKQALEAIVENDEALREMGRTIGKITTAVLISLHLDPRCFATPKSYQKALGVNLTEKSSGQINGRLRLSKRGSAIARKFLYLAALRLLVNDPLVGKWYEAKKDDRAKLKTVIALMRKLPLALWHIARGERFDAGKLLKVAV

SEQ ID NO: 98968 - protein, 276 aa, unidentified
MEEVVTVGLDIAKSVFQVHGVDAEGRVVVRRRLTRAKVIPFFEKAPRCRIGIEACATAHHWGRRLAALGHDVKLMPPSYVKAYVKRQKNDAADAEAICEAVSRPSMRFVPVKTPDQQSVQVIHRTRMTLMRHRIELSNTIRAHMAELGLVAPIGRLGLQGLIEIVRDDSDARVPTSARTCLKMLADQLDLVNRQALENDRMVLADARSSEVGRRLMAVPGVGPVLASAMVAAVPDPRAFRSGRNLAAWIGLVPKQNSSGGKERLGGMGRSVPGSCS

SEQ ID NO: 98969 - protein, 414 aa, unidentified
MLFVGDDWAEDHHDVEVLDEAGRRLGRARLPEGVAGIDRFHALVGRFADPDDESGAGQVLVGIETDRGPWVAALVAAGYRVFAVNPAQAARFRERHAISGAKSDTGDAHVLADMVRTDAHQLREVAGDSALGEGVKLLARAHQSLIWERTRHLLRLRAGLVEYFPGVLAALAAGGLDLGDRDALELLATAPDPDTAAGLPAEQITDLLSRGARRGDLPARAEAITAALGAPQLTQPPVLAGAYAIVTRSLVAVLTSLAEQVTELESQVGAYFGQHPDAEIYRSQPGLGVILGARELGEFGDDPHRYTSAKARKNYAGSSPITRASGRKSVVLARHVRNRRLADALHAQAFSALRASPGARAYYDALRARGIGHHAALRQLSNRLVGILHGCLKTRTLYDEHAAWAHHQDQQKVA

SEQ ID NO: 98970 - protein, 409 aa, unidentified
MRYYLGVDWADQTHAVWVVDEGGTKVAMRTVPHTAEGLTEWGRALDEWRAQGIELWAAIERPEGRVVDLLLDHGVVVYAVNPKTLDRARDRFRQSAAKSDPFDARVLADFLRTDHAHLRAVQPSSEAAQELKLLTDDYHRQIRQQTRLVNQLTTTLKAYYPRGLEVAELTTGLAREFLQTYPTPATITALTERQWQRWAHAHRLSETRTQQLWVVLQRPQLPVPPHVVRAKARLMQSLVAQLMVVMEGVGAYREAIEDFFARIPAAQWIRTLPIGDHGITAPTLWARLGDAPGRWESFRHLQAQAGTVPVTIRSGKQQVVRFRFACDKSLRYIIDHVAFLSLRWSEWAHAYYAGQRARGHSYRQALRALSAKWLKIIFVMWERQIPYDEQYHLAMMTRQQLRQRQEKVA

SEQ ID NO: 98971 - protein, 452 aa, unidentified
MANSAKRKQTAKGLRFEVVNPNAAGIDISPKEMQVCVPADRDGDCNRTFGVYTDDLHYIAEWLKACRIDTVAMESTGIYWLPIFRVLKDKGFDVILVNPSDVKNYSGRKTDASDAEWLMMLHSYGLLKGCFQPENIARSMRELIRHRDNLIRSASREVLHLQKAMEQMNLKLDNVFSDILGKSGQAIIKAILSGERDPKKLSALADPRCRTSVEEIEKSLQATWDEEHLFEMKQSNALYQFYQQLISECESEINKIAERYTAMVDAPKAELLRSAKYNAKKNQIGFDVEKYAFELWGVNVMRMPGMSRALLLRLLGELGQDFTMKFPDVKHFVSWANLVPNNKISGGVLLSSKVPKKKNPVGMVFRQAANSLKAAKCPLGDYFRHIRAKGGHLQAMVATGKKLASVFYIMVQRKVEYDEEIYTIHKRTELQDKVSYLQKRLKRMELELANCS

SEQ ID NO: 98972 - protein, 352 aa, unidentified
MTVDLERGYKRRELCGPKQYLNLLLRSVLMIYVGIDVAKDKHDCFITNSDGKVLFPVFTIQNNRDGFDVLFSRIQSSSSDVSNIKVGLEATGHYSYNLLGYLIDKGLPTYVINPLHTNLYRKSLSLRKTKTDKVDARTIALMLMSDVNLKSYSDTSYHNEELKSLTRYRFRKVQERAQLRQSVSRLVTILFPELEKLVPSLHIASIYALLSEFPSAGTIASCHLTHLTKRLENASKGRYSREKAIEIRNAARASIGSNMPAKSLELKHTLRLIGELDSEISEIESEIKRIMDEIHSPILTIPGIGYRMGAMILAYAGASPSTYQSGQMESSYSHMEKRGSRYLRFALINAAK

SEQ ID NO: 98973 - protein, 415 aa, unidentified
MEKLLERCAALDVHKRQVTACARVPDRKGERAELRAEFETMTPDLLALRDWLKGLGITHVAMEATGVYWKPVYYLLEDDFELLLVNAAHVKNVPGRKTDVADAQWLCQLLEHGLLRASFVPPKPIRELRDLTRYRKSLIWERQREANRLQKLLEDANIKLASVATRTLGVSGRAMLAELCEGRNDPEALAELARGKLRRKLPELRRALQGRFSSHHALIVSRLLAHVDYLDETIAELSGEIEKRLRPFEPEVELLRTIPGVAQRTAEVILAELGPDMSRFPTHRHAASWAAICPGNDESAGKRKSAKTRKGDGWLRTALVEAANSAAGRTRGTYLNAQYARIKRRRGHNQAIVAVAHSILVSAYYILRDHRPYEDLGGDYFLDRERPERLTRHLVRQLERLGQRVTLEPVAAGAR

SEQ ID NO: 98974 - protein, 348 aa, unidentified
MTVYIGVDFHARQQTISYLTTEDGEIRRLQLDHGQPGEVRRFYQQFAGQRVVVGFESSGRAAWFEELLEELGCEIWIGHATAIRLFARRRQKNDRRDADLILDLLVSGDFPRIHRYSAESRTVLQQLRYRQRLVKMRTMVLNSLVFMASSRGVVLRSQLKTKRGLARLQQLALPPTLGEQRVEWCQLLLELKPKIDKVEKWLAAKADSDLRVRRLRSQYGIGPLTGLCLAHTLECPERFANPRKVTAYVGFDPVEDSSGQRRRIGSISKQGSRLLRFLLVEAGQIAVRKDQELAQVYRRVLIRRGHAKAKVAVARRLLVRAFIMLRDEIDYAEFQRRGVAARSSREIA

SEQ ID NO: 98975 - protein, 310 aa, unidentified
MDATFVGIDVSKDWLDVHVLPSGEAFRVGNDAGGHERLNERLAALRPQRVGLEATGGLETAVAAGLAGARVPVVVLNPAQVRSFAHAMGKRAKTDPLDAGVIAAFVAAMRPEPRPLPDAATRLLADLVARRRQILAMIGAEENRARRATGKQMKKSIQRLLVALRRELDSLDADMDSHIRKSPAWLVRQDLLTTMPGVGKTVARTLIAELPELGSLERRRIAALAGLAPYTRQSGRWRGRSFIGGGRSGVRAALFMAGLVAIRHNPALKAFRDRLVAAGKPKIVALVATMRKLLTILNAMIRDQKPWKDA

SEQ ID NO: 98976 - protein, 337 aa, unidentified
MEVRIVSTPSAGTDNEPVHCYVAIELSKSSWIVGFQTPLTNKTSQYQVKACDASALLELIERVRTRVARELRRPIEVMSCYEAGYDGFWLHRVLKAHGIHNHVLDPASLQVNRRARRAKTDRIDADRMVRALIRYLRGEPEACSVVRVPSVEQEDARRLHRERRRLIAERVQHVNRIKGLCATQGIYHYAPLRKDRLARLDDLRTGDGRALPTRLKAEIARELKRLEVLLEMIATVETERDVILTSAASTHLNAGKIKMLAKLKAIGPEFATTLVGEVFYREFANRRKLGSYVGLGSSPFCSGPVDRDQGISKAGNPTARSMMIELAWTWLRYQPGP

SEQ ID NO: 98977 - protein, 416 aa, unidentified
MLFVGDDWAEDHHDLVVIDNNQKVVARARVPEGPAGITAFTDVIARAALKTVTSDDDLDDDALEVMVGIELNHGPWVQALVAAGYQVFGVDPLQAKRFRESWSNSKTKSDSGDALGLAELVRSRHRTLTTVGADSEGSAAIRILAREHQRAVWDRTRQTNRLRSTLREYHPAIVTIAAKYDLPLHDKTILGLLTLAPTPAAGAAITVRQVLPLLARRHDKDAKAAWIVQALQQPQLPVGPEIVEAYAITVRAATRVISSASSHIAELEEQVNAHFSRHPDAEIYLSQPGIGQVIGARLCGEYGDDSTRFRTAKDRRNFAQTSPLTRQSGKLRIVCARKAGNDWALDAAILQANAAIMHDKYAHAYYRRQRDRGVKHNAALRQLANKLTGILHGCLARHHRYDPAIAWANADLEVPA

SEQ ID NO: 98978 - protein, 348 aa, unidentified
MQISRIGLDIAKNVFQVHGIDTSEKVVVRKQLRRRQVLAFFEALPPCLVGIEACATAHYWARELTKLGHQVRLMPAKDVKAYVKRNKNDAADAEAICEAVRRPTMRFVQVKSAEQQGQLMLHRTRDLLMRQRTQVINALRAHMAELGIVAAQGRDGIKELLKIIAREEDMRLPTDAHTSLVVLAAQLQALQTMIRSIEKRIVVQHRSNEASKRLETIPGIGVIGATAIVATVPDPKVFRSGRDLAAWIGLVLREDSTGGKQKLGPISKQGDQYLRRILVVGAHAVLKRARQHPEKYPWLTQLLARKPFRVVAVALANKMARIAWALLARGGTYRAPALTAATQGVRRR

SEQ ID NO: 98979 - protein, 344 aa, unidentified
MAQLNTIGVDLAKSVIQVSVVTSSGKELVNKALTRKQFGEFLAKQKPSLVAFEACASAHYWARRAQEQGHRVRLLPAISVAPFRQGHKTDQNDALAVAEAAGRPNLKEAPLKSADQQALQAIQRSRDLLIRDRTAMSNHIRGLLLEFGVTIPKGFSHLHAHVPEILEDAENGLPHTFRSTLYLMHERLIAIKRDIDLLTDRIKALVHANESCKRLLDIEGVGPISAVLLYATLGSGEAFSNGREFSAYLGLTPRQYSSGGKTNLIGISRFVANKRLRAILIQGARAYIHRVKEPKTPKDKWLLAMVERAGYGKASVALANKNTRTAWAMLTQGTEYNKFQGRAA

SEQ ID NO: 98980 - protein, 408 aa, unidentified
MNSVGIDVSKGYSTVVALRPLGEVALTTREVTHTYSNLERLGYDIISLGEDTRVVMEATGRYHEPVAAALHELGIYVCVLNPIVIKQSGAGSVRKVKNDKKDAFKIAKYGLDNWADLRQYTPADAIRQQLKLFSRQYNLYMKTSVALQNNLISLLDKTWTGANELFDSPTRNDGHQKWVDFVADFWHCDCLTRVSQNAFAERYKKWCKRKGYNFSAAKAYDVYISSAGHFPTLPKNDGSKLLIKSAAAGLTDVRKGLMTVKAEVIRLAEQLPEYEMVQSMYGVGGITGAQLMAELGDVRRFDNRKSIVAFAGIDPEVNESGSYQRQSNPASKRGSSHLRKTLFQVVDTYLKKSPLDEPVYQFLNKKRAEGKPYYVYMTAAANKFLRIYYARVKEYLNVHCHEQEPLDL

SEQ ID NO: 98981 - protein, 371 aa, unidentified
MEHTRFVGLDIHKERISIAVAESGRSCAVEYLGEISNDPVAIGRLCDRLERPGKTLAFCYEAGPCGYGVHRQLISLGHRCDVVAPSLIPTRPGDRVKTNRRDATMLARLHRAGELTPVWVPDVDHEAMRDLIRLRSVVRQIVSRARQHLQGFLLRHGRKHGRGTAWRMAYRRWLSTLAFEHPAQQIAFQDYVDAVMDAERRLQRVEEQISCLLPEWNLRPVVDALQAMRGIALITAVVLVAEVGDFTRFANPRQLMAYFRLIPGEQSSGETIRRGGITKTGNAHARRALVEGAWAYRMKARIGRHKVDRIEALPKVVRDIAWRAQLRLCTRYRRLSARGKTANVVNVAIAREMVGFIWSIACTVQSAPKTA

SEQ ID NO: 98982 - protein, 344 aa, unidentified
MGEVSTIGLDIAKSVFQVHGVDVAGAVVIRKRVSRAKVLEYFGELPQCLVGIEACPSAHHWGRELQALGHTVRLIPPSYVKAYLKRSKNDANDAAAICEAVARPSMRFVPIKTKEQQTALMLHRTRQLLVRQRTMLSNALRGHLAELGVVSAKGRNGTAELLRIIAGGADSRVSPAVRGILEVLARQYGAIGTEIASIDKSIMALHRACEASRRLAEIPGIGPVGATALVAEIGDWKTFSSGRSLAAWIGLVPKQHTTGGKDRLGSITKQGNRYLRWLLIVGAMAVIRYARKHGTQKRPWLGRLMERRPTKVAAVALANKIARMAWAIMVRGERYKEPKLLLAA

SEQ ID NO: 98983 - protein, 507 aa, unidentified
MNNLAAAVAVEPISDDTAGGRHFAAASLRSPPPHPTRVESRKPATPTARVQKSERTLPREGRRISSTMNRVTPTSAAVTKRKESEKMKAWNEVTHFAGFDWAKDHHDVLVLDSTGKITSEFRFDHTATGWTLCQEKLTQFPELAIAVEAGHSAAIERLVALGYRVYPVHPRSSKSYRTRKLPSGTKTDRRDCWALADALRLEGESWRVLTTPEPLVQQLRLLCRDEVTLIEQRTALINQLQQALYEYYPSALEAFEDWCAPSAWAFVECFPTPQALVQAGKRKWQNFLHAHKLFHPELNQKRLEIFARADQFCGPAPAIAAKSVLAVAVAKMLQTLDAQLARYRSLITECFKQHPDHALFTSLPGAGPKLAPRLLGELIALKPLADTPQALQCLAGMAPVSYQSGKVSVVYLRHQCNRFLRHTVHLWVDLSRHYCDWARIYYEAHRKKGQSHACALRCLGMRWLKIIAAMIRNQTPYDAAVHTRNQLQHGSWVMQLQPVQIIKKDAS

SEQ ID NO: 98984 - protein, 520 aa, unidentified
MVTARTTRRPRRRPPTATTGKLRGVLHPRVQQVGPEHFGIVCFDCAKARSKFLLADFYGRILIPPTTVAHNRPDLDAAVAQIRQAFTISQLRDGLIAIERTGRYHRLVQRTFAAAGFETRILHPFVTKQYRQPVDPGNKTDDTDLAAIHRATVTGCALLEATRDEAWTTLQLLIRHRRDLVEKGAALNCQIRDHLEAALPGYAACFDKLWDSPIPWHLLRDFPTAAQLRAAGVTTLCHSLRQAGIRFQQRTVQTVLDWADQAAPGDVAASQHHRIALTLFDDRHRKTLEIQALERDIASRLVQTPYVLLLSFPGINVVSAADFAGEMGPIEHYANPRSITGRAGLRPARYQSDQVDRANGPLVRNCNRALRAAILRIADNLILCNHHFNVLATQWAAQGKDPRDRHVRVGLRFCRIAFQMVAGRQVFRHPCIQGRHYILDKLSAFHTAHDTGVAELMRDLQAAVDQIPAREHAPEAGPLAEELRRIQDGHRRGPQLLGDILPIVLARLGVGVVQSTESGE

SEQ ID NO: 98985 - protein, 325 aa, unidentified
MCSVTSQVVFVGLDYHAESVQVCVLARDGKVLVNRPCRNDWRTITAAVREKCGSQTAVEAAIESCCGAADLADELVGKARWSVNLAHPGYVARIKQSPDKTDFSDARLLADLQRVGYLPRVWLAPEEVRELRRLVRYRQRLTKERKDLKLQIRATLREARQKPPAEMNPWTKVWQVWLRKTAVLSPNARLITDCRLARLAELARHIRAMERLLAEQTRHDPLVRKLLTLKGVGLVTAVTMRAEIGRFDRFRTGKQLARFCGITPRNASSGQRQADAGLIKAGNRGLRTVLVEAARRLMRYEERWMKFAARLSLRGKPVSERSLRT

SEQ ID NO: 98986 - protein, 343 aa, unidentified
MEAVKVIGFDIAKSVFQVHGLNADGKVIIRRQLKRRHVLPFFQKLPPCLVGIEACASSHYWSRELQALGHTVRLMPAAYVKPYVKRHKNDATDAEAISEAVTRPNMRFVATKTPEQQSCLTLHRARHLFIRQQTAVINAIRGHLAEFGIVAPVGRKGVEDLLRVVADPKDERVPKVARACVVALGAQLRMLKAQILEFDRMINAWHRSNKTSKELDEIPGVGPALATALVAGVADPKAFRSGRDFSAWIGLVPKQHSSGGKEKLGSISKRGDRYLRGLFTSGALAVIRYAKIHGTKHRPWLTRLLARRPTKVAAVALANKIARMAWAMMAKGERYKEPVALAA

SEQ ID NO: 98987 - protein, 404 aa, unidentified
MRFIGIDIASEKHVLAIVDEEGTVLQKPVAFTEDREGYDKLLGLAAAPEDALIVMEATGHYWQNVFVELVAAGYKVTLVNPLQTRRFAEVGLQRTKTDAIDAIGIARFGAQRKPAPTAIPDQVTQDLRELVRLRDRWMQELGDRVRQLHRVVDLTFPELTRHVRSLDSELATTVLSHWPTAAQLAKQSVRRVAATVYDGRHEIGNALAQELVTAAKTSVGKHQTYPYQVQTETLCEDIATLRRRLRSFDRQIRDALEQHEVGKLLTTIDGIGPTTAARLVAELGDITRFEHIGALAAYVGLAPGLKHSGKSAPARAGLSPLGHVRLRAKLWMPTLTAVRRNPWLRAFYERLLARGKLPMVALAASMRKLLAAVLSVAKHRRPFVPQLPAHLVENQHAPHADSAC

SEQ ID NO: 98988 - protein, 355 aa, unidentified
MVTLGIDAHKRTHTVVAVDELGRELGQKTTVATTSADHLEMLRWAERFGPERSWAVEDCRHLSRRLEADLLAAGERIVRVPPKLMAHARDAARTYGKSDPIDALAVARAALRHPDLPAAQLDGPARELRLLVDHREDLIAERTRCINRLRWHLHELDPTWDPPARSLGRFRHLDAIAERLAGFDGPVARIASDIVADIHRLTVRERSLERDIATLVAELAPILLALAGVGALTAAKIVAETADVRRFRSKNAFASHNGTAPLPVWSGNRERHRLSRTGNRQLNAAIHRIAITQIRCHDDARGYLERRMSNGNTKTEALRALKRRLSDVVYRALIADAQTLTATSAARPPCDAEAA

SEQ ID NO: 98989 - protein, 410 aa, unidentified
MEAMIERCAGLDVHQETVVACALFGPLDKKPETSIQSFSTTTSGLLELNDWLASLNITDLVMESTGVYWKPVWNILESDFQLILANANHVKNVPGRKTDVKDAEWLAKLLRSGLIESNFVPPEDIRDVRDLTRYRKKMTHQRTAEQNRIHKILQDANIKLTSVLSDIFGLSGRRILEAIMNGEKIEIKDLKEIVHWRTKASLADNAEAINGRIRRHHRDMLQYHWDHMLYIEKMIQDLEEQIDQCLAPYRKEVDLLDTIPGVNQVGAAVFIAEMGVDMSVFKSSKHLASWAGLSPGNNESAGKKKGSKTTKGNKALQTMAVECALSTARQNNRISAHQKRIMKRQGKKKAQFASAHLIVTIAYNILKTGEPYQELGPEYVHQKQQNKERKMIEYLKKKGYTISNSDPETA

SEQ ID NO: 98990 - protein, 349 aa, unidentified
MQTIHRSRTLFVGVDVHKDTHTAVGLSPFGEKVFEMTIGNEAEDFISLIEKTKVEAEKSGLVPSFGLEDVHSWGERLSSFLVEEGLPVRAVAPILVDHRRSKTTHPEKNDSLDASGVAEVMIQRIDSLPLYKLTDEAQKAKQIRELSLEREWLVKERARLKNQLHILLHRIHNTCYRTKFKDPFSKKALRYWMRSVPKNTDVILEQRMKRAVRRILDLREEIQEIEEELTALMKDNGQTLSTASGCGVVIAAEIIGEIGDINRFHSPGALAKYAGCAPREHSSGKTIRWRKTRSGNRRLNRAFHRMACLKYQGRAMTRPERTSNEKYPKVKQKRRPWSACAVSWSMLSG

SEQ ID NO: 98991 - protein, 403 aa, unidentified
MNNVAGIDVSKGKSMVSVLRPFGEVVAKPFSIGHTGSELKELADYLKSLDGETRVVMEHTGRYYEPVARFLHDEGVFVSAVNPKLIKDYGNNTLRKVKTDKADSRKIARYGIDNWAELRQHTPMDTIRMQLKTLNRQQSLYTKTKTMMKNNLIALLDQTYPGVNALFDSPVREDGSQKWVDFATTFWHVDCVRNMSLTAFAERYRKWCKRHGYNFSQSKAVEVHAGAQALIAMLPRDALTKTMVRQAIDALNAISASMERLKAEMQALAAQLPEYPVVMAMHGVGDSLGPQLMAELGDVTRFTHRNAITAFAGVDPGADQSGTHEAKSTRVSKSGAPELRRALFLVMDCLLKTQPQDDPVYRFMDKKRAEGKPYLVYMTAGANKFLRIYYGRVKEYLASLEGN

SEQ ID NO: 98992 - protein, 368 aa, unidentified
MNTKTKLSVSDRESNLAIEVNHGKRVLNLGMDTHFRQVTAGMQEDGGRIKAAGKMSYPLFLAWVQKKLDEGWEIYSCYEAGATGYWLHRQLEQMGVKNLVVVPKAMGQGGKKQKTDRRDGAELCDSLDRYLRGHDKALSVVAVPTEDQEEKRALIRYHRQIMADRGRCEARGKGLLCAQGIEVSGRWWQAKAWMEVQNDPRCKDWMREQLLGWRNKILSTDEEQSGLRERIAALAPAVLPKGVGAYSAAVLHYEMRGFERFKNRRQVGSMTGLCPGIHLSDGRGKEGSINRCGIGIVRWTLVEMVWRLMIWQPQYPPVRRLAAGLVKSKRARKRLVVQAARRLAIDLWRLSIGQTTPEKLGLIMHSTK

SEQ ID NO: 98993 - protein, 425 aa, unidentified
MNCKQNERINQVKESTLVVGIDIGSTTHYARAFDWRGIELGKVFKFSNSREGFDSFKNWMQWLLNKNNKSDVIVGIEPTGHYWFDLGAYLEDGGILLVMVNPYAVKQTKELDDNSQSKNDCKDPKVIAKLVIEGRYSAPYTPDGVYADLRVLTTNRKRIIRELTQIKNRIARWFAIYFPEYKDVFRDYESESSMLVLRKACTPEAIVNLGPEGIDQIWREVKLRAVGKKRAETLWETAKRSIGLKKGTTAAEFEMKMMLEDYDYKMTQLNSIMEEIESLCKKIPESEQLLAIKGIGLITVAGFLAEVGDVRRFDSPRQIQKLAGLSLRENSSGKHKGQTTISKRGRSKLRAVLFNAAIPLIATNPEFKALHKYYTTRAQNPLKRKQSVIAISCKLIRVFFAILTKGVTYDPAKMMSDIHRQPVAA

SEQ ID NO: 98994 - protein, 349 aa, unidentified
MYYVGADLHKEQTWFYVMDEKGNKIDSKSIPNSPDSLKSYFATMPTPFTLAVEATYNWYFFIDMAEQFAQTAYLANSYELKAFAKRHKKTDKIDARLIADILRKGFLPTVFIPDQSIRSLKELLHYRINLVRDRCRNIFRLKNTLDKLGADSSGDFTTKKRLWEIPVDSFAERCHYIISGYIGRIVALNQHIHNMKTYLKNELLEDKEIQNLITIDGLDYFSAALIKSEIADINRFASFNRLCAYAGLAPRVSQSGDKEAHHGALMANRRKNLQWILLETVFHFIKATPERQARYEELKGRKGANTAKVIMARQYLKIIYHVLKEQRPYYREEVKRPKVFCQIQSVATA

SEQ ID NO: 98995 - protein, 347 aa, unidentified
MSTITVLGIDLGKSTFHLIGRDSHEQTILKKKLTRKKLIEFIVQLPACTIAFEACGGAHWLARLCQRHGHTTKLIPPQYVKPYVKGNKNDFIDANAIAEASGRPSMRFVPVKSEEAQSLAVCHRLREGFVADRTAYMSRIGAILLEFGLALPVGHSTMKRLFAWLATQHTVTLPIMLFQELQIAHDHYLYLNEKITEQDRKIIAQVKADKRCQLLKTIPGVGDMTASQVVMEVGNAQQFRNGRDMAAWLGLVPRQYSTGGKPTLQGISKRGNKRLRCLFVHGARAIMSKLSCSDGPLHQWVRKLRLSKSFNVACVALANKLARIAWSVLRNSRAFNVNALQPSLQAL

SEQ ID NO: 98996 - protein, 357 aa, unidentified
MPQKERLVGLDVSSSQVDGYVLASTAARSVQNDAAGRAGLLAWLRAEGVELAVLEASGGCERTLVRQLRTAGIEVRVVDPRRVRAYARALGRRAKNDHIDAEVIARFAQACPAKPGEHSEHDPAREAVASLLATRQDLLETRISMENRLGHQDGPARQVLARVIAQLEKEIAGLDRLIARAIADHPPFQALARRLDTVPGVGPVLIAALIAWLPELGRANRMKLAALAGVAPYDEDSGNSRGPRHIAGGRTALRGVLYMVTLGAATRSNPVLMATYQRLRQAGKEAKVALVACMRKLLHILNVMIAREQDWNPDAATRPVDERPATAGSVLRTDPMKSPKPGGWTGARPIAAGGGGA

SEQ ID NO: 98997 - protein, 464 aa, unidentified
MRTIGIDLAFTAAHKAVVLDEQQHYVTPVISFHTRAAELDSLLAGARQGADSSEVQVVMEPTGMAWFPIAVYLEQQQVPVYLVNCQEVSDLRKYYQRHAKSDRIDARVLAQLPSVNPEHLHRLTPASAKLLACQRGCKELDRLSRAMVALQNRLHAIDRFAWPELTPLVFKDPLAATARWFREHWYDPAQVLQAGASRIRQNSPDPADSPENQGDWATDLVRLAHQVVELYGTENRFLHFEELQAEIIRLQATLAFLEGQFDTVRFRIVRPLYRQLHPSRNLETIKGIGQDSAAVYLSFIGDPQRFQTARRLRGWSGMVPNSKQSAHTEAKGLHITQAGPALIKKYLYLDAEIARQWDPQLAALYYDQMVNKGKHHLQAICTCATHLLDRIRIVLRDDRPYELRDVQGQPVTVAEARAIIMERYTVPEEVRQRNNKRTRHERAANLIEKQHARQTKKEKSPKIG

SEQ ID NO: 98998 - protein, 332 aa, unidentified
MQNIDYIGIDVSHLTLDVCRQEGGKEISSSMDNSMSAIQSWVSALPATAHCVFEATGIYSRKLEYVLSQQGVRYTKVNPNKIKGYMHACGCLNKSDRHDARYIRRYGEAFKLESGPKVCEDYIQKERYVHALSDLRKTLQNIDNQLHVIKQEPITLDGLLDTYEQIKSSIQAEIIRVEQWLEALQVPCQTNEAELLQTIPGIGHKSAQAMLHAVGTLGCFETDKQLVKYFGLAPVSATSGTSVRKTLGICGTAVPRVRSTLYMAATSAIKSNPACKALHLRLRQKGKPKKVARIAVVNKLVRQAFAVVKSGKPFDHNYEQQYQSAKTENLEN

SEQ ID NO: 98999 - protein, 345 aa, unidentified
MKPLTHYYVGIDIGSETFACSILTNPDNDVYSQDELLNTPSGFEELEEWLAQHNVSSKNSIVCLEATGVYGESLCYWLNSRGYSVAVEPPQKVNRAFKIKSHKNDKIDSRQIAQYAYRFADELNFWKPRAEIIEQIAVLLSTREQFVGQRTACTNATKALRRKVVQTPLANKLYEKNIKHLNQDIENIEKEIANLISKEPEYKQMVAWLSSIPSVALLLASNILVMTDGFTTSENIEYRPLAAHIGICPYQHKSGTSTRGKTTASGHGPARARKLLYLAARTLRTHHPQFKEYFLRKRAEGKDSRLVLNNISNKLLKIMCAVIRNKKPYIKNYMSINPQFIQKRA

SEQ ID NO: 99000 - protein, 342 aa, unidentified
MNKVAIAAIDLGKHTFHLHAQDDRGHELYRKKFNRVALAQHLANLEPCTVVMEACGGAHFMAQEVAKLGHTPKLIAPHLVRPYVKSNKNDFADAEAICEAATRPTMRFVPPKNQAQQALAMLNSVRESYIKDRTATVNRIHAALLEVGVSLAPGFKSIKELPALLEMSSFSGSIKKILMGLHEHFNYLDGKVKALDKDVECQAAEDDLASRLMTMPCVGPITSSALAAELGDGKQFKCGRGYAASIGLVPKQHGTGDKTVLLGISKRGDRNQRRLLIQCARVYLIQLDRQKGALADWVRQLLASRHHSNLVVCALANKFARIAWAIAAHHTEFDAGPNAMNA

SEQ ID NO: 99001 - protein, 319 aa, unidentified
MSTTTIERYAGVDVSKARLDVAVRPTGERYSVANDPEGLDTLVGRLVMLAPELVVLEATGGFERPAAMAIAASGIAVAVVNPRKARDFAKATGTLAKTDRIDAYVLARFAEALKPEPRALPDEEALLLSEILDRRRQLIGMLVAEKNRLAATVCGPVKRRIRSHARWLEKELSRTERELEEAVEASPIWRENEALLRSVPGVGPALSRTLLAELPELGTLTHKRLSALVGVAPFNRDSGRMRGKREVWGGRARVRTALYMSAMVASQHNPLIRQFYERLVKAGKPKKVALVACMRKLLSILNAMMRDRTPWRCIHALTP

SEQ ID NO: 99002 - protein, 342 aa, unidentified
MGYFAGLDVSLDDTALCIVDDAGRIVREARVASEPETLVAFFGACGMTMDRVGLEACSLTAWLHAGLTEAGITAICIEARQAKAAMGAMPNKTDRNDARGIAQIMRTGWYRAVHVKSPSCRSWRALLTARRMVLNKRRDVENGIRALLREVGLKVGTPSRKDFPARVRELAADDPVLMSLAEALLSVMDVMTGEVEKLTKRVLDEVRVEPTCRRLMTVPGVGPLTALAFRATIDQPDRFRKSRDVGAHLGLTPRRYQSGETDVQGRISRCGDELARTALYEAAHSLLIRSTKWSALRAWGMSIAKRRGMARARVAVARKLAVILHRMWVDGSEFRWGKQAAA

SEQ ID NO: 99003 - protein, 394 aa, unidentified
MKYAGIDIASEKHFVAIVDEAAEVLHKATSFTEDAGGYTRLFELLGGADGVAMVAMEATGHYWKNVYAALVAKGYSVALLNPLRTNRFAAEDMQRTKTDAIDALGIARFAAQKRPAVKRLPDSATEELRELVHLRDRLMQDMGDRVRQLHRAVDLGFPEFTRYVRGLDSALATAILKTYPTAQAFNGVRGNTLSHLKYDGHHFVGRELARQLLDAAKVSVGAHHAAPYQLQVKYFCQDIDTLRERLHALDRDIDEDLDKNEVGKLLTTIDGIGTVTAARLIAVLGNPADFRDGRALAAYVGIAPALRQSGKHTTQRAGTTPLGNAKLRTALYMPTISAVKHNPWLKAFYERLIAAGKPQKVAIIASMRKLLHAIYSVAKHRALYEPRLAPATCP

SEQ ID NO: 99004 - protein, 368 aa, unidentified
MKKNTSKTKKRTTTAEAREKFASFVGIDLGDKHCEVCVFNGAGEVQERLRLPMKGKDLEGYFGKLGRSRVALEAGGQSRWVAEVIERCGHEVYVSNVRKVAYISASDDKDDPGDAYKLAELVHFKPQLLHPIQHRSREAQTDLSWIRAREALVESRTQLVNTVRGMSKAFGERLGKCSVEAFPAKRAEQVPEEIRGAVAPLLEMIDQLNEKIAYYDQMEEHIARQRYEKHDLLRQVDGVGVHTALSFMLTIGEAERFEKSRMVGPFLGLRPRKKDSGESRPQLGITKAGDEYLRKTLTNCAHHILGPLGKDSDLRRAGQRICERGGKNAKKRAVIAVARKLAVLLHRLWITGEVYEPLRNSKKKAVAA

SEQ ID NO: 99005 - protein, 433 aa, unidentified
MKDAQDEPLFVQRVAGLDIAKAGVEVTIRVPSDTTPGRRQQETRTFAATRAGLLSLADWLRCWGVTKLGMEATGDYWKPVFFLLESRGFDCELYNAAQVKALPGRPKTDRADSIWLAKIVERGMIAASFVPPEPIRRLRTHTRYRRHLTQARTAEKQRVEKLLEDGHLKLSSVISNIHGVSGRDMLDAIAAGQRDPKALAQLARGTMRGKIRRLEEALECSFFTGEHAAVLAMMLAVIDHYSAQIEALTATIEALTEPWLHQIAQLDAVDGIGTICAQDIIAEIGTDMSVFPTASHLVSWAQWSPQVRQSAGKRKGSNATGRGNPYLSAALGEAAISAGRTQSFLGARYRRLTRRMPKKKALVATGNSMLVIIHALLSDPADSYHDLGADYYEQRMHARRQARNHVKSLERLGYKVTIQALSPDTGQPLTATS

SEQ ID NO: 99006 - protein, 452 aa, unidentified
MEQDVISMEIINPQAAGIDVGSRSHWVAVGQSEQDVREYGVFNEDLFAMADWLEERQVKTIAMESTGTYWQNLYAVLLSRGFQVILCNGKFTKNIKGKKTDIKDCQWIQKLHSLGLLTGSFLPDGQTEQLRTYCRQRANLIHSSASTSKKMQKNLCLLNLRLDVVVKDVCGLTGLAIIRAICEDEKNPQKLACLRHGNCRKSEEEIAKALHSNNREDYLFALKQELDTYDYLQKKIVECDMEIEKKLNEIIGGDDNKRQHYIDPKTHKRINKNTPKNIDLNLKSYQMFEGTDLLAIEGMSYSTVLALMSEVGIEGIRKFSTAKHFASWLRLAPNNKVSGGKVLSSRVPKGSNRLKIALRNAANAIGNLKESTPLRDFFHRINFRKGRVSAISATARKLAVIIWNMVVKGTPYINPEGYLFLDQKRKLGLVKRIKKQIDKFALTDEDLGFVNS

SEQ ID NO: 99007 - protein, 345 aa, unidentified
MKKIIIGIDFSKETFDATLFDCRNSELSEAVQSAVHEKFTNKKEGFQAFVTWIKSSVKKINLDELLLCGEKTGKYSLPLSNFLYAKGYSIWLDSGLRIKRSLGISRGKSDKADSLKIALYAYRYQDMAVCYVPLSKNVSRLKELFLYRQHLVSQMKAMAVRKNVTDDFNKELGDVRFIVNSSTKIIQQIKATIKKCEEKMQELIEEDEELKTTHDSITSVKGISLINAAAFIAYTNNFKDFGGNAKKIATYWGVAAFAQESGTSVHKVARVSKIANKMLKSLLTQAARIAVRWEPKFRQYFEHLISRGKHQGVALNNVKNKLIHLITALAVSQKKYNPAYKCINR

SEQ ID NO: 99008 - protein, 345 aa, unidentified
MDKLDFSGVEVSAEELVVSLQGEGQQKALKTFPNQPQGHQALVRHLRCAGRRMRVCLESTGVYGLDLALALHRAGFEVMVANPRAVRHFASALMQRSKNDRLDAVVLLEFALRMPFQAWVPPRPGALQLHCLARRLEALTEMQAAEKSRWHAARATSTTPSALLRDLQRSLRSLRRALARLSAEALNIIGRDPDLNLRYHLLRSAKGIGPVSAIQILAELGVVTEGLDVRQQVAYAGLDPRQYSSGTSVHKKVRISKAGNAHLRRALYMPALVAIRRQPNLRAFYQHLLERGKLKMVALVAVMRKLLHAIYGMFKHRQPFDGAKVYRLSQPGPQPQPSLSTVEAA

SEQ ID NO: 99009 - protein, 340 aa, unidentified
MKSLGLDVHAGNFILEVLTAQGQVAQRVSRETTAANLIEAVSVVPGPKTLIVEESHLAQWVKRTVERYVDKVLICDPTRNAWIAKDQFNDDTSSAHKLAKLHQGGFLKEIRHPGNEGARLRALFLHYYDLNHQLTRFKNKLKATFRQEAIRTAGRAIYKEEQHASWLKRLRGQSHLQHAARQRFQLVDLLEGLKQETYEALVKSAKKDKAFELLQTLPGVGPLIAAGYQALIETPHRFSRKNKLWSYAALANKRHSSDEQVYEEHASKSGNRALKWLVVENFERAVVTSQQPNRFKRQYEALRHRGLNETAARRLVCRALLSTLRAMWIKEEEYREQPLS

SEQ ID NO: 99010 - protein, 281 aa, unidentified
MNTKINQSINVGVDTGKTQLDIHIRPLDLFFSVENNDKGIKKALKTIKSHSPERIVIETTGRLEMPFVLACAEAQLPIVRANPVHIKRFAGAIGRRAKNDRLDAELIAHYGEAIKPAFTVIKPKNIRLMSDLVIRRNQLLSMQTMENNRIQILPASLHPTIKPMLTTIKNQITKLEEKLVKLIEDSTEYQAKNTILQSVPGIGNIAAASIISNVPELGYITNKQAASLIGVAPITRESGRYKGKRVIQGGRAQVRTVLYMAMMSAMQCNPVFKATYSCRKA

SEQ ID NO: 99011 - protein, 411 aa, unidentified
MRVHHNVCCGIDVHKKSVTACLMWGPADKEPEFEIRRFGTMTRDLQKLAEWLKQAGCEAATMESTGSYWKPVWNVLEGQIPRLILANAQHVRALPGEKTDRKDGKRLAELTRHGQVRPSYVPPRAILELRDLTRYRSKLLSAGSSERNRIQKVLEDANIKLGSVLSDVFGLSGQKMLQQLVTKDTVDIANVIQLAHWKLKPKMEAIEQSLEGKLTDHHRFLVKASLEHMRFIEEQLKRLDEEIQRRLQPYQEEYALLQTIPGIKETGAARILAEIGADMSPFPDGDHLSSWGGVCPGNNESAGKKFQSKIRKGNVHLLSALTQCAWAATKKKDCHFRNKYYRLKSRRGSQRAIVAVDHAMLKCVYVVLSQRKPYEEPKPVSLTDAHKQRKASSLCRQLRALGYDVKIQKTA

SEQ ID NO: 99012 - protein, 344 aa, unidentified
MEITTIGLDIAKRVFQAHGVDATGRAVLRRRLGRAEVLDFFRALRPCLVGIEACGTAHHWAREIRALGHEVRLIPAAYVKPYVKRGKTDAADAEAICEAVTRPTMRFVPVKTADQQAVLMLHRTRDLLVRQRTALVNALRGHLAEFGIVAPQGISRVAELLAVLLGEDEATLPPLARQALRGLVAELKALGKRVEEIEAAIVAWHKENEASRRLAAVPGIGPITASAIVATVGDVSNFASARHFAAWIGLVPKQNSTGGKPRQGGISKAGDHYLRRLLVLGATAVIRHTRIKAREGWLAELIERRPTMVAAVAQANKTARIVWALLARGESYRPQRGSPQHAGA

SEQ ID NO: 99013 - protein, 346 aa, unidentified
MRFYDQQHEYYCGVDLHTRKMYLCLLDREGNKRLHRNFQAKPDGFLRAIKPFREDLVVGVECMFTWYWLADLCRDEGIDFVLGHALYMKAIHGGKNKNDRIDSEKIARLMRGGTFPLSYVYPREMRATRDLLRRRTFLMRRRSELLTHVQLVNHQYNLDPFEKRLQYAANRDVLERFTEVSARHNVEADLEMIGHYDTLLQRLELNVLRQAKVHDPQAQFLLQTIPGVGKILSHVLLYEIHTINRFASVGHFLSYARLITPQHTSDGKRTGGGGAKIGNAHLKWAFSEAVPLMLRECPEAKQFVERKEKKHGKSRAMTMLARKIGRVVYQMLKRKEAFDKVKFFAN

SEQ ID NO: 99014 - protein, 346 aa, unidentified
MNKFSKAKSDGNVCTDMFVGMDLHKNYLQVAVLDGKGKVLKNSRIHNDLSKVGRFFDRIGNSSDVKVVMESSCVWYNIYEYLSEERQLDVSLSNPFKTRAIASAKIKTDKLDAVKLADLLRGGYIAKCYVPDRKIMDLRQLVRHRIVLVRMRTKLKNKIHGITLMQGVRITDTSAFSNNYVQKLKQLNDYRIDAYLRLIDSLDSEIKKVSKEIQSRAEKEDVTKLLVTIPGIGYYSALLILSEIGDISRFPDSYHLCSYAGLVPTTHSSGGITYHGAITKTGSKHLRWIMIECVYTHMRISKNSNITRFYTRLAKRKGNSKAVVAAASKLLKVVYWVMKEKREYHV

SEQ ID NO: 99015 - protein, 464 aa, unidentified
MAVLNVGIDLGVTAKHYAEVINSEGIRVCSSVAFPGTTEGFDMVSKHALEHVAEGTKLRFICEPTSMSWFPLAVYAKKYGHEMMRVKAQKSHALRKYYSKHSKSDKLDARTLAMMPIVDRESLEEVYLPDKLTNALDRRCRQREKIAKEIASIKTRVKSLYHWVMPGLTDCFEDPYGERAKAFYKKYSNPFRVKRLGISRLRIFLDKAGRQQSSDGLAQRVYDAAIRGSALYDHSDKYIDFDELQKEVECELHLLESHEKVQKKVDEAISRLYVCVDPNKNLETIPGIGETLGPVFLGIIGNSERFSSQSKARSYSGMIPKQNDSGESSKKGLTITKDGPSRYRRALFLASDTGRQWDPQLSKVYYDQMVNKGNCHTQAVCAVSTHMVGRIVRVLKEKRPYELRDLEGRPITKKEAKILITREFTVPEEVRKRTRSRRIKKGYERDQIQGIAQMQSSRSSAYPS

SEQ ID NO: 99016 - protein, 359 aa, unidentified
MQELINKKAFKEKNIYIGIDVHKLSWKVTIMLEEITHKTFSQDPNARILAEYLRRNFPGGTYLSAYEAGFCGFSVHRALLNEGINNIVVNPADIPVTDKEKRQKEDKRDSRKIARGLRNSELVAIHVPSVETEELRFFFKDRMSLTKDLTRMKNRIKSYLNLFGIEVPAQFKETSKHFSKRYINWLRDIQLATHQGNLALANLINRTEFLRKELLSINREIKRLAKEEKFLKQIGLLTRIPGIGTLTALIIIAIIEDINRFKRSDDFFSFVGLVPSTNRTGDNEKTGDITPRRNKILRGIIVESSWIAVRYDPALMLAFADLCKRMEKSKAIIRIAKKLLNRIRYVLKEQKEYAYNVAA

SEQ ID NO: 99017 - protein, 346 aa, unidentified
MKHFAGLDVSLGETAVCVVDEEGRIAKEARVPSEPEALAAFFLGLGLTLERIGLEACSLSAWLHEGLVAAGLPAVCLETRRAKAAMGAMPNKTDRNDARGIAQIIRTGWYRAVHVKSPASRSWRALLAARRLVLNKMRDVENGLRALLREAGLKLGTPGRKRFPERVRELAAADPVVSALAEPLLAIAATMARELAQLTRRVLAIARDEPVCRRLMGVPGVGPLTALAFRATIDEPGRFKRSRDVGAHLGLTPKRYQSGETDVQGGISRRGDELARTALYEAAHSLLVRSRKWSSLRAWGTRVAKRRGMARARVAVARKLAVILHRVWADDAEFRWGEEDTALAAV

SEQ ID NO: 99018 - protein, 339 aa, unidentified
MDKHTLIAIDLAKAVFQVCALTSTSRIAFNKQLKRRDIAAFMAKQHPTVVVMEACYSSHYWARRFQAMGHTVKLIPAQHVTPFVRGHKSDRNDALAIAEAAQRPHLSTVPVKSIEQQDIQSLHRIRERYTARRTGLMNQTRGLLSEYGIVAPQGHQAFIHCLQSALEDGSDQLTSIITHELRYVIDEYQWLTERIRTIEKTFVHLTQTHPLVRILISIPGIGPINATAIYSAIGNGSQFSSARDFAVWLGLTPRQSSSGLSFKSAGITKRGDRYLRKQLVHGARALLHRCTKKTDALSRWATQLHARRGPQKAYVALAARLARIAWILLNKQETYRVMP

SEQ ID NO: 99019 - protein, 342 aa, unidentified
MSFYVGLDVSTKETAICVVDETGERVWAGTSRTDPDAIGAVLKRRAPGVVKVGIETGPLTVWLWHALNERGVPIVCLHARHAAAALKLQMNKTDRNDALGLARLVRSGWYRPVAVRSIETHRLRALLVARDQLVGMRTALINKIRGLAKTFGILIGPGKGGTFVRQVRAQLPDDPILTALFETLLTLLGTLQERSHEIAKQLARVARQNKICQLLMTTPGVGSITAISFVTTIEDPRRFRRSQDVGAYLGLTPRRYQSGDVDINGRISKCGDRLTRKLLFEAANAMLSRISMPLALKEWGAAIGRRSGFWKARVALARKLSVILHRMWIDERPFEPKVIAMT

SEQ ID NO: 99020 - protein, 392 aa, unidentified
MFYYLGIDVGKFSHSLCLLREDGQKSIWQIDNNRSGFLILENKLNSLNCWDKILVGMEATGHYFINLYQFFLEHEVKVEQIALLNPLQVKSFRNSNLRGAKTDNIDAERIATLLKFGDFQRSNVSIDIMMDLRELTRLRYELVASANNLKRKIVAVLDRIFPEFGKIFANHLGHTALSLISQYPLPEDMAKLSLDELTKIIKGLSRRGLNKDKVEKLHQAARNSIGITFGKQAFKIELDILLVQLKTIKEQISALEETIAQTTEKLKSPIFTIPGIGKTTGAAILGEIGDITKFSSAVKLIAFAGLDPKLKESGTYQGKTSISKRGSKYLRSAIWYSAMVACRVEPSFKQKYQERRDRGKSHRYAVTAAANKLTKIIYHVLKNNCSFQPDLV

SEQ ID NO: 99021 - protein, 325 aa, unidentified
METKNLCCGIDVSHTSLDVCYQNNLGELFHLKVGNNNAGFAKILEHTGTGYHFTMEATGVYYIRLAFYLHEHGCQLSVVNAISIKRYIQMHLERNKSDKKDAAWICKYTMEQKPLFWEMPDGAYFESKQLYNTIREYAEQIKRFNNQLHSLKLLPVPSRDTIKSIEKIKDQLEKEMVCLEEKLEVVLKQWQPDQVKNVSSIKGIGKRATAMLIVYTQGFRHTHNHRQLISFAGLSPSEYSSGTSIQGKSRIYKKGGKNLRDVLYMCSMNAIKTNVACKALYERLRANGKTGKQALIAVCNKLLKQVFAVVKNNTLYQPNYCSAKP

SEQ ID NO: 99022 - protein, 382 aa, unidentified
MRTVALDLGARRVDFCEITDGGVIQRGVLAGLSQLERRLGSETPPARVAFEACREGWYVAERLTGWGHEPVMVDTTRVKQLGIGQHGRKNDRIDAEVLATALLSGRIPQAHILSPARQRLRLVLAVRRSLVESRAQYVTSSRGIVRARGGHVPSCNTRDFLGKLREVALDEQAQQLIEPLRASVEVLAQQIAEVDLRIEELCEEEPVIRRLMTVPCIGSVVAGAFVSVIDEAGRFRNAHQVESYLGLVPSEDTTGGRRRLGGISKAGNSYVRSLLVEVSWTLLRKKDGDPLARWARQLARRRGLHIATVALARRLAGVLWAIWRDGTVYDPQLVGLKSAEGVSRHAQEREFQAQALRAAAGKSALRIRSARRALEAGSKDSQ

SEQ ID NO: 99023 - protein, 352 aa, unidentified
MDATTVAVDLAKDVFEVAVANRAARIVDRRRLTRRQFETFLDSLAAGTTVVMEACGTAHYWGRRGQARGLHVRLLPVQYVRPYVRRNKTDRTDVEGMLEAHRCAGIQAVPIKTVDQQALQALHRARTQWQAARTARINVLRGLLREQGHPMPTGSRTVLARVIAVLDTAGDTLPGLLQTLIRTLVDEVRDLEGRVATLDRQLAAVARTHPDAQRLQQVPGIGVVTATAFVGAVSHIHAFRRGRDFASWLGLTPRESTTGMRRYLGRISKRGDGYLRCLLTHGARAVLLAAQRTARDRPHRLTRLQQWAVALAARRGHNKTAIALANKLARIVWAVWCRETDFHSPAAAPVAA

SEQ ID NO: 99024 - protein, 427 aa, unidentified
MSTLFVGIDVSSKTNAVYAMDFEENKYISSSFGNNQPGADQLVNMIAECMQKHKNLDTVLIVLESTSVYSVHISNFLSASEVLMPYRPYVFCVNPKAASNYRKSYIGMEKTDPTDAYLIADFGRVGRTKKLEPWRGGQFISLKRLTRHRMHLSECITREKTYMVSNLYLKFSELQLLEGDDKPFGSLYGATSSAVLTEFLSPQEIIDMPEEELLTFLAGKSRNRISDLSKTSELLRKAARDSYRLDKCMYEPLSISLASSFNCIHAYQKEIKLIEQAIEKCINGMNPNALLILQSIPGIGPIWASGILSEIGDITVFHSSDALAKYAGLYWPKGDSGDFTSEDNKMSKAGNPYLRCYLGEAANSVRKHIPEYADFYARKYAEVTKHQHKRALALTSRKFVRLVFGLLAKNQLYTGEKLDAEYNIKSN

SEQ ID NO: 99025 - protein, 337 aa, unidentified
MMYSGIDLHSNNSVIAVIDDADRVVAQKRLPNEITKIVGFLARWKDELAGVVVESTYNWYWLVDGLQDAGLHVHLANTAAIKQYDGLKHSGDETDARHLAHLLRLGILPTGTILPREHRAVRDLARKRMQLVRSRTTHVLAVENIMARQLGGRMTSNQIQRLTADAIDKLPLAADVGLAIKTNVAVIATLQAQIEVVEKRLQERVKPRPEYALLSSAPGIGQTLATVILLETGPIDRFAEVGHFASYARCVDSVRRSNRKKKGEGNVKNGNKYLAWAFVEAANFAVRFCPEAKRFHARKKAKTNNAVATKALAHKLARACYHILKEGKPFEVTRCFA

SEQ ID NO: 99026 - protein, 314 aa, unidentified
MNSPVYVGIDVAHAQLDIAVRPGTRFSVPHEEPGIVRVVEQLRALSPTLIVLEATGGVEVSLTSALAAAGLPVVVVNPRHVRDFARATGRLAKTDALDAQILAQFAEVMRPERRPLPDAQTQALAALVTRRRQLIEMLTAEKNRLSMAPPPVRKSLRAHITWLERELAHTDTDLAQTIRQSPVWREKDELLQSVPGVGPVLTSTLLANLPELGTLTSKQIAALVGVAPLNRDSGTLRGKLTVWGGRAQVRAVLYMSAIVAARFNPVIRAFYQRLQTAGKAKKVALTACMRKLLTILNAMLKHRTPWRTEGTAHA

SEQ ID NO: 99027 - protein, 360 aa, unidentified
MSFNGTSVGLDVHALSVVAHAVDEETGRIERARLCPDHGEILDWLHRLRAPVRVAYEAGPTGFGLARTLAAAEIDCVVAAPSKLIRPGGDRVKTDARDAAHLTRLLRLGEITAVTVPEADVEAVRDLVRAREDARADLMRVRHRLSKLLLRHGRVYSGGQAWNGVHETWLRRQRFDDSHTTAAFDHHFDAVLSATAARDRLDEQIVTIAASPRWADPVDRLGCLRGISALTGLALSVEIGDWTRFTGSSISAYVGLVPTEYSSGTSRVQGSITKAGNAHVRRLLIEAAWHHRAAYRNPGPTLRARWAKVDPALKARGHAGNRRLHQQWCRFNERKKHHVVANVAVARELAGWCWSLATLN

SEQ ID NO: 99028 - protein, 428 aa, unidentified
MSNQEIIRRRQYCQIIKEINGSDQHLVVGIDVGKDKHHAFMGSATGISLYRKLIFENNLSGFSRLITTADQIKAQNGLAKVVFGLEPTGNYHKPLARHLIGCDRDVVLTAGQSVKNNRQVLNGRWDKNDTKDAANIADLVSRGRCLFYDVPSQEIVELRTLLSLRRRLKKEEHSLRMRVRNGLLAQYFPELDRFYNACESEILAIVRWCLNPDKIATMEFDHFFKMVTRTRRGIAQKLRLEKIYQAAIDSVGCAMGPAAEFEAELLVEKINQVRGQLHDTEELIEEICLTFSEYSYLMTIPGFGPYVSAKVLAVIADPFRFDNRKQVIRLAGYDLCASRSGKTSDQAVPVISKNGNGEFRYVLYIAANVAASRTEHFRAYFTKMLQGREREKGIKTKMRVKLAVKMLVIAWTLMKKKEVFDPDHLNID

SEQ ID NO: 99029 - protein, 428 aa, unidentified
MNIEDTIRREQFSQIKSEICGSNRYLVVGIDVAKDEHHGFMGTATGKSLLRKLVFENNLDGFGKLLENSEAVKVRNALSKVVFGLEPTGNYHKPLAAHLICCGCHVVLVTGKAVKNNRELLDGRWDKNDDKDAANIADLVSRGRCLYYDLPSSDLGQLRQVLSLRRRLKKEEHRLRMNIRNNLLAQYFPELDAYYGACEAETLAIVSRCLDPNQIAGMHFDEFFTQVTTKRRGIAQKRRLQKIHRAAIESVGCPMGPVAQVEAQLLVNKLGQVRSQLKEVQEWMEDIAGEFAEYSYLLTIPGFGPYVASTVLAAIGNPWRFDSAGQVLKLAGYDLSASRSGKNSDRAIAKISKRGNSQLRYALYQAARVASSRSRDFINYFTCLLRGRERERGIKTKMRVKLAAKMLRIAWALMKKKQVFNPAYLFIE

SEQ ID NO: 99030 - protein, 414 aa, unidentified
MEIVHSRCAGMDVSKRDAKVCVRVAGRGRRKTVETVCTWGSTTNAILTLREHLINEQVSLVVMEATGDYWKPFYYLLEDADFEVMLVNARHVKNLPGRKSDVSDAAWLAQLGAHGLVRGSFVPPPPIRQLRDLTRARTAMTRERGREIQRLEKLLEDAGIKLSSVASDIICVSGRLMLQALIDGQHDPAVLADLAKRRLRAKIPELTEALTGRFSDHHAFLAGMYLDAIDQRSQHIAELTARIEVVIEPFRSFCDLIGTIPGIGERSAEVIVAETGADMSIFRTAAHLASWAGTCPGSNESAGRVKSTATRPGNPYLKAALGTAALSIANSHGTYLAAKYRRIAARRGPKKALVAIEHTILVAIWNMAHTGALYDDPGADYYTRRDPERARRNAVNQLQRLGYQVTLAPTAASA

SEQ ID NO: 99031 - protein, 347 aa, unidentified
MRFYTRQHKYYCGVDLHARSIYVCILNQEGAVLVHKNLRAKPDAFLAVIAPFREDLVVAVECMFTWYWIADLCAREGLTFVLGHALYMKAIHGGKAKNDRIDSHKIAHLLRGGNVPFSYVYPEAMRATRDLLRRRNFLMRKRAELLAHIQNTNSQYNLPDIDGALRYPANREDLSERFTDDSVKKSIETDLALIDVYDKHLKEVELYLTRHAKVDDPNSYHILKTVPGVGQILGLVLLYEIHDIARFPSVQDFVSYCRLIRCSKESAGKKLGTGGRKIGNAHLKWAFSEATCLFLRGNGAAQKYLARLESKHGKGKALGILSRKLGTAVYYMLKRQEAFDMNKFFET

SEQ ID NO: 99032 - protein, 417 aa, unidentified
MRAVFGIDVSKASSEVAILVNGEKVHGYTISNDAIGFARLLGDLKTVHKPEIIFEATGVYSRRLQAFLDEHGYAYTRLNPLEAKKQLDSLRVRKTDQIDAEKLAQSQFVLNRKTTYVQEEVYQNLRDLSRFYQNLTEDIVRAKNRLHKALQVTFPELENILSTPTGEQYWNLVIAFPCKDFVLELSKDKLSESIRQSTSKRISDKRVAYLAEKLIALANQSYCAVKKTSPMLEEVRYYTKELLRLSEQRQAVLDEMVELAQPLPEYDILLSIPGIAETTATSIIGELGDIRRFQSANQINAFIGIDLRHYESGNFLAKEHITKRGNPYARKILFKCIHNIASASHTNPCHIADFYEKRKRQSQTTSTKPHTIASIHRLIRTMYYLIMHNKLYDYASTQNRKNCLCSIIVTPYQKIST

SEQ ID NO: 99033 - protein, 382 aa, unidentified
MKHMAQEEFAAFVGLDWADAKHDVCRQAAGTARREFGGLEHSPEAIDGWAQTLRTRFNGQPIAVCLELKQGPIVSALRQYDFLVLFPVNPLTLAKYREAFTPSHAKDDPTDAELQVELLLKHRDKLTPLTPQSPTMRAVAQLVESRRRLVGDKVRLTNRLTSALKNYFPQVLQWFDEKDTPLFCDFLSRWSTLKAAQLARRSTLEAFFREHHVRSAALIATRLQAIKSATALTTDAGIVTPNALLVQALVAQLRVTLGVITDFDKAIARHAQGHPDFPLFDALPGAGAVFAPRLLVAFGEQRERYTSADELQTYAGIAPVTERSGKKSWVHWRLECPKFLRQTFTEWAAESIRHSFWAQVYYQQQRDKGKAHQAAVRALAFT

SEQ ID NO: 99034 - protein, 344 aa, unidentified
MEHYAGLDVSLELTSVCIVDAQGTIVRETKVASHPEDLVGYFRLLEHPISRIGLEAGPLSQWLHAGLIAAGFDAVLLETRHVKAALSAMSVKTDRRDARGIAQLLRLGWYRPVHAKSVSAQEVRALLTARKLIQAKLLDVECSIRGVLRGFGLKVGAISRGRFDMRIRELVDGQAMLETVISSMLNVRTALQEEFARLHRALLVLVRADPICRQLMSVPGVGAIVAITFKSGVDDPTRFRRSRDVGPHFGLTPRKYQSGELDVTGSITKVGDRMVRTALYEAASVMLTRTVRISPLKSWALGVAKRRGTKKARVALARKLGVILHRMWIDGTDFRWANEEAAIA

SEQ ID NO: 99035 - protein, 360 aa, unidentified
MHATTVAVDLAKSVFQIAVADDQWRIIETQRLIRSQFERWFVNRSVGLVVMEACGSAHHWARWLNSLGIEVRLLPAQYVRAYVRRNKTDASDAAALLEAARACDIRPVRVKSVEQQALQGLHRIRSLWMGTRTSRINALRGFCREFGIAVPVGARTGIEVIGRVLADPQSAVPELIRHTASQLLEEIRLLEARIAQVERQLSQAARQSPACTLLLSIPGIGLLSATALVAATSGDVTHFQDARHFSSWFGLTPREYSSGGSRYLGRISKKGDRYLRMLLTHGARSVLRAAKVAQGAGKEIQGVRQWALEVQGRSNHNKATCALANKLARLCYATLRDHKPFDEAARLIRKENRQSFAMPD

SEQ ID NO: 99036 - protein, 410 aa, unidentified
MEVLHAHCAGLDVHKDSVVACVRHMADSRVTTVVKTFKTTTQELMALSDWLSVEGATHIAMEATGVYWKPVWRILSDGDFGLVLANAAHVKNVPGRKTDVNDATWLADLMAHGLIRASFVPDEPTQQMRDLLRTRKQMVRERSSHVQRIQKTLEDANIKLDSVVTDILGLSGRRIIEALIAGQTIPQALASLAHRRIHASVDELEASLRGRVTKHHRFLLKLHLDQIDAFDAAIASIDEEVNANVEPFRAAIELLSTIPGISALSAEVLVSEIGIDMSRFETAGHLISWAGLCPKNDESAGKRRSNRMKKGAPWLKTTLIQCAWAASRKKNSYLQAQYLRLRSRRGAKKAVGAVAASMLTAAYHMLKDGTFYQDLGPNHFDDRAKSKHVLRLVNRLHNLGFDVQITPLAA

SEQ ID NO: 99037 - protein, 451 aa, unidentified
MGTLVEQLDTDEAEERLERAAAIDVAKASGMVCTRAPGPSGRRVTKVWEVSSTTKSILALADQLADEGTERVVLESTSDYWRPFYYLLEARGLNVWLVNSRDVKNVPGRPKTDKLDSVWLAKLNERGMLRPSFVPPQELRELRDYTRLRYDLVAERSRHAQRLEKLLEDALIKLSCVASDILGRSGRDMIQALVAGERDPEVLAKLARGRMKAKHAQLVEALTGRFDDHHAELARVLLDQVDALTTKVDMLTARIAGLVAELPGASEPSEGQPAQPRDEGTPTTVKPGPLPPLARLDEVPGISLVAAQAIIAEIGLDMGQFPTAGHLVSWARISPRTVQSGPRTSSGKAGKANRYLRGVLGEVAAGAARTDTFLGERYRRLARRRGKQRALVAISRSVLVIVWHLLADPNARFADLGPDYYDKRIDKDRRTRLLVRQLNALGHQVTLNPAA

SEQ ID NO: 99038 - protein, 317 aa, unidentified
MRYVGVDISKKTFDCYCPDLGVRQFSNDELGFKLFKAWAGSPIHVVMEASGPYYLRLAHDLYESGILVSIVNPLVIRRFCQMNLQRAKTDSKDSISIAQFGEMTNPPAWKPASEQLQQLLQMQSVMEQLSKQLVSTKNALESLKQHPGISKKAKSALEQVARAQQDQIDDLENQIMEQTKQQYSAEFKSLISIPGIGTKTTLLLLLATDGFKRFDTAKQLTAYAGLAPRIFQSGKTVNKKPKICKLGMGDLRRSLFMCSLQAIRRNDACKNLYDRLRQNGKAAKVALIAVCHKLLKQAFAIVKSKSEFKTEFSLALI

SEQ ID NO: 99039 - protein, 317 aa, unidentified
MRASAAFFVGIDVSKQQLDIAVRPSGESWTVAHEEASLSALVARLRGLAPTLIVLEATGGWEVPVTGALAAAALPVAVVNPRQVRDFARSTGLLAKTDRLDAQLLAQFAEVVRPAPRPLPDAQAQELTALLQRRRQLVEMLTAEKNRLPLAARRIRPQLQAHIAWLHQQIAQFDEDLRQLIRSSPLWREKDDLLRSTPGVGPVLATTLVAALPELGTLSRRQIAALVGVAPLNRDSGTLRGRRTVWGGRAQVRAVLYMSTVVAVRHNPVLIAFYQRLRAAGKAPKLALTACMRKLLTMLNAMLKHHRRWAPVRAQHA

SEQ ID NO: 99040 - protein, 486 aa, unidentified
MPTEARQSVYAGLDLHKRNVYCGLIDQEGQPIYRRRLPAELPLILQALEPYRPQLKAIAVESTFNWYWLVDGLQAADYPVHLANPAAMQKYSGLKQTDDETDALWLAEMLRLGILPEGYIYPPAERPVRDMLRRRMLIVRQATQTVLSLQSMVTRHTGQSVSAAKLQGWTLPEVRAAFAESYSQQTATALLELLGQQRRIQHSLEKPVLAVAKPTGPFQRLLRIPGIGNILGLTIMLETGPIARFASAGDYASYCRAVNSRCESDGKKKGENNRKNGNPYLGWAYVEAAQFATLQSASAGLVCPQEGANQPGGRGEGLGVQAGQSRILRAARCGGVRREQTVWRSRRRRAQARVGVGAKPPELIGSGRRHPFTGSEDRLFCLHREPTRVGRLRTASGPSHSIVNLTEWTRCGTEGFLGPPRGPGPREVGQPSDAQSRTRWVTEQNSETKQPRRTRAVLVTVEGSTEEEAMRAGKASAGNFCLDRNL

SEQ ID NO: 99041 - protein, 366 aa, unidentified
MKKISTVQAYGKEILKEQKLTIGVDLGDRWSFYCVLEEAGQIILEQKVPTTAEAMKQTFSRIPHSRMALETGTHSPWVSRLLTELGHEVIVAHAQKVQLITKSNRKDDRHDARTLARLARIDPELLGPIRHRSVQAQIHLTVIRARAELVSARTALVNAARGLVKSYGQRLPKCGTQQVGRKLAAALSTELRDVLEPLLKEIESLNERIKEYDERMEKIAKEVYPEVSLLKQVKGVGTQIALTYVLTIEDPHRFLKSREVGCFLGLRPGRRNSGESEPQKRISKEGDRYLRTMMVQGAHYILGPFGADSDLRRWGLKLAERGGKNAKKRAVVAVARKLAVLLHRLWVSGEVYEPLRNSEKAMRAVA

SEQ ID NO: 99042 - protein, 434 aa, unidentified
MESEFVAFVAIDWADQKHAWALQLEGSSDRRSGTIDHTPEAVDVWAAELRLRFGGQRIAVALEQSRGPLVFMLNKYEHLVIFPVHPTVLVNYRKSFRPSGAKDDPSDAGLLLDILTLHRDRLRQLDPDTAETRTLQFLVEERRKLVHEKTRYSNRVTAHLKMYFPQVLTWFDEVGSHIAAEFLERWPNLEKVQRARPSTIERFFIDHNSRDPERIAERLEQIRKAVPATTDAAVVISSSAAIVVWAGLLKQVLSAISTYDEHIDELARAHPDYALMKSFPGAGPALAPRLIAAMGSRRDRYEGAYELQCYSGIAPVVASSGQQRWVHWRWACPKFLRQTFHEWALHSIAYSQWAREYYEQQRAKGKRRNTAIRSLAFKWIRILFRCWKERKPYDEMTYQQALAARRPKKHSELQPVELAWKNVVGFSKLVVPGA

SEQ ID NO: 99043 - protein, 337 aa, unidentified
MTDVHILAIDLAKRSFQVCATAAGGAVLFNRMVSRAKLETVLREQAPCIVAMEACATSHFWGRFAQGLGHEVRLIPPIYVKPFVKRQKNDAADAAAIAEAALRPNLHYVAVKSAELQARAVAFRTHQSFVGQRTQLINALRGHLGEFGLVVAQGPTGPKAVAGMIDDDTTELPDAVRDIVRLYLDQIAVLTQKIDELHFKLRTATKVDEAMRRLCTVPGVGPVTAGAIMAFAPDLRVFASGRNFAAWLGLVPRQRSTGGKTRLGGVSKMGQADIRKLLIVGAMSRIRWIIRRGVLPDNWLGRVLGRKPRMVAAVALANKMARMIWAMMTREQNYRTA

SEQ ID NO: 99044 - protein, 348 aa, unidentified
MRVFIGLDVSLAKTAVCVVDHDGAVQWQGKVPSEPGPLIKRLAEWHGMIELAGIEACPLSEWLHRGLREAGIPIVCVETRHAQRFLSSRPVKTDKNDARGIAEMMRLGHYRPVHVKSPAAQSMRTTLAARMQLVASQLQIEGTIRGLLKVYGLKIGAIHRNRFAARVLELLEMAALTELSAAIEPLLRVREGMRTERKAFDRTLASAARRSDVGRRLMTIPGVGPVTTLAYIATVDDPGRFGTSKALGAHLGLTPRVYQSGEIDRSGQISKCGDRMLRHLLYEAASALMTRTRKWSRLRAWGVAVAKRRGMKRATVAVARKLAVIMHRIWVTGDEFDFGGPAVAAKAA

SEQ ID NO: 99045 - protein, 347 aa, unidentified
MNSTFLFNYNVCKVMKDLSTKKHFIGCDVSKDTLDFALYERGKDYREFAHIQVTNNLEGFQAMRKWLRVLKVKLSEAVVAMEHTGSYSTPLAEWCYKKGYTFVFLHPLDVKNAGARGRNKTDKIDAQFIADYVYTMREKLEPSTPESPVIKKLRMLRNERRLAINARMAFIVQNKCMDDAQAAKRASKIITELNKQITAIEAQILNVIQSEKSIKSNYELLLSIKGVGMINALVTIIATGNFTRFQTARQYAKFCCVAPLSRQSGTSIRNGDHISKAGHNEIKALLTEAARSAIQHDAQLKQYYERKRAQGKAHGCVMNAVKFKLICRMFSVQKRNTPYVDTDKYRS

SEQ ID NO: 99046 - protein, 317 aa, unidentified
MNNSKIQIPVNIGVDVGKANLDIALHPSGQLYSIPNSKAHIRRFVKILKGYSIERIVVEATGRYEHALVQACDQASLPIIVVNPTSVRRYAQAIGVLAKTDRIDAQVIAKYAATLKPEFRPIPDKTSQKIKDLLTRRSQLLEMSTMEKNRLQILPKTLHRSINSLLKMLQNQIKTITQQIDQEVAKVDHWRIKAEILTSVPGVGKVLTYTLLSELPELGSLNRKEIAALVGVAPINRDSGKLNGKRRIQGGRHRVRTVMFMAMLSSIQCNPVFKRFYEHLKAQGKLPKVALIACMRKMIVVLNTMVKNQEPWRENMA

SEQ ID NO: 99047 - protein, 489 aa, unidentified
MAHSANTEFSSPAVAPAKKADWVHAHWARGFGHHMQAQDKPLVLDSTNPDRKGSDIMIKINYMSTLFVGIDVSSKSNAVYAMDFDENRYISSSFGNNQPGAEELADMIVKCMQKHKNLDTILIVLESTSVYSVHISNFLSTCETLMPYKPYVFCVNPKQTANYRKSYIGMEKTDPTDAYLIADFGRVGRTKKLEPWRGGQFIALKRLTRHRMHLSECITREKTYMVSNLYLKFSELQLLEGDSKPFGNIYGATSSAVLTEFMSPQEIIDAPEEDLLSFLAEKSRNRISDLSKTSELLQKAARDSYRLDKCMYEPLNISLASSFNCIHAFQKEMKLIDQAIEKCINGMNPNALIILQSIPGIGPVWASGIISEIGDAAAFHSSDALAKYAGLYWPKGDSGDFTSEDNKMSKAGNPYLRYYLGEAANSVRKHVPEYADFYARKYAEVNKHQHKRALALTSRKFVRLVFGLLVKNQLYTGEKLDAEFNIESN

SEQ ID NO: 99048 - protein, 326 aa, unidentified
MEHELHYIGIDTAKEKLDVDVFRPDGRHRTKKFANTTKGHDELVSWLKGHKIDHAHICIEATGTYMEPVAECLYDAGYIVSVINPALGKAFAQSEGLRNKTDTVDARMLAEFCRQKRPAAWEAPHPLERALRALVVRHQALTDMHTQELNRTETAREVQRPSIDAHLLWLEAELKRLEKQIKDLTDDDPDMKHRRKLLESIPGIGEKTSAVLLAYIGLKDRFAHARQFAAFAGLTPRRYESGSSVRGASRMSKAGHVSLRRALYMPAMVATSKTEWGRAFRDRLAANGKKGKVILGAMMRKLAQVAYGVLKSGVPFDASRHNPVAA

SEQ ID NO: 99049 - protein, 391 aa, unidentified
MTSGASQLSKTTKEVTVFSQQKHFTVKPLEFDLFCGMDVDKKRISVTFVSHDGFVKHITIPYDSANLIAYVHRHFPGKRFAFVYEAGPTGFGLYDDLVAAGFVCLVIAPTQIARSAAERVKTNRLDSLKLAEDLRGGKLKGIHVPNRLYRDLRHLVHLREIVVRHQAATKVRIKLLLLLEGIRFPATSKERWSLAALARLRLLQTGSEIRFKLDQYLATLQFNKQQLLTIQKQLISFCKKDPDLWNCLSLLCTIPGIGKVVSMYLMARIGDWRQLTSSRQIAHLLGLVPVERSTGDNVRRGAISRMGDAITRSKLVESAWMAIRKDPELNNFYLRIKNRNPNQFASQKAAVAVARKLTTRIYAVLKYQRPYVIRNVSASGQDPMLNSTPGT

SEQ ID NO: 99050 - protein, 337 aa, unidentified
MNYSGIDLHSNNSVVVVIDEQDRVLASKRLPNQLEAIIALLLPHRSELAGIVVESTYNWYWLVDGLREAGFVVHLANTAAMVRYDGLKHSDDESDAIQLARLLRLGILPEGHIMEKQARAARDLARKRMQLVQDRTRHVVAIENIVNRETGGRLSANAVKRLTAQAVDKMPFHEDVRLAIQANAAIVHSLNEQIECIEARLQSRISPRPESALLKTAPGIGPILSTIILLETGPIQRFADVGNYTSYCRCVNSSRVSNGKKKGEGNTKNGNKYLAWAYVEAANFAVRFCPEAKRFYERKKANTNGIVAIKALAHKLARACYHMLREGTAFDLKRCFA

SEQ ID NO: 99051 - protein, 410 aa, unidentified
MSASGAKCLFVGVDAGDERFQVCPVDAAGAANEQRSFTHDGEGIDEAIAWLKTSRAERITIAIESPRGPLVAAFLEAGFEVYSLNPKQLDRFRDRFSLAGSKDDRLDARVLGDSLRTDPRAFRRLTAEPGWLVKMRQASRMEDELKQECRRSANRLRAALHEYHVELLALLPSADEPWFWDLVELAPTPTLGARLRPKQVERLLGEHRIRRLSAQDVIERLRRRPVPALPGVVEADSTQALMLVPRLHLLTQQLTQCQSQIQTMLGEIAAQEAPEQTSEHRDVRILRSLPGAGRYVVATMLAEAYSALQPRDYRVLRAVCGAAPVTEQSGRSRFVHMRHACNRRLRYAVHHWAWNATLVDPNFARLYKDMRARGLTHGRALRGVADRLLNVTVAVLRRGILYDASLRAAA

SEQ ID NO: 99052 - protein, 347 aa, unidentified
MGKSITDLSSVTTVGLDLAKHVFQVHGVDASGRVIVAKAFRRKDVLAFFAQLPECLVGMEACGSAHHWARELIKLGHDARMMPPAYVKPYVRRQKNDAADAAGICEAVTRPSMRFVGVRTLENQAALMHHKAREMLVAQRTQLINALRGHLAEIGVIAAQGLKNARELARVILAEGDETIPACVRAALAPLVRQLHALDQEIARSDRTIAAMARDDEMARRLMTIPGLGPMTALAMAASVQDVSAFSGPREFAAFLGLTPRQNSSGGKEQLGRISKMGNRYLRKLLVVGAHAVLYHRKPHEDALRSWAKKLMQTKPFKLVAVALANKMARIAFAIMRGRTTYSAAPV

SEQ ID NO: 99053 - protein, 338 aa, unidentified
MIVIGLDVHKQSVTAVAVDEAGRPLAEKAIVVGSDELLGWAARLDAQRLWAVEDCRQLTGWLERQLLSVGEQLVRVPPKLTVPERRAGRRRGKSDPIDALAIARAALREPDLSRPRQGEQVHREIKLLVDHRDDLVDQRRRTQQRLRWHLHQLDPTYEVPLRRLDRASHLNRVARWLARREQELRVRLARELVSTIRALNRAIEELDQELEQRTTQVAPALLDLPGCAGITAAKLLAEIGPIDRFKTDAQLARHGGVAPLEASSGRTQRHRLDRGGNRQLNAAPYRIAITQARYYAPAREHLERKRAEGKSRREAIRCLKRQLARAVFNTLKTSPALT

SEQ ID NO: 99054 - protein, 314 aa, unidentified
MIHAGLIVGIDVSKARLDVHVHPTGEHWSSANGRAGIAGLAKRLARLCPAAIGMEASGGYEQPLAHALHAAGLDVHILPPARVRAFARAIGQGAKTDALDAMMIARCLEASRDRLARYAPDPARARLSALGTHRRRLIAERNGLASQLDTIAEPVVRRMIQARLRSIALGLVCLDKAVRMLLAATPRLQRQVDRLCQVKGVGPVLAGALVADMTELGHISAKAAAALIGVAPHARQSGASTRPGRCAGGRKALRDILYMATLSAIKARDPVLASFYKRLREKGKPFKLALVAAMRKMITILNAIARSDPAFHTA

SEQ ID NO: 99055 - protein, 346 aa, unidentified
MEHHAGIDVSLELSSVCVVDARGKIVREAKVASEPDALVSFFKGLGLPVKLIGLEAGPLSQWLHAGLMRAGFEAVLLETRHVKAALSAMTVKTDRKDARGLAQLIRMGWFRPVHAKSIGSQEIRALLVARKQLLGRLLDVELSIRGILRGFGLKVGQVTRKTFEARIRELVTGHTMLERIAEAMLSARATLQAQYEKLHKAMLAFVREDAVCRRLMTVPGVGPVVAVTFKSGVDDPNRITKSKAVGALFGLTPKKYQSGEKDVTGGITRTGDEMVRTALYEAANVLLSRITRFSKLKRWGIDVAKRRGSKRAKVALARKIGIILHRMWIDGTTYRWAEAKPIAAQA

SEQ ID NO: 99056 - protein, 341 aa, unidentified
MNSIYYIGLDIHKKVIAYCIKRIDGALIRQGTVAAERKALNRWLSELPGPWCGAMEATLFTGWVYDFLKPYAVELKVAHPAMLKAITAAKKKNDRADAEKIADLLRVNLLPECHMMPEELRELRRVLRYRNMIVSTAVKMKNKMSGLLMEVGAVYDKKRLHGKKYFGALLERVEDVPDSVKGLLKLSRNGFEMFDDIQKKLVGALRKNRMIRERVERLMSIPGVGELTALTWVLEIGEVSRFSSSRQIISYCGLCSGQHESAGKEQRGPISKKRNKHLQTKLIEAAKLAPHWNEQLALLHDKELARGNKNRATLVVARKLVEFMLAVDRRKTDFELLKEAA

SEQ ID NO: 99057 - protein, 404 aa, unidentified
MWYVGLDWADTHHDVEVLDEAGKRVGVRRFAHSHDGLNELKQFMLSIATDPEQLACIVETNHGLLITFLLEAGIPVYPVNPKTANHLRKAAGAKTDQIDAHLLAKLGRLDLGELRRLEPDSAIVQELKTLTRDQDALIQMQTRLVNQLTACLKEYYPVALKLFTKLQQRSTLLFLQAYPTPEAVQAASLDEITATLRAGKHTNPSQVAPSIFAEVHRPQLVASEIIVRAKSRLLLSLVKQLLVVLQEIASYDKAIRPLFLSHPDHELWSSLPRAGKHLAPRLLAEWGDDRTRYANATSVQTLAGTAPVPFQSGHYAKAHKRFACVKPLRNALYQFAWQSTRQEPWALAYYQRKRAEGKSHSMAVRALANVWVRIIYRMWQSKTNYQTVTFEAARLAHAPRQHVA

SEQ ID NO: 99058 - protein, 310 aa, unidentified
MDAIVVGIDVSKDRLDVAVRPTGETFAVERDAEGLSRLIARLAPLEPQAIAVEATGGYETVVAASLSAAGLPVVVVNPAQVRAFAKALGKRAKTDPIDAAVIAHFVEAAKPDIRPMPDEQTRLLADLVARRGQIVQMIVAERQRQKRLIEKRLQKSIARLLAALQKELSSLETDIDEAVRGSPAWREKEDRLASVPGVGPTIARTLIAELPELGRLDRRKIAALVGLAPWTRQSGQWKGKSFIGGGRMQVRAALFMGALVAARHNSALRGFHQRLLDAGKPKLVAIVAVARKLLTILNAIIREQKPWLPA

SEQ ID NO: 99059 - protein, 425 aa, unidentified
MNLLILKGVPMSLKIVYKICCGIDVHKTFVVACIASTNDKGVTSYESHRFSTYTSGLKTLLQWLLKHNCKDVCMESTGKYWIPIYNILENDCSIVLAHPKYVKAIRGKKTDKKDAKWIADLFKHDLVAGSFMPPADIRQLRDLMRYRFKLTCFQSSEKNRLQNCLTVSNIQLGNVVSDTFGKSAQAILDKLLENPADTSFDLEPLVYKSLKKKLPQLRDAINGYITPEQVGKLKVIKAHYESLESRKAELEELILALATPYQQELAILQTAPGIRSLFTAIGIISEIGTNMEAFPSAKHLCSWAGLTPTNNESAGKKKSVRVSKAGCYIKPLLVQCANAVVTSKKHPEIRNRYLRLKKRRGHKKAIIAIARMLLTALYHMLKNGENYNAELYRKYDLPPTNWEITVEQAIIIAKNQGYKIKSATA

SEQ ID NO: 99060 - protein, 372 aa, unidentified
MQQDSKVFVGLDTSKLKMSVALAEEGRQGEVRFLGDIDNTPDAVKRLVSKLSGKYHQLLLCYEAGPTGYGLYRQITALGQDCTVIAPSLIPKRPGEHVKTNRRDALTLARLHRAGELTAIWVPDPEHEAVRDLVRAREAAMEDLREKRQHLQSFLLRHGRIYPGLRPWTQVHARWLSSLSFDHPAQYLVLREYRQAIEDAEARLERLTQQVAGVVSSWSMVPVVEAYQAMRGIAFLTAVTFVAEIGDVRRFETPRQLMAFLGLVPSERSTGEQVRRGRITKAGNPRARRVLIEGAWTYRYPPRLSRSLQVRQESLPMTVRAIAWKAQLRLCARYRRLRAAGKRQTLVTTAIAREMAAFLWAIGHEVTPCSAA

SEQ ID NO: 99061 - protein, 332 aa, unidentified
MYLGIDIHKRYAQVAVMDEAGEIVEEVRVENANLDDLAQRYAGAEAALEATSNYYHIHDTLSEHLDVTVAHPKELNQIADTDKKTDRVDAKELARMVRLNSVPESYVPTDEVREARALVRGRQTLVENRTKYANKIHGLLSDHGITEDVKPLTIEGREFLRELSIPAPWDSLLESYIELIETLNEEIRNLEETIEQRAGSLKETQLLMTIPGVSYYTALSIYAELGEISRFDGDKSVVSYVGLNPVTRESGDSRIEGSISKRGSGRVRWLLVQAANTAVHTCSDEYLSRFYERLASRKNSQKAIVACARKMLVSIYHMLDRGKVYDPPNVSA

SEQ ID NO: 99062 - protein, 337 aa, unidentified
MERQYVGIDFHRRRSVIVRLNAAGDRLAVTRVANDPLAISAAVAEAGPVPEVVIEATYGWYWVVDLLRANGATVHLANPNALNWGERRVKNDVIDATDLADMLRLNRLPEAWIAPPGIRELRELVRYRAKLVRLRSGLKAQVHAVMAKEGVLPTVADMFCAAGNAQLDAMTLGPNYELRVASLRELIAIYDREVAMLERDIHRHLRHHRGYAAVQAINGIGRTIAAVLVAEIGDVMRFPNPEALCSWAGLTPKHRESDVKARRGEITKQGSRLVRWSLVEGIARYHGGPKLSSDYHRIAKRRGVNKARVAIARKVLTLVYYGLRDGEIRCLARAAAA

SEQ ID NO: 99063 - protein, 413 aa, unidentified
MEMEVIVSRCAFLDVHRDSVMACARIPDGRGGRREDVTEFGSTTPQLLALGDWLIERGVTRVAMEATGVYWKPVHWVLEPVIAEVWVINARHMRNVPGRKTDVADAIWGASLLEHGLVQPSFIPPPTFRALRDLTRYRKSVIEERGRETQRLHKVLEDAGVKLSSVASSVLTKSGRAMIEALISGERDSEVLAEMAKGRMRSKIPALKDALAGRFGDHHALLCRAMLARIDQADATIAVLTVRVDELLDPYEAAATLLITIPGVARRAATVILAEIGADMSRFPTAGHLASWAGMCPGNNESAGKHHSGHTRHGSKWLRKALIECAKAAARSNDTYLAAQYAQIRARRGSQRAAVAVGHSILVIAWHLLTTGEPYNDLGGDYFDQRRNTAARQRRLVTQLEALGHKVTLEPAA

SEQ ID NO: 99064 - protein, 420 aa, unidentified
MQEEAEFAAFIGIDWADRKHDVCLQVPGVAAPEVSVLEHRPTVINAWARRLRERFGGRPVAVCVELAQGPIVSALLEYDFFVIFPVNPSTLAKYRRAFVPSGAKDDPTDAALALDLLRRHPEKLAPLRRESEDMRALRRLVEARRDLVQDRVRVTNRLTFTLKDYFPQVVDWFRDKETDVFAAFIERWPSLQAAQRTRRDTLVAFFHAHSVRRATVIDKRIDAIQSERPLTSDLAVIEPALAIVATLLPQLRALSAGIARLDSDIAKRCDALPDFRLFAGLPGAGPVFASRLLAAFGEQRDRFADAAAVQKCVGVAPVTERSGNKHWVHWRWACPTFLRQTFVEWAASSVSHSFWARAFYDSHRAKGSSHNATIRALAFKWIRILFRCWIDRTSYDESRYLSALQKRQSPLLKFAAHVPS

SEQ ID NO: 99065 - protein, 353 aa, unidentified
MTTMTEVTERITAGVDTHRDTHMVAALDERGTKLGIREFATDPNGHLAILSWLASFGTVELFGVEGTGTYGAGLNRFLHERGIAVVEVTCPNRQKRRMHGKSDPVDALAAARAAQSGEATALPKTRNGSVEAIRALRVIRRSAMRDRTSALNQMRALVVTGPDEIRDAFRGLTLRKMLTTAVHLHPADPTSPDGATKFALRELARRVIALEAEVKRNDAVLVPLVRATAPRLVARHGVGTDTAAALLITAGDNPQRLHSEAAFSHLCGASPIDASSGLSKHKRLNAGGDRTANEALWRIVLVRMSSDPRTRAYVDRRTVEGKSKRDIMRCLKRYVAREVFADLGCLSPALDKQ

SEQ ID NO: 99066 - protein, 424 aa, unidentified
MRFVALDVHRDFCEVAIAEAGEVRLAGRVKTTPAELELFGRSLGSDDQVVLEVTGNALAIARILEPFVARVVLANPKSVKAATDAAKTDKGDARTLAKLLAGGFVREVWIVDEQTRILRRRVSRRAQLVRQRTREKNQVHATLIRNLKARPPVSDLFGVRGRCWLAEQALPADERETVEACLRQVDFLAAEIAVIDRALAELALGSEQMQRLMTLPGVNFVTAAALTGAIGDISRFPTAAHLVSYIGFDPRVRQSGSEPARHGRISKQGPGEVRHLLVEAAWHATRSYGPLRVFAERIASKRGRNVATVAVARKLVVIAWHMLSRGEDYAFARPSLVREKQRKLELLTGAERRKGKRNPVRVFATKEQHELEKDLARQAEVAYRRLIQDWQPAMKGAGAAAGRASSSQPKRQAARQETAPTPAL

SEQ ID NO: 99067 - protein, 462 aa, unidentified
MPRPSRTPATYRIDGLPTIFANAAGMDIGADEIVVAVPPDRDPQPIRAFRTFTPDLEALVIWLLECGIDTVAMESTGVYWIPIYELLEQHGIVPYLVNGRHVKNVPGRKSDWNDAQWLQKLHALGLLQASFRPDAEISALRTLVRYRAELIQHRAPHILHMQRALQQMNVQLERVLSDIMGTTGQAIIRAIVTGERDPLALAQLRNPACKSSEELIAKALRGTWKPELLFVLAQALVIYDVYTAQIAVCDGELERYLDQLEPRSGDPQAPLPDLPATKTDSHSKNAPRFNARAHYARLLGVDLVAVMGLSSSSVQTIISEIGTDMRRFPTVKHFAAWLGLAPRNDISGGKVLRSRTRKVTNRATQAFRQAAQSVSRSDSAVGAYYRSMRARKGPEQATVATAHKIARIVYHLLKYGAAFEAESADAYEQKRQERELRGLTRRAAKLGYTLAPVQEPAPDPSP

SEQ ID NO: 99068 - protein, 335 aa, unidentified
MNVAGIDVDSRTLKVVVRRQGKNEKVKVYDNTALGHGDVVALLRRARVQRVCLEATGSYHIDLAVALSDGPDLEVMVLNPKVAKRFAESLGQRQKTDAVDAGVLAEYAERMPFSAWVRPAEEVLALRALTRRVTALTKQRTQAKNHLHAARAARSTPALVLEDMALSIAQLDRQIERLRDAALALVRQHKGLARTLALLSSAKGVGVTSALQLMGELLVLPTGLTARQWVAMAGLDPRHHRSGHSVDKPPRLSKAGNRYLRLALYMPALSACRHEPHVRAYYQHLIVRRGLKKLQAVCAVMRKLLHAFHGMLATQTPFDGTRFTAVRVEPAAALA

SEQ ID NO: 99069 - protein, 341 aa, unidentified
MKIRSIGIDLGKTTFHLVALGERGKIVVRKKLSRKQLLAFTANLDPALIGMEACSGSHFLGRALSQQGHDVRLIPAQFVKPFLKSNKNDFLDAEAIAEAAERENMRFVPLKSDDQLDLQALHRVRERLVSRRTAVINQIRAFLLERGITFRKGPSSLRRQMPEILKNGDEQLSPRIRSLLAMMWEEWKRLDKQVESFNTQIEAIGSGDPVCQRLREIPGVGPLIASAVMASIGNGTAFHKGREFAAWLGLIPRQSSTGGKVKLLGISKRGNRYLRTMFIHGARSLVLRVNREHSPMGGWISSLEARAHCNVVIVAVAHKLARITWAVLSSGERYRPASLAG

SEQ ID NO: 99070 - protein, 339 aa, unidentified
MKKSDCPTYLGIDVSKGSLDCCLYNGTEHKTRSFNSNKLSTVQKIISHFKISPVSCRVVLEATGVYHSAAFIGFTSQDFDVAVENPLRIRSFATMKNLLRTKTDPVDAKTIAEYGFTNNPVSTKPKEAYQCKVVARLKLIGFFKKLIAQNRNHIEALNNNSFECNATSLITHVKNEINHLNVTINEIKSDIEKILTKHCPELYKQYKSIPGIGPTVAGAIICFYGDFSGFSNSKKAAAFAGLCPKVCKSGSSVDKKGSISKKGNSMLRTLFYMAALSAARCNDTCQEVYLRLRQAGKPAKVALIAVANKLLRQAMALARKGESFIENYKEISPCAAKTT

SEQ ID NO: 99071 - protein, 320 aa, unidentified
MSVSSVTVGVDVAKAHVDVHVPGVGNDVQRFANDAEGHSALAAVLQPLGVDLVVMEATGGYEAALACGLQAAGLPVAVVNPRQARDFAKSMGRLAKTDAVDARMLAELGSVLVHRDDLARFLRPLANECQQWLAALVTRRRQLLAMLHSERQRLQITPRKLHASIEAIVKAIKAQLDEIEEQMVTHVREHFGELDRLLQSAAGIGPVASATMIAELPELGRLNRREIAALVGVAPMANDSGNSKGRRRVQGGRFEVRRVLYMATLTATRHNPAIKAFYERLKAAGKLPKVALVACMRKLLTTLNAMVRTGKPWAQSLHGT

SEQ ID NO: 99072 - protein, 401 aa, unidentified
MTVRPQLWVGIDVGKTNHHACAVDDAGTVVWAQKLTNEQRAIEQLIDRAHKAAEQVRWAIDLTSPMALILITVLLGAEQSVVYVPGRVVNTMTHGFRGEGKTDAKDARVIAETARLRSDLSKVTLPDELVVELTQLTGYRTDLMADWVRGINRLRGLLGSIFPTLEAAFDYSTRTPLILVTGLCTPSEIRAAGIDGVKAHLVEHKAWPAAIAKTAATAVALANEQELALAGEAGTAALVKRLARKLLELDHEIKDIDKAITERFRDHPYARIIESLPGFGPGLGAEFLVVTGGSLASFATPGRLAAYAGLVPVPKDSGRITGNLRRPKRYNRRLRRVFYLAALSSIRSNGPSRQFYDRKRGERLIHSQALLALARRLVDVLWALLRDDREFTPHAPGTAAA

SEQ ID NO: 99073 - protein, 372 aa, unidentified
MASIIYVGMDVHTTNFTFCCYTVDSDRGFAVAQTEPDYRQVIKYMERVQKQRGEECKFVCGYEAGCLGYSLYHQLTRCGVDCVILALSTMHQEKGKRIKTDRRDAENIARCLAFSLYSPVYVSTTEDDAVKEYIRMRDDIKADLKRVKQQIIAFTTRHGFAFDGKSYWTQKHLKWLETLVFEHPLYKETLQEYLILYYMLDEKVAVYDTRIEEMSHLEHYEENVQKLCCFRGVAAHTALSLLVEVGDFQRFRSAKHFAAYLGLVPGEHSSSDKQIRTSITKAGNTHLRRLLVEAAQSYNRGAIGKKSAALKARQGGNPAEVIAYADKANERMQRKYYRIAFKSRHNIAKTAIARELACFVWGMMTGNISNAA

SEQ ID NO: 99074 - protein, 399 aa, unidentified
MTEEAPVREAPITVLSAHPAVRATHPTLTTEEVAVNTIAHSEDRRVIGGVDTHKDVHVAAVIDDLGRIQGTKSFPTTRHGYRRLLGWLQSHGEILAVGVEGCGSWGAGLARYLTARGIRVLEVNRPNRQDRRLDGKSDPVDAQAAARAVLSGRAKATPKSATGPVEALRQLRVARSGAIKARISASNQLHSLCDTAPERIRAQLQGLGLRQKIAVCERWRPSTANTPESAAKRAMASIARRWRALDDEIKTLDRHLHAILDDIAGQLLAKHGVGYETAGQLLVTAGDNPDRLRHEASYAALCGSSPVKAHSGKSTRHHRLNRGGDRQANSALWTIVLSRMSNHPPTRDYVARRTKEGLSKPEIMRCLKRYAARELFPHVQAIITDTTDLDAPGKDAAAA

SEQ ID NO: 99075 - protein, 350 aa, unidentified
MKSRNSEHHIKIVGIDLAKSSFQIHAITKNGHKITNKKMTRNKLKSYMINLPACLVAMEACGSAHYWARLFHSYGHKVKLIAPQFVKPFVKSNKNDAVDAEAICEAVQRPNMRFVAIKEVSQQDIQSLHRMRSLAVSRRTAQVNQVRGLLLEYGIDIPKGRNHVREQLSGILENAENGLTNLFRALLSDLYEELVHLDKRIEKYEIKIKHISQVDEQARRLLTIPGIGPVVSTALIAAIGDINMFKNGRELAAWLGLVPRQSSTGGKPRLLGISKRGDSYLRALLIHGARSILQHAERKTDKTNCWINKLAQRRNKNIAAVAMANKIARTAFALLKHKQDYQLITESIAA

SEQ ID NO: 99076 - protein, 356 aa, unidentified
MNGLKHQKEKRSMDHFAGLDVSVKETSVCIVDEVGKIVREVKVASEPEALLAVLKNPVYCFKRIGLEAGPLSQWLFSALAEAELPVICVETRHMRAVLKAQINKTDRNDARGIAQMMRVGLYRPVHVKTLRSQKLRMLLTHRKLLQSKAIAIENDLRGTLRNFGLKVGMVGKVMFEARIKELVEDLPDLAIMVEPLLIVRRALREQFVILHRRLLAIVRDDEVCRRLITTPGVGPVVALTYRATVDVPARFRKSKAVGAVFGLTCSKYQSGEIDWSGRISRCGDEMMRMMLYEAAQSMLRAKKWSWLKAWAMQIARRRGMKKAIVALARRLAVIMHRIWVDGTEFRWTRQQAAAAA

SEQ ID NO: 99077 - protein, 412 aa, unidentified
MRVLYERCCGLDIHKKFVVACFLATGADGTVGKEVRTYSTMTADLLALSDWLRAEGCGPVVMESTGVYWKPLYNLLEGTLEVLVVNARHSKNVPGRKTDVRDGEWIAELLRHGLLQPSFIPDRPQRELRELTRSRTTLVRERAAEVNRLQKVLEGANIKLASVATEIMGASGHDILAALVAGHTQASELAQLARGRLRAKIPSLEQALAGQFQAHQRFFVAQQLVHIDFLEGLIERVSAEIAERVRPFEEAVALLDTIPGVGRRIAEIFVAEVGVELRRFPTAAHLAAWAGLAPGNNESAGKRRPATTRKGSPWLRAALVEAAQAAGRTKSTYVGAQYRRLLPRKGKKRAVVAVAHTLLVMAYYVLTRREPYRDLGTNYFDERDRQAVERRLVHRLEALGYTVSLQPPGSAA

SEQ ID NO: 99078 - protein, 388 aa, unidentified
MTQTLTAASKPVALDYDNTLVVAIELSNVSWVLAAQVPGLPRLKAKRSVEPTAEALMAAINGYRNRAREAGRMVERVIAVYEASWSGFWLARWLERGGIEIHIIQPSSVPVDRRARRAKSDGIDAELLLRTLLAWLRGEPRVCSMVPIPDEADEDARRFIRERAELVAERVSLVNRIAAVLATLGVRDYNPLLRNRRGRLDELRTALGTALPPQARAKIVRMIDRLELVQAQVAELDQERDAVLEDRAPDKAAKMIQQLATLRGVGVQSATVLVREAFVREFPNGKALGSYAGLTATPYSSGGAEREQGISKAGNRRLRTVMVELAWLWHRYQPGSVQVSWFRERANAAGRRARKVMIVAMARKLLIALWRFATQGVIPEGAVLKPAA

SEQ ID NO: 99079 - protein, 411 aa, unidentified
MSLLHEALPASTLVVAIDPGKVSNRVWLSTGEAGEVVPPLSLPVLRPGLEQLHRLVVEHVGSSGPVFAIEATGGLHQAWLRELNQRFPGSVRLFAPSETTAARAQLGSRRFKTDDRDCAALTYLARQGQGRPVPDQAQDALAAAVRHRRGLIGEHKVAQQRLHDQLHVLCPGLAAPEGHGRALPVDSVIGQAVLDCAAAFAGRPPSVRSLRARARGRVLTSEAEFWVHRWRACLPPPADAPARAARLARSLARWRAIDVDIAAVDAEITALLAGSDGQILTTLPGVATSRAAAFAAFSLPIARFPSAEHLYSATGLAPGSYRSATINRRTPISRQGLPEHRDALMNLAWGLSQHCGPFIDRAHELRGRGLRPIPVRIALARHACRLAYTLLQTQQPFDEQRYRRARHQSER

SEQ ID NO: 99080 - protein, 412 aa, unidentified
MSPMLIGIDVSLRSHHVQFMDGDGRSLASFSVPNDQTGADTLIHRMLDTASKEKVEHLHIGMEATSNLGWHLAHYLKNELQSYEPNVKSQVFVLNARKVARFKKGYDTLPKNDRIDAWVIADHLRFGRLPHEMKDIIQYEALQRLTRTRFHLMKNIKRDKTYFLNQVFLKFSGMRQDNPFSNTFGNTSLAVIQELEPDQIMAMSMQELIEFLQDKGKNRFENPEEIATYLKKIARSSYRLDKAMADPVNISLATTLSVIQHLESEVKKLDKEIAKIMKGIPETLSSVKGIGPVFAAGILAEIGGIDRFDNHADLAKYAGLVWSQNQSGEFEAEETSRMRTGNKYLRYYLVQAADSVRKHDTEYGSFYQKKYDEVPKHKHKRALVLSARKLVRLVFMLLKTNKMYTPPERRNR

SEQ ID NO: 99081 - protein, 375 aa, unidentified
MLDTTTFVGLDVHARSIKAVSLDVMTGEVRCATFGYDAGAVAGWVRSVDPKARCVYESGVTGFDLQKRLSGLGVDCVVGAVSKMIKPSADRRRKNDRNDAEFLARMLSVGNVVEVWVPDDECEAARDLTRALEDARDDLSRSKQRLSKFLLRHGLVFDERTPTGRRKGNWTRAHWSWIESIRFAEGADNEALAYYVDAVRRAAEDKARLEGLVEAETRKPRWRKRVDSLRCLKGVDTATAADLVFEAGEFSRFRNARSFAAWVGLTPSEHSSGESDRRGAITKAGNKHLRKALVEAAWHYLTCSGRPKDLAKGQAPDRVARRHAAKGVRRLVERREALLARGVHGRTSPRRARSPAGYGRSASWPRRRRGAFPRT

SEQ ID NO: 99082 - protein, 408 aa, unidentified
MLFVGDDWAEDHHDVELQDEAGGRLRRARLPEGVAGVARLHELIGEHLTEDAGPEEVAIGIETDRGPWVQALVAAGYVVYAVNPRQVARYRERHGTSGAKSDAGDAHTLADMIRTDRHQLRPVAGDSEQAQAVKVVARAHQTLIWERHRHMLRLRTALREFFPAALDAFGDLTAPDALELLGRAPDPDSAARLTPAQVITALRRARRRKPEEKAAAIIAVLRAGQLGQPPAVAAAYAATVRSLARIITAFNAEITAMEEQVTACFGQARDAEIYLSQPGLGKILAARVLGEFGDDPARYASAKARKNYAGTSPVTRASGKKKTVLARFIHNDRLVDALHQQAFCALTASPGARAYYDQLRGRGQGHHAALRQLSNRLVGILHGCLKTGTLYDEHTAWAHHNHDQQTAA

SEQ ID NO: 99083 - protein, 402 aa, unidentified
MAAGQLWAGVDVGKEHHWVCVVDDVGTVVLSRRLVNDEQPIRALVGEIDSLSDQVAWTVDLTTVYASLLLTVLADAGKSVRYLSGRQVWQASATYRGGEGKTDAKDARVIADQSRMRGSDLPVLHPNDNLITELRILTSHRADLVADRTRTINRLRQQLVAVCPALERVAHLTADRGWIVLLARYQRPKAIRQSGVSRLTRILTDAGARNASTIASAAVAAAKTQTVRLPGEEVAASLVAELAQGVIALDDRIKTTDADIEGRFRRHPLAEVITSLPGMGFRLGAEFLAVVGDPALIGSADQLAAWAGLAPVSRDSGKRTGRLHTPKRYSRRLRRVMYMSALTAIRCDPTSRAYYQRKRDQGKRPIPATICLARRRTNVLYALIREQRTWQPDSPPITESAA

SEQ ID NO: 99084 - protein, 378 aa, unidentified
MHSMTQENTLVVGGVDAHADSHHAAALDQRGALLSTKSFPTTTSGYRQLLDWLSSHGQIDVVAVESTGSYAAALVRYLREHDVRVVEVNQPHAHTRRRIGKSDPIDAEMAARLFQAGKAKAVPKRTDGIVESIRLLRVARSSAVKSRSAALLQVRDLIITAPHEIRDQLSSRKTLRGKVTVCARFRLSGRELRSPSQAAKFALRSTAQRIEALDQEIAALDRELEQLVATAAPRTVQLLGISTGHAGQLLVTAGENIDRLRSESSFSMLCGASPIPASSGKTTRHRLNYGGDRQANRALHLIAVCRLRYCDRTRAYAKRRTAEGKTQREIMRCLKRYIAREVFNSLCADLADIAQPRPVVSTTIMCGTPGFGINRTRT

SEQ ID NO: 99085 - protein, 402 aa, unidentified
MRRCIGLDVHREFAQVAIWEDGVVWQAGRIQTTPEALRLFADSLCATDEVALEATGNTYAIARLLEGHVGRVVVSNPQKTRAIAEAKVKTDKVDAAVLAGLLAANYLPSVWLPDDQTHALRRQVTRRAHIVRQRTRLKNQVQSILHRNLVPRCPAADLFGNKGRAWLATQDLPADEHQAVGALLRQLDFHGQELRIVDAELGRVGLERAEVRRLMTIPGVDATVALAIVAAVGDFQRFSSPQRLVSYLGLNPRVRQSGGQPAQHGRITKQGRAHARGMLVEAAWAAAKTPGPLRAFYERVRARRGMQVAVVATARKLATLCWHLVVGDQDYAFQRPSLTDKKLRALELRAGMPPRRGRKGTAAAYSLKEVRRRERALTEQAEVAYRQLVTDWQPKRPATKPR

SEQ ID NO: 99086 - protein, 341 aa, unidentified
MAEVRVIGLDIAKSVFQLHGVDAEGATVLQKRLTRARLLPFFEKLPPCLIGIEACSTSHFWARELVKLGHEVKLMPAQYVKPYVKRQKNDMADAEAIAEAVTRPSMRFVGAKSATEQSAMMLHKVRLMLNRQLIMITNATRAHMAEFGIIAPIGRRGVVGLLAIIDDESNEQIPAEARRCLQMLVAQLKLVKLQILDNDRQVLALARSTELGRRLMEIPGIGPLVASALVACIPDPSMFRCGRNMAAWVGLVPKQNSSGGKERLGSITKAGNRYLRQMLFTGAMAVIRRAMQGTRRTWLSQLLARRRPKVAAVALANKNVRIAWALMTSGDHYREPMAIAA

SEQ ID NO: 99087 - protein, 316 aa, unidentified
MRKKEVFVGIDVAKEELEVAVFPRAETETWPNTEEGILRLVYHLKSLCPTLVVLEATGGLEMPCVGALAAEGIPVVVMNPRQIRDFAKATGRLAKTDRIDARVIARFAKAVRPEIRELKTEEMQELTALGLRRRQIIQMITSEKNRLATASKWTREDIKEHISWLEKRLDDVNKELEKSIRNSPVWREKDDLLRSVPGVGPVLSATLLSQLPELGSLNRKQIAALVGVAPLNRDSGQFRGKRCIWGGRASVRCALYMATLVATRFNPTIAEFYHRLRTAGKEHKVALTACMRKLLTILNAMARDRAHWSPVCLTES

SEQ ID NO: 99088 - protein, 346 aa, unidentified
MDHVGIDLHKRDSQICWLYDTGEVREVRIRTTPERFEALFGGQAPAQILIEASTESEWVARHLERLGHVVVVVDPNYAPMYPRRRRRQKNDQRDALALATASRTGTYRAVHRVSAAQRAVRQALTIRDTLVQTRTRGVSVVRSLVRGEGLRVASGQTEGFVGRVAAEPVPEPLATTLAPLVTLLTTLEAAIGAIETHVRTLTADDARVHRLQGVPGVGWITATAFVAAVDAAGRFADAGQLAAYLGLVPRDRSSGEGHRSGPITKTGPSRIRWLLVQAGWRVLRATTADAQPLRRWGLQVAERRGTRVAVIGLARRLARILYALLRDGTAFDPMQVAAGRAVRPAA

SEQ ID NO: 99089 - protein, 406 aa, unidentified
MRVVLAFDVSKGTSIVVAYEESETCILEDKISHSSSGFIVLQEMIEGLTKEYGQTPEIVFEATGVYSRALERFLQDNSYAYCVLNPLEANFQTKTLRRNKTDKSDAHELAKSHFKEKRQIKQPQEAYYENMRVMTRRYDDIDQEKKLYQNKLHALLQLSFPEIEIVFKSKSSLFLNIIQLFPHASSIVNSSKTIIRNRLKQCTKKNYSLQKLEEKTLELIAVAKDSYPAIDEEDYECQLIKQYAKILLKLEEEQVQLIEKMAELSEGRPEYNVLLSFPGIQKTTACRLIGELGDVRRFKNNKKLNAYVGIDIVRYQSGSIQYKDSINKRGNKRLRSILFFMIVSMLSAKGKGTNHIVDYYYKLKEQPYNKHHKVATIACVNKFLRIALHLIQHNILYDYEIATTHS

SEQ ID NO: 99090 - protein, 403 aa, unidentified
MTMRRRAWVGIDVAKTSHHACAIDETGKVVWNQKVSNEQRAIEQLVTRACKGAEQVQWAIDLTSPMALMLITALLCAEQSVVYVPGRTVNTMTHAFRGEGKTDAKDARVIAETARLRNDLSNVVLPDELVVELTQLTGYRADLMADWVRGVNRLRALLGSIFPGLEAAFDYSTRTPLILVSGLCTPAEIRAAGIDGMTAFLVDNHAWPTGIVKSAATAAALANEQPLALPGEAGTAALVKRLARRLLELDREIKDIDKTITARFRDHPYARIIESLPGFGPGLGAEFLVVTRGDPASFATAGRLASYAGLVPVPKDSGRITGNLRRPKRYNRRLRRVFYLAALSSLRADGPSRRFYDRKRAERLIHTQALLALARRLIDVLWALLRDDREFTPEKPITATAAA

SEQ ID NO: 99091 - protein, 372 aa, unidentified
MASIIYVGMDVHTTNFTFCCYTADSDRGFAVAQTEPDYRQVIKYMERVQKQRGEECKFVCGYEAGCLGYSLYHQLTRCGVDCVILAPSTMHQEKGKRIKTDRRDAENIARCLAFSLYSPVYVPTTEDDAVKEYIRMRDDIKADLKRVKQQIIAFTTRHGFAFDGKSYWTQKHLKWLETLVFEHPLYKETLQEYLILYYMLDEKVAVYDTRIEEMSHLEHYEENVQKLCCFRGVAAHTALSLLVEVGDFQRFRSAKHFAAYLGLVPGEHSSSDKQIRTSITKAGNTHLRRLLVEAAQSYNRGAIGEKSAALKARQGDNPAEVIAYADKANERMQRKYYRIAFKSRHNIAKTAIARELACFVWGMMTGNISNAA

SEQ ID NO: 99092 - protein, 312 aa, unidentified
MIMSATEKYNTFIGIDVSKDTLEIFNSSTKELMTLENTKAAVSNYIKALAFSKETLVVIDLTGGYEALCAACFSLKGFDVIRAEGVKVKGFAKAIGQKAKTDAIDARLLAEYGEKCHDKLRLYEPFPNPIKPLVIRLTELKDIHQQEKNRFQAPNMPAMVKRGVSRVLKTLENEISLLETEILKAIKADKSLSDRYRLLKAQKGIGDKTAFILLGLLPELGHINRRAIAALAGVAPYAKDSGTLNGYRFTRTGRKDVKKALFIIALSVVRYDAKWKKVYEDFQLRGKKKMVALTAVMRRILITLNAKCKILP

SEQ ID NO: 99093 - protein, 369 aa, unidentified
MIIIGCDYHPGFQQIAYVDTETGELHERALQHREEAEKFYRELAAQGMKVRVGMEASGHARWFERLLAELNIELWIGDAAEIHRKRERKQKTDRQDAQHILRLLLKDDFPKIWVPSWENRDLRQLLWHRHRMVQARTRMMNQLQAVALNEGLRYKKRLWRDAGRKQLEAFRLAPWASRRRHDLLELLDRLNPTIAELTQAIEREVEKCPEARRLQTHPGVGPLTALAFVLIIGKADRFQCGKQIASYLGLVPLEDSSGNRRRLGHITKQGNSLLRFLLVEAAQVTARSLPEWRSKYVHLTMRRGRKIAKVAMARRLAVRMYWMMRKGWDYEQVKKFGSHAGQPGYRHGVKSNIEQLIGASRSSSQRSSK

SEQ ID NO: 99094 - protein, 432 aa, unidentified
MKAWNEIKHYAGFDWAKDHHDVIVLDAGGKTVADFRFDHTAGGWDEFSKKLAAFPNVAIAVETNHGGVIERLLERECCVFPVHTRSAKGYRQRKVPSGNKTDKVDAWSLADALRLDGAHWKQLSAQDPLIKELRLLCRDEVALIRDRSALITQLRQTLYDYYPAALEAFDDWTMPAAWAFIIAFPTPEVLVKAGKRKWEKFLHVHKLGRPATYQRRLEIFARADQFAGSAPAVRAKSKLAVARAKQLQLLETQIAEYRQEIRRLFAQHPDAKLFGSLPGAGDKIAPRLLAEIGDDRALFPDAQGLQCLAGTAPVSYQSGQIHRVYLRRQCNKSLRNVVHLWANLSREFSPWAATYYAALRAKGKSHACALRALGQRWLKIVWKMWQTRTLYDADLHARNQLKHGSWVLQLVNQPAVVKTEKSSGKESPARNP

SEQ ID NO: 99095 - protein, 429 aa, unidentified
MQNESTPDARGPVFCGVDTHADSHWLYVLDWRGRRVLSRRFPADAAGYEALAGAIAAAGEPACIAMEGTSSYGAGLTRHLASLGMPVREALSPARMQRRRPGQGKCDEADAERAARAAMSGSRLGTPKSQDGWVDGVRCMLAARSGAVKARTSAINTARSLLTTAPEGLRSRFRGMAGPRLMEELPSVRAEGALGAALGALADLWAAARDAALDMERAIEASLEENCPALLAMYGCGPVSAAKLAVAAGDNPGRLRSEASFAAICGACPIPASSGKTVRHRLNRGGDRQANSALHEIARQRVMRDPETAEYAERARARGKSDREVMRCLKRYVAREAYRALMRPHEIRRPEDASELVAARRAAKVSQVRAASILGTSEKYISMLERGQRELKPIRRAYEAWVEAGLPLDWDRQAFEAERKMDSKKHLAK

SEQ ID NO: 99096 - protein, 325 aa, unidentified
MQGKEVSEQETAKCTAGIDVSKNWLDVHVLPASQSLRVANTSGGICQLKRWLIRFDPKLVVIEATGKWHRVLCRSLAASQVPLAIVNPYRVRMFAEAQGILAKTDQLDAKVLAMFAVMMAPPARAPSSEMLEVLQELITARDSAVAEETALRNQRSAAQARFLKPHFARRIAQLKSHIKALEKECLRLIKTDDALARRFAILLSVPSFGAVVAMTLIARLPELGSITNKQISALAGMAPLADDSGNQKGIRVIRGGRGPVRRMLYLAALTAAHHDETMQAFYLRLTSKGRASKAALVAVARKLVVLANTLIAQDRLWQPIAPQNA

SEQ ID NO: 99097 - protein, 369 aa, unidentified
MPVMIGVDPHKASHTAAVLDEHGCLLGQQRVPATLDGYRQLREWAGRWPQRCWAVEGAHGIGRALAQRLVGDGEQVLDVPAKLAARVRVLSVGHGRKSDPHDAVSVAVAARSVPSLRQVGVEDQAVVLHLLTKRRQDLVAARTQTINRLHRLLMDLVPGGARRNLTAKRAAALLAAITPAGQPAVTRWQLATELVADVRQLEQQIAAVEARIKTEVTQANTSLVGLFGVGPVLAATFLGEVGDVLRFPSKHHFAAHTGTAPLEASSGQVVRHRLSRAGDRKLNHALYMMAMVQVRRPSAGQAYYQRKLAEGKSPKEALRCLKRRLSDAVYRCLLADRRSPRSPDETSTGCPKASGRVLLGHRDMVVKEP

SEQ ID NO: 99098 - protein, 334 aa, unidentified
MNMHTQGGVASRDQRPNAGIDVSKQHLDACWGLQEQRLVNEATGWDGLIAELKQAEVDLVVIEATGGYERGLVCALQGAGIAVARVNPRQARDFAKSMGVLGKTDRVDARTLRDFADVLSRHKDRHKYITPIVDAERAELAALMTRRRQLVDMRVAETNRLEQAASARAVRSIKSLLRTLDKQIADIDPDADDFLNRRFNEQRRLPDSAKGVGPVTILTLTSALPELGQLRRRQISKLVGVAPLADDSGPRKGVRRIFGGRSEVRSVVYMATMSAINYNPVIKVFHSRLIAAGKPKKVAIVACMRKLLTILNAMLRDSAMWDAAKHVQAQKTAA

SEQ ID NO: 99099 - protein, 343 aa, unidentified
MIYVGVDLHLRFCYMTVLDAKGKVLRQGRLQNRDSQLQQFFADVKNSLSENEGIAVAVEACGFWCAFVDCVEPLVERVVLVHPAKVKAIAHAKLKNDRVDSATLAQLLRANLLPEAWKADRTTRDLREVLRMRVALGQDRTRYKNQIHAVLHLHGQQTAVSDLFGRQGRAWLKALVVRPAARQAIDTSLRMIDQLNGELRVLDRQLQKSAQQDADARCLLSIPGIGAFSAMVLKAEIGDIRRFRDKKSLYNYAGLVPVIRQSADHLRRGGITRSGSPLLRWVMSEAAVTATRHCPAARAWFTRLAQRKHPHVARTALARKLLGAVWALWTQGVYFDERIFAAM

SEQ ID NO: 99100 - protein, 345 aa, unidentified
MESMYYIGLDVHKKTISYCVKDVSGRIHGEGKIPATRFDLDRWMKTLPQPWTVAMEATIFTGWIYDHLRPHAGAVKVAHPLMLRAIAAAKKKNDRIDAKKIADVLRCDFLPECYMAPTAIRERRRTLRYRNLLVRQTVQLKNRISGLLMEAGVSYNKQKLHKVGYFRELLKTNPDIDESLRPLLQLCRETLVRLQKTESALIRSLARDRLLVERVEHLMTIPAVGPITALTWALEVGEVSRFSSIKKAISYCGLCGDEQSSGEHVKRTPISKQRNKHLQWVLVEAAHMAPRLSPELALLYDREKQKGNANRATLAVARKLVAYLVAIDRSQRDFLLVEKENQAAA

SEQ ID NO: 99101 - protein, 345 aa, unidentified
MLYVGLDVHAKRSSICILNHDGKTVKQELIKGPWPAVVDRLRGIDQPFAVCYEASCGYGALHDQIAPLPMARQVSVAHPGQLRLIFKSKKKHDRIDAQRIAKLLYLDEVPAVHVPDVNVRSWRKLIEYRQKLLGRRSAVKNQIRAALRGCGVVAPARLWTKKALLWLKSIELPAGEKLTVELAIEELSDFAARVKRVERELGRIAKTHAGVQLLMTIPGVGIRTAEAFVAYVDDIRRFARNRQVGSYFGLVPCLDSSAGKDRFGHITRDGPPTVRKMLTEAAWMGVRCNPTLRAFYRQIMHDDPDRKKIAIVAVAHHLCRVMAAMLRSGEVWRGSVRHDDQTCKV

SEQ ID NO: 99102 - protein, 405 aa, unidentified
MNAVGIDVSKGKSMVTILRPFGEIVSRPHEVRHSSTQINALIREIQSLDGDTRIVMEYTGRYHEPMARWLSDAGLFVSAVNPKLIKDFDNASLRKVKTDKADSVKIARYTLDKWHDLKQYGLMDELRNQLKTMNRQFGYFTKVKTAMKNNLISLLDQTFPGANTFFDSPARSDGSQKWVDFVDTYWHVDRIRCMSLSAFTEHYQKWCRRKGYAFQPDKPEEIYEAVRDIIAVLPKDEVTKFLVRQAVTQVNTVSAAVEELRARMNETASQLPEYPVVLAMKGVGTSLGPQLIAEIGDVTRFAHKGALTAFAGVDPGKNESGSYAQKSVRTSKRGSASLRKTLFQVMDVLIKTMPQDDPVYAFMDKKRSQGKPYYVYMTAGANKFLRVYYGRVKEYLLEHTESSEN

SEQ ID NO: 99103 - protein, 430 aa, unidentified
MNSNTQNKKIEAITEKTLVVGIDVGSETHYARAFDHRGIEYSKKPFKFSNDEAGFASFKAWILEYKEAHDKDKVVPGMEPTGHYWFNLGKFLQDNDMKPVLVNPHHVKKSKELDDNSQTKNDRKDPKVIAGLVREGRYMIPYLPDGVYADLRTASNMRFQIQSELTRILNRISRWFNIYFPEYKTVYGNLDAVSGMLVLKTAPLPEDILTLGVDGIDKIWRDAKLRAVGKKRAQTLVNAAEHSVGSKEGAIAARVEIRMLIEDYESRNARLQEVMALIEELVKKIPMTEKLLAIKGVGIKTVSGFLAEVGDISRFKSPKELQKLAGLALVENSSGKHKGETTISRRGRKRLRYLLFEVAMSLVSKNREFAELHNYYTTRKQNPLKKMQSLMVVAAKLIRVFYAMLTKGVDYDPKKMSEDIRRPMISLQAA

SEQ ID NO: 99104 - protein, 414 aa, unidentified
MFAVGVDVSHGRSTVAVLGAKRKVVMKPFEVPHTVDGFASLAEKLNGLDGEVRIVMEHTGRYYESFAMSMYRAGFFVSAVNPLAIRDYQEGISVRKVKTDKADALKIAQFAIDKWEILPQYTPMDTIRYNLKTLHRQFQLSSKTRTALNNNLIALLEQNYPGANRYFDSPVRPDGTQKWVDFVDTFWHVDCVAGVSQNAFVERYRKWCKRHGYHFSEQKAIEIHTDARRKFPLAPKTDTCKLLVKEAVAQLNAISRTVETYRTEMNRLAAQLPEYDTVMAMTGVGKSMGPQLMAEIGDLRCFAHSKSLVGFAGTDPIKDDSGDKISGSNRSSKRGSPYLRKTLFVIMTILLQLQPQDDPVYQFLDKKRSEGKKYYVYMTAGMTKFLRIYYGRVRDCLREKGLWDNPASQEVNPG

SEQ ID NO: 99105 - protein, 343 aa, unidentified
MELYVGMDVSLKETSICVVDGDGEIQCEGTVISEPDAIAEFIKGKAGRALRIGLETGPTATWLWHELRAHGLPVICIDARHAKAALSLQINKSDRNDALGLARIMQAGWYREVEVKSLPCHEVRALLKSRAQLVKIKRDLENQMRGLLKNLGLRIGKAGGRVFRSRVEELVGDRPLLHEAVGPLLAVREMVSRQIATLHRKLLDLARDDEESRRIMTVPGVGPITALAFVTAIDDPKRFARSRSVGAYFGLTPRRHASGEVDWSGRISKCGDGMVRSYLFEAAGVLLTRVPRWCALKAWGHRLWKRIGFKKAKIAVARKLAVILHRMWCDGTEYRRSAKEETA

SEQ ID NO: 99106 - protein, 410 aa, unidentified
MEVMFERVAGLDVGKATVTVCVRMPGPRGRRTSQTRTFKTMTGSLRVMRDWLLECGVTIAAMESTSTYWKPPFYCLEDHMTVWLLNAAHMKAVPGRKSDVRDSEWIASLLEHGLLAPSFVPPPDIRRLWMLTRYRMQLMGDRTRDTVRLELMLEDASVKLSVVASSLNTVSARAMLTAMINGETDPLRIADLAKGRMRGKIPDLAQAVTGHFDIHHASMARSILRRLELVEEALKESDGVIADACEPWKHQIELLQTIPGVGEKVAQVIVAETGADMSRFPSAGHLAAWAGLAPAMHESAGKRSPAGKRHGNKWLTAMLVEAAGSVGRMRGKNYLAEQHARLRARRGANRAQIAVAHSMLVSAYHMLQRDQPYHDLGPDWHSRRNTEAHARRLVQQLERLGHTVILDPAA

SEQ ID NO: 99107 - protein, 319 aa, unidentified
MVIGIDVAKAELVVAARPGGERWTVANDERGVRTLVERLRATPPELIVLEATGGYELLCVGALAAAGLPVVVVNPRQVRDFAKATGQLAKTDRIDADILALFAERVRPAVRALPDAEAQELEALLARRRQLLEMLQAERNRLGQVFGRGKQPVKKSLKGHIVFLERELRITDSDLGTMIRESPAWRERDDLLQSVPGVGPVMSRTLLADLPELGRLSRREIAKLVGVAPLSRDSGTMRGRRFVQGGRATVRAVLYMAALVATKRNPVIRTFYQRLLAAGKPKKLALVACMRKLLTMLNTIARTEQRWCASQTDRALIPA

SEQ ID NO: 99108 - protein, 326 aa, unidentified
MKIVRPICCGMDVHKNIIVATIGITNKKTRITEYIQETFSTLNPDLLNLKQWLINHKCFDACMESTGKYWIPVFNILEDEINIYLTHPKYVKAIKGKKTDKKDSKWICDLFKHDLIKFSFIPPKEIRALREVSRYRYKLVGMRSSERNRYQNCMTVSNIGIGSVFSDPFGKSAQAIMKEVLESDIIEDEKILKCIHGSCKNKDKILDSIKHCNIETDQRFKMNESMTHMEELQVHINNCEIEIMKRAAPMFDRFMHITQLPGISTLSAILIISEIGVDMKQFESDKQLACWAGLAPANNESANKKKSVRISKAGQYLKPLLVRVTK

SEQ ID NO: 99109 - protein, 428 aa, unidentified
MDFTQNKRLKQITENTIIIGVDVAKYKHVARAVDDRGVDLVKRLVIKNTAEGFTELVRWAESLSNELNRTHIIIGMEPTGHYWLNLAYFLKDRGLKVVLVNPMKVKKSKELDDDSPTKNDTKDAKVIAQNVRDGRFHEPTLPEDVYAELREGMRLHDMIQEDLNSIQAQMHNLLDRYFPEFLTVFKNWTGKAALHLLKQGYLPNKIIDTSEDVLLAEIKSATQRAVGLKRVRELKQAADSTVGIQVGLNMAQEELRYLVDQYIHLNQRLLTLEESLEELVIHVPGASEMVAIKGVSSMTVVAFFAEVGDLSNYRDPRQIIKLAGLNLTMNQSGTHHGSTRISKRGRKRLRSVLYQVAIPLSYHNPAFKQLHGYYRNRPNNPLTGKQSFIALSRKLIKIFYVLGTHQCSFSESKMLDDIPVLAKSKEVA

SEQ ID NO: 99110 - protein, 345 aa, unidentified
MSLMFFLGVDVSKKTLAVVLSDHKDKILWSNKSIPNDEVGFKKLVETVIKNTSKKAGKEEYSIAAGMESTGVYGERLAYYLNGNSHNGRIVTYVLNPAAVRAFGTSVMAPNKNDSADAQLIASYLSMAVTKEQISPWKAPSPEGRALRELSRRREELTELHASECNRLEKLECMQEPPEAIVRNVRELISYLEDSIHNLEKEIEEHIDDDPGMREDIELLRSIPGIGDVTSVTLQGESDGLINFASVKGLVSFVGIAPSEHTSGTSVFKKSKISRRGNSRIRHHLYMATLVAARVNPVIKEFYERLLNRGKCKKLALVACMRKMLHIIWGVMKNRKRFDPCYSLK

SEQ ID NO: 99111 - protein, 354 aa, unidentified
MIIIGMDYHPSFQQIAFVDTETGEYQESRLQHREEAEKFYRDLAARGVKVRVGMEASGQARWFERLLAELNMELWIGDAAEIRAKRVRKKKTNREDARHILRLLLEDRFPRIWVPSWENRDLRQLLWHRHRMVQMRTRIMNQLQAVALNEGLCCKKRLWRESGRKQLEGFPLAPWGSRRRRDLLELLDRLNPTIAELTQTIEQEVEKYPAAQRLMTHPGVGALTALAFVLIIGEAERFRCGKQIASYIGLVPTEESTGERQRLGHISKQGSGLLRFFLVEAAQVTVRSDMEWRSKYFHLAMRRGRKIAKVAMARRLAVRLYWMWREKRDYEHLKKFGSYVGGPGTGVGARQNIA

SEQ ID NO: 99112 - protein, 356 aa, unidentified
MLSFMRSTIGCDLGDRNSRVCCLTADARVETEATVRTTRQGMREFFSARAKARVVLEVGTHSRWVSELLKSLGHEVVVANPRRVKLISQSDSKSDISDAKLLARLGRADPELLAPIIHRGTQVQADLAAAKVRDALVRTRTKLVCQARGLVKSFGERLPRCSAESFHRRARADVPEALKAALEPLFDILEKLEIQIKLQDVAVEQLAKKYPDVEVISQVNGVGTLTALVFLLTLEDKSRFKKSRTVGAFIGLRPRKDQSGDTDKQLPITKAGDPFLRRLLVNCANQILGPFGKDTDLRRWGLELASRGGKNAKRRATVAVARKRAVLMHRLWVTGEEYQPVGYEAWKKNITTTAAS

SEQ ID NO: 99113 - protein, 403 aa, unidentified
MKHFAGLDWGSTGHAVCVIDEQGTVAARLEVQHTAEGLQRLVTQLARIAPPQELPVAIERPSGLVVDALVEAGHPVVPIHPNALKACRPRYRAAGGKSDPGDAYILADVLRTDGHRFRTLRPASDEVRALRALVRTRDDLVAKRVALANQLRSLLDSFWPGANAIFAEVDSPIALAFLERYPTPTSAQRLGEKRLAAFLAAHRYSGRRSARELLERLRTPPTGLAGKAEEEAKGELVKALVAVLLALVDRIRLLTRRIEHDITQLPAGQVMTSFPRTGKLNAAQIIAEIGDDPERFQTEAQLAAEAGVAPVTHASGKHRSVAFRYACNKRLRRALTTWAANSRFASPWARHVYDQARARGCDHPHAVRILARAWVRVLWRCWRNGIPYDPTRHGAARPFGEAA

SEQ ID NO: 99114 - protein, 452 aa, unidentified
MEREEKRLEQFRRLRKEIRGCQDYLVVGIDISKDLHNAVIRTVSGKMHRRLTFHNTREGFENLLLAVDAVKVQHGPTEVVFGMEPTANYHKPLGEFLIHRDQQVVLVSPEAANKNRSLLDGRWNKHDGKDCANVADLICQGKFLYYEYPSAELGDLRNLLSLNRKLKEFEQGLRLRIRNHLVAQYFPEMDQYCHWGASEGLALVQWCLDPALMASLSDEELCQRLGSLGRTIAQRKRLSALKEQAASSIGCRFSRSVEFEGQNLVKLLKEVRQRMESTREQIEEVCQKFKEYSCLLSIPGFGPTLSAMVLGAIGNPWRFQNGAQVLKMVGLDLSASSSGKSQGSPIVSKKGKAEIRYALYQAAMVASTRDKHFVRYFTDQLRGREKETGIKTKKRVKLAAKMVMIDWSLMKDQERFDPDYLVAGDQRIAAAGNAKIQNGGIPKLQPNAARAL

SEQ ID NO: 99115 - protein, 421 aa, unidentified
MLAETQDHEEIIARVAALDTGKAELVCCVRVPREDRPGRLQEVETYSTMTRSLLGMAGHLRGLGVTRVVMEATEDYWKPAFYLLEAAGFETWLVNARDVKHLPGRPKTGKLDAIWLCKVAGRQMIRPSFVPPPEIRRLRDVTRYRADLVAVRTAEKQRAEKLLEDAQIKLSVVASDIFGVSGGQMMAALIAGERDPKVLAQMTRAAMRGKITALQEAFTGHFTGHHAFLLEKMLARVDAIDADIAALGAKIEEMITPFAAAAQRLDEIPGINAIAACVVLAETGIDMSRFPTAGHLVSRAKFAPGVQESAGKKKGRNSTGHGNSYLARVLGNAAVSAGRTGTFPGERYRRIARRRGRKKAVVAVGRSILVISWHLLADPGARCTDLGSSFYETRINPERRKHGHIRQLEALGYKVTLQPAA

SEQ ID NO: 99116 - protein, 392 aa, unidentified
MKKDSIAQGSLNKPRHRRASKGRMTEITGPAISGIPEQIVGIDLGDETSRYAVLDREGAVKSERSVATKRKAMSEVFGKMSRSRIALEVGTHSAWVSRLLASLGHEVIVANARRVRLISHSSQKNDKMDAQLLARLARVEPALLYPVQHRGEQAQQHLAMIRARAALVEGRTALVNTARGLTKTFGERLGKCDADQMGVGKLAGLPAAVQAALERLLGVVEQMTEKIQGYDKQLAEIARKEYPETALLEQVSGVGVLIALTFVLTLDDPSRFEHSREVGPYLGLRPKQHDSGESQPQLGISKEGDVYLRKLLVQGAHCIVSRRGPDTDLKRWGLKLAGQAEETAKKRQGNKNAKKRALVAVARKLAVLLHHLWVTGEVYEPLRNSQAAKAVA

SEQ ID NO: 99117 - protein, 400 aa, unidentified
MRTVFGIDVSKASSEVAILVNGERVHGYTMSNDIIGFSRLQKDLKTVRNPEIIFEATGVYSRRLQAFLEENSYDYTRLNPLEAKKQLDGLRVRKTDKIDAEKLASSQFVLNRKPTYVQEEVYQNLHDLSRFYQNLTEDIVRTKNRLHKVLQVAFPEIENLLSTPTGEQYWNLVSIFPTKHWVLELSEVELKETIRQSTSKRISENRVGNLAEKLVGLAKQSYSAISKTSPIIEEVKYNAQELIRLTNRREQVLEQLIELAEPLPEYEILLSIPGIAETTATSIIGELGDIRRFKSANQINAFIGIDLKHYESGDFLSQEHITKRGNPYARKILYKCIHNIASASHTNPCHIADFYEKRKRQSQTTSTKPHTIASIHRLIRTMYYLIMHNKLYDYTLAQSH

SEQ ID NO: 99118 - protein, 357 aa, unidentified
MKMYKIKQETPNRDGRADLYVGIDLHQKNWDVSIVHDGRVIKSASIPSIWDALRCILDRYKGYRIHAVYEAGYFGYSLHDRLLNYGAECIVTPPSLIPREYGNRVKTDRLDSRKLALLLSQGSLKRVVVPTEEERSHRTVIRRRHQLVKDCIRVQLRIKAELRYYDIPFPESRGKWSKTFVENLHNLQFKNRWLAESFKRLLSEYDHLIDEINQQTRLVHELAKTDRYRDSVKVLRTIPGIGILIAMEFLVELQNIRRFRTADQLAAYVGLTPSQYSSGEHVRMGRITCIGKGHLRALLVEASWILIRKDSVMAEKYQTLKYRAGSKKAIVAIARKLLVRARRVLLDGTPYVLGKVA

SEQ ID NO: 99119 - protein, 407 aa, unidentified
MNSSSGTPTPPLVAGVDTHTDTHALAILTAQGGVVFTGVFPADERGYAKLIKRINNAGNVGTVGVEGTNSYGAGLTRALTAAGYEVREVLRPTRQIRRLHGKSDGIDAVEAARTVLSNHGISIAKDSRTPAESLRCLLVARNQLITHSTALGNSITSLLITAPEDVRSKYRRLSSLVLAQRLAVSRPNGELDSPATAITHALKQLAKARLDLKHRADELECQLRDILIRHYPQMLNIYGAGTIVAAQLVVTAGGNPQRIRNEAAFASLCGVAPIPASSGRTNRHRLNRGGDRRGNSALHRIAFVRLQRDERTKAYAERRMKEGKSRRDIMRCLKRAIAREAFRALTGKQTPDDQHKKLKALRKAKHLTQRQVADALGTHSSRISEIERQSRPLPELPRRYQEWLKTA

SEQ ID NO: 99120 - protein, 425 aa, unidentified
MSAGILTGEGTMEIVHTHCAGLDVHKKTVVAAIIVPGPKPSGYQETRTFGTMTVDLLTLSDWLLAHGVTHVAMESTGEYWKPVFNLLESDFQVLLVNAAHIKAVPGRKTDVNDAEWIADLLKHGLLKASFVPPLGQRELRDLTRHRSNFVRERVNLANRVQKVLESANIKLASVATDVLGISGRAMLAALIAGQASPTEMAELAKGRLREKREPLAKALEGRVQVHHRFVLTELLCQIDNLDETIARFDAQIEAYCAPYEEAVVLLDTIPGVARQTAEIMVAEIGTDMSRFPTADHLAAWAGVAPGNHESAGKRRSGQTRKGNKPLGVALNQAAHAAARTKHTYLSAQYRRLAGRRGKKKAIVAVAHSIVVIAYHLMRRNEPYRELGGDYFDKQRPDTTAQRLVKRLERLGYAVTLQQNPITGAA

SEQ ID NO: 99121 - protein, 431 aa, unidentified
MVEEDGDQSLFVERIAALDLGKAVLEACVRLPHPSKPGRRVQEVRSFETRTAQLLALADWLRCEQVTTVVMESTSDYWKGVYYLLEAEGFDCRLANAREVRNVPGRPKTDKADAVWLAKVAERGMFRPSLVHPEPIRRLRDFTRYRRSLVRDRSREKQRVEKLLEDAQIKLSSVISDLFGVSGRDMLDALAAGQRSPKVLADLARTSMRGKTALLVEALTGFFTAHHGELLAMMLANIDRLSEQITVLDTRIEELVAPFCHQVEQLAEIPGIGLIGAAEIIGEVGVDMTRFSTAAHLVSWAKFAPAVHESAGTKKQKKRPKGNPWLAATLGNAAGAQTRARTFLGVRYRRIARRRGKGKAMVAVGNSILTIVWHLLSDPESRFHDLGADYYETRINAERRARNLAAALQAVTGQKIIIHGGKAIIVEPEAA

SEQ ID NO: 99122 - protein, 340 aa, unidentified
MDEIKTIGLDLAKHVFQVHGVDASGATVLRKRLGRGQVVTFFTGLPRCLVGLEACATAHYWARELRAVGHEVRLMPAQYVKAYVKRNKNDAADAEAICEAVRRPTMRFVPIKTAEQQAALLVHRCRERLVRQRTALVNALRAHLAEFGVIAPQGLRNVAGLIAIIRDRSDARLPAAARRVLEVLATQIEQLEGAVAALEKQLMAWHKSNPVSQRLATIPGIGPIIATALAATVVEASGFRSGREFAAWLGLVPRQHSTGGKARLGGISKRGNRYLRRLLINGASANLLRSKATNADPWVIGLRRRRPSLVVAVALANKTARIAWAVMHRQENYQPMAAAA

SEQ ID NO: 99123 - protein, 345 aa, unidentified
MPSIVGGLDVHRKQITFDYLDTVTGEVSRGRVVPADREHLRVWLARRFPRPEEVALAVEGCTGWRYVVEEVQRAGVEAHLAEPADTAAARGRKRHAKTDKTDARLIRDLLAQGRLPECWIPPAHVLECRALLELYHDLRTEHTAWVQRVHAVLFHQGAPAFGDLSRAEAPAQLAELARARLSPAGQAQIAVYLRMLEGLEAELAAVRRRLGDAARHLRGARTLTGSLYGVGPVTGLALTCWLGGAGRFSSSRKAVRFAGLDITVSSSDSKRPPGYLSRQGPPVLRWCVYEAGKAHARAAAPDHGYYAAVKDRRGGTRAALAEARKIIRQACHILAELGDDALTRV

SEQ ID NO: 99124 - protein, 404 aa, unidentified
MIVIGIDPHMKTHTAVALDAATGRSVAEKTVACDGDGHDELLAWARALPGDHYFAVEDCRHVSGRLERHLLPRGERVVRVPPKMMAGVRHSARAYGKSDPIDAAAVARAALREPDLPEASLSGPEHDVRLLADHRDDLVDERKRIQTRLRWNCHDLEVSLDLPPRVLDRYVWLDRLEGVLSALPESTRRRIALDQLARCRELTVDIRSLERDIRSRMRELAPELLAIPGCSAIGAAHLIGQTAGASRFSGEAAFAMHVGTAPLPASSGQCTRHRLNRSGNRRLNSTIHMIALTQARMHQPAIAYMERKQAGGMSYREALRCLKRHLARVVFKTMLRAESGRVCRVIAVPFRPEPVAVAVWIDIGATDGQRLALPLTPQTLGGLPGGASGSDGALRVVADDNGSG

SEQ ID NO: 99125 - protein, 346 aa, unidentified
MNATTHILGIDIAKHKFDVHLRTLVDAEARHSATFMNHAKGFEMLQSWLKSQGVGQPATLHACLEATSRYGDGLAAWLHLQGYQTSLVNPRRTRHYADSRLARTVNDRIDAGLIADFCAAHREQLSLWEPLAADHRQLQDLTRARQSLIEHRDGFANLLETAAGLARKGFQRQIQHLEKEIQRLDKAIKGFLEQTPELQRQVALADSVPGVALITAATVVAELPPIHKISRANQAVALFGLDPKNKTSGQSVHTPARLSKMGSRRGRRALYMPALTALRCNPDIRALGQRLKDKGRSGKYIVVAAMRKLLRQIYGVLKGGKPFDPHWSQRPAKRLPVPATVAPTLP

SEQ ID NO: 99126 - protein, 350 aa, unidentified
MNYAQINQRYFCGVDLHANSMYLKIMNRSGQVLYKRNMPNNMAVFKKILTPFLPDVAVGVESTFNYYWLYDGCVEAGIPFYLGHAAYMKAIAGNKKKNDPLDAETIAHLMRSNLFPQAYPYPAEMRAVRDLLRRRHRLVRHRSEAYTHVQLLLRQQGICEFRGKDVKSVDGKEQILNSLNDPDVYYLLKSDLLLIDQLDKLLSKIEKQIKTRAFHHNGTDYSLLKTVTGVGDMLALSILYETHDIMRFPNVQNYASYCRVIRVQRTSAGKNNYGRNQKMGNPYLKWTYGQILVHARQSSERINACYQKLEARRCAKLARGIISHKFAVAVYHMLRKKVAFDENRFLKVAS

SEQ ID NO: 99127 - protein, 420 aa, unidentified
MQVLYPRCAGLDVHKDTVVACVRVMEGGEIKTEVRTFKTMTSQLLELSDWLSDNGCTHVAMEASGVYWKCVWAVLSDDEFTLVLANAAHVKNVPGRKTDVNDATWLAELLAHGLVRSSFVPDPSSQELRNLLRTRKQLVRERSRHVQRVQKTLEEANVKLASVISDVMGRSGRAIIEAIIKGETDAAKLAGLAQGRVRASQTELTEALRGRVTKNHRFLLKLHLQQIDAIETAIDAVDKEVDAHLREKLNSFRDAIELLKSIPGVSELSAITFLSEIGADMTRFPTAGHLVSWAGLCPKSDQSAGKRRSNRLRKSAPWLKTALVQSAWAAVRAKGTYLQAQFHRLRARRGATKAICAVASSILTAIYHMLKDGTFYKDLGPQHFQRRSKHTQARRLLRSLEYLGYAVQITSLAPELSVSS

SEQ ID NO: 99128 - protein, 351 aa, unidentified
MTTTSMADPHQLVTLGIDTHAEVHAVAALDERGRLLDSTTIPTSLAGFQALLEWAAGFGTIDRIGVEGTGSYGAGVARWLHAQGLVVIEVDRPDRGERRRRGKSDPIDAEIAARAVQSGRASGTPKAGDGRVEAIRALRIARGSALDARSRVANQLHALRVTAPDQLREELRGLSLARLSLRASRFRVPTVVDTPLAATRLALRSLAQRFRQLSAEIARLDVQLVRLVAAAAPQLVARPGIGTQIAGQLLVTAGDNPTRLRSEGAFAMLVGTAPIPASSGKTERQRLNRGGDRQANSALYMLALSRLSRDPRTQAYVRRRTAEGKTKPEIMRCLKRYLTREVYRLLVLTPG

SEQ ID NO: 99129 - protein, 309 aa, unidentified
MKPYVGIDVAKAMLDVAIGSAGEVVQVENDEAGIAQLIERLREIAPTLVVLEATGGYESLVAGALAGDGIDVAVVNPRQVRDFAKATGVLAKTDRIDARVLARFAEAVRPEPRPLPTEEAKELEEALRRRRQIVDMLTMEKNRLSIAATERLQKELKKHIAWLEEALRRANDDIDTAVRKSPAWREKEDLLRSVPGIGPVSARTMLAELPELGSLNRKKIAALVGVAPLNRDSGTIRGSRVCWGGRATVRQVLYMAAVTAVRCNPVIRRAYLALRGRGKKHKVALVACMRKLLSILTAMVRDQRRWSPS

SEQ ID NO: 99130 - protein, 356 aa, unidentified
MQTQVTKKIDFTGKQLFIGLDVHKKSWSVTILVDGTEHRTFTQPPDPESLNTYLQRMFPGGEYNSAYEAGFCGYAIHRRLNELGINNIVINAADIPTSQKDKLQKRDPVDSRKIARSLEKGSLHGIHIFDREQEELRTLNRTRFYLMRDLRRSKTRIKSFLQYYGEPIPVEFDNNQWTLKFVSWLKQVKMQTMSGQDAFSNLISSYEYHRSHLLTQSRQIRQRILEYDRELYTLLKSVSGIGPLTASALITELGDINRFKNIDQLGSYVGLIPRIRESGETTHTGGITFRCNSFLRTLLIESSWQAIRMDPAMMQYYHAHLINNKGHKVVIKVARKLLNRIRYVMKNRKPYITGVA

SEQ ID NO: 99131 - protein, 313 aa, unidentified
MDALIVGIDVAKDKLDVAVRPSGESFVVSRDEAGLEELRDRLGKLQVALVGLEATGGYESVVAASLSATGLPVVVVNPAQVRAFAKALGKRAKTDPIDAAVIAHFVEATKPDVRPLPDEATRQLSDLVTRRSQILAMIVAEQQRKTHRPNKRMLASIERLLAALQKELSDLDGQIRETIKASPVWREKDKLLESVPGVGPAISGRLLAEMPELGSLDRRQVASLGGLAPWTRQSGRWKGKSFIGGGRAGVRSALFMGAMVAARHNPPLKAFYERLIAAGKQKMVALIAVARKLLTILNAIVRDRQPWREQPHG

SEQ ID NO: 99132 - protein, 430 aa, unidentified
MKSNTQNAKIEAITEKTLVLGIDVGSETHYARAFDYRGVEYSKKPFKFSNTEAGFVTFKAWVLDIKEKHGKDKVIPGMEPTGHYWFNLGKFLQDNEMKPVLVNPHHVKKSKELDDNHPTKNDRKDPKVIAGLVREGRYMIPYLPDGIYADLRTASNMRFQIQSELTRVQNRISRWFNIYFPEYKTVYGKPDAKSGILILKEAPLPEDILTLGIDGVNQIWRDAKLRAVGKARAKTLIEAAEHSVGSKEGAVSARMEIRMLLEDYESRNIRLQEVMGLIEGLVNQIPMAEKLLEIKGVGIKTVSGFLAEVGDIRRFNDPKELQKLAGLALVENSSGKHKGKTTISRRGRKRLRYLLFEVAMSLVAKNPEFRELHNYYTTRRLNPLKKMQSLMAIAAKLLRVFYAILTKGVGYDPKKMVNDIRRPAAYAQAA

SEQ ID NO: 99133 - protein, 412 aa, unidentified
MRVIIERCCGLDVHQETVVACLLIGAPGDRPTKEVRTFRTVTRDLEVLRDWLAAAGVTHVGMESTGVYWRPVYAVLEGHFDLIVGNARHIRNVPGRKTDVKDAEWVADLVRHGLIAKSFVPPRPLREMRELLRYRRKLTESQAAERNRLLKLLETANIKLASVMSDVFGVSGRAMLRALIEGWVSVEAMADLARGQLRRKRSDLILALEGRMEEHHRFLLATQLRRLEAIEQDIATLDLRITERLEPYRTPHALLMQIPGVDWLVAAVLIAEIGVDMSVFLSVHHLSAWAGVCPGSHESAGRQKSGRARKGNVHLRTILVGAAISAARTKGSYLKDKFHRLKARRGAMRAALAIAHKILVSAYHMLAKGLPYRDLGEAYLDQIGQTRTVANLKRRLERLGYHVTLERTTQAA

SEQ ID NO: 99134 - protein, 346 aa, unidentified
MQITTIGLDIAKNVFQVHGIDAAEKVVVRKQLRRGQVMTFFEALAPCLIGMEACATAHYWARELTKLGHEVRLMPAKDVKAYVKRNKNDAADAEAICEAVRRPTMRFVPVKSAEQQGQLMQHRTRDLLMRQRTQVINALRAHLAELGIVAAQGREGIKELLAIVADDQDARLPIDARASVIVLAAQLQALQTLIGSIEKRIKMQHRSNEASKRLESIPGIGVIGATAIVATVVDPTVFRSGRDFAAWIGLVPREDSTGGKQKLGPISKQGDRYLRRILVVGACAVLRYAKQNPERYPWLTQLLARRPFKVVAVALANKMARMAWALLAKGGTYRAPALVPAFAAAA

SEQ ID NO: 99135 - protein, 347 aa, unidentified
MRFYNRQHRYYCGIDLHVKTMYICVLDGTGRVLVHRNVKSTPEALLELLAPYRDDLVVAAECMFTWYWLADLCAAEGITFVLGHALAMKAIHGGKAKNDKIDSHKIAVLLRGGLLPQAYVYPAGMRSTRDLLRRRLHLVRKRGQLLAHIQNTRAQYHLPEFGRRLAYPGNRDGVVEHFPDPSVRKSIEVDVTLIDQYDALVNDLELTIVREAKRHDGDAFHRLRSVPGIGKVLGLTILYEIHDITRFDRVQEFASYARLVKCQKQSGGKTLGTSGAKMGNVHLKWAFSEAAVLFLRHTAEGKKLLARLEKTHGKGKALSILAHKIGRAVYYMLSRGTVFSMEKFLAA

SEQ ID NO: 99136 - protein, 320 aa, unidentified
MASRESLFIGIDVSKQTLDVAFGADPHAPRETIPSTDEGVQLLVTRLQRLQPTLIVLEATGGLERMVFAQLLQAGVPTARVQPRRVRALAHAEGRQAKTDRLDARLLARFAERVRPPHHQATDEQRASLRDLLVRREQVIPMRTAEINRLTAAAPNLRPGIQQHIDWLDQEIRALAQERDNEAERTDEVRRKRELRDSVPGIGAITALNLLLRLPELGTINRKEAAAVVGVAPYANQSGAQHKPRHISGGRRDVRSVLYMATLAATRRRLVRRAFDQRLCQAGKPRKVAIVAAMRKLLTILGAILRQQKPWDPAVHTSAP

SEQ ID NO: 99137 - protein, 392 aa, unidentified
MVLTVFSALLCLKNLAECANGRFSPTARSLELSPFVLEGHRAWRGAWDSSGVFLNPNSCMGLEPEPSKEGSWMMAQDDLVVAGIDIAKDKVDVCLRSPSLRRTFASTAEGRRELASWFRRQKVGKAVMEASGGYEREWANALRDGGIEVRIVDPKRVRSFAQSAGRLAKNDTIDAEMIAWFAETFDEAPGQAYDAKREELHQMVNARQALKDMQAKLTSQGEHAVPAVVQRIHARISKTIAVELVKIEAAISTLVQATPRFAELAEIIESVPGLARTTSAALIAGMPELGHANNKIVAALLGVAPYDDDSGKRRGERQIKGGRRRTRNAFYMACLGAATRHNPVLKAFYDRLVAKGKEKKVALVACMRKLINILNIMIERRQKWDPSRYAVN

SEQ ID NO: 99138 - protein, 343 aa, unidentified
MRISTTIAVDLAKNVFQVAVSHHPGKVAKTHRLSRKKFLPFFAEHKPAIVLLEACGMAHYWGRELGQLGHQVLLLPPADVKPYVRRNKTDRADAKGLLEAHRNEEIHPVPVKSVAQQTLTALHRMRSAWVGDRTARINTVRGILRELGLTVPVGAHHVVPEVWALIEDADSTIADPLRLALGEACLEIRDFEKRIKAVECQLRAMAASMPVVQRLMTIPGIGLVTATALVAFVGGVLRFPTSRKFSSFLGLTPKENSSGQKRRLGRISKRGDVYLRTLLVHGARTVLVAAKRSKHPDRLRAWALKVQQHRGMNKATVALANKITRIAWAVWRDGSKYESQAVA

SEQ ID NO: 99139 - protein, 339 aa, unidentified
MYYGAIDLHKNNSVLGIINADGQRLCMRKIPNDLDLIKKALGPFAENLEGIVVESTYNWYWLVDGLQDAGYRVHLANPTAIQQYSGIKHTDDVTDAWWLAELLRTRLLKEGFIYPRAERAVRDLLRKRAHLVKQRTQNILSIQNLICRNTGGRLSANQTKQLTEETVQKFYDKEEERALAINCSLRVIQTLKREITIIEKQAKSKLKLSQPYQVLQSVPGIGELLAMVIMLEAGDISRFPGVGNFSSYCRCVNSVRLSNGKKKGSGNRKNGNKYLSWAFMEAAHYAIRYYPVIRKFYQRKSAKKGMMVAQMAVAHKLARASYYVLRDQVPFEETKCFVH

SEQ ID NO: 99140 - protein, 365 aa, unidentified
MGGREEPPMGYVGVDIGKDACFATMITSTGRVRGRLEFANRPEGFAELVAKLKARDKLVMEAGTYIYPLHDHLRRRGFKVLVGHPRAIRQITESDKKTDKHDSEVLAQLARVGYLPPAYVPHPDILRSREILRSRLDMAHQTTRVKTRIRSFLARQGLEPPEDVFLRDRAWLRQAHWQDSRDLVLGVMADELDALEARRAKVDAVLATLAVDSPEVKLLMTIPGINYYLALLIVCEVGDITRFPTRETLRTYAGCAPRMRQSAGRNPAQGTNRNASPRLKRAFSLAAQTAVGLEGPIQDAFNKRERKTKSKARAHAVARRKMCDLVYAILRSGEPCRWATPAAIERKQRELEVMKDRAERLPPPT

SEQ ID NO: 99141 - protein, 385 aa, unidentified
MALTGLSGNEGAAMSEESEAFVGLDTSKTKISVAVADGGRCGEVRFYGDIDSSPDAVNRLVKKLSARYQRLHFCYEAGPCGYGLYRQLTALGHQCDVVAPSMIPIRPGDRIKTNRRDAITLARLHRAGELTPVWVPDEAHEAVRDLVRAREGAMLDLRMKRQQLTAFLLRHDRIFPGRKTWSRAHVRWLCEQRFEHPAHQIVMQEYRHTIDDAETRLDRLEGQLAEVVPQWSMAPVVEAFQAMRGVGFLAAVIFVAEVGDVRRFESPSQLMGYLGLVPSERSTGDRVRRGGITKAGNRRARWVLIEGAWTYRLPARVGRTLQARLDGLPKAVRDIAWKAQTRLCGRYRRLTAAGKKPCLVTTAVAREMAAFLWAIGQQVAPRLAV

SEQ ID NO: 99142 - protein, 357 aa, unidentified
MAALSIADVPANVTVGVDTHKHSHVARAKDGLGRHLGQLEIETDPRGYAGLLAWAQGFGPVVTFGIEGTSSYGAGLTRFLRAQGQAVIEVLRPVRRDRRFGSKSDPIDADAAAGAVLSGKATAVPKAGDAGVEMIRALKIAKQTAIKARTQAVNAVKGLIVMAPDPIREQLRHLKTPALIRTCCAYRVEGASDPTSAVKLSLRSMSRRYVALDHEVRALENELDALTVRLVPQLREVFGVGQDVAATPVLAAGNSGDRLRSEASFSMLCGASPIPASSGIVKRHRLNRGGDRQANAALHQIVLVRLRYDEATKAYFAKKKAEGKSKNETFRCLKRYVAREVYRTLVGPSEEAIRSAA

SEQ ID NO: 99143 - protein, 314 aa, unidentified
MRTQVFVGIDVSKAQLDVAFRPEGRFSAPNDEAGCAQVLERLRAVPPTLVVLEATGGLEIPLTGVLAAAGVPVVVVNPRQVRDFAKATGRLAKTDTLDAQTLAHFAQVMRPELRPLPDEQTQALAAILARRRQLVEMLTAEKNRLGSAPKPVRKSLRTHIAWLERELRHTDSNLAHAIRESPVWREKDALLRSTPGVGPVMTTTLLANLPELGTLTGKQIAALAGVAPLNRDSGTWHGKRTVWGGRAQIRATLYMAALVAARFNPVIRAFYQRLCATGKAKKVALTACMRKLLIILNAMLKHRTPWRTELVQCA

SEQ ID NO: 99144 - protein, 370 aa, unidentified
MTVFMGADLHKTQITVHVRVGDNVESLSEIKQYPTTQGGYAELLARIAEYKSAGYDVKVGVESTGNTRFFKNQVEKAGAEVTVINTLKFKVINESTKKTDKHDASTISEFLEKDMLPESYVCNQETENLRRLLKSRERLVRSIVGQKNEVHALLVSMGLSDELRSLQSKKGRQKVLDTLLSHSDLVLEAQSVKLMFQIIDQIAEAVKTIEKQLAELTKDDEMVNRLMTIRGCGKITAWIIRAYTEDIGRFATAKKYAAFCGLVPWVQDSNETVHHGKITKRGPQELRTAFVQLVLGIRRCGDTSEWRIMQRLDYMKKNKGSGKSIVAAARKMAEITWALLTEKQDFDAKKMMGKYKPMNLVDQALAAIDK

SEQ ID NO: 99145 - protein, 324 aa, unidentified
MLLNDQDQVIYQKRLPNHLPTILEPLNLHHGELEGVVVESTYNWYWLVDGLMEAGYRVHLANPAAMQQYSGLKYTDDPSDARWLAHLLRLGVLPEGYIYPKTERAVRDLLRKRAHVVRQHTANILSVQNILARNTGARFSGKRIQELTKQELTTLLADETQVLAVTSSLVVLDCLRQQIKTLEKTVHKHLHHTPSYEQLLTVQGIGAILAQTITLETGAISRFPSVGHYASYCRCVDSAKISNGKRKGTGNVRNGNPYLAWAYMEAAQFALRFQPEAQRFYQRKLAKSRNNTILARKAVAHKLARACYYLMRDCVPYEATKTFG

SEQ ID NO: 99146 - protein, 415 aa, unidentified
MPELWAGTDAGKAEHHCTAIDTDGKKVLSRRVPNNETELLELLGDVLKLADGGPVTWAADLNAGGAALWIALLVGHGQKLLYIPGRTVHHASAAYRGSGKTDAKDALVIADTARIRRDLQPLTEAGGIAADLRILTARRIDLSADRTRAINRLRAQMLEYFPALERAFDYSVSKSALVLLTGYQTPAALRRIGRTRLATWLKNHGVRTVTTARNTAEAAVAAAEAQFTVVPGERTCAKILHALAREVMSLDQESAELEALIEGRFREHPDTAVITSMPGIGDMLGAEFIAATGGDMTAFGSPDRLAGVAGLAPVPRDSGKISGNLRRPRRYNRRLLRMFYLSAQVATTHCPVSKAFYQRKRDEGKNPQASRPGARKTPPERALGAHTRWPYFRCRRTQSRYRNALITSPDVTAQA

SEQ ID NO: 99147 - protein, 439 aa, unidentified
MKRAKVSALRERGLRADVCRRAEPQCLVTNANKERKADTMKTYILRPVKAVHSENHLPQPAGRTAGSPPALFIGLDVHNDSIAVSLAPSDSTEVRRYGIIGGEHDDVLKLVKKLQAAHPGASLRFCYEAGPRGFALCRCLRAHGLDCILVCPSKVPRKPGERVKTDRRDADQLARLFRAGELTGIYVPEPEDEAMRDLIRARFQVGKAQHRARQQLKMYLLRHNLRYGGKSSWTPAHLRYLAKIKMPFPVQQIVFQEMLEVISEATARLERYDQEIERAVPGWRWEPVVRALMSLRGMALLHAATLVAELGDFNRFAHPGQLMGYLGLVPSEHTTGTDRQQGGITKMGNAPARRALVEAAWQYRAPARLSPHLKKRQEGLPKAITDISWEAQRRLHHRYNHLTRVGKKKSQVAVTAVARELSGFVWAIARQVKPHPAKP

SEQ ID NO: 99148 - protein, 334 aa, unidentified
MAVTTIGLDISKSWFQIHWITADGEIIRKKLARGKVLDFFSRLPSCLVGLEACGSAHHWARELIKLGHKARLMPARYVRAYVKTNKHDAADADACWEAVQRPGMRFVPVKTVEQQGILMLHRTRDLLIRQRTGAINALRGHLGELEIVNGKGKASARELMGLVEVDERIPQNARSTLLILVDQIEDLELHIESQEKMILATAKDNEVCRRLMKVAGIGPLAATALAASVDHPQKFASAKHFAAWLGLVPKQHSTGGKERLGGISKRGDGYIRKLLIHGARAAVHRVRIHQVTNTWIAELLGRRPFNVVTVALAHKTARIAWAIMANGEEYRAHV

SEQ ID NO: 99149 - protein, 443 aa, unidentified
MSKFKKTFVLTHSNAAGIDIGASSHFVAVPPDRDEQPVREFPSFTEDLHALADWLTMCGVDTVAMESTGVYWIPLFELLESRGFTVYLVNARHVKSVPGRKSDVLDCQWLQQLMTFGLLSGAFRPHGDFCALRTVARLREVLLRCQATHIQHIQKALLLMNLLLMEVISDVMGETGQKIIRAILAGERDGQVLAKYRNNHIKASEEDIAKALQGSWREEHLFALKQGVDLYDAYAERLLECDQQLEKMLEDLARYDLKADKSKRRRGKARNAPKFDARTLLLQMCGVDLTRIDGIDVTTAFKVLAEVGADLSRFKDAKHFASWLGLCPGTKITGGKVISAATKPTTNRAAQALKMAAINLRNSQSALGAYYRRLCGRMDKGKAVTACAHKLARLIYTMLTKGEEYVDQGQAYYEEKYRQRVIKNLTKRAEEFGFQLTPASEAV

SEQ ID NO: 99150 - protein, 427 aa, unidentified
MICAAIERCAGIDVGKKVLSVCVMAGPLEGEPRVESRSFGTMIADLERLRDWLKQEGVTHVVMESTGSYWKPVFNVLEDAVQVYLANPKEVKNRKGHKTDKKDGWWLAHLLRHAMIHPSFIPPRAIRELRDLTRRRKRLLGAGASERNRVQKVLEDANVKLGNVLSNVFGVSGQLMLEALLRGEGKPEDVAQFAQRRAKQKIPEIIAALEGHQMSDHHRRMIRYSVAHMRFVEEQIEQLDQDIAAKIREAGLEPQWQLLQSLPGVQETSAAIILAETGKDMTQFPSEKHFSSWAGVCPGNNRSAGKNKSSQTTGGNPWLRSALTECAWAASMKKNCFLKEKFWRITTKSGGKKAPAVMAVAHTLLILTYQVLASGQPYHDKQAPPLDPRHKERMIRHHIRRLGKLGIAVYSCRPEPTGRRRRPSLKL

SEQ ID NO: 99151 - protein, 401 aa, unidentified
MNKHWCGLDWASHTHAVCVVDDAGGIRARFELPNTGKSFAGLVKRLVKIQVEGVAIERPDGPLVEALLDAGLTVHMVPPSMLKAVRARYGAAGAKSDPGDAFVLADLLRTDHHRFAPLMPDSSATKGLRSLTRTRKELVQTRVALSNQLLAQLEVCFPGAIGLFSELHSGVAAAFLRRYPTAAKAASMTEARLGAFLRRIHYSGRTPVGELLGRIKQAPPAGLGPEEDEARAACVLALVEAIGVCETRARELEAEIIERLEIHPDAHVFTNLPRAGHGVRAASLLAEIGDVRQRFPDPESLMALAGAAPVTRASGKHRVVSFRWACDKKLRGAVVDFASDSRRDSAWAQAIYERAVAKGHTHPHAVRILARAWLRVIWRCWQDGVAYEVTKHRGAVVQIAA

SEQ ID NO: 99152 - protein, 368 aa, unidentified
MSKEIKKRTNQKVEKEYIKYSVASDIGKDNFASCISILDKEQEVKTVATRTFTNSPKGFDNFFEWQKNKCKLSIPAVFTMEATGIYYEKLAWFLHRKDLYVSVLLPNKAKKYMQSLGLKSKTDKIDAAGLARMGAEQKLDRWKAPKESIMALRYITRHREDLQKSRTVFNNQLSAHRCGEFISETVVKGLEELIALLDKQIKMTEKQMREKLDADQEIKEGVERVIGIKGVSTITIATILAETNCFLAFENQRQLVSYAGYDVKESQSGKHVGKTKISKRGNAHIRRILHLPALNVVSYDEPVFVNLYERVFQRTKIKMKGYVAVQRKLLCLIYTLWTNQVKYDRDFYKKSGEHPEMQSKSLSFCMVS

SEQ ID NO: 99153 - protein, 394 aa, unidentified
MILVGIDVGKNSHYFTVVNKDDGEVLLEPRKINNNLEGFDSLLSSIKPYKNSDILIGMEDTGHYHFALMKYLLDKKYTVALINPVTTDLTRRANGSVSKTDKLDTLTICDILASSNIKKPYRISKVNRFDLYEQRCLTRHHHNLKEELNVYSNRLQKCIDIVFPEFNDLFTSKYGTVYNNILKTFTSAANIASADIRSLRKCFEFKGQGKRISLTADKLKQAAKDSIGIDSISEVIQIRHLIDQIELINKQIKEIDKKIEEFSKQVNSPIISTPGISHFSGTSILAEIGDINNFSNHRQLIKYAGVAPLTYESSKFKAQHTSITKKGSKYLRKTLYQIILPVINNNETFKKYYDLKISQGKSHRCACGHCVRKLLRIIFHLLKTGQSFDSALVR

SEQ ID NO: 99154 - protein, 370 aa, unidentified
MEQYTEAFVGIDTAKNKHALAIADPGRDGEIRYLGEIDSAPAAVQRMIRKLAGRYEKLYFCYEAGPTGYGLYRQVRALGHDCIVVAPSLVPKRPGERVKTNRRDAVTLARLLRAGDLTPVWVPDAVHEAVRDLVRARTAASEDLRRKRQQLLSFLLRHGRIYSGRKHWTKMHLHWLAQQKFDHPAQQIVFQDAVDAIEDAATRLRRLDQQVAEIVPSWSMAPVVEAYQAMRGVSFGVAVTFVTEIGDLRRFDNPRQLMAFLGLVPSERSTGERVRRAGLTLAGNKRARRVLVEGAWSYRYPARVRQTLQARLEGLPKTVRAIAWKAQIRLCARYRRLTAAGKKRPLVIAAIAREMAAFLWAIAQHVAPAA

SEQ ID NO: 99155 - protein, 353 aa, unidentified
MSQVTTIGLDIAKSIFQVHGVDAAGQSVLRQRLSRSRVLEFFGKLPRCLVGLEACASSHYWARELIRLGHEVKLMPAQYVKPYVKRGKNDAADAEAICEAVVRPTMRFVGVKTTEQQSIMMLHRVRRILMRQRTQLSNALRSHLAEFGIVSPIGREGLDRLLKIVADTDDRRVPAEARASLEMLAAQLEGVKAKILENDRRIIASARATEVGRRLLEVPGIGPVLASAFVASVADPAIFKSGRDLAAWIGLVPRQNSSGGKERLGGITKAGNGYLRQMLMVGAMAVIRYAQRNSTRRPWLVQLMGRRPAKVAAIALANKTARTVWALMTSGERYRDPQAIQAAVSANGMETPD

SEQ ID NO: 99156 - protein, 428 aa, unidentified
MSGKERVQPEPEFVAFVGIDWADQKHVWCWQAADTGKCESGELEHKPEAVEAWVGKLCQRFGDGPIAVAVEQVKGALVYMLGKYECLHLYPVPSTMSASMRAALYPSGAKDDPRDAELLLELLVLHRDKLRRLRPDNEATRQVQNLVEERRKLVEEKTAQLNRLTGYLKVYFPQILEWFAKLDSKLVCDFLERWPSLEELQQVPSGEVKKFFRHRRGRHGELTEWRMQGISQAMPAIRDHAVIAAKRTVVQVIAQLLRVLLEGIATLDRKIAEAAEAHPDFFIFQSLPGAGAALAPRLLAALGSQRDRYASANEVQKYSGIAPVTERSGKKKWVHFRWACSKFLRQSFHEWAGHSIAQSVWARAYYQRQRERGQEHHAAVRALAFKWIRIVFRCWQDRVAYDETRYLAALAKRGSHLTSAFVTAAVSL

SEQ ID NO: 99157 - protein, 387 aa, unidentified
MIFIGIDIAKSTHFASAVNSDGEVLINPFKFTNDNQGFNLFINTFKDFDLSNCLVGLESTGIYGDNLTTFLFEKGFKIGRINPIQTDSLRSSNIRKTKNDKIDTFLIAQCLMLGHYTLITEKDIQLIKLKTICRFKFDVKKSQSKSKVQLVTCLDIAFPELANFFNNNLHIKSSYALLSKYPTARIIANTRIDALTNLLYSASKGHFKQDKAIALKELAKNSVAMDNPAIGIQIKMLIEQIQMLEKQIDLLDIEITNIMESLNSPISSIPGIGNWLGSIIISEIGDITRFSTSTKLLAFAGLDPSVRQSGNFNATNTKISKRGSKYLRYAINRAAQLIIWNDDTFYQYYTTKLAQGKSYLNVIGHVSHKLTRVIFKLLTTNTTFKNS

SEQ ID NO: 99158 - protein, 343 aa, unidentified
MEYYVGLDVSLKQTSICVVDQTGSVVREGVVDSDPEAISVYVRSKAPGAVRIGLETGPTSTWLWTELKRVGLPVICIDARHAKAVLKMQINKSDRNDAIGIARIMQTGWFKEVHVKDIDSHSVRALLASRALLVKIKRDLENHVRGLLKNLGLVIGRAKFNVFAVRAEELIAGRPELIAAIRPLLEARDAVGHQVSELDRKVMKLARHDAQVRRFMTAPGVGPITALCFKATIDDPARFARSRSVGAYVGLTSRRHASGEVDWTGRISKCGDAMLRSYLFEAAGVLLTRVPTWSAVKAWGMKLAKRNGLRKAKVAVARKLAVILHRMWIDGTEFNWSKKEIAA

SEQ ID NO: 99159 - protein, 464 aa, unidentified
MNGAFQEGVYTPLLARKLISSKVDSILPDGQSLSACNYKSQEVIFLAFKIFRKNCCGLDVHKTWIYACIGITDTNGRTEYKQARFSSFSKGLKELADWLAKYRCFEVCMESSGKYWIPVFNILEKAGLFVTLAHPKYTKPQKGNKTDRKDAKWICDLFMCDMIKPSFIPPADIRHLRDLVRYRFKLTCMITGEKNRTQNCLTVSNLKLDDVFSDVFGKSSRSITEQILAHPGETFDVAPFVDKRCKTPIREIQAAIDGAVSPEQAVKLRQCLDHIDELEMHIEKVQQEIFRLSDKYQAALDLVRTVPGFDKNPMTAIQILSEIGGDMSVFPTAKHLVSWAGCCPRNDQSAGKIKSTRISRAGSYFKPVLVQVASALTRSKDHPEITNRYRRIKARRGHKKAIIAVCRMLLTAIWHILSDCKPYTPDGFVEPRPAEKSKVLTTAQALSLLKQRGYVISDSAPVLN

SEQ ID NO: 99160 - protein, 342 aa, unidentified
MDHFAGLDVSVKDTSICIVDDTGRITREVKVASEPGALLAVLMNASHRFKRIGLEAGPLSQWLFSALAEAGLPVICVETRHMRAVLKAQINKTDRNDARGIAQMMRVGLYRPVHVKTLRSQKLRMLLTHRKLLQSKAIAVENDLRATLRNFGLKVGMVGTVRFEARIRELVENVADLVVLVEPLLVVRRVVREQIGILHRRLLAIVRDDEVCRRLMTVPGVGPVVALTYRATVDVPARFRKSKSVGAVFGLTCSRDQSGERDRPGAISRCGDEMMRAMLYEAAQAMLLRSTKWSWLKAWAMQIARRRGMKRAIVALARRLAVIMHRIWVDGTEFRWTRQVTA

SEQ ID NO: 99161 - protein, 389 aa, unidentified
MQTVADRPEAPTAIRTDLGAIFVSLELSRSTWLITSLSPGGGEKMSKQVVRGGDVAGLLERFARLREKARARTGKVFPFVVIQEAGLDGFWIDRALQNEGIESHVVDPASIATSRRRRRAKTDGIDGEALVRALLAYKRGEPRVCAMVKAPTPEEEDRRRLCRERKVLIGERVRHVNRVKGLLFSQGISGYEPLRRDRRERLDTLQTGDGRLLPDHLKAQVCRELDRLELLLEQIKAVEAERDVLLAAQQVAAPAPAAMLLDIKGIGPEFAAILWSEGLFRHFDNRRQVASYAGLAPTPWQSGSVDREQGVSKAGNPRLRTTLIQLAWLWLRHQPQSALTLWFEERVRRNGGRLKKTTIVALARKLLVALWKYVTAGVVIEGAVMKTPQ

SEQ ID NO: 99162 - protein, 359 aa, unidentified
MTDGSRALTPVVTAGLDVGDKYSYLCLIDQQSGEVMEEGRLRTTPEVFLRRFDSEQQMTVAIEAGTHSPWVSRKLEECGHKVLVANPRNTRLIYGQGRKTDKLDAEKLARLARVDPKLLSPLAHRGEASQAHLALIRSREVVVRSRAQLINHVRGTVKSLGARLPKCSTASFHKKVAACIPEELRPALEPLLETIASLSTRVRHYDRELEQLAEEHYPQTKLLRQVQGVGTLTALTFVLTVEDPGRFEESRSVGAYLGLVPGKDQSGERDPQKRISREGDEMLRRLLVGSAHYILGPFGEDSDLRRQGLKIAGGAAKNARKRAVVAVARKLSVLLHHLWISGEVYEPLYNCRQLKGRAA

SEQ ID NO: 99163 - protein, 421 aa, unidentified
MTPPNEVVWAGIDTHTDTHTIALLDERGRPLGAETFTADPDGYDRLIGMPPGPGRVAAVGVEGTNSFGAALARRLTAAGYEVREVLRPRRSVRRRDGKSDPLDAVAAARSVMAGDGTSLPKSSDGWVEALRHLNAQRSQLVSAMTAIPDSTNGLLVTAPEPIRERYRGLRSETRMNRLAECRPAGGLVERSVLAALKSAAKAWKALKRQAGLLEERMRLILEEHARPLLDMYCAGAVIAATLAIVAGDNPERIRSEAAFAKLCGVCPIPASSGRTNRHRLNKGGNRQGNMALHRIAIVRLRYHKPTRDYMAKKTREGKGKLEIIRCVKRFIAREAYRALISIRNGEVGRGTPAERGAKLRELRVSRNITQQQIGEALCVPSSRISEIERGARDLPELEQRAIQWIHSTTNPKQHTQTLDNV

SEQ ID NO: 99164 - protein, 342 aa, unidentified
METKRHIGIDLHRNCFTACVRLENGRNYLSEWKLEDLPQFTKRLRASDVVAVEMTGNTRFFHEAVAPHVARLVIVDPNQFKVISQSVKKTDPHDARNLALYLAKDLLPEVRMKEKSEAQIASLTQTRDTLVKLRTALKNKVNNILAAHGINLAKEALSSDKALNGVLEMHFDEMVEVELQVIVEQIRGLNQSIGKLEQTIRDRGQKLKGHRNLTSIKGIGNLGASILLSVIGDINDFADEGKLAAYFGIVPRVQNSNETARSGRITKRGTKLGRTTLVQCALIAKRYSPYLARYYDQIKSRRGGGKAIIALARKFLGVIYRTLKNNWVFEDFPNFVLAEAPA

SEQ ID NO: 99165 - protein, 350 aa, unidentified
MSKGITVGMDMGDKNHSVCVLDADGEVLARATVTNTGKAIRKYFGELEPCRVALEAGTHSGWVSRLLEGLGHKVLVGNPRKLRVIWDSDEKDDDRDAEMLARIARFDPHLLYPIHHRSQQAQSDLAVIKARDMLVKSRTILIAHARGAVKSTGQRISKCSAEAFHIRLLEEMPAELMPALEPIMKSIADLTCRIRHYDKVLDKLCTEKYPETEGLRAISGVGPVTTLAFILTIDESSRFDKSRAVGPFLGLTPKRDQSGQTDKQLRITKAGDAYLRRLLVGCAQYILGPFGPDCDLRRFGMKLAARGGKNAKRRAVIAVARKLAVMMHHLWKSGAAYDPFYQQNRKKKAA

SEQ ID NO: 99166 - protein, 353 aa, unidentified
MTRLARIGIDTSKSAFQLHGVDDKEQVVLRKQLRRRQFLAFLGKLDPTVIGLEACGASHHWGRELAKLGHQVMLIPPQHVKPYVGRNKNDKIDAAAICEAMSRPKVVERLVPIKSTEQSAAQMLLGVRESLIKRRTQLSNTIRSHAAEFGLVAAKGLDKIEPLLLRIAQGDSLPALAKEMFAALGQEFEAIKRRSAAIDKKMLAFHRANEVTRRLAEVPTIGPVGACLFVTKIVNPHGFRSARRCAGWIGLTPKDRSTGGKQKLGGITRAGDESLRAALVCGATAYLRHVRSGRTTPSPWLAGLLNRKPPKLVAVALANKTARIAWKLMTSGQPYDPRRARPNIAAHAIGIAA

SEQ ID NO: 99167 - protein, 345 aa, unidentified
MEHYAGIDVSLESASVCVVDASGRIVREAKVASEPEVLIGWFGMLGLAVTRIGLEAGPLSQWLYAGMREAGLPVELLETRHVPDAFKVMPVKTDRKDARGIAQLMRLGWFRAVHCKSLPAQEVRALLTARKLLQTKNHDVEMSLRGVLRGFGLKVGPTTPRTFAARIRELVAGHPTLSTVAEALLAARSTLFEQWQKLEKRLRSLARQDRRVRLLMTAPGVGPIVGLTYASAIDDPSRFRSSKAVGAHFGLTPKRYQSGETDVSGRISKIGDGGVRTALYEAANVILTRPVKGSTLKNWGMRLAARAGVRKAKVALARKLAVVLHRMLANGTTFLAEKAAPAAAH

SEQ ID NO: 99168 - protein, 442 aa, unidentified
MVRADVAGVDIGSQRHWVCAPTQDGGGREIADFGATTPELIRMAEWLKARQVKFVAMESTGVYWIAPHEVLEAHGLEVLLVDTRQLARVPGRDKKTDPTDCEWIQRLHSCGLLRGAFRPTEAICMRRTLVRDKATLVAESGDWVRRMQKSLDQMNVRVHRAVSDLSRTTGMNMVRAIAGGERDARELAKLRDPRCHKSEEEIAEQLSGHWREDHLFSLCQAVKIYDAIEERIAAYEKEILRKLGEMEHPEHRGENAPALKNANKARLIKNRGQEPKRQAWYRLSGADATQIDSIGVETVEVVISEYGPDLSRFPTEKEFVSHATLAPHVPKSGGKPLRKKRRSSASTRVANALRMAAQCLRNSHTALGAYYRYIAQRKGADIATFAAARKIATLIYRLLRWGQPYVDEGVAAYEKRYQQQRLKALQSRAKQLGYQLTPVTAP

SEQ ID NO: 99169 - protein, 444 aa, unidentified
MENYKIIVGIDIGKEINLISFLHISKKEEITKRLKIKNNIEGFYTLLEALNKITKENNCKVEDVLIGLESTGSYWINLYHFFTRRNYKVVMVKNRLVKLKREAKYSQKGKNDSIDCYCIALVLKEGDYFEIREKQVGFGSLQRMTRTKEDYIKVKVQNKNRLRSWLDVNNPIYFRVFKSLDSILGLAIIKKFPSPWDIINIDRNSLIEILKEDVKRVDLRCLDEYIYLCNELYKDVRNINEGERKEIKCYLDQYDILEKAINDLEESIECLAKETVPAYEKLIKIKGIGKTEIISLISEIGFIENFPNARALQSFLGLGIKADMSGSMSKESKITKAGNRTGRKILYHISMLLITHNDDWRKVYSYYKSYNRKYQNINKEMLIAVACKFLRVVYGILKYNIEFDREELFRGYDFTKCNKEKFIKEYIGKSKRTISEEEIKELFG

SEQ ID NO: 99170 - protein, 340 aa, unidentified
MSFKIFRKNCCGLDVHKTWIYACIGITDTNGMTDTNGMTDYKQTRFSSFSKGLKELSGWLAKYHCTEVCMESTGKYWIPVFNVLEKADVSVILSHPKYTKPQKGNKTDRKDAKWICDLFMCDMVKPSFIPPADIRHLRDLVRYRFKLICMITGEKNREEIEQEILRLSDKYQAALDLIRTVPGFDKNPMTAIQLLSEIGGDMSVFPSAKHLVSWAGCCPRNDQSSKKIKSTRISRAGSYFKPVLVQVANGLLRSKKHPEITDRYKRIKARRGHKKAIIAICRMLLTAIWHILSDLKPYTAEGFRESRPVNESKILTTSQALNLLKQRGYIIKDALAPAMN

SEQ ID NO: 99171 - protein, 326 aa, unidentified
MNLMPLGIDVAKQKFNVCLRFAHDKLKHKVFTNNQAGFTQLHRWLQQHAGARVHACLEATGAYGEALAFYLHEQGHLVSIVNPAAVKAFAASCLSRTKTDRVDAELIARFCLAQQPPAWEPARPEVRELQALVRRLASLIEMRVAEENRLAAGPTVPEVHRSLEESLAHLQAQIKRTEKLIRTHLDQHTGLRQQRDLLTSIPGIAATTAALLLAELPHLKQYRSARQVAAVAGLVPRERQSGSSVKGRVRLSKIGNARLRKALYFPAITALRCSPFMQQWAQGLRERGKSKLSVVGAVMRKLLHLAYGVLKTNQPFDPEWTTRAAG

SEQ ID NO: 99172 - protein, 404 aa, unidentified
MLNAVGIDVSKGKSTVAVLQPGGTVIRKPFDVKHSASDLKSLKDYILSLEGETKAVMECTGRYHEPILHTLSDAGVFVTAVNPHLINGFGNNTIRKVKSDPADAKKIARYTLDNWVELKQYSSMDSIRTQLKTLNAQMDFFTKQKVSAKTNLISLLDMTYPGVNELFTSPVREDGSEKWVDYASSFWHVDCVRKIGQKAFTERYRSFCKRYGYNFSEEKAQEIFDSSKELVAVFPKEMVYKHLIEMGIKQLRTAAEITVSIRNTMNELASSLPEYTTVMAMAGVGKTLGPQLMAEIGDVSRFTHREAITAYAGVDPGVDQSGQHNSRSNRASKCGSPRLRRTLFLIMSVLLQTKPDDPVYHFLDKKRAEGKPFNVYMTAGANKFLRIYYGKVKACLAAQAESSD

SEQ ID NO: 99173 - protein, 349 aa, unidentified
MRFYTKQHRHYCGIDLHARTLYVCILDQAGQVLVHQNLRASPEELLAAVAPYRDDLVLAVECIFTWYWVADLCAQEGIAFVLGHALYMKAIHGGKAKNDRIDALKIATLLRGGMLPQAYVYPAGMRATRDLLRRRLHIVRKRGQLLAHIQNTSHQYNLPPLGKRIAYPSNREGVAEHFEDRVVRKSIPVDLALLERYDALVTDLEGYRVRQAKQHDPQAFQLLRSIPGVGKILALTILYETHDLRRFDRVQQFVSYVRLVKCAKESAGRKHGTSGAKMGNVHLKWAFSEAAIGFVRHSEGGKQLLATLEKRFGKGKALSILAHKLGRAAYYMLLRGKAFEIERFVATVS

SEQ ID NO: 99174 - protein, 396 aa, unidentified
MPTTTRHARTPALPQSMPVPPRVLYLALDLGQRHWTLAFTVGRGQRPRVRTIPGGDLARLTTELAAARRRFGLPPESPVVSCYEAGRDGFWVHRALLAHGVTNVVVDAASIEVPRRARRAKTDRLDARKLVTMLVRYAEGEREVWHVVHVPSEADEDRRHLERERQTLVAEHTGLVNRIQGLLATQGVVLTLRGDVPAQLAAVRRWDGTPLPPELRARLEREWARVTAVRAALRTLTARRHQRVTAATPAAADVPAVHLTRRLAALGAIGETTAWLLATEMFSWRAFRNRRQVGGFVGLTATPDQSGERVRELGLTRNGSVELRARVIELAWSWLRFQPGSALSQWYRRRYGSGTARLRRIGIVALARRLLIALWRYAIGGPLPAGAHQKGDAVAA

SEQ ID NO: 99175 - protein, 410 aa, unidentified
MRYYLGVDWADKTHAVWVVDEQGTKVASRAVPHTAAGLSEWGRELDEWRAQGIELWAAIERPEGRVVDFLLDHGVVVYPVNPKALDRARDRFRPSAAKSDPFDARVLAEFLRTDHQHLQTLQPSSEAAQELKYLTEDYRRHVRQQTRLVNQLTATLKAYYPRALEVSELTTGLARQFLQAYPMPVAVTALTAKRWQRWASAHRLSDVRTHELWGILQRPQLPVPDHVVRAKARLMLTLVEELTAVVAAVGQYREAIDAFFAGLPAAQWIRTLPIGNHGVTAPTLWALLGDAPRRWESWQHLQGHAGTVPVTIRSGQQRVVRFRFACDKALRYVVDQVAFLSLGKSEWARAYYDQQRARGHDHHPALRALGAKWLKIIFVMWDRQIPYDEQHHLATMTRQQLRQRGQKKVA

SEQ ID NO: 99176 - protein, 346 aa, unidentified
MVLIGSDFHPSWQQVSWLDRETGETGDQKLVHEAGSVEKFYRQFPAGSRIGMEATGNCQWFLELMAKLGHEVLVGDAAKIRASDARQQKHDKRDARLLVQLLAEDRFPRIWVPSREEKDLRQLLIHRYKLVRIRAQVKNGLQHLALNQGLQRKKRLWSEAGQKALCELPLAPWASRRREDLLKMRSELDAKIDLLDQAVMEAAEKNEKAKLLMTQPGVGPITSMAFVLTMGDVKRFPRGKQVASYLGLIPREYSSGGKQRLGSISKQGNSFLRMLLVEAAQGAARYDAGMRNEYLHRCHSKPKGVAKVAAARKLAIRLYWMLRTNTSYPEVVRVESSSRVPLVSAS

SEQ ID NO: 99177 - protein, 388 aa, unidentified
MDKNRRQAIGGLIDSRWRVAMDEFSLANGIECAKVEVRINHLREGEPIMDFTAYGVDTAKNVFQVYSVEQATGEILNKQIKRAKFLEYFVNKPPCLIGMEACGGSQHWARALQAMGHMIKMMPGKTVKAFVSGNKNDAADARAIWLALQQPGVRAVAVKSEMQQAVLSLHRMRQQLVKFRTMQSNGLRGLLGEYGEVMPIGRTALNRGMKDALARLAERLPALLIDTLREQWDMLSKLDQQILQIEQRLLEWMRQDQACKVIAKIPGVGLLTATAAVATMGDAKTFKSGREFAAWLGLVPAQSGTGGKVRLLGISKRGDTYLRTLLTHGARSVLTHTKDPGKWLQDIGKRRPLNVVVVALANKMARMIWALLAHGREYDGMHVSVRPA

SEQ ID NO: 99178 - protein, 415 aa, unidentified
MDILFKHCAGLDVHKKIIVACVLLSSAEGVQRFIKNFATTMAGLEALDAWLTGLGVTHVAMESTGVYWKPVFNVLSSHFEVWIVNARDMKQVPGRKTDVCDAEWICKLMSIGLLKRSFIPEVAQRDLRDLTRYRRRLVEERTSASNRLEKILEDSNIKLSAVVSKIQGVSARAMLEALISGETDTAKIADLAKARLRSKIPELEAALVGQIREHHRFMWRELLYHLDELNARIAAINERIAAYTAPHEALLQRLCMIPGIQRWTAEVILAEIGPNVTAFPTAQHLASWACVCPGNNISANKRRSGKTRRGQNWLRPALVEAAWATSHTQTYFGSQFHRLRARRGDKRAAVAVAHSILIVVYHLLADPEAVYTELGADYFTKRNPEQEQRRAVRKLETLGFMVTLAPAQAAAPAPS

SEQ ID NO: 99179 - protein, 353 aa, unidentified
MNERCYVGLDQHKHYSYVTVLTSQGQEVKKGMIYHSKAALSRWVREFKDQKATVALEATGFWPWMADFLESHGLEVHLAHPLKVKPFAEKHLKTDRVDSLVLAQLLRLDYLPEAYLAPQEVRKRRELLRFRAFVVSLRTQLKNKVHSYLHAWGLLMPCQAPRRFSAAGCQWLKTLQINGQTEQLIGESLKLIEVCDQVIAQVDRKLEQVGEEDERLELLEQIPGIGKYLGGLIVAEIGEIQRFRRARQLVSYAGLNPAVWSSGGKMRYGRITKYGSPWLRWAFTEAAIHAERKVEQWRASGARLRARKGVSAARMEVARKICRAVFHMLSQQMNFKEYLQGKTNRTPVGSWNP

SEQ ID NO: 99180 - protein, 361 aa, unidentified
MFRQRTFVGLDVHARSVVGHALDEHTGEVWQQLLPTDPPGIWGWLESLPQPVKVTYEAGPTGYGLARFLRGRGVVCLVAAPSKLTRPAGNRVKTDFKDAEHLCRLLRLDEIVEVRLPDTDQEAARDLVRAREDVRGDLMRARHRTSKLLLRQGIVYPGRKTWTVTHQRWLQQQRFDAPPRQLAFEDAVEAVLLTTDRRDRLDAAIEAMAADSSYTPLVRRLCCLRGISTLTGFGLAVEIGDWHRFSGSSIGAFLGLVPTEDSSGESRSQGSITKAGNGHARRLLVEAAWHHRKSYRSPSRDLRNRWQLAPSPARVRGHEGNRRLHSRWQTFQARHKRDTIAAVAIARELAGWAWSLAVMDD

SEQ ID NO: 99181 - protein, 364 aa, unidentified
MNKCHLNTELSSHEGTRCQFNGGTGAIKLGIDVHRDFYVVVVQEGGSNPKPPQRFRKEAFLHWATKLKSRATEVHAVYEACGFGFSLQRQLNALSIHCYVVCPQKLDEHNKRVKTDGLDAKALVLKLDRFVQGNRAALAMVRVPSKEEEQKRAIHRQREQLVKTRMQLEAQGRTLMVNHGIEPVKNWWKGRTFAALQLPAWMKELLGNSQPILLALQEKISALTLQLQVAAASKQARGLGAMTSVIIDREIGDWNRFSNRRQIASYTGLCPGEYSSGNSRLQSCVTKHGNPRLRAALVELAWRLVRFQPSYKPILKWRRLLAKGALATGAARKKAVVAVARQLAVDLWRVRTGRCKPEALGLVI

SEQ ID NO: 99182 - protein, 349 aa, unidentified
MKKIVRQVLGIDVAQKELVVCLGRMHDDWTSELFSHGTFANSKKGFDAMVKWVKKLSIEATAVGYVMEATGVYHESLAYYLEGKGYEVSIVLPNKISNYFRTLEVKTITDKTASEAIARFGLERKLDTWKRPKQIFKNLKQLTRERDQIVEARTMAKNQLHAEQAEAFPNPSSLHRIKAHIKFLDKQVAEILKEITELVKQDAQFNESIQLICSIPGVGRLTAATVLAETNGFELIRNKRQLTSFAGLDVREKQSGTSIKGKPRISKKGNRHLRKAMHLPALTAIRHEKKFQAVFVRLVSKHGIKMKAAVAVQRKLLEMIYTVYSKNTAYDKNYVNQNKDELTKKPSLA

SEQ ID NO: 99183 - protein, 339 aa, unidentified
MQVTTIGLDLAKNVFQVHGITEDEEIVFNRPLRRAQLLPFFSKLEPCLIGMEACSSAHHWARELTALGHDVRLIPPMYVKPYVKRGKSDAIDAEAICEAVTRPTMRFVAVKTVEQQALLSLHRARNLLVRQRTQLINGLRGMVAEFGVYIARGLARVIGFAEDILAGEVLDLPEIANEVIHNLCEHLMELHVRVRWYEDRLKLVAKEDARVRLLRTIPGVGAVTASAIIASIGDGHQFRNGREFAAWLGLTPANKSSGGKEKLGRITKMGDQYLRSLLVVGMTSLVRQTRSHPERASKWLTSLLERKPARVATVAMANKTARIVWAVLTRNEPYTPHTA

SEQ ID NO: 99184 - protein, 310 aa, unidentified
MGGVNAAIDVGKHQLEIVLGSAGEHWVEANEPRAIKRLSQRLAAAGCERVLLEGGSYQNLLVAGLRAAELPVVMVNPRRVREFAKSIGRLAKTDRLDARVLALYGERIAPPVRELPDEQSQTLRALWVRREQLIEMLVMEQNRLEHAPQALHHRLRAHIDYLRKELKQADDDLDRTVRNSPLWDKYEVLSSVPGVGPVLSIALLADLPELGRLNRREVAALAGVAPFNQDSGSVRGQRKIEGGRGRLRRVLYIATLAAVRCNPLLKPFFQRLRAAGKPHKVALVATMRRLLLILNAMLKSNTAWRPPCPA

SEQ ID NO: 99185 - protein, 341 aa, unidentified
MKISRTVVGVDTAKRVFQLHWVDRETGEIVDLKLTRAKFLEHFANRVPCLIAMEACGGSQHWARQLLELGHEPWLLPAKSVRPFVTGNKNDAHDARAIWTAAQMPGVKTVAVKSEEQQAVLALHRMRQQLVKFRTAQINGLRGLLTEYGEVMPRGRAGMRKAMPDALARVSERLPAMVIDTLREQWARVARLDEEISEIERRIGVWHRGNANSRRIAEIPGVGVLTATAVVAAMGDPAAFRSGREFAAWLGLVPRHDGTGGRVRMLGISKRGDRYLRTLLIHGARSVLTNAKAPPEWAVRLAERRSANVVTVALANKTARTIWALLAHDRAYQADFVSRPA

SEQ ID NO: 99186 - protein, 413 aa, unidentified
MMSALVYRFHVGIDWATEKHRVVVLDAERRVVREREVCHEGAALESFADWLTQLAASAVETVAVALEVPRGAVVDVLLARGFHVFALNPKQLDRFRDRFTVAGAKDDRRDAQVLASALATDLATFRRLEPEHPLLLELRELSRLEDDLQEELGRLTNRLREQLHRYYPQLLHLVPAADEPWLWTLLERAPTPSVAQHLPRATVRTILSRHRIRRVDTDAVLATLRAPALPVAPGTVQAAQRHLAVLLPRLRLIHQQRAECATQIEGLLERLGESQEHRDVPILRSVVGVGRVVAATMLAEASRLLAARDYHGLRAQTGVAPITRQSGRRTLVCMRYACNPRLRQAAYHWGQSAARHDPVSRAHYERLRARGHNHARAVRGVVDRLLHVLIAMLTAGTLYDPARRRLPVGEAVA

SEQ ID NO: 99187 - protein, 344 aa, unidentified
MEPMYYIGLDVHKRKISYCVKDSGGKIYAEGSLPATRMDLDLWMKTLPHPWSGAMEATMFTGWIYDHLKPHAAALKVAHPLMLRAIAAAKKKNDRIDANKICDCLRCDFLPECYMAPTAIRERRRTLRYRNLLVRQMVQMKIKISSLLMEAGVSYNKQRLHKAGYFRELLATNPDIDEGLGSLLRLCRETVVRLQKTESAMVRSLERDSLLIDRVERLMTIPAVGPITALTWALEVGDVQRFSTIKKAISYCGLCGAEESSGNTVQRTPLSKQRNKHLQTTLIEAAKMAPRNSADLAMLYDQEKQKGNANRATLAVARKLVAYLMAVDRGQRNFQVVETNGIAA

SEQ ID NO: 99188 - protein, 345 aa, unidentified
MSTVYVGMDVGSKVTAVAARSESGEVVERLSFKTSKENLISHISRYGMDAEVLLEEGELAGWVYRTLLAYTGEVIVCDPKRNAWIAKGKDKSDKVDADKLSELLRINSFATIYHTPDEHIAAFKVAVKHYEEATERAARQMVQIKAMFRTNGVFPEGKRVYGIQGRCEYLHMAENPTIRNILVQEYDMLDYLSKAKVEAGGLVVKMSLNFPVIEHFKRIPGVGPVLAARFVAYVLDPNRFNKRGLWKFSCLGIVNRSSDGVSLGRQHLDSAGVSAMKDLSRKVFDGAMRTKETNGVQVFFQRSYRNCGDRDHARLSTQRKVLSMMNAMWRDGTDYSDEMFIGPRA

SEQ ID NO: 99189 - protein, 338 aa, unidentified
MKVHILGVDLAKNVFQLHGVDRRGRSVLVRRVRREQLLKVFGELEPCLIGIEASTGAFFWQRQFEKLGHTVKIMAPQYVKPFVRRQKNDTNDAEAICTAVQQRNMRFVPKKTLEQQDIQALHRARQRLVNHRTALISQMRGLLLDRGIAIAVSATRARRLIPKILAAPSDELTVLMQEIVSSLYAFMLQIDERIKAFDRKIDAIFKASDVCQRIAKIRGIGPKTATAMIAAIGDGSDFKNGRHLAAWLGLVPRQHSSGDRKVMMGITKRGSQHLRTLLVHGARAVVRTAVRKTDSRSMWVNELRQRRGYNRATVAVANKNARVIWAVLTSGEPYRAAA

SEQ ID NO: 99190 - protein, 318 aa, unidentified
MSDSVFVGIDVSKQTLEIASSHESKTWQVTNDPAGIDELAQQLVQLKPQLVVLEATGGYEFDAACALQVLGLPVAVVNPRTARDFARAMGALAKTDALDARMLATFARALHQHPQRERFIKPLADAQLQRLQALVLRRRQLVQLITSEQQRLRLAHAVARPSIERVIEFLKRELSDSDGEIEQHLRQHYDELASALASVPGIGAASVAVLISGLPELGTLDRRRIAALVGVAPLNRDSGQMRGQRTVWGGRADVRSTLYMATLVATRFNPAIRAFYERLVASGKRKKVALVAAMRKLLGILNAIAKTRTKWNPDLLDA

SEQ ID NO: 99191 - protein, 329 aa, unidentified
MRYLLGIDISKSSFHAAFLDTAGSDGPQHGEFPNDAAGFQQLSEWLERLSSSGSATGSPVTVHACMEATGRYYEALACFLHQAGHRVSVVNPTCIAHYARSKLLRNKTDKIDAATIADFARTQNPRAWTPPSPQLKQLQALTHQLDALKKMKTQETNRLKAAPPDKNVQKVIREHLHFLEQQNQTLIQQLDSLAKDAPFQRQVQLLTSIPGIGKLTAYRLIAEGITRFDSSRQLAAYAGLSPRHHESGTSVKRKEALSKVGNARLRAALYWPAISAKRWNPALAAFVERLESKHKPNKLITAAVMRKLLCLAFAVLKADKPFDPAYQPH

SEQ ID NO: 99192 - protein, 415 aa, unidentified
MIFVGIDWSEAHHDVCVLDDQGTVLAKGKVSDDVSGVGRLHAMLAEHVEDPSEVVVGIETDPGLLVGSLVQAGYHVYAMNPLAASRYRDRHAVSRAKSDPGDAKVLADLVRTDRQNHREVAGDTELAEAVKVLARAHQNLIWSRQRQVNALRNTLREFYPGALRAFSTSQLATVEACGVLAMAPTPTWARDKLTLQRLRRSLAASGRKRNLDRRAGQILQALQAPELSAPPLLEQAYGEVVGSLVVVIDGLTHQIMGLEAELSERFEGHPDAEIITSLPGLSSVLGARVLAEFGDDPTRYVDARARRRYAGTAPITRASGTRLVVLARVARNRRLFDACYWWACSPPSTPPPEPAATTTPTAARARPTTRRSVQSPTAGSGSCMAASSGKSSTERTSPGSRLLRLPLDNFEPWDV

SEQ ID NO: 99193 - protein, 325 aa, unidentified
MVDDTGKTVFQGKAKSYPGALTELLRKRAPHAERIGFETRAMSSWLWHELKRVGLPVVCLDARHAKAALSVRMNKSDENDARGLAELVRVGWYREVKVKSAESQATRSMLVARSRLVEIRRDLENQTRSMLKEYGLQFSRSIGSQFRRKVWELVADGHPLRPLVQALLSVHEQVCCEQEKLDRQVRHLAREDETTRRLMTVPGIGVVTALTFRHTIDDPSRFHSASNVGAYLGLTPRRKQSGETDVNGRVSRWGDRLLRTYLYEAASVLMHRTKKWSTLKAWGVRLSKRIGMKKAKVAVARKIAVLLHCIWVDGTSFEWGSEKMA

SEQ ID NO: 99194 - protein, 340 aa, unidentified
MNRYLGVDLHRNCFTVCTLREDGQSELRKWSIHSLSEFAHTVQATDAVAVEATGNTRYFCQSLKERGCRLVVVNPQQFQVISRSVKKTDAHDAKTLAQFLARDLLPEVRMKEALQAEIASVLQTRDKLVKLRTTLKNKINNLLAGRGILIRRESLSSDKGLEQVLQAPVSDMERVELEVLVGQIRHLNNSIRKLEAAIKKQGPKLPGYQNLKSIKGLGDIGSSTLLSTIGDINDFASEGKLAAYFGVVPRVANSNATEHSGRITKRGNKLGRTALVQCALIAMRYSPYLAHYYSRIKAARGTGKAIIALARKFLGIIYKTLKNGWVFEDFPGFVIAPAEA

SEQ ID NO: 99195 - protein, 347 aa, unidentified
MTIVEDARAITGGVDTHADMHVAAALDPVGGLLGVQEFPATAGGYARLLGWPGGFGTVCLVGIEGTGSYGAGLARHITAAGIRVVEVDRSDRQDRRRQGKSDPLDAVSAARAAQSGRARGAPKGRDGAVEAIRALMVAKRSAAGERTRTINQARALILTGPDDLRARFAKHTAAGLVTAIASLRPRPGDAAGYATRIALRELGRRAVFLDGQLERLDELIVPLVTARAPGLLALYGIGSSTAALLLIAAGDHPGRLRSEAAWAHLCAAAPIPASSGKVTRHRLNPGGDRQANHALWRIVFTRMGSDPATRAYVERRTKEGKSKAEIIRCLKRYVAREVYPHLRPVAG

SEQ ID NO: 99196 - protein, 388 aa, unidentified
MIKKRFDFRKGKDYLSVPYKHLTGSLPKKGSLMNRKMQDFIVKGKKVFIGLEDSKKTWKISARCEGMEIHYTAMPAKYAGLREYLFRKYPSCEITVIYEAGFKGFGLHDQLMSDGIRCIVTPPNKVTQEKDSRVKTDKIDARRLATVLEKGDYKACAVPDKERREDRQVNRAMLQVQGEITRVKNRIRKFFDANGYAETFAAGEWNERQYDEVRTMELPPALKVTLDAYFSMLDKFKELRKILHKEIMAIAKKERYAEAVRIIKSIAGVGKLTAIRLILEWGEDMGTRFKSGGSLACFSGLTQSEYSTGERIRKSRITHQGRGYIRAWLIQCAWICIKRDPAMLAAYQRIAKNTASKKKAIVAIARKLVVRLWTCLHTKTEYAIGVIE

SEQ ID NO: 99197 - protein, 459 aa, unidentified
MCPATERLGWTCTSPTRTVKHVPWGVRAKSASTGPMKHHGWPSREGILTESYRFFVGIDWAWERHTICVLGSDAEVIDRRTIEHSGAGLTQLADVLEKLSSGDPFSVAIAIEMPRGAIVESLVERGFAVYSLNPKQMDRFRDRHTVPGAKDDSRDAFVMADALRTDLHLFHRVRLDHPDILRIRELSRSEEDVQQDQVRAENQLRDLLNRYYPQMLQLCPAVDQAWFWDLLEMVPLPAQAAKLSKSRIEKLLRSYRIRRFDANEIHQTLSVPALQLAPGAAEAASEHVLLILPVLRLLDRQREEIARRMQLLLEKMSADEQVVEHRDVKILLSLPGVGRVISATMLAEASQPLAERDYHAIRSYAGAAPITRRSGKRKMVVMRRGCNPRLRNALYHWSRVSSQNDPRSKEHYAALRAKGHSHGRALRGVADRLLAVLIAMLRSGTLYDPNHQTAAMPLK

SEQ ID NO: 99198 - protein, 408 aa, unidentified
MSVNGLPGECFDGGLIVAIDPGKAMHRVWVTDRAGMVGEPVSLPNSRIGIERLEALVGEASATFAVEATGALHRAWAAELERRRPGALRLFAPSQTHAARAQLGTRRFKTDDRDCAALVWLARQGAGRPARSSGVEAMLAAVSHRRQLVLALTPLRQRLHDQLNALAPGLSAPAGHGRALLLSTPTGHAVLACAAAFAGRPPSPQSLQARANGRLTAATAALWAGRWRQCLAPPPDAELRAARLARDLDRFQALRVDIAFVDGQLEHLLADSAGQILTTLPGVATARAAALTAYTLPIERFPTPEHLYSATGLAPASYESASVRRRSAIARTGLPEHRDALMGIAWGLGQFAPAFQRRRRELNQRGKTGIQARVALARHACRLCWRMLDTQQPYDDRRYDRARRDRGR

SEQ ID NO: 99199 - protein, 421 aa, unidentified
MKRADTRKVRGVRDDTLIVAIDVGMGMNRGYCTTPDGRSTKPFKFDNTREGLDTLWGMIMASKDRFKCNEVIVGYESTGPYGEPLVHYLIKKPVKMVQVNPMHTKRVKELNDNSPLKTDDKDPRVIADIIQLGHTLSIVIPEGDAAYLRRLNNSRERHVRERTALVNKLQQLVFLLFPEFKKVIKDIKCRTPLYLLKRYPTPEAISVLETHALGEEMRKKSRGKFREHHADMLITLARNTIGIREGVSGLSMDIRHILVQLEMLRNLIAEIESEMEIALGRIPYSSKLLSMKGLGIVSVAGIIGEIGDFKKFGTQPESMKLAGLDLYEISSGKMKGQRRISKRGRSLLRKILYYAAIQTIRKNGILHDYYTRLTDRGMKRMMALVAVSRKLLGIIYAIVRDDSEYSVNFESMKRQVIKKAA

SEQ ID NO: 99200 - protein, 349 aa, unidentified
MTMLADHVDVVIGIDTHKHTHTAAVVRAVTGASLETLTVPTDVTGYEQLVALADRYRGARVWAIEGTGTYGAGLTRHLHARGERVFELDRPKRPARRNGAKTDALDAVRTARDALALEHHATPRHGGDRAALAVLIAARRSAVEAAKVAHTQLHALICAAPELLRSRFRGQSARTILTTAAKIRISSRWDNETQTYAGVLRDLARRQHVLKAEANTHERAITAIIKAWRPDLLEQFGVGPIVAANVLCAWSHPGRCRNEAAFAKLAGVAPIPASSGMTDKHRLSRFGDRQLNRALHVIVIHRLRYDPVTQAYAERRRAQQKSDRDIKRCLKRYIARQLFRQLEHPVDDQ

SEQ ID NO: 99201 - protein, 414 aa, unidentified
MRIVYPRCCGLDVHKKSITACLLTPTEQGETQQEVRRFGTMTRDLLELSDWLTGNGVTHVAMESTGVYWKPVWNILEPACTILLVNAQHVKAVPGRKTDAKDCQWIADLLQHGLLRGSFVPPTPVRELRDLTRTRASLRQDHTAVANRMQKILEDANVKIASVATDWLGVSGRLILNRMIDGEQDSGKLADLCRGRLRDKIPQMQLAVEGRMTEHHRWMLRLQRQQLEFLEQQITQLDARIQEQINDYQRAVDLCTTIPGIEVVAAGNLIAEIGVNMDQFPSAQHLASWAGLCPGNNESAGKRLSGKASNGNVWLRRNLCQAAWAASHTKNTYLSAQFRRLAARKGKKRAIVAVGHTILVIVYHMLKNQQPYRDLGSDYFDRRNSEQLKWSLIRRLEGLGLQVSVKSQNQPEER

SEQ ID NO: 99202 - protein, 402 aa, unidentified
MTFPFDQQIRVAVDVGCHRHRVAVAGPENRVLEEFDIEHNAQGIGAFFRRVEAHERRLELPVAVAMEGFNGWARPLDTQILVRGWRLFNVNNLKLARFKEIFPGPAKSDPIDTQKMLELFELRAHLPLAKDVLQEIAVAPVENEKLKRITRRRRQLVNERGRVINRLQSDLQAVSPGLGSITAKVDNLWFLRFLTCREQLDQLMRVQRRTVLNIQGIGQRYADIIQKWQKQAHFSAEVDYVGPMIVADARRILELKDQINVLETAIEGLLMQSAIARLVDTIPGYGVVCSAELAGEIGTIERFTSEASLALYLGMAPLDNKSGKYHGSKSPRQVNVRAKAAMMVGVDRHRKQVPESQRYYEKKRAEGKLHNQAIRALGRHLVRVIWSMIANNRDYQLKTKTD

SEQ ID NO: 99203 - protein, 338 aa, unidentified
METYAGIDLHSSNNFIGVINDKDKILYGKRHANRLDDVLRALDPFKDSLKGVVVESTFNWYWLVDGLQEHGYRLHLANPSAIQQYEGLKHTDDPWDSFWLAHMYRLGILPEGYIYPKEHRAVRDLLRRRLLFVRHSTAHILSLQSMISRNLGFKMSNNEIKKLKPADIESLFDCSNLVFMANNSLAAIEFLQKITKGIEKKVKSQVKLRKEFEMLLTIPGIGNILGLTINLEVGDIGRFPKVGDYSSYCRCVESKRLSNGKKKGENNKKNGNKYLAWAYVEAAQFARRYCVKAQSFYQSKEAKTKPVVAIKALSNKLSKASYYIMRDQVAFDEEKLFG

SEQ ID NO: 99204 - protein, 405 aa, unidentified
MQHHIFSLEVFVMVVSVGIDVSKNKHDCFIVSSEGEVLADVFTIPNNMDGFYALLEKIRACTTPQDKIKVGLEATGHYSYNILGFLLDNGLATYVLNPLRTNLYRKSLSLRKTKTDRVDARTIAAMLLSDVGLKPYTNTAYHNEELKSLTRYRFDKVKERAKLKSSISRLVCILFPELEKLVSSLHLATVYALLEEFPGSKQIAKAHLTRLKTLLGNASKGRYGRDMAVTIRSAAQNSVGSCMPAKSLELQHTIRLIRELDAEIAEIEAEIETMMDKIQSPITTIPGMGFRMAAMIIAEIGDFSRFESPDKLLAYAGMSPSTYQSGQLKNCYPHMEKRGSRYLRYALYNAAKYVCHWDPTFAVYLAKKRDEGKHYNVALSHATKKLVRLLFALERSRQPYCSLAA

SEQ ID NO: 99205 - protein, 316 aa, unidentified
MDNKSSVYGVDVSKATLVVGEYDSGSMFTLSNTPEQIARWVSSIAEGSIVAMEATGAYHQVLATLAHAARMRVYVLNPRALKHYAQAIGQRGKTDPIDTRMIARYAMHEHSKLFAWEPPAPGAEKLAQLLQRRDRLVTACQMVAQSLAGVSALKAQREQLLANIKRMIRNTELLMRAELARAPHLAEVHQRLTSIVGVGFVVAAQLVVALTRLRFPRLESFIAYTGLDPRPDDSGQRRGRRRLSKRGPQLLRCRLYNAGMAAAHSKLFKPLYLALRARGLRSTEAIVILARKLARIAFALYRSGETFDAAKHLQTA

SEQ ID NO: 99206 - protein, 297 aa, unidentified
MQTQVTKKNDFTDQNLFVGLDVHKKSWSVTIIVDGIEHRTFTQPPDPGSLCNYLHRMFPGASYHSAYEAGFCGYGIHRELNFLGIKNIVINSADIPTTQKDKLQKRDPVDSRKIARSLEKGSLHAIHVFDRELEELRTLNRTRFYLMRDLRRSKNRIKSFLQYYGEPIPEEFDNNQWTLKFVSWLKQVKMKTISGQDAFSHLIESYEHHRGQLVDVSRLVRQRIREYDNELYSLLKSISGIGPLTSSALITELGNINRFNNIDQLSSYVGFIPRIRESGETTHTGGITFRCNTFLRT

SEQ ID NO: 99207 - protein, 420 aa, unidentified
MKVVYQTCCGVDVHKSFLVATIIKTTSGVEPSYQKKRFSTFNNSILQFKEWLVKNQCRDVCMESTGKYWVPVFNLLEDEINITIANPKWVKAVKGNKDDTKDSKWIGDLFRLGLVPGSYIPCKPIRILREFTRNRYKLTSCRTSEKNRYQNALTVCNVALDSVVSDIFGKSATSVIDYLIEQPDNSINHEEIASRLLRSLKKKSDSVIESIEGYQMTDSQKYRMRLIRAHLDYITSTINDIDTMLNSLIAPYENAVQLLCTIPGVDRNSAITVISEIGTDMTPFSNSKRLCCWAGLTPDNNESAGKKKSVRITRAGVYLKPALVQVAHAAVKSDKSPYYKQKYERIMKRRGKKRAIIAIARMILTAIYQMLSTGEAWNPTDLFKIDMPEPMKEKQKEKAIKQAMKLLIREGKISESQLAS

SEQ ID NO: 99208 - protein, 421 aa, unidentified
MPNIEIGVDSMVKENFIYVGIDLHKETHTAVMIDCYNQKLGEITFPNRPAAFPKLVTKVKKCNTDGKEVVYGLENAYGYGRALAVWLIDKGYLVKDVNTAISHRQAKHRGAMYRKSDSDDAKAIALATLNMLDKLPDACPNDAYWSLGQLVHRRDNIMKQRTRLVNQLHEQLCIAYPSYKQFFNDISRPTALYFWEHYPSRKYLKGKSVEDLRAELVPVSHNKCSTKTCEKILDAVASDKVKNNAYQDARDMVTLSIVSDLQHYDSQLTEVDKMLEQMYKMLGCTLTTIPGVNVITAVKILAEIGDIKRFSNANKLAQFAGIAPLHLSSSGKGKDVATKQGNRRLQATIYFLAIQMVQVSSKGTPRNSVVRAYYEKRKAEGKTSQQALICISRRLISIIYGMLKSGTEYRMPVMENTGETV

SEQ ID NO: 99209 - protein, 356 aa, unidentified
METAYDGRQVVGMDLHRRRSVLVRMTGDGRRLGTAKITNSPAELRRAIARAGKHPRVVLEATYGWYWAADVLAAAGAEVHLAHPLGVKAFTYRRVKDDVRDSADLADLLRMGRLPEAWIAPHEVRELRELTRYRIKLVRLRTSCKDQVHGVLAKLGVTVTCSDIFGVAGSAWLDGLRLPQPYAGKVTSLRHLAGELTTEITMLSEVIASLLAGDRGYQVIQQLPGIGPVLAAVITAEIGEVTRFRNAGQLCSWAGLTPRHRESDTKVARGHVTKQGSRLLRWALIEAIQRIPRDSVIGAVKDGIIGRRGKEAKNIAKVAAARRLLTLVYYGMRDGQIRCLSRPPAGPPVTETARAA

SEQ ID NO: 99210 - protein, 368 aa, unidentified
MHLQCPVLQLGNINWRMVMNINDPRNQLILGVDTHLDLHVAVLVNMIGQVVSTEVFETNKKGYNRLFKWCNSFGQLLKAGIEGTGTYGAGLSRFLVSHNISVYEVNRPNRARRRLRGKSDPTDAENAARAVLADEAKAVPKTQNGSVEAMRFLLIARRSAIKSRTQAINQIRAILVTAPDEVRKQYLIASTSACIEACKNIETLGDSTLLDSLAISLKLLAKRWLVLTEELKILDRNLKRLTLTTAPLLTQELGIGPYVAATLLVTAGDNPERLKKESSFAALCGVSPVEASSGKVVRHRLNRSGSRVANNAIWTITLIRMRSDPRTQKYVDRRTKEGRSNKEIQRCLKRYIARELYPKILNDLTSAA

SEQ ID NO: 99211 - protein, 380 aa, unidentified
MPEAVIGLDVGKSSHWACVATRDGEVLLSTPVANREDDLDSLFGRFPDALVVVDQSRNIGALALARARAAGMSAAYLPGLAAHGAARLFAGDAKTDERDAMVIAKTALGIPDALLPVGDPGPTIAAARALAAQRNFLTCENTRNKNRLRSILLESCPAFEALVDLSDGPQLRLMASLGGAWSVADAGPRRAAALTRGAARGKIEALVRSTTSSTRPDASVVAAEDRAVKLLARRISENSAEIEAITAEISALLEGDDTYRCLLTVPGIGPKTASELAISIDIEDFPSHDRLASYCGLAPRNRQSGTSISSVTASRQGNKRLKNLLIFSCNCLTRTEGRWGDYYTRCRERGMSHGKALKALARKRLKVIYAVMRDRVPYAA

SEQ ID NO: 99212 - protein, 340 aa, unidentified
MNATTYGLDVAKRVFQMYWVDAQTGEIVNRRFGRDELIRFLAQRPAGQVALEACGSGHWWARKIKALGHEVVLLHAKFIRPFVQTNKTDAADARAIWTAVQQPEMRTVAAKTEDQQAMLSLHRMRALLVKFRTMQVNQLRGLLYEFGATFRAGRVAGLAEIRARMAELADALPEAMLCSLQDQLQRIDALEQDIDRLEQRIGAWQKQEAECRAIAAVPGIGKLTATALVATVGDAKTFKSGREFASFLGLVPRQSGTGGKIRLGSISKRGDPYLRTLLIHGARSVMYHVKEPTAWQREIRARRPANVAAVAAANKMARTAWAILAHGQAYQKDYVSVKPA

SEQ ID NO: 99213 - protein, 345 aa, unidentified
MNIASIGIDLGKTTFHLVALGERNKILLRKKLSRTQLLTYTANLPASLIGLEACAGSHFLGAALREQGHEVRLIPAQFVKPYRKSNKNDFLDAEAIAEAVTKQNMRFAQLKTQEQLDWQAMHRVRDRLVQRRTALINEIRGFLLERGITFAAQPIHLRKNLPTVIEDAEQNLSPRLRWLLDRLWQEWKQIETDVEAITDEIERISNEDARCRQLRQIPGFGPLVSTATVAAIGNGAAFRRGRDFAAWVGVVPRQYSTGGKQKLYGISKRGNVYLRRMLIHGARAVLFRVKYDTGGFGQWVQRLAQRAPRNKVVVAIANKLARIAWAVLSSGRDYRHQPLLQPAAA

SEQ ID NO: 99214 - protein, 432 aa, unidentified
MKNAKTVACVGLDCHRKFSIASARDGSMGVVWRRRLEHADRNGLRKELSQWPTGTPVILEATFGWGWMSDELREARLDPHLSSGRKVAAWREARGMAKSNKRDADLLGELWGQQPRWWEVWCAPPEVRDLRELLRHRMGLVRIQTALKNQVHATLHRHGVVQPFSDLFGCHGRQWLSSLLEDPAAPLRESGRGTLHQQLGLLDEVRRRLAEATRQFRSRVNRQASAKRLMTLPGVSTILAYTILAEVGRIERFPGGRQLSRYSLMAPLSDDSGEERPGQAIGRHVGKVGRLTLKWAWIEAAHGAVRRSGRMKALFDRYTDNGQHDRNRGYIAVGHQLCLIAYVLWKKQRDYQEIPPPRPGWEKRRQREEDREKRKAQQIKQRDTIQQEKPGEARMNQYKDDVSRPGTGQPQTAMAADTDDRQQAGGIRQTAA

SEQ ID NO: 99215 - protein, 339 aa, unidentified
MKLYVGDDLHSSNNYLAIIDEKGKRVFHRKLPNDRATVINTLAPYEGAIAGIVVESTYNWYWLVDTLMDEGYKLHLANPSAIKKYEGLKHTNDKDDAFWLAEMLRLHILPEGYIYPKEDRPIRDLLRKRRHLVSLRTSLIISLQNIISRNCGHGFNANDIKRIKEDMISPILAYDEDLALAGQVSKDAIDFHTRKIWEIERVIERKIELREPYKLLLTIPGVGKILALTIMLESGPVDRFEKVGNYASYCRKVSSKWTSNNKTKGSGNKKNGNKYLAWAFSEAAELARRYDERIRAYYNRKMQKTNFMVAHNAIAHKLARAAYYIMRDQVPFMPEKLFT

SEQ ID NO: 99216 - protein, 341 aa, unidentified
MNVTTIGIDLAKTVFSIHGTDQHGKVVVRKRLNRPKLLAFFAQLPPCLIGMEACSGAHYWAREMTKLGHDARIIAPRFVAPYRKSSKNDDNDAEAICEAVSRPNMRFVPIKTEDQQATLSLHRIRRGLTKERTAQINQIRGLLAEFGLIIPQGRYAARRRVPEILEDAENGLPMLARRLLNNINQRILQLDEEILAYDREIEAMARRDEQAKRLMAIPGIGPQTATALLASAPDPRQFKSGRHFAAWLGLVPRQYSTGGKPRLGRITKRGDKYLRTLLIHGTRAVIATIDTKEDRLSAWAKELKERRGYKRAAVAMAAKNARIVWALLMNQTEFKTQPVEG

SEQ ID NO: 99217 - protein, 372 aa, unidentified
MQSTTKFVGLDVSKEKISVAIADASGETPRYYGSIPHTPAALRKLIKELGPAETLSFCYEAGPTGYETYRWITSMGAHCVVIAPSLIPKRPGDHVKTDRRDAEQLARLFRAGELTPVYVPEREDEALRELVRAREAAKEDAHRARQRILKFLLRHQIEPPATIKRRWTRKYRSWLEQLTFPYEPMQVAFDEMLHTLNEIEQRMGRLEKALVQQATVGSKATLIRVLQSLRGIGLLTAVTLAAEIGSFTRFRSPAQLMAYLGLVPRESSTGLSTRRGSMTKAGNGRLRRSLVESAWSYRHRPAVKGDLAKRLDGMPADIQLLSWKAQERLHYKYRHLIFGKNKHKNVAVGAVARELTGFIWAVARTVEQPVAN

SEQ ID NO: 99218 - protein, 429 aa, unidentified
MTRISAGVDVSKNRSTVCIIDQDGKVIMRPFLVWHSTEELDFLADTLKRLNGEVRVIMESTSIYQYPIALHLKEKGIFISIVNAYKVKKFANTDFRGGKTDKKDSRTIASYGISYWDKLVEWQIPKDTYFNLDLLNRTYMNAKKHRQIILQELQHYIDCAMPGMDKELHSLNLSTKKDFMLDFVEKFWHRDEIVNMTEAEFTEVFTAWAKKKGYRPVEGKAAKIYAIAKSCIPYYPANPTVKTILQCIVDKLSGVNRTLVTIVTQMIEEAKKLPEYQIVREMPGVGDPLAARFFGSVGDIRRFKNSKALVAYAGIDSPPDESGDFSSTHRHITKKGSKVFRDTGYEIMMALRAQKRTWEKVRKNPEVYDYMLRKEAEGKPPKVAKIAALNKFLRIVYARIKELYDNMALAERAKAKTKSKTKVKTKATA

SEQ ID NO: 99219 - protein, 428 aa, unidentified
MNTPTSNPPVVAWVGLDWADQRHEIRLQAAGSPRLESFSVEQKPEAFQAWVAELRARFPQGRIALALEQSRGAVIYALMNYDFFLLYPLPPKTLARYREAFASSGAKSDRSDADLLLELVRTHGDRLRAWQPDDAMTRQLRLLVEYRRKTVADRTRLTNRLTDLLKTYFPQALDWLGDLRSLAACEFLGAWPTLQAVQGANRPALRRFFHDHRRLSAEEREKLLDQIRHARPLTQDRAVLEASELMTQTLVEQLRAVISALARLDQALEELFGQHPDQQLFDRLPGAGEALGPRLAAAFGTDRDRYQSAEEIQQFSGIAPVTAASGKMRWVHWRWACPKFLRQTFHEFADASRKKSLWARAYYQQQRQHGVSHHAAVRALAYKWIRILYRCWKTRTPYDEALYLRALQRRHSPLWLAAASLSTQEAHP

SEQ ID NO: 99220 - protein, 322 aa, unidentified
MTKRNTICAGIDTGKYKLDAAIEGRYGQTQVANTAEGHEVLVAWLRRHRVKRVGIEASGGYEQPVVAELRRKRFVVVVFQPAQVRAYAKFHLQRAKNDRIDAALIAACTAAVRKIHAAPDPRLLPFAEHLTMIDQVSEDIVRLKNRIESCRNAQFRKLWQEDITLLEQREKAELKALVAAIRKHCDLARRLALINSVDGIGLPTAVAILVRLPEIGTITREQATALAGLAPYDDDSGEQADVRHIEGGRKRLRRALYAASLAASFRWNRQLIQLYQRLTAAGKGHKRALVACARKMLIFANTVVARGTPWCDQPPKTTSSVS

SEQ ID NO: 99221 - protein, 409 aa, unidentified
MDQLIERVAGLDVHKASVVATVRTPGPDGSRVSRTETFGTMTADLIALRDWLHAYGVTHVALESTGVYWKPIYYVLENAFQLLLINMVALKHVPGRKTDVKDSDWLAQLLECGLLKASFVPPPAIRELRDLTRYQVQQVRDRAQEVNRLCKVLEDAGIKLSSVATDVMGASGRAMLDALLQGTTDPTVLADLARGRLRKKLPELRRALRGQFRRHHAFLVEQILAKIDFLDETLDRITTELDARLVPFAPMLANLDTIPGVNRTTAVSIIAETGGDMTRFPSAGHLCSWGAMCPGHDESAGKRRSGKTRKANRYLRAALIQSALGASHANGTALQARYHRVKRHRGHKKAVVAVGHQILEIAYYIMRDGITYTELGADYFDRRHADRTVRRHVRQLEALGFHVTIEKAA

SEQ ID NO: 99222 - protein, 388 aa, unidentified
MCHFDRANEVSERRQYEGASPILNWCVLYLVTPEGRSPVGNHKFAAADVHAATTTFAVLDSSGKFVMETVVETKAESLLSVVKSISGAVHLTFEEGTHAAWLYDLLRPHVAELLVCDPRKNRNDKGNKSDRIDARQLARWLRSGDLSPVYHGDDSTKVLKELVRGYENLVADSVRVKNRLKAVFRSKGEATSGGDVYRLEKQEEWLSKLRSSGLRSRAEWLYSQMESLNDLRDEAEKAVLREAEKHRPCSLLKSVPGRGPIRSATIVAHVATPFRFHTKRQFWSYCGLAVVTRGSSDWEIEGEELRRSRRPVSTRGLNRNHNRHLKDAFTGAVRDARPFRPHLDALVESGMRESMARLTVARKIAATTLAIWKKGETFVLSKAVIRSE

SEQ ID NO: 99223 - protein, 362 aa, unidentified
MQVPSLSLLKSEQFIRTAEPVFRMLDVSSFVLPKNIIMDKITNYYGIDISKDVFDVMDNLKVHHQFSNNKSGFTEFLKWLKPNGCCVMEATGVYHTQLADYLYEKNVFVSVVNPLVIKRFIQMNLRRIKTDKADADMICKYAQLNDLNAYKPEAVYIKESRVISESLSLLLKSRTMFKNRLHALIHKQSKHRNALIKPIKDTIKNLCKQIEVLEGELQKLIIENESDLYYNLQTIPGIGKSTAMYMIVISDGFRKFESAKQFICYAGLSPVEKRSGSSVRARSHISKQGNGKLRNLLFMCSFNACISNKSCKLMYERITAKGKSKKLALIAVANKLIKQSFAIARSGLVYDSEFVSVKPSIR

SEQ ID NO: 99224 - protein, 483 aa, unidentified
MKTARPPEEAKKTTEGALRVQWDEMNRKQRREMMRKIQSADLSLEVVHPHAAGIDIGNESHYVAVPPDRDNQPVRRFGCTTAELKAMADWLNQCGMCTVAMQSTGVYWIAVYDILEAAGLEVYLVNARDTKNLPGRKSDVQESQWLLKLHTYGLLRNSFRPSQEIRTLRTYGRQRNDLVQAAGRHIQRMQKTLTQMNIQLANVLSDGSGVTGQAIIQAILDGERDPHKLAELRDPRVQASEEQIAQYLEGNWQPDLLFVLQQEHEAYGFCQKQMAACDEQLKQYLQQREDRSQGAALPEEKRKGRLKKKKGNAPQFDLRAELFRMTGTDLTRIDAIDVVTATTLLSEAGWNMSKWETENHFVSWLRLCPDNRISGEKIMGKGRLPTNNRIHVALKMAASSLRTSNTYLGAQFRRLRTKLGSPVAIKAMAAKLARLVYRMLRYGMKYVDRGVESYEAQHRRLLIKHLRDNAAKLGFRLVEALET

SEQ ID NO: 99225 - protein, 322 aa, unidentified
MILSMGVDISKKKADITIYNDVVKKNYVITNSVSSIKRFLKKHSDVDRIVMEATGTYYLKFATIANELGFYVSVVNPYIIKKYGEYKFKRSKTDKIDAELIAKYGYENTPKKYKITDKLRLKLKSLLTTITGLKKQITQNTNRIEALSQFPNNETKYSIKALQKVIKAIKREKSNIEKEIQAIIKNNFKKTYELLDGIKGLGPGCNAAIIAYYGDFSDFDSAKKAVAFAGMDPIKHESGSSVRKKSKISKRGNKVLRALLYMGGMSAIQYNKQCIKLNKRLKDKGKIGKVRIMASAHKLLRLAYGVVTSGVKYDPDYLKKSA

SEQ ID NO: 99226 - protein, 346 aa, unidentified
MKKIFCGIDLHSNNMMAAFVDSEGKRLFHKKMDCNIHQLEDVLKPYRNELEKMAVESTFNWYWLVDGLQAKGYPVVLANPAAMEQYSGIKHADDKNDAYFLAEMLRLNILPTGYIYDCNLRPVRDLMRRRMLLVQQRTALLLSFKSLYTRMTGQEMNVNKVKEMEPEEAVKLYEHPANQLISKVQKKHIDALSESIQTIEKAVLADSRDLPLYKRLTTIPGIGKILGLTITMEVGEIKRFEDSGNFASYCRTVDSSRTSNDKKKGDNNGKCGNRYLAWAFVEAANFARRYDETCQKWFDRKKARTCQVVAVKALACKLAKAAWHMMSEETDFQAGRVFPECAGNKK

SEQ ID NO: 99227 - protein, 343 aa, unidentified
MQTITTIGLDIAKSVFQVHGVDAAGQVVIRRQLKRRHVLAFFQKLPPCLVGIEACASSHHWSRELQALGHTVRLMPPTYVKPYVKRQKNDMADAEAICEAVTRANMRFVPTKTPEQQSCLMLHRTRHLFIRQQTAVINSIRAHLAEFGIVAPVGRKGVTELLHVVADPSDKRVPEVARACLAALGTQLLSLKQQILEFDRMIMAWHRSNQTSKRLHYIPGVGPMLATALVASVADPRTFRSGRNFSAWIGLVPKQHSSGGKERLGSISKQGDRYLRSLFVAGALAVSRYAKIHGTGHRPWLAALLGRRPTKVAAIALANKIARMAWAMMAKGERYKQPAALAR

SEQ ID NO: 99228 - protein, 440 aa, unidentified
METYQRIKVGIDVGRSKVDFAILHPGGYPLEKHSSFSNSPDGIEQAKQLLIKTMEKHHFSGVDIAAEATGFYWLPLFMQLHQDADLARYAPRLTILNAAWVKWYKKGFPPDHKSDQIDPYYIADRLRTMVNPTWWYYDPHWLSLRFNTRLRFHLSQSLIREKNHYHLFLFLAHSAYSQKKTRPFTDTFSHINEVLLHSPGLLENLQDLDVDDLATQLHELSRHRLNDPMQSAKQLQQALQESFSPPKELEPAIQSALDTLITVIRHLKDQIKIVEKRIADLVENDYPEVAWLRSIPGIGPVFASGIAAEIGDLRRFSDRLRWDNKRNDYRRRSSREVEDAVAKFAGLWWPKNASGDFSAEETPLSKRGNAYLRYFILQAADRMRLFIPSYYDYYTKKFYQSTKHHHKRALVLTGRKAVGLIVGLLHHHEFYRPEEVSPRT

SEQ ID NO: 99229 - protein, 348 aa, unidentified
MIVIGIDPHKSTHTATAVDSTTNTDLGSIRINASFDDYAQLMTWSKQWPDRIWAVENASGLGHHLTQWLISRGEAVVDVPSTATARVRELSRGGRRKNDRIDAAAAACVAFSQGDFRPVAPEGHTDVLRILDERRTDLIKQNGRLVNQLHAVLRELFPGGMERDFETEDAATQLKQLRPETAADAMRQKIGLEIVGDLRRIRFQIDDLTTRIKTELAACGTQLPKIPGVGTVTAARILARTGNPTRFANEAAYASYTGTAPVEVASADKQRHRLSRSGDRSLNAAIHIVAVTQARTPSSPGYAYHQRKMAEGKTSREAMRCLKRQVAKRLWRTMCDDLEQRLAMPLSA

SEQ ID NO: 99230 - protein, 312 aa, unidentified
MAKRTTICAGIDTGKRKLDVALDGNSEQLQVENTAEGHKALLEWLGRRKVKRVGIEASGGYEQAVVAELRRMRFVVVVFQPAQVRAYAKYRGQRAKNDRIDAALIAACAAAVNKIHPAPDARLSPLAGQLTLIDQIGEDITRFKNRLESCRDARIQKLWKEDIVRLAKRERVEFKALVAAIREQHDLAARLDLIYSVGGAGLPTAVAILVRMPEIGQISREQAAALAGLAPYDDDSGEHIGARHIIGGRKRLREALYAAALAASFRWNPQLIALYKRLIAAGKGHKRGANRLRQEAARLHQRRSGPRHPLAS

SEQ ID NO: 99231 - protein, 413 aa, unidentified
MSQKAYLGIDLAKGNSKVAAIDEDGDEIVSSFSISNSREGVEKLMSKLYSYKKNNIVCAMEVSSNYWENMYSYLNQKDIVCILLNPYQVKKYRQALGSKIKTDSIDAAAIASLVRAKKYDSLCVSDEAVLELRELVRIAHSFGRRVKDLKRSVLALLYLTFPEYTKIISYPFSKVSMQILSKYPTSFHMAKEATVGRLVKVFRRYQGCNFGADKAKELIAVAKDSFYSGKAARSRGMSICMQIEEIASLSLKIQEIESEIKSILNPDDPKDGLHQDFDILNSIKGVGIGTIAAFIAAVGDVNRFSSSDKLVSFIGFYPKIFESGKYKKKNPTIVKAGPKDLRYMLYMSSVAAVKHNTHLKKYYYDMVSAGMPVKKALIKVAVKITRMMYSMLKHKQYYDPCRVFLQQAPAVAA

SEQ ID NO: 99232 - protein, 346 aa, unidentified
MEELKVIGMDLAKNVFQVHGMDARGHKLRMAKLKRVQVLPYFANLAPVLVGMEACGGAHDWARRIMALGHRVKLMAPQHVKAYVQGNKTDARDAAAIAEATGRESVPAVAVRSVQSQQMQALHRTRELFMRQRIANTNQIRGLLAEFGVVMPQGMKGLRTEVAQWQEQASPELAQLKAIIELLMESLRQTEERISQIEGRIKQLHREDSASRLLESIPGVGVLTATAVVAAFGRCESFETSRKFASCLGVTPREHSSGGKQRLLGISKRGNQYVRKLLIHGARAVLKARMNKPAHAEDWEIKLAKRRGHNIAAVALAAKNARRMWAMLRTGEVFRVDYAQAKGACT

SEQ ID NO: 99233 - protein, 346 aa, unidentified
MIEILKYSVGIDVSSEDLVAGFGLISRDLLSKVGKPRKFTNTTKGFKSLDRWIQKQQKAKSVKLGVVMEATGVYHENIAHFLYGKGYEIYVVLPNKAKRYLQSIGYRSKNDPIDSRGLTQMGIDQQHLEKWHPPSPIMIHLRGLTRHRQRIQQQVTVVNNQFHAIESGFFDDKSVKKSLRATIRFHKKQIKSLELDIEETLKANPLLAAKIERIVKSIKGIGTLTLVTLIAETNGFEHFSSIQQITKYAGYDVIENQSGKSKGKERISKKGNSRIRRILHMPALNLVSFNTGSFPSIYERIYQSSGIKMKAYVAIQRKLLCLLFTLWKKDEIFDPNFISKLSKTSD

SEQ ID NO: 99234 - protein, 350 aa, unidentified
MIILGADYHPGFQQIAFVDTDTGEFQERRLQHREEAEKFYRDLAAQAMQVRVGMEASGQARWFERLLSELHFELWIGDAADIRTRRVRKQKTDRQDAQLILQLLLEDRFPKIWVPSWENRDLRQLLWHRHRMVQARTRIMNQLQAVALNEGLRCKKRLWRKHGREQLEAFRLAPWASRRRRDLLELLDRLNPTIAELSQAIEQEAKKFPEARCLMTHPGVGPLTALAFVLIIGKADRFQCGKQIASYLGLVPLEDSSGNRRRLGHITKQGSSMLRFLMVEAAQVTVRSLPEWRSKYFHLMMRRGRKIAKVAMARRLAIALYWMWRKGWDYERVKKFGSHAGQLEPGDGVQ

SEQ ID NO: 99235 - protein, 448 aa, unidentified
MSKIKTKNDTVKRISQLTVINPTAAGVDVSDTEMMVAYPINSVQLEVRVFGCYTIDLHSIAKTLKANGITTVAMESTGVYWIPLFLLLQEYGFEVCLVNAKHVKNVTGRKDDESDAEWIQKLHSCGLLRASFQPDSQTRTLRSIVRHRKSLESTCSVYINRIQKALELMNIKVHTIISDIDGKTDLFIIESILAGERNPEKLADLRDKRIKASREEIIKSLQGHYTAEHLFELRQCYQLYRTHRQMIEECDREIEKQLIEQIASKNGGVVTEIAEVKRKASKKHKLPFNATSYLKEIFGVDITEVFGISELSALAILSEVGTDMSKWKTEHHFTSWLGLAPNTKISGGKIISSRIMKKKHHAGQAFRMAANGLHNSKSPIGDYYRRLKAKAGAGKAVVATARKLAIIFYKMVACQQNFNPKMLIDFQEKYKQKKINQLKRKLQLLEAA

SEQ ID NO: 99236 - protein, 416 aa, unidentified
MNAAGIDVSSRKSTVAVLRPFGEVVKLPFDVRHSAEDLAALAAQLKSIEGETRVVMEHTGRYYECVAKVLHEAGLYVSAVNPLLIKEYGNNSLRKVKTDKADAMKIAKYALDNWTELRDYTPMDTIRYDLKTLNRQFQLASRQKTATANNLIALQEQSFPGVRKLFDSPVRSDGTQKWVDFTHDFWHVDCVRSGSQNAFAERYRKWCKRNRYQFSMEKAAEVYALAKSAVVLVQKTSVTKTLVQEAANQLTAISRSVETYRSEMNKLASQLPEYPVVMEMYGVGESLGPQLMAEIGDARRFERKQSLVAFAGIDPAPSESGDYCSRSNRTTKRGSPYLRRTLFNIMKVHLQRAPADEPVFQFLNKKRAEGKPYYVYMTAAGNKFLRRYYGKVMAYFSTLEGLPPVDMDSTGLHHTE

SEQ ID NO: 99237 - protein, 394 aa, unidentified
MIFVGIDVASDKHDCCILGADGNLLSIFTFTNDKHGFDCFITTVATHCGKQGFKNVKVGLESTGHYSINLTNYLLAKRLSVKIFNPLQVNLLRKAQSLRKTKTDKSDARFLARLLFSDDSKPYSQPLYHISELKTLTRNRYRLVQMRSKLKLSVSRLITILFPELPDAVWSINQKSCYALFLEFPTAKAISEAHLTRLTNILSANSKGKYGREKALQIRELAAGSIGLDSRATGFELRQAIRIIQGLQAEIDELDAEIKSVMLEIDSPILTIPGIGYTLGAIILSEIGSIENFDNPAKLLKFAGLEPSIYESGKYKASDTPMVKRGSKYLRWAFLQAARLVAYRDKTFALYLAKKRSEGKHFLVAMSHVAKKLVRVVFHMLKSTEPFAPLPATA

SEQ ID NO: 99238 - protein, 363 aa, unidentified
MPTEAVTRLYAGLDLHKSNVFCGLIDQEGKPIYRRRLPAELPVILQALQPYRSQLTAVAVESTFNWYWLVDGLQAADYPVQLANPAAMQKYSGMKQTDDETDALWLAEMLRLGILPEGYIYPKAERPVRDMLRRRMLIVRQATQTLLSLQSMVTRHSGQSVGAAKLQGWTLSEVRATFVDPYSQQTATAMLELLGEQRRIQHRLEKQVLAVAKPTGPFQRLVSLPGIGNILGLTIALETGPITRFASAGDYASYCRAVNSRCESDGKKKGENNRKNGNKYLGWAYVEAAHFAQRYSPRAQAWFAGKTARAGRVVAVKALACKLAKAAYYVLRDAVEFDENKLFGGVEGGERKPVLGLVHNQQM

SEQ ID NO: 99239 - protein, 342 aa, unidentified
MDIKVLGIDLGKTVCSLAGLDEAGAIVFRKRLQRHRLLDFLDKLPPCIVAMEACGGAHHIGRFCLQNGHEPRLMSPLYVRPYVKVHKNDDRDAEAIAEAATRPTMAFVAIKTEEQLDLQALHRARERLVSDRTRLINQGRGFLMERGIRIGTGRHVFQKELIRLTAEGTDDLSRRMLTLLSDMASELSVINDRISAIDAEIRVLAKTDADMQRLMEIPGVGPTIATALVAAVGTGSSFGKGRDLAAWLGLVPRQITTGGKAKLIGISKHGNRYLRKLFIHGARTVLHLVRDRTSPIAAWADRLKERAHVNVAAVAMANKMARIAWAVLTKRERYQPNALSGL

SEQ ID NO: 99240 - protein, 407 aa, unidentified
MQKRESYLYVGMDLHKKTHTAVLVNCWNEKLETLVIENKPAEFEKLAKWVNKKALSLGLTPVYGLENAYGHGRSLAAFLIEKGCVVKDVNPALAYDRRRSAPTMKKNDEYDAYCVAMVLIDRLHTLPDAKPADNYWTLSQLVNRRDTIVNDGIRLKNALHEQVSVAYPSYRKFFSEIDRKSALYFWRTYPSPGCLMGKTAADLTTELKVVAPNFSKSKAALILDCVTNDGDTAREYQASRDFITQSLIRDLERQAIELSQIDAEIEKMLETFDYNLTTLPGVGSAIAGKLISEIGDIRRFPNADKLASFAGIAPKRFSSAGKGRDESNKQGNRALHGLFYFLAVSMVCVTRGGKPNNPVFYEYFCRKISEGKTKSQALVCIMRRLVNIVYGMMKNKTAYVAPPMGEH

SEQ ID NO: 99241 - protein, 373 aa, unidentified
MPRYSTAFGMDVHLRSTTVCALDAETGEAVTRRFRGNPWGEVAEWMSGFPGPSLAAYESGYLGFAPQRELSALGVDCVVAAVSRVPRSAADLSSKNDRNDAARMAKAILSHDVTPVWVPSPEIEGLRDLAGAHDAATARLAAAKQRLLAFLARRGYAYGGTTPAGNPRRYRTYDFLRWLDKVRPADDGGIRALAALRNEVEAAAETRDDLLAEYRAAVAAGPLSAEVEALQSIKGCGFALAAAFASEVGDFSRFRSGRQVTAYFGLAPKQRSSADSVRLGGISGAGNALVRRLAVEGSWSYVQASHQPKLMPKGSGVPLEVRMHGRKGSERLLRRRGEMLARGMPQAKANAATAAELVRWLWALGAMCREATE

SEQ ID NO: 99242 - protein, 372 aa, unidentified
MIHKNNSTTDNSMYMAFDLSNKIWKLMLSNGVNTRGISIPARDLQRLEKEIDKARKHFALDDGAQIHSCYEAGRDGFWLHRYLKEKGINNLVVDSSSIEVNRRSRRAKTDRIDASKLMTMLIRYQNGEQKLWSVLHVPSVEQEDDRRINREIERLKKERTSHTNRMRSLLILHGIDLKVNRDFLNSLVHVKQYNGKALSTHLLAEIHREYERFELINKQLKQLLVQKTQQLEKANVQTRQIKQLMMLKGIGPISSWNLVYEFFGWRNFKNVKQVGAASGLAPTPHASGDSVVEQGISKAGNRRIRTLMVELSWYWLRYQPNSRLSVWFNQRFGPNGKRMRRVGIVALARKLLVALWKFLEKGQVPEGAMLKL

SEQ ID NO: 99243 - protein, 337 aa, unidentified
MEVWSGIDVSKAFFDASWVGPGTGIEDFQKIPHARFERSRAGVRKYLRWLKQRAASTAAVRVVMEATGRYSLELQIWLVDKQPSLAPAIVNPKQAKHFHKSLGLRNKTDSVDSRALGLMGKDRRPQPYEPLPAEYQKLREFMRQRRDLIQIQVGERQRLGELPKDHREVRSLVQSHLRHLEKLLQRIDRQTHQLLKASPQLAQDFALLDTIPGVGRIIALTVMGELGDLRRFNRSRQVSAMAGISPSNYQSGKSPGRSRLNKNGHAEARSVLYMGALTATRKSSDNHLARTYRHLINDQGKCKQQALVAVARKTLVIMRALLITQQPYIDHFATAAS

SEQ ID NO: 99244 - protein, 384 aa, unidentified
MGYSPKGLQSHIQEERVMKNSINWIGIDDHADKLTIAHYIDLGKEPAKEWEVIPDEKGLRTVMRWLGSLEGEVRCVYEAGPCGYELYRLVTRKGFGCEVVAPSLTPRKPGDRVKTNPRDARKLATLHRAGELTAIAVPDRKRESVRDLMRMRESVRKSVLSLHHQLSKFLLRHGYRYRDGRAWTQKHWRWIRALQMDEAYEQIVLVELIIAVEQRVAQLVRFDQLVEETSKEPEYAPMAKALRVLRGIDTLSAMGILAELGDLRRFHSAPQLMAALGLVPSEYSTSDKTRRFAITKTGNAHVRHLVIEAAWHYQRRALPGPKINQRRKGQPKELLEIAQRCDLRLHTKFRRMTSRGKRSTVAAVAVGRELAGFIWAIGQLALLY

SEQ ID NO: 99245 - protein, 345 aa, unidentified
MLHVGMDLSRHRLDVRVLEEGGATVAELAVAPTGVELRRLAARFVAEAPVRAVIESMNGARFVHDTLELAGWEVEIADAQKVKGLAPLACKTDRIDAWVLAELSRRDLVPAIWLPDPSVRAHRERARFRLHLVHHRVGLKNRIHATLIAFGHACPTSDLFGVSGRQRLAELAFPEPWASDITACLGLIDHLNTQIAGIEADLRREGADHPYVPLLLTVPGISWILAYTIAAELGDITRFESPKKLCGYSGLCPRVYQSGDTDRRGKLTKQGPKYLRWALVEAAVHAARHPVYVDHYQRTKLRLGRQRGAKVARVEIARKLTEAIWHMLTKGEPFAPAGPTKILAA

SEQ ID NO: 99246 - protein, 387 aa, unidentified
MFGLRVNGTISKHQREFGGFKRDLKAMAAWLQELGVELVVMESTGIYWKSAHAHIERVGIPALVVNAHFIKYVPGRKTDMGDSEWLAVLARFGLVRGSFIPPKDLRELRILSRYRRKVSQMLASETNRMHKVLEDGGIKLGAVVSDINGVSAREMVAGLIEGKPLGEMLAMARGSLKNKRDDLAASLDGDLSPRHLFVLRQLHEHVTSLERQLAQMDAELFQAMTPYHWAWVLLQTIPGIDAIASALILIEIGDDMSRFGDADRLASWAALCLGNNASAGKRKSGKTRKGNAIVRYLLCECANAARMTKSSLASKYRNLKVRKSHNKCIVAIAHKMIRIIYFMLSRREPYRDPGVNYEAMSAQKNAPRWIKALKNIGKLPEATTASA

SEQ ID NO: 99247 - protein, 416 aa, unidentified
MEQKVCGIDVHRDIHIATILDQTGHKQTRTFTNNITEMQELKDWLKTNNTQDIAMESTGSYWTTLFIILEDAGLKPVLANAHQVKAIPGRKTDQKDSEWLAYLLRSGLIRPSYVPKKPIRELRELARTRVRYVESRTQYKNRCQKLLAKNNMRLSSVLSDVFGASGREILDGLKAGKSVENILNTTQNKHLQKKKQEIIDAAKGSLSETDIFLLEEMGHTIDTLTIQIHNIEERMAELVDNDALEIICSVPGVGRLSGATILAELGDVSRFGNGGQVASWCGFAPSVSQSAGVTKIGGITKRGSRWLRRVMVEVAHVAVWMDCRFKDMFWRIASRKCRKVAYVAVARKLLTVIWHLLSNAEVYVEEGFSKSATALARSTMVVKNGHSCSGGDKSGLSLEDMVGVLSRAVKTVSDVG

SEQ ID NO: 99248 - protein, 347 aa, unidentified
MRDYTGKTVFIGIDVHKKTYAVTAVCENQVVKKDRLCAQPELLINYCKKYFLGADIESAYETGFCGFFLHRRLLENGIRNRVVHAAGIEIASGDKVKTDKRDSMKLATQLSVGRLKGINVPTKEREDYRALTRMRETFIRHRRRCGCQLKAVLFQQGLIPFDHTSAVSAKWIKSLQEMSMTKEIRYVVEEYAHLWLHFTCRIKKIEEEMANQAQKDERIESVYRSVPGVGPVVARALANELGDTLQFNNERRLFSFVGMTPSEHSSGEHVRQGHISRQGSAFVRKLLVQVAWKAIKLDPSLREVFERISLRAGKKRAIIGVARRIIGRIRACFKNGTLYCIGEKQAV

SEQ ID NO: 99249 - protein, 358 aa, unidentified
MNRNTGMSAGQIIGTMNGQQVVGLDIAKHVFQLHTVNMGTGEIVNVQIKRAKVLEHFANRQSCLIAIEACGGAHHWARELTAQGHRVRLLHAKAVRPFVSGNKTDATDARAIWLAVQQPGVKFVGIKTAAQQATLTLHRQRELMMKMRNMQTNALRGLLYEFGATFAKGRKALFKDVEQALEELSAQLPQMVRDSLREQVARIKVMSEDILAIEKRLGLQLKVDPQMQRIAQIPGVGLLTATAAIATMGEASAFKSGREFCAWLGLVPTQTGSGGKVRLGGISKRGDTYLRTLLIHGARSVLTHAKEPGPWLEQIKQRRPANVVVVAQAAKMARTIWAVTAKNQDYQRGFQSVRPQAA

SEQ ID NO: 99250 - protein, 335 aa, unidentified
MTDATSSVPPSQGSVLHIGVDVGSQHLDAAIDGEARVVRLANADAAINRWLRKLPPGSRLGMESTGRYHQRLAQLAHAAGMVVYVLDPRAVHHYARGMGQRGKTDRLDAQVLARFIEREHAGLRAWQPPSAQAELLKELIRQRASLTKAKAALHQGQQPAAIAMVDLAPLFKQFDASLRALDRQILAAAHALPEGQVGLDLIMSVPGIGLLTGASLLRVFQRLATRGSDAVIAFLGMDPRPAESGKHVGVRKLSKHGDAYARKLLFNAAMSAVRTSGVWRTLYERERAKGLPSTAALVIVGRKLVRVAFALFKSKATYDESKIASVAGLALSGAH

SEQ ID NO: 99251 - protein, 442 aa, unidentified
MQREKGSVKKALQDLKMEIRSSQNTLIIAVDIGKIRNCACFVSSSGKVLRRRFFFTNTIDGFNQLMRQSKFYQRKKELPHTLFGMEPSGYYWIHLYEHLINCGKRTVTVSPLAVNRNRETINVSKDKSDPKDAYNIADLMKQGKFYLPIYRDKKIRELKRFTKIYYRLIAQRASLRCRLRGAVGYIFPELEHYFTDILAKSMIIILKKCPFPSQIKKMGKSRFISLLGKKNPRLSRKRTDEIYELARLSVGITGEEKSAFFEIKFLLNELEALNRNLAEVNARVQNIVSDRDDYRLLLTIHGVGPVTASSAIAEIGDITNFSSGKQLIKLSGLDLYGSESGISIHSLRHISKRGRRTLRTVLYQAAISCIRCNAHLKACYLKLLANQPNKKKVKPKAIVAIACKLLRIIYRMLTEKKPFDSTYDQRLREKASLKMAKSSLLV

SEQ ID NO: 99252 - protein, 371 aa, unidentified
MSSATAHRPSFNPERETESAWVPCETVNKLGSPLHRCNEARTIAGAAHASPYPRARVRCSGESTMAECVGIDVAKHTLEWSLGAEGKIQHVRNEPRPIAGLVRRMVTLDPERIVVESTGGYERKLVAKLAEAGLPVVVVNPRRVRSFGEGMGFLAKTDAIDARLLALFGEKAQPPIRPILQGTDRLLADLVARRRQLISMTVAEKNRRDIAAPAVRRTIDPVLRALAKLVRELERRIDTTLREDLERAELLALLQTVPGVGPGVARTLLIDLPELGHLGRREIASLVGVAPFARDSGTFRGARRIRGGRASVRTALYLAAMSASRFNPALAEIYQRLRQAGKPPKLAFIAVARKLLVALNAIARERTAWQA

SEQ ID NO: 99253 - protein, 374 aa, unidentified
MSLAVVWLERGESTSTRIRLARCGSRRRQKGNVMMMIGIDPHKGSHTAVVVDRDEMVVDEIRVRASADQMVELREWASGYDERCWAVESARGLGYLVAQQLVAAGERVIDVPAMMASRVRLLGSGKSQKTDPNDARSVAIAALRHPGLTLVGRDDHARVLGLLAKRHRDVARLKNKVACRLHALLMELAPGGLASEMTVNKAISLLEQVDVTDEVTRQRVVIATELIDDMGRLEAQMRASKKRIRVAVVASGTTLCDIRGIGPIGAAIILGSVGDITRFPTAAHFASYNATAPIEASSGDKRRHRLNPRGNRKLNHVLHIAAVSQLRYPSEGRGYYQKKIAEGKTTKEAIRALKRRISDVVYRRLLADARRSIN

SEQ ID NO: 99254 - protein, 409 aa, unidentified
MDIVIARCGGLDVHKTTVAACVRIEGPRGQITQQVRTFGTTTMQLQALVVWLQEHGVTDVAMEATGVFWKPVWHLLEPQFHLLLVNPRDIRRVPGRKTDVSDAAWIAQLLQCGLLRSSFVPPREIRELRDLTRARATLEQQTTAVANRIHKLLEDANIKLGSVATDILGMSGRAMLRALADGETDPVRLADLAQRRLRAKIPALQEALTGAMTPHHRFLLRRLLTQLTFLEDEIASFNRQIAEATAPFATLLARLDTIPGFARRGTENLLAEVGPDMAPFATAPHLVSWAAICPGHHESAGRSAGGTIRKGNRWLRRTLGQAAWSARNKKNCYPAAQFRHLAARRGKKRAIVAVAHSLLVAAFYIIRDGVAYSDLGAAHFDRLAPDKLTRMLVKRLERLGHKVTLEAAA

SEQ ID NO: 99255 - protein, 400 aa, unidentified
MGQQLWAGVDAGKSDHYCVVIDADGQRLLSQRVTNDEAVLVELIDEVMALADGGEVTWAIDLNGGGAALLITLLFGRDQRLLYIPGRTVYHASGGYRGDGKTDAKDAVVIADQARMRRDLQPLRVGDDIAVELRILTGRRTDLVADRTRAINRLRAQLLEYFPALERAFDYSTSKAALILLSGYQTPDGLRRSGTTRLAAWLRKRKARNADAVAATALEAAHAQHTMVPGQDLGATMVARLAEEVMALDTEIGDTDAMIEERFRRHRHAEIILSLPGFGVTLGAEFLAATGGDMSLFDSADRLAGVSGLAPVPRDSGRISGNLKRPRRYDRRLLRACYLSAQIAIRTDFASRTYYDRKRAEGKTHTQAVLALARRRLNVLWAMLRDHRTYQPTAPNAAAA

SEQ ID NO: 99256 - protein, 335 aa, unidentified
MIVIGSDPHKRNHCFAAADAATGELRSSEAVAASGAGFERALGWGRSLGQQRVWAIEDCRHVSGRLERFLVARGERVVRVAPKLMAGQRRSSRQAGKSDPIDALAVARAALREGVASLPAAYLDERALEIKLLLDHREDLVRERTQVQGRLRWHLHDLWGEDGVPAGGLDRAKWLDRLSRRLARGEQTVRARICREQLTRLRALARRATELEREIGRLVSAHAPELLQLPGCGALTAAKLVAETAGAQRFATDARFARHAGIAPIPASSGRNQRVRLHRGGNRQLNCAIHASPSPRGASTHPRSTTSPANKPKARAASKPCAASNATSPEPSGGP

SEQ ID NO: 99257 - protein, 338 aa, unidentified
MERQYVAIDLHKNRSLIVRDNAAGEELAVVRIDNDPVALSAVLAEAGPEPEVAIEAAYGWYWAVDILQDAGARVHLVHPAGLNWEERRVKNDYRDCRELLDRMHLGKLPEAWISPHDVRELRELVRYRAKLVAQRTSAKAQVKAVLAKHGLHPPVADLWGPGGTRYLDELHLEDAYTIKIESLRDLVELFDREVAMVEQETRRRLAEHDGYQAIQAISGVGPILAAIFVAEIGDIGRFASPQHLCSWAGLTPKHRESDAKVWRGRITKKGSTLVRWAAIEAISKIRGGPKIQADYHRIAERRGKNIARTAAGRKLLTLVYYGLRDGEIRCIERVDEAG

SEQ ID NO: 99258 - protein, 328 aa, unidentified
MMNTMIGIDVSKAKIDCAWLRDLETGKVKTKVFKNNPEGFQLLIQWVENNTQHPIAASCFVLEATGIYHEALAYALHDAGAKVCVVNPAYIHDYTKSLGVRSKTDKKDSVIIARFGVTHHPAPWQPEAPEIRQLKALITRHEAIEKDLQRENNRLEKAEITQVSQEVISSINTVINELTKELKRIKQLIDDHIDQHPTLKQDSILLRSIPGVGPVISQRMVALIRSRAFVSARQCSAFIGLNPIIRESGSSVKGRSRLSKMGDPRIRAKLYMAAIVAIQYNPDIKRQYERLLKNGKAKMVALGAAMRKLVQICFGVLKHQIPYQPQVE

SEQ ID NO: 99259 - protein, 402 aa, unidentified
MNAVGIDVSKGKSMVAIMRPFGEIVSTPFEIKHTTSDINSLVELINSVEGESRIVMEHTGRYYEVLAHQLSAANLFVSAINPKLIKDFDNDSLRKVKSDKADAVKIARYALDKWQNLKQYSVMDELRNQLKTMNRQFSFYMKHKTAMKNNLIGILDQTYPGVNTCFDSHARSDGSQKWVDFVSTYWHVDCVRKMSINAFIDHYQNWCKRKKYNFSRSKAEEIYGKAKELVPVLPKDDITKLIIKQAVDQLNSASATVESLRTLMNETASQLPEYPVVMTMKGVGISLGPQLMAEIGDVSRFTHKGAITAFAGVDPGVNESGSYEQKSVPTTKRGSSDLRKTLFQVMDVLIKTHPQDDPVYQFIDKKRAQGKPYYVYMTAGANKFLRIYYGRVKEYLSSLPES

SEQ ID NO: 99260 - protein, 353 aa, unidentified
MKKLFIGIDFAKEKFDAAIIEACGLKEFGNREYGTFTNDKKGYRQFFKWVKTNADKSVENEWLFCGEDTGSCSLGLSKWLYGKGLDIWIENAYSIKHSSGIQRVKSDKADSSMIAEYAWRHQDKAVLFEPLSESLSQLREVFLYRHKLVQQHIAMDVRKQDKEAAEPSKAISFIKRKSKHLMSEIDNAIKECDLMIDRIIESDAELKENYAIITSIKGVARQNGACLLIFTNNFRRFDLDARKIACYYGVAPFGKDSGTSIHSPAKTSHFANKLIKSLLGQAAHCAKKFNPEIREYYNRLIGRGKKPQVALNNVKNKLIRIIVALVRKKVYYDPKTYIFYNAKFTDVKKMLNS

SEQ ID NO: 99261 - protein, 338 aa, unidentified
MVTIGVDLHKHVFQIAVLVPGGEIAQHRLENDSAKMVEFFTKMPAPANVAIEACATWWWLVDLLEQLGHHPVLSHPKQTKAIAAARLKNDRVDAERLALLLRGDLLPTVWIPPAALREARELLRHRISLVQLRTRVKNQVQGLVARRNLRPTSSKSWMTIRGQHELNALPLGPSPSAIRENCLTLLQLLNEQIRRLDENLLRCWGSDPRVRRLMTIPGIGPFVAILLSLEIGDIHRFPSAKHLASYTGLTPRVRASGDRIRSGHIGKEGNRLVRWALVLAATQASRRPGPLRNWYRARQERKGKHVARVALARRLAEIVYHIWKTETDYWSLLRRSAV

SEQ ID NO: 99262 - protein, 322 aa, unidentified
MAMLSFGGIDVSKDRLDITVLPDEQCSSVSNDAAGWAELIEQLRGSSITAIGVEASGGYERGVVRALLAAGMSVRQINPFKLRQFAKASGILAKNDRLDARMIASFVAIMPTRPAQQQAPMIELLAAMLTVRRQLSDHKVAAENVSRLLEGAMLQRLSRRRIAGLTADIDLLDQRLVEIVTADPALAHRFRLLTSMPGVGAVLACTLIALLPELGQMSRKQVAALVGLAPYDFDSGKLKGRRCIWGGRARVRHVLYMAAMSASNWNPGLKAFHDRLEVAGKKPKVTIVAVMRKMITTLNAMVRDDVVWADRLSSRHSVPTAR

SEQ ID NO: 99263 - protein, 406 aa, unidentified
MDVVYSHVCGLDVHKKNVVACVITPEGKEIRTFSTMTDDLIALKEFIKNKGCTVVAMESTGSYWKPIYNLLELENINILLVNAKHIKNVPGRKTDVKDAEWIANLLRHGLLKGSFVPNREQRELRDLVRYRHSLIEERSRELNRIQKVLEGANIKLSSVVSDINGMSSRSILEAIINGEDDPENLADLAQGKLKNKKEDLKRALKGLINDHLRMMLEIQLRHIDYLDEEIKRLDEEIRKRMLPFEEDLALLDTIPGVGRRTGEQIVAEIGTNMDQFPSAAHLCSWAGLCPGQNESAGKQKSARTRKGNKKLRSALIEAARAASRAKDTYLSSQYHRIAARRGSNRAAVAVAHSILTIVYHILKRKQPYIELGPNYYEEKRRSMIIRQSLKKLESLGLKVTVETVAS

SEQ ID NO: 99264 - protein, 347 aa, unidentified
MAIVGGFDIHRRQVTFDYLDTVTGQVRRGRISPACRETLRHWLERFAGREDVTFAVEGCTGWQFVVEELQRAGITALLAEPAETAHLRGPKRHAKTDKTDSRHLRMLVADGRVPLSWIPPRQVCELRALLQLYRDLAEEHTAWTQRIHATLFHQGVPSLAGRLGDPQVRARLADGAGMGLSPAGAQAVAVALRRMDDLEAELGPVHARITAFARRQAGCKTLARELFGVGPLVAAIVWAFLGDARRFSSSAQAVRHTGLDVTVRSSDGKGPPGYLSHQGPPILRWALFEAGHQSSRTASPDHRYYADVAGRIDANRAALSVARKLARRSHHILRRLGDQAYAPVPDW

SEQ ID NO: 99265 - protein, 352 aa, unidentified
MMIIGCDFHPRFQQIAYGDRETGEYGEQRLLHTAEAEMFYRSLAGRRVRVGVEATGNFRWFRRLLSELGFELVLGDAAAIRAAQPRKQKTDKRDARHILLLLWEDRFPAVWQPTADNERLRQLLLHRSSLVRMRTRVENQLDSVAKNEGLVGSRRWTAKRRREVEQLPLEGWHAARRRDLLALLDGLQERIRPLELAVRGAAEEDAQARLLMTHPGVGPVVSLAYVLTIGDWQRFPRGKQVASYLGLIPGESSSADKRRLGHISKQGNPMLRWLLVQAAAIAQRYDARWHRQYVRLSMEKHHGVAKLAIAHKLAVRLYWMLRSGQAYRQIVERGSHAGQSACPDGCGVTPRT

SEQ ID NO: 99266 - protein, 408 aa, unidentified
MATVEFPQIIERGAGLDVHKDTVVATIRGTGLIEETRTFGTFTCDLERLIDWLKAAGVTHVAMESTGVYWKPVYYVLEIHFDIILVNARHIKNVPGHKTDKKDSEWIAQLLLSGLLKRSFVPTAQTRQLRALYRHRKKLINQRSREKNRLQNVLEDANIKLGSVVSDVFSKTGQAIITHLIKGVTDPEALSNLAKGSLVRKKLDLQKALHGRFTNHHRFMVELIMDTIESINKFIQRIELQIAQCSQSIQNDICLLQTIPGISQQSAIGIVSEIGTDMSVFPSSKHLASWAGVCPGTHESAGKKKSSRVPEGNNYLKTTLIEASWASTHTLNTHFAFKYNKLSLRRGRKKAAMAIGHDILVASYHILRDKVPYREPKLKPEILFERKKAEMERLEKRLQKLKTLASNI

SEQ ID NO: 99267 - protein, 345 aa, unidentified
MHNIITGVDLAKEEIQVCVCKRNKVQSNQAMTPTEFGSWLASSKPMIIVFEACSTSNYWKQKALEYGHDARLISAKLVASVRQNQKTDKNDALAVAQASQLTDVSFINGKSKEQQELQTLVRLRELAIKHKVAMQQQIKSLLLEFNIRVSSSQGGLNGVVEDVLEDAENGFSMVFRQALNTSWEQLQRGVESIKLYDLYLEKAANEHETCKSLQALEGVGPLNAVNLYMVLGCGEMGQFEKGRDASACIGLTPIQHSSGGKVKLGSVGKYVKNNMLRSCLVSGAMSAVNQAMRRPAKTKKEMWIQQMVERRGKRCTAVALANKTVRTAFAMLANGTEYKAELLAA

SEQ ID NO: 99268 - protein, 355 aa, unidentified
MDKSKYIGMDVHKETISIAVLDSSGKLVMESVIETKGITIVQFIRGLRGELRVTLEEGTWAAWLYDLLKPYVHEVLVCDPRKNALLKAGNKNDQIDARKLAELLYLDRLTAVYHGEHGVRALKELSRSYVTISGDASRVMTRLKAVYRSWAIPCAGKQVYAPRYRAEWLGKIREPGVRRRAEFYYQQLDELRALRQQVRRELLAESAKHQASKLLCQIPSIGPIRAAQLIAILQTPNRFRTKRQLWAYGGLAIQTHSSADHRYVDGQLRASKRPVSLRGLNRNHNHELKNIFKGAAIIAATKAGPFQEFYAALVAKGIRPEMARLTLARKIAAITLIIWKKGVSFDAQHLKPQTA

SEQ ID NO: 99269 - protein, 342 aa, unidentified
MLLVGIDWAERHHDVCLTAADGRVLAAERIVDGVAGLARLHELIASWAEEPAQVVVGVEAAGHYHQTLAAHLADRDDLLLRLVNPAAVAAVRKTQLNRRRKTDWLDAAAICDLLVHGEGSRLLLGDDAATALRPLWSGRKDLVDARARLRLQVLALVDCLWPGLTAHDTALGVRPVLRNLFTTKAGRILLGLLAQGWSPERIGTHDMARLKALFARHGCQLKVTVAARILARAHESLPPHPAATAGKPALLAALLATLETLDRQVTELEATMAGLLPHTEGAKLTQINGISTVVASGFVAFVGSARRWGDWSKVWRGAGLDPARCQSGPTDVNFSISREGSA

SEQ ID NO: 99270 - protein, 355 aa, unidentified
MDSTKYIGMDVHKETISIAVLNSSGKLVMETIIETKASTVLEFIQGLRGSLHVTFEEGTWAAWLYDLLKPHVTEVLVCDPRKNALLKTGNKSDRIDARKLAELLYLNKLKPVYHGEHGVRTLKELSRSYLTISGDLARVMTRLKALYRSWAIPCAGKQVYAPRYRSQWLGKISEAGVRRRAELYYQQLDALRALRQQVRRELLAESGKHKASKLLCQIPSIGPIRAALLIAILQTPDRFRTKRQLWAYGGLAIETHSSADHRYVEGQLRPSKRPVSLRGLNRNHNHELKNIFKGAAIIAATKAGPFQEFYAALVAKGIRPEMARLTLARKIAAITLTVWKKGVCFDAQHLKPQTA

SEQ ID NO: 99271 - protein, 438 aa, unidentified
MEEAGDEPLFCERAAGIDIGKQVVSVTIRVPSDTRRGGRQQETREFGTTRRQLLEMADWLRCWQVERAGMEATSDYWKPVYFLLEREGFDCLLYQASQVKALPGRPKTDRLDSAWLARITEQGSLAGSFVPPEDIRRLRTHTRYRRRLTQARTAEKDRCEKLLEDAHLKLSSVISDIHGVSGRDMLRAIIAGERNPEALAQKARTRMRRKIAQLREALDCSFFTPDHAFVLQMMLDNIDQLTAQIAVLDERIAILCEPYERQVAQLDDIPGFGVRTAQDLIGEIGVDMTAFPTAGHLCSWARLAPRVRESAGRRKGKNATGRGNPYIGGTLGEAAAGAGRTQTFLGAKYRRLCTRMPKKKAQGAIMRDQLVITHALLSDPEAGYRDLGTGYYEQRERTRRRASSHVRSLERLGYKVTIEPLAPDADPETGELITRTAV

SEQ ID NO: 99272 - protein, 343 aa, unidentified
MQTVSTIGLDIAKSVFQVHGVDANGLVVVRRQLKRRYVLAFFEKLAPCLVGIEACASSHYWSRQLQALGHNVRLMPPAYVKPYVKRQKNDMADAEAICEAVTRANMRFVPTKTPEQQSGLVLHRTRHLFIRQQTSLINAIRGHLAEFGVTAPVGRKGIEELLRVIADPSDKRVPDVVRACLAALGSQLLSLKKQILDFDRMIMAWHRSNQTSQRLNCIPGVGPLLATALVASVADPKVFRSGRNFSAWIGLVPKQHSSGGRARLGSISKQEDRYLRGLFVAGALAVIRYAKLHGTKYRPWVAALLARRPTKVAAIALANKLARMAWAMMARGERYNYPAALRV

SEQ ID NO: 99273 - protein, 362 aa, unidentified
MEVLHPRCGGLDVDKDSVGACVRCVSFPEAHHVRTFATTTTGLVALADGLETHGCTTVAMEATGVYWQPVWHLLEGHFTLVLANAQHIRKVPGRKTDVNDATWIAELLAPGLIRSSFVPPAPIQELRDLTRTRKQLVRELSQHCLRLEKVREDANLQVASVLSNLLGHSGRAMLAALIAGEQDPERLADLARGSAGQKRPQLIQALRGRGTPHHRALLQLHLDLIAALEAALAQVDTALGKALAPIAAAADLLKTMPGVSDVVAQVILAEIGAERSRFPTAGHLVSWAGLCPKNDESAGKRRSTRLRKGGTWLKTTRVTAAWAAVRHKEGYLHNQFLRLKARRGAKKAIIAVAAAMLPAAYH

SEQ ID NO: 99274 - protein, 421 aa, unidentified
MPNIEIGVDFMVKENFIYVGIDLHKETHTAVMIDCYNQKLGEITFPNRPADFPKLVTKVKKCNTDAKEVVYGLENAYGYGRALAVWLVDKGYFVKDVNTAISHRQAKHRGAMYRKSDSDDAEAIALATLNMLDKLPDACPNDAYWSLGQLVHRRDNIMKQRTRLVNQLHEQLCIAYPSYKSFFNDISRPTALYFWEHYPSKKYLKGKSVEDLREELVPASHNKCSTKTCEKILDAVASDKVKNNAYQDARDMVTLSIVSDLQHYGSQLTEVDKMLEQMYKMLGCTLTTIPGVNVITAVKILAEIGDIKRFANANKLAQFAGIAPLHLSSSGKGKDLATKQGNRRLQATIYFLAIQMVHISSKGTPRNPVVRAYYEKRKAEGKTSQQALICISRRLISIIYGMLKSGTEYRMPVVENAGENR

SEQ ID NO: 99275 - protein, 436 aa, unidentified
MSKLQQIHPNCAGADVGSTKIFIGLEDEPVRSFATYTNSLKQAVDYLNQHGITELAMEATGIYWISFYDMLCAAGIKVYIVNGRHVKHVPGRKSDVADCMWIQQVHSYGLLRNSFIPDDNIRQLRTYMRIRQDAIEMQTTHVHHMQKALTQMNIRLTEAISEVHGVSGLRMIQAILQGERDPEKLVALRDAQIIKRKKQVVVEALKGFYKPEHLFELDMAYKGYRFYEGQIVHCDKQINRWLQKNLADKQKQMVKNPTKKIRHHAPQVNKLHDKMVQLFTGKDVTGIPGITHYTWLQLTAETGLDLSAWPTAKHFVSWLGLSPDKYSSGKMNRNKKRKCSTKAGQIVKEASVSVLNSKNHFLGAFGRKIRSRRGPNVAIKALARKIATMYYNTLMKGIEYVEKGIQEYEKNYRQVQQKLLEKKAKQLNLQLIPIEN

SEQ ID NO: 99276 - protein, 372 aa, unidentified
MESIIYVGMDVHKDTYSVCCYKSSEDRNYYEKKMKATSSNIIKYLKSVEKEFGEGTVFVCGYEAGPTGFGLYRDLQTAGYICVVMAPTSLRKAPGNRVKNDTVDARYLAKTLFTKDYSEVHVTTKHEEAIKEYCRMRLSIKKELKMAKQLLQSFLLRQDKKYTEGATYWSLNHRKWLKTVTFEDGYLQETFNEYMITINSLEARLKTIEHKIDEIANDSAIKEKVEKLVCFCGIETLTAVTIAAEIGDFNRFKKAYHFANYIGFGWAEESSGKKERVLGMSKCGNINIRRLLTESAKSIKQTNSRGQKSKRLIDRQKGKDPQVIAYADRCRYRLKNKMIHLECRGKHSNVSSTAAARELACFIWGMMTNNIA

SEQ ID NO: 99277 - protein, 418 aa, unidentified
MERLYDTCCGIDVHKRTVVACLITPAGRGQRTKETRTVGTTTEELLVLRDWLHAAGCTHVAVESTGVYWKPVFNILDGVCTVFVVNAQHIKAVPGRKTDVSDAAWIADLLQHGLLRPSFIPDRAQRDLRDLRDLTRTRTTLVDERAAAINRIQKVLEDANIKVAGVATDIMGKSGRGILAALVGGETDAAAMADLARGKMRRKRDELEKALNGRMGDHHRMLIALHLEQIDLLDDQIAHLSRQIAERLRPYKEHLALLDTIPGVGPYIAEILAAEMGLTMDQFPSAGHLASWAGLCPGNYESAGKHKKGPMRKGNKALRRALNEAAQAAARTKKKDQTYLRGRYRRLVVRCGKKKAAVAVGHTILRIAYRLLKEHEPYHEGILVQLDERRQARVQQRAIDQLKALGYDVTITPKQPAA

SEQ ID NO: 99278 - protein, 343 aa, unidentified
MNFVGIDLHKKTISVCVVNQERKVLTRKTLACLPAEKIREFFAALGTFQAVVEATASYEWLWLLLEPLANRLVLAHPKKLRVIAESTRKSDRLDAQVLAEFLVLDMIPPAYRPTPRQRQHRALVRQRFYLRKRIVSVKNRLRRILSDYNADRRDLFSPEGLAFLKGVAVSATDRFILNQLVAEWEGHEQQLMQLTKELKAFAKKAPQPEQEARAVLATIPAVGPVTIDVVVSELGPIERFRSAKRVVAYAGLAPGQRESAGHSRDLGITKDGSRYLRWALVEGAWRLIRRSAHWRAVYEGIHKRRGKKKAIVAVARRLLTVMAALLRSGQAYAFAAEPAGARG

SEQ ID NO: 99279 - protein, 411 aa, unidentified
MLKIVYPICCGIDVHKTFVVACIASTNEKSVTTYQTKRFSTYTRNLRELAAWLESNNRRDVCMEATGKYWHPVYNVLELTCNVVLAHPKYLKAIRGKKTDKKDAKWIADIFKHDLVSGSFIPPADIRQLRDLMRYRSKLINFTTGEKNRAQNCLTTSNVQLDHAFSDVFGKSATAILDYMLEHPDETDFDVTPFVDRRCKTPIEEIQLSIDGTISHEQAEKLKVIRAHMGSLELCKLNLESAILTLAEPYLSQMELIASVPGIRDFSAIAVIAEIGVDMSVFPAAKHLCSWAGLAPQCNESGGKRKSSRVSRAGAYIKPLLIQCANAVVTSKKHPEIRNRYLSIKKRRGHKKAIVAIARMLLTAIYSILSKNEPYNPELYRKSDPDPIDHEKAAIQLLQKRGFAISPPSVP

SEQ ID NO: 99280 - protein, 409 aa, unidentified
MDCAEGHHDSAIVAPDGTLVAKKRIGDDPTGFAELTQLLADAGDTAENPIPVAIETPRGLMVAALRASCRPVYAINPMAVARYRERHSMARAKSDHVDAMILANILRVDAHLHRRLPGDSERAQAISVLARAQQDAVWRRAKASNELRSLLREYFPAFLTVFAGKSATNLAKSEARAVLAIAPTPAHVVKLTKTRIAAALRRAGRQRGIDTLAAEILDGLRHPHRRQPALVEKAFGRQALALLAALDTACTGADDLEQAAAEEFRKHPDYAIITSFPGLADLTGARMLAEIIDDRTKFASDRALKAYAGSAPVTRASGKSISITHRRIKNDRLAAAGWVWAFAASSRCNPARGHYQHRRAHGDRHAAALRHLFNKMLGQLHHCLQSRELFDPFKAFGHPVTAPPAGAAA

SEQ ID NO: 99281 - protein, 428 aa, unidentified
MSNQELIRRKQYCQIVKEITGSDQYLVVGIDVGKDKHHAFMGSATGKSLFRKLIFENNMDGFSRLLKTAEAIKSQNSLSKSVYGMEPTGNYHKPLAGHLIRCDCNVVLVSGVAVKRNRELLDGRWDKHDTKCAANIADLVSRRRCLYYDSPSLGIIELRSLLSLRRRLKREEHGLRMRIRNNLLAQYFPELDRFYSACESESLAIVRWCLNPDTIAAMEFGEFFHLVTKSRRGIAQTLRLSKIHSLATDSVGCPMGPAAEYEADLLVEKLKQVRNQVQKTADLIEDFCLEFSEYGYLLTIPGFGPYVSARVLASIGDPFRFENQKQLIKLAGYDLCAHRSGKTSDKAVPVISKKGNGDLRYALYQAANVAAAKVDLFRTYFTRLLRGRERERGIKTKMRVKLAVKMLVIAWTLMKKREVFDPAHLNID

SEQ ID NO: 99282 - protein, 351 aa, unidentified
MSLAELVDHVIGVDPDRDRITAAVVCARTQGEIASKSFATTARGYGQAMRWAKDHTTDGRRAWSIESTGSYGAGLASALATRGEFVIEFDHPATRPSKDGAKSDSLDAVRAAREILGRKTWATPRSRGAREGLRTLITARDSAKLARVAAINVLKALVVTAPIDLREELRGRPLMDLVGRCQRLRPDTAIDPEHAATKLSLRSTANRVRHLTDECRELELAMIPLVRAMAPALLDEPGIGVLMAAQILVSWSHPGRCRDEAAFARLGGVAPLEATSGQTQTRHRLSRGGDRQLNRALHTVILARAKHHQPTKEYIARRITEGKTKREAMRCLKRYYARHLFRLLEAAPMTA

SEQ ID NO: 99283 - protein, 430 aa, unidentified
MNYTQNQKIEQVTESTLVLGVDIGSSEHYVRAFDYRGRELTRKVFRFSTDINGFNSFYDWVTQICIKHGKNEAMIGCEPTGHYWYTFYQFVKDYGMKLAFVNPASVKKAKELDDNSPKKTDLKDPKTIAKLVIDGRYSFPYVPEGIYAEIREVTSSRDRIMKELNAASNRIQRWLKIYFPEYLTVYKKFDTTTGMMILEEVPLPTMVTALGVDNIIKIWREHKVRGKGASFNRAKTLVDAAHDSVGKSGGQGAVMEIQMLLEDYKVKKQQLEMVTSVMEELIMQIPNAEKMLSVDGVGLVTVAGFISEVGDISRFKNPKQIQKYAGFELVENSSGKHKGRTTISKRGRKKLRKIIYQVVLPLIQSNKEFRSIYDYYRKRIKNPLKGRQAMIAVGCKLILVFFAIMTKGVVYNGSKMIEDIHRPTQLPQAA

SEQ ID NO: 99284 - protein, 429 aa, unidentified
MDIVHPRVAGIDVHKKVIWVAVRLPGPGPGDRKVIVKSFKTFWRSLLKMTAWLAELGVTDTAMESTGVYWWPVYHALATAGVIEVCVCNAAHMRNVPGRKTDIKDCQWIAELHEHGLLRPSFIPGQQVAALRARTRYRKKLIEHRTAENQRLAKILEDAGIKIDSVASELLGVSGREMTEALIAGERDPRVLAGLARGRLRAKLDDLEMACDGRFTAGHAQMCRLHLDAYDHLTAQIATLDQLVAAAAEPFGAVIARLVTIPGIGQRVAEVIVAETGGGMARFASSAKLAAWAGLAPGDNESAGKRKKAPARKGNPHLRAAMTEAAWAVSRTATRPGARFRRLARRFGKLSATKAAVAVAHTLLCIAWAVMKHDSDYAKAGADYYDQRDQRNHEHLVKHHQEALSRLGYQVTLIPPSDGSPPPAQEPAA

SEQ ID NO: 99285 - protein, 341 aa, unidentified
MRIVGGLDIHRRQITFDYLDECSGQIQRGRIAPADRMLLRHWLKTTVNGAPAVFAVEACTGWRFVVEELRNAGIEAHLAEPADTAAARGPKRRAKTDRTDARHLRELLAGDRLPESWIPPEQVLEMRARLQLFKDLREEHTAWVQRVHATLLHQGAPAIAGDLLGADNRRRLEAGEQLSPAGRQAVATALRILDALDAELVPLRKQIAAFARRQPGCKALQAHYGIGEITAVALWAELGDTRRFSSSRKAVRHTGLDITVHSSDDKRPPGHLSRQGSPLLRWALFEAAKCAARPGAPDHAYYRQVADRLGGNRAALSVARKIARRAHHTLQALGDEALAAV

SEQ ID NO: 99286 - protein, 359 aa, unidentified
MTARVWGKDVFIMLGIDTSKATLQCALRDPQTQCVLWDLEFANSESGVAKLLKEAPSGVHWVIEPTGRYSVTVVRQAQAAGRTVLLAPPRKAKDYLRSLQSRAKTDKLDARGLALFGLSRPLAQYPVKEEALDTIDQLLSARKGLSHSITRLQLQSNELPAAKEVLDKAITLLKTELKDLDKLIAGRTASEPKMAAAKELRKVPGIGAVTSAAICSRLANKGFARPDQFVAYIGLDIAVHESGTRKGKRGLTHQGDAELRRLLYCCAQASLRAKGTPFNAQYERELAKGLPTTAALCAIARKMAKLCWALYTHKAKYDPSRVYTSPPRGRHAASEALQLATAAGETLASDQAGPNSKAK

SEQ ID NO: 99287 - protein, 336 aa, unidentified
MRELLFVYIGVDVSKGTLCVDAGGAFRGVVPNTPDGIRKTLAVVKRKLGRGRAPHVCLEATGPYGEALLAVCRSWGFPCSVLNPAKVRHYAKAMSESAKTDPIDARVIREFAEAKHPAADRVPGGAETLLRQLMTAREALTKSAVQLEGVLDSMTCASARKAVTLAVGCIRRKIKALEDGMAAALKADRRLEGLAAELANIDGVGPLSAAKIVALVPELGSLGRRDAASIAGLAPFRRDSGKFSGKAFISGGRASVRRALYMPALVAIKHNPTLKAFHQRLIGQGKPFKVAITAVMRKLFIHMDGTARKWLAAHGGTGEGVSPQPLPLLPSFPRTP

SEQ ID NO: 99288 - protein, 372 aa, unidentified
MPSMPEHARPAQTDTEGEVILGVDTHADQHVAVVITVLGAVVAAETFAATAAGYRALLAWGRGHGLVRKAGVEGTGSYGVALARHLRSAGVEVIEVNRPDRAARRRRGKTDAVDAEAAARAVLGGLATVTPKSADGPVETLRLLKLAKDSAVKSRTQAINQLKAVLVGADPALRESLAGLGRATLVRRCAELPDRPAATEPGAGVAGTVVFTLRLLARRIQHLSAEVKDLTKRITDVIAAHAPQLLERRGVGPDSAATLLITAGDNPERLRNEASFAALCGASPIEASSGKTQRHRLNRGGDRQANSALYHIALTRLRCDPRTRDYVDRRTAEGKTQREALRCLKRYIAREIYNLIRPTPATTAPTSPPLAA

SEQ ID NO: 99289 - protein, 339 aa, unidentified
MSKIAISSQAFCGVDVSAATLDVAVQRIEREQCEHRQFANTAAGHRELIAWLRKRGTAVRVALEATGIYSFDLALALDKAEGFEVAVLNPKLANRFAQSLNRSKTDKADAAALAEHSRRMKFVPWRRPSEVGLQLRALGRHLAALGQDRTRLSNRLEAAKGSAATPRCVLQDLKRGMDAIEKRIVKLRREAVAMIASDEELKRKFDLLVAMPGIAETSAVMLLSELSALAPELTARQWVACSGLDPAHTKSGTSVDKPSRISRGGSKYLRRSLYMPALVGVRFDPHLKAFYLALQARHKTKLQALMAVARKLLHAIFGIFKTGTAWNGAKLFPKLIPNS

SEQ ID NO: 99290 - protein, 449 aa, unidentified
MSDIPTSSTQPEFGALIGIDWGDKKHAWALQAGDSTKIEKGDIEHTPEAIQQWAAGLRQRFPTGRLAVALEQSRGPLVFALSKYEHLTLFPIHPTSAAEYRKIFRPSGAKSDGPDAVLHLDMLARHRDKLRPLNPDTPETRALQLLTEDRRQLVNERTRYSNRLTANLKSYYPQVLQWFDDLYAPVTLDFLDQWPTLEELQKAKPGVWSEFFQEHNCRDAKTQQRLAAIPMAVTATTDFAVVTAGRAGVCAAVRLLRNLNQAIQEYDRQIDQLAKGHPDFAIFQSLPGAGKVMVPRLIAAFGTQRDRYQRAADIQQYSGIAPVTEASGQQLWVHWRWGCPKFLRQTFHEWAAQSIAQCDWAAAYYRVQREDKNKSHHAAVRSLAYKWIRIAFRCWKDRQLYDDSKYELALKTRAKATPEPKQPSAFPLPLRWISCAGFQKLAEKNGENT

SEQ ID NO: 99291 - protein, 310 aa, unidentified
MDIIAVGIDVSKDRLDVAVHPGGEAFVVERNGAGLEQLTARLKQLAPTIVALEATGGFETIAAAAVGGAGLPIVVVNPAQVRAFAKALGQRAKTDPIDASVIAHFAAATRPEPRPLPDEATRFLSDLVTRRRQIVDMIGAERQREKRATSQHLRKSITRLIKALEKELVSVDTDIDDAVRSSPAWREAEDLLASVPGVGPIIARTLMAELPELGRLNRKQIAALAGLAPYTRQSGQWRGKSFIGGGRQAVRTVLFMGAMTARRHNPVLKAFFDRLVANGKPKLVALIAVARKLLTILNVMIRTKTPWQPA

SEQ ID NO: 99292 - protein, 408 aa, unidentified
MKVLHARCAGLDVHKDLVVACARLQDSAGVQREHRRFETTTKGLLELLAWLVELRCTHVAMEATGVYWKPVWHVLEGHAELVLANAAHIRNVPGRKSDVNDATWIADLLAHGLIRASMVPPTPIQELRDLTRTRRQLVREIGQHTQRVQRVLEDANVKLSSVISDVLGMSGRRILEAIIAGENDPEKLAALGSERLRCSQEQLREALRGRVTAHHRFLLRQHLDTIDHLQRAVDQFDQKIARQLEPFRAQFELLMTIPAVRETAAAVLIAEVGVDMSRFPTAEHLVSWAGLCPRMDESAGKRRSTRLRKGASWLKPVLVQSAWGAARTKRTYTQAQFLRLRARRGPMKAVVAVAATILTAAYYILRDGVSYRELGPDHFVERDRTRIAQRLARQIRELGYEVTIREAA

SEQ ID NO: 99293 - protein, 381 aa, unidentified
MQRATSTATVSANTLNCALELSKKTWLLAIQFPAREQPSVYTIKGGDGAALVAQLIAARDRWAEVSGSPPSILICYEVGYDAFWLARFLMAHGIECLVIDPGSLEVKRRSRRVKTDRVDLKKLLRTLSAWCRGERHVWSVVRIPTVEEEDLRRSHRERSRLISERTAHSNRIKGLLFAQGIRVDNIKTLALEKLVTGDGRRLLPRLADEIARQMKRLAVVQEQIDEIERERDTAPTPCKETEKKRHLLLQLKSIGPTNAAVLSREVYYRHFDNQRQLGSFLGLTPSPFKSGEEERCQGISRAGSGRVRAAMIEAAWLWVQHQPKSALTIWFLKRTAGQSKRARKIMIVALARKLAIALWRFVELGLVPDGAIFHPRVTAQA

SEQ ID NO: 99294 - protein, 360 aa, unidentified
MRIIGCDLHARQQTLAMLDAVSGEVVNRTLQHEGKEVREFYSNLPQPVLVGIEAIGPMQWFLNLLEELKIECRVGDATKIRAAEPRKQKHDRRDAELILRLLVENRFPAIWRPSQELLDLRALLLHRHQWVRLRTQIQNALQAIALANGLRRGPSLWSYDGQAKIAFLPLPPHASYRRSMLQALYRQMEEEIAQLTAQVAEQAEQRSGARLLLTHPGVGPVTALATDVFLGDPQRFADGKALASYVGLIPREYSSGAHQRLGALTKQGSPFLRFLWNEAAAHAVRRDPDLQRFYRRKLVQKGLGKSRVAAARKLGIRLWIMLRDQIDYQEFCRRGQKQSSAACAGMPETGFGANRHRPID

SEQ ID NO: 99295 - protein, 324 aa, unidentified
MLSEAGQVVQRARVRGIDQMLRLLKGLPDRFEVCYEASCGYGHYHDLLRPLAARVVVAHPGRLRLIFRSRDKNDRKDAERLAKLLYLGETPAVHVPSLGVRTWRELINCRAQVIAKRTRAKNALRALLRGAGVVPPKGPGLWTKKGLAWLRQLDPPTASQRLRRDLLLDEVEALNGQVRRIEQELSRRAQQTPAVARLRAIPGVGLRTAEAVAAFLDDPHRFRHAKAVGRYFGLVPCQDQSGDKNRLGHITRAGPAVVRRLVAEAAWQAVRRSPTVCAFFERTRRGDPQREKIAVVATAHYLVRVMWALLKRGTGWQENEARAK

SEQ ID NO: 99296 - protein, 426 aa, unidentified
MRVMYDRVAAIDVHKDMVKVAVRVPGAKRGTRKTDVLEFRAFYGVLQEMGRELRRRGVTHVVMEASGVYTEPVYYALAELDFTEVLVINPAHAKALKGHKTDARDAIRLLDLYECGLLSGSYIPSPDLKEVRDLARYRMKTVQARASEVQRLQKTLESAGIKLSSVVSDVTGVSAMAMIEALIDGERRGVVLAGLAQGRLRTAAKMAGLSMALAGRFTAHHAVMCRLHLDRIKVLGEAVTDLDARIAPLVARYSREAELLKTLPGFGDVVVAGWLGAIGPAPHEYFATAQRLASWATVCPGNYMSAKKSKGGRTGDGGAYIKPLLVQAAWAAVRVPGRLQAKFSRLVRKFGGPRNKGAVKRAIMAIAHTLLKIAYQVLKTGKPYRDLGAGFYDSRESPQARHDYLIRQLQKLNPGCVITITPAEAA

SEQ ID NO: 99297 - protein, 396 aa, unidentified
MISVGIDVSKGKSTVCIMKPCGEILESPFDIGHTADELDSLISLIKSFDEETRVVMEDTGHYHLPVATYLSSHNIFVCCVNALRMKKFCSQSIRRAKTDKIDSIKIASFGITYWNELVKAYPSNVIYDELKFLARQYYQVTGMLVKSKVNFSNLLDQVMPKINDVLSNQGENHKLTEFVSRYIHFQNILDMGEMKFTSDYCKWAKKKGYRLNERKAAEILALAQNGIPTLPNSQSVKIAVSEAVKLIHSIEESRNTILAQMQDFCNTLPEYSVVKEMDCIGDTLAPRIIAEIGDVRRFKNKHSLIAYAGIDAPPYQSGAFHASERHISKRGNSYLRKTGYEIMQSLIKHKPADNAVYDFIQKKRSEGKCGKEAMIAGLNKFLRVYYGKVMEFYSEH

SEQ ID NO: 99298 - protein, 412 aa, unidentified
MDVRYERCCGIDVHKQTVVACVIVPDAAGKPVKETRTFGSMSADLQALAAWLQGQGCTHVAMESTGVYWKPVYNLLEGAFEILVVNAEHLKKVAGRKTDVQDAEWIADLLRHGLLKGSFIPSAPQRALRDLTRYRTTLTDDRTREVNRLQKVLEDANLKLASVASDIMGVSGRAILTHLLAGQTDPATLAELAKGRLREKRALLEQALRGTLKPHHRFLLVQHLSHIDYLDEAIAKLDAEIEEQMRPFVVELAHWDQLPGINQRLAQIIVAEVGADLTAFADADHLASWAGMCPGNHQSAGQQRSGKTRKGSPWLRAALAEAAQAAGRTKGSALQTQYRRLAARRGKQRATVAVGHTILRIVYHLLDDPTGVYDERGTHDRAERDRQALERDLVRRLQRLGNMVVLHPVGVT

SEQ ID NO: 99299 - protein, 411 aa, unidentified
MRIVHQRCCALDVHKNSITACVLVWDGQEAVEERKKEFGTYKKELERLRFWLMACKVTVVAMESAGVYWKPVWHVLERQRQFKLKLVNAQHFHGVDGQKSDQIDASWLGELLQCGLLKGSFVPPQWQRELRDLTRLRVSLLQDQNRIQNRLEKVLEDANLKLGSVASDTLGVSGRRMVKAVIAGDKDPAWMADYAKGTLRAKRKQLEQALHGFVTDHHRTLLAMLLRQFDALESDIEYLEAEIRRRLTPHQDVVDRLVEIPGFGEVSAWTVIAELGLDMNVFRTPERAASWSGLCPGNRKSAGKRGHGRTRKGNRWIRRGLTQTALAVSHSKQSYLRSFYWRITSKRGAKKARIATAHKQLKIAFLIIRDGVRYKDLGPNYFDRRNAERTKRRLVERLEGLGLKVTLEPAA

SEQ ID NO: 99300 - protein, 664 aa, unidentified
MSRSCQNRRRAAARTATNQDAGGAVHAAAMPTEGPVPSTTDPKTSRSRAAPGDTPAATPVAIGVGIDTSRYGHHAIFLDADLQPAAPELKFVESAQGYQQLQSRLAALRHKHGPVHFHFRLDVAGSYADNLLAFLHGLPEPRTISCGDPQRNKNYRAAIFGHKKSDATEANATARYALTEKPKPMPVVAPAVQQLCQIASRLESQARHCTRVVNQLHNLLGRTFPELALLVKDLSAGWVLTLLDRYPTAAKLAAARPSSLEKIPYLPHEHIASLREQARTSIAALTGPVTEELVRELVGQLQDAHVRHKALEKLLVSAYRQLPEPNHLDSIIGFGEVTAAILTAKMVTTGRFVEPAKLTGYFGIYPVEASSGIDRDGQSRLPLRMVMSRRGNDLVRRYLWMAALSAAQHNPAVRPLYQRVRAKHPDQPGIAIGHAMRKLLHLALAVWQTGKPFDPEHYPWDQAAHLPGSQQPATAEPVAPSPTHERTGPNAQAAGHKNPVTTPVRSVVTAACVPTSVTEAASAGNDSTRSVASEHPEATACDMPMSQDAQAEATALAWIDFAHLKTQLPLQRVLEHLNLLTDLRGRSSQRKGPCPVHAPSGKSRTFSVNLDKNLFQCFDPHCGSKGDVIDLWAALHKLSLRDAAADLIQTFNLEPASRTEKRHG

SEQ ID NO: 99301 - protein, 343 aa, unidentified
MLRTNVIGIDLAKNVLQVCHISRQGELLSNKAVSRQKLKELLAKSKPSLVALEGCASCHYWGRYAESFGHEVRIINPKKVKAYVDGHKTDANDALAIANAALQMGIKYSKPKSMEQQTLMSLEANRQFLSKTIVSLGLHIRGIINEYGIVKAKGTKGLAELVTSTLYESDVLPASLVTTLSMLWQQYLNLKDELSKLQKSMNSTTRQIEPCKRLMALEGVGETTASMLYATLGNGTQFTNGRQASAFVGLTPKQYSSGGKVTMLGIDKFGGVKDLRSMLYLGAMAYIYRLPESPKNQKQAWLIKLVDRVGFKRACIALANKTVRTAWAMLHYETAYQPKPLSI

SEQ ID NO: 99302 - protein, 317 aa, unidentified
MDTMFVGIDVSKDRLDVAVRPTGDHFVVARDTHGLRELVARLTALAATTIGLEATGGYETVVAASLAAASLPVVVVNPAHVRAFAQALGKRAKTDPLDAGVIAHFVEATKPPLRPLPDADTQRLADLVARRGQIVEMMVAERQRQKRLTAKRIQKSIARLLAALQKELSALDADIDDAVRGSPAWREKEDLLASVPGVGKIIARTLIAELPELGTLDRRAIAALAGLAPWTRQSGQWKGKSFIGGGRARVRAALFMGAMVAARHNPVLKAFRDKLVAAGKPKLVALVATARKLLTMLNAMLRDRKPWQEGEHAAASN

SEQ ID NO: 99303 - protein, 356 aa, unidentified
MRFYDQQHRFYAGIDLHSRTMHLCVLDANGTIVFDKNLPTRPDAFLAALAPFRADVIVGVECMFGWYWLSDLCQQEDILFVIGHALYMKAIHGGKAKNDKIDANKIARLLRGGNFPLAYAYPQGMRETRDLLRRRNYFVRQRAALMTHLQILNAQYNLPPFPKKLSFAANRQELDIPARFTAPSVQKNAAVNLAVIDALDTQIADLELYLTRTAKVDDVQTYHRLQTISGVGKILALVLLYEIHDIRRFASEGRFLSYCRLVRCEHESAGKVLGCGGRKIGNAHLRWAFAEAACLFLRGSERARAWKQKQEKKRGAGKALAILAARLARAVYHLWRKGEAFDEERFWQGQPASARR

SEQ ID NO: 99304 - protein, 403 aa, unidentified
MYAVGIDVSKGRSTVAVLEPLGKIVAKPFEVRHTKSGMNNLVNYLNTLDGECRIVLEHTGRYYEPVVRWLSGAGLFVSAVNPKLIKDFDNNSLRRVKTDKADAKKISRFTLDKWYKLRQYTAMDNIRVQLKTMNRQMSFYQKQQTAYKNNLIALMDETYPGVNKFFTSPRRADGSEKWVDFIEKFWHVDCVCNISLNSFTEKYQKWCKKHGYNFQPDKPAEIYNASKELIPILAKDDMTKLFVQQAVTQLNAISKAVEELRQQMDSLASQLPEYPVVMSMFGVGKTLGPQLIAEIGDVYKFTKRSQLTAFAGVDPGVNESGDYAQKSVHTSKHGSPYLRKTLFLIMEVLIQNQPEDDPVYRFMAKKRDEGKPYYVYMTAGANKFLRIYFGKVKEYLNNLPLEK

SEQ ID NO: 99305 - protein, 351 aa, unidentified
MLIIGCDYHPGFQQIAFVDTETGEWKEQRLEDRECAEAFYRELASRAAKVRVGMEASGHARWFERLLAELEIELWLGDAAVIRAKRGRRKPKTDRQDAQHILHLLLKDDFPKIWVPSWENRDLRQLLWHRHRMVQARTRIMNQLQAVALNEGLRCKKRLWREKGRKQLEAIRLAPWASRRREDLLQLLDGLNPTIAELTQAIDQEVEKSVAARRLMTHPGVGPLTALAFVLIIGRAERFQCGKQVAAYLGLVPLEDSSGERRRLGHITKQGSSMLRFLLVESAQVVARSIPQWRNRYFHLAMRRGRKIAKVALARKLAIRLFWMMRQGWDYEQMTQFGSHAGQLGTGDGVR

SEQ ID NO: 99306 - protein, 400 aa, unidentified
MLSIGIDVSKGKSTVCGMKPGGEIVYTPFEIQHTREGMSELVSLLHNSCEEVRVVLESTGSYHCPVVAALLENGIFVSVVNSLRMKRFCSQSIRKVKTDRIDAMQIALYGLAYWQELQPTKLPEDTYRELQLLARQYYQMTSLLIKAKVDFNALCDQVLPGMQELMSDHAGRHKLSDFVLRYRHTTHILEMGETRFRKDYCKWAEKKGYRNCERMAALIFATAQNGIPVLPNAPSTQIVITEAIRVLHTVEASRDAILTQMQALAKTLPEYSLVREMPCIGDTLAPRLIAEIGDVRRFHSKRALIAYAGIDAPPYQSGKFCANNRHISKRGNRYLRKTGYEVMQSYVMHKPANDPIFTFIEKKRGEGKCGKLAMVAGLNKFLRVYYGKVTELYRSLPAIE

SEQ ID NO: 99307 - protein, 429 aa, unidentified
MTRISAGVDVSKNRSTVCIIDQDGKVIMRPFLVWHSTEELDFLADTLKRLNGEVRVIMESTSIYQYPIALHLKEKGIFISIVNAYKVKKFANTDFRGGKTDKKDSRTIASYGISYWDKLVEWQIPKDTYFNLDLLNRTYMNAKKHRQIILQELQHYIDCAMPGMDKELHSLNLNTKKDFMLDFVEKFWHRDEIVNMTEAEFTEVFTAWAKKKGYRPVEGKAAKIYAIAKSCIPYYPANPTVKTILQCIVDKLSGVNRTLVTIVTQMIEEAKKLPEYQIVREMPGVGDPLAARFFGSAGDIRRFKNSKALVAYAGIDSPPDESGDFSSTHRHITKKGSKVFRDTGCEIMMALRAQKRTWEKVRKNPDVYDYMLRKEAEGKPPKVAKIAALNKFLRIIYARIKELYDNMALAERAKAKTKSKTKAKTKVTA

SEQ ID NO: 99308 - protein, 344 aa, unidentified
MQHYVGLDVSVKETSVCIVDKTGKVIREVKVATEPVAILAVLTEEELAIERIGLEAGPLSQWLYSALAEAGLPVICVETRHMKAALSAQINKSDRNDARGIAQMMRVGLYRPVHVKTLASQKRRMLLTSRQLLQAKALDIENDLRGTLRNFGLKVGMVGTVKFEARIRELVADHPDLAAIVEPLLIARRVLREQLGVLHRQLLEMVRHDEVCRRLMTTPGVGPVVALTFRATVDVPSRFTSSKAVGAAFGLTPRRQQSGEIDRMGGISKCGDAMMREMLFEAALVLMTHSGKWSWLKAWGMKIARHRGMKRAIVAVARRLAVIMHRMWMDGTEFRWSSKEVAAA

SEQ ID NO: 99309 - protein, 337 aa, unidentified
MKYCGIDLHSNNSVVIVSDDEDRIVLQRRLTNDLGQIRGVLEPYREELVGVVVESTYNWYWVVDGLMDAGYRVHLAHPSAIRKYEGLKHSGDVADAAYLAQLLRLGLLAEGYIYPREQRGVRDLARKRMQLVRYRTAQILAIENILIRQTGARMKGEAVKRLTAEQVDTLALAPDVALAMEANRAVSQALGQQIEALERRLKERVSLRPEYRLLQSVPGIGEILATTIMLETGCIDRFAQVGNFSSYCRCVDSLRESNGRKKGEGNAKNGNKYLAWAFIEAANFALRCCPQAKSFYERKKSKANRVLALKALAHKLARACYYILRNQEPFDVSRCFG

SEQ ID NO: 99310 - protein, 405 aa, unidentified
MEIFCGIDWSEAAHDVAVVDETGRLLARRRIADDAAGFTALTELLAGYAGRPERVDVAIETGRGLLVAALRAAGHRVFAINPKAVDRYRDRHGMAGAKSDPGDARVLADILRTDRDRHRPLPADSDLAAAVGVLARAHQDAVWARVQDANRLRSLLREFFPAALTAFADLTTNTALAVLAAAPTPTAAARLSRANLTDLLRVAGRGTRPTEAARLAEIFTVDQLRQPPVVEAAMGQAVRAIVRTLTAANQSISDLEAALAAAFDQHPDGEILRSLPGLGPILAARVLSEFGDDPTRFPDPASRRAYAGTAPITRASGRSRVVLARHVRNKRLADACYLWAFAALNRSPGARAYYDTRRAAGDRHNAALRRLASKLLGQLHHCLTTSRPYDEALAWPQPDTTPAAA

SEQ ID NO: 99311 - protein, 446 aa, unidentified
MSLDCCYEHAGLCPGRGPSGPAPSGDGRLTEDGRDAMEVMFDRVAGLDVGKETVTVCLRTPGPRGGRRSETRTFKTMTGSLQVMRDWLVEAGVSIAAMESTSAYWKPPFYCLEEQMTVWLLNAAHMKAVPGRKSDVRDAEWIAQLLEHGLLRPSFVPPPDIRRLRMLTRYRVQLMGDRLRDTVRLELMLEDASIKLSSVASSLTTVSARAMLTAMIDGETDPLRLADMAKGRMRRKIPDLAQALTGNFDANHARLARSMLRRLDLVEQAMAELDQVIVDACRPWQHQIELLQTIPGVGPKVAEVFIAETGGDMSRFPTAAHLAAWAGLAPAMNESAGKQTPAGKRHGNKWLAAMLVEAAGSVGRMHGKNYLAAQHARLMKRRGMGRAQVAVARTILVSAYWMLTRDEPYHDLGVDWHTRRNDQAHTRRLVAQLERLGHTVIIDPAA

SEQ ID NO: 99312 - protein, 457 aa, unidentified
MESYYMGIDVSKGYADFVILNAKKNVVEPNFQMDDTFGSHCKLFEILKRFFDRHPGSVLFAAVESTGGYENNWLHSLGGFQGALDIRSARLNPLGVRANSKASLRRVITDKISARDVAEYLIAHPEKVTYQQEDSLAGLRRQWGFVRLLVKQKTQILNQFESLLYTANPELIAYCQSGVPAWLLKLLKQYPTAAKLAKARATSVARIPYVTACRAKELIDQAKKSVASATDETTGSLITAMAEQIICMEETIRIQTQQMAKQCAIPEVALLKTIPGISDASAIGLMLEIQSVKRFASVKKLASHFGLHPAFKTSGDGTSGVRMSKQGRKEPRKILFMVAMVSLTANPHIRKIYEEHTDKGMKKMVAIGLCMHKILRIVYGMLKNNQAYDSQVDQKNRENRTARKTTHTAKNANRRYEIFDQQAPISRRQSNKRKEWKQSQGDNITQCGIGVPIPSAA

SEQ ID NO: 99313 - protein, 314 aa, unidentified
MLIGIDVAKAELVVAARPSGERWTAPNDERGVQRLVERLRHDGPALVVLEATGGYELLCVGALAAAGLPVVVANPRQVRDFAKATGQLAKTDRIDADVLALFAERVRPEVRTLPAADAQELDALLARRRQLLEMLQAERNRLGQVFGRGKQPVKKSLKAHIAFLERELRIADTDLGAMIRRSPAWRERDDLLQSVPGVGPVLSLTLLAELPELGRLSRREIAKLVGVAPLSRDSGALRGRRFVQGGRAGVRAVLYMAALVATKRNAVIGAFYQRLLRAGKPKKLAPVACMRTLLTILNAMARTNTRWQEHPATA

SEQ ID NO: 99314 - protein, 347 aa, unidentified
MEKLIRVGMDTSKQVFQLHGVNAAEEAVLRGKLRRKQMVAFFQRLEPTVVGIEACGGAHHWARVLREFGHQVKLLPPKYAKAYVKRGKNDAADAEALCEAMSRPTMRFVPVKTAEQQAVQMLAGTRDRLIRRRTQLTNAIRGYAAEFGLIAARGIDKIEPLLARLQGEPTLPALARELFAWHAKEYAQLQTQLKAVDAKLMAWHRQNEPSRRLAKIPGIGPIGASLLVMKVAQPEAFRSGRHFAAWIGLTPKDHSTAGKTRLGGITRAGDEALRSVLVVGATAVLQQVRRGKGQPSPWLVELSKRKPPKLAAVALANKMARIAWKLMVGGQHYNPAHVIATAMDKAA

SEQ ID NO: 99315 - protein, 385 aa, unidentified
MPLLQDVGTVLLDCMTSLYGMARPFSPASDMMLVLEEERSGPMSIVILGVDLGKNACSVVGVDAAGAVVVRRSMRRQTLVDYVAKLPVCVVAMEACCGAHYLGRLFAAHGHEIRLMSPEYVRPYVKAQKNDDRDAEGIAEAASRPTMRFVELKTQEQLDIQTLHRVRSRLVAERRSLTNQLRAILLERGTIFPVGRRKLELGIDALLADEDTTLSPRLRQLVAELRAEWRELDTRVETLNGEFVELARNDAAARRLTSIPGVGVLNATALIAAVGDASSFAKARDLGAWLGLVPRQHTTGGKPRLLGISKRGNTYLRTLLIHGARAALPSLARSETPLGRWLTGMIERGVHRNAIVVALANKLARIAWAALRKDATFERGYPVAA

SEQ ID NO: 99316 - protein, 360 aa, unidentified
MAKARSLVGLDVHATKIVAAVLDAETGQLQCFTLGGEPDRAAAFCEQLPGPVRVAYEAGPTGYGLARELGKRGLGCVVAAPSKIPRGSGDRVKTDRRDAEHLVRLLLAGKLHAVRVPGREEEALRDLVRARESVRMDLMRARHRLSKLLLRHGHRFDDGNAWTDRHRRWLAGIDLEWPAAQTTLLDCRGQVDALVIRRDQLEREIVTLLPSSPWTVQAGRLRCLRGIDTLTAVGLCAEIGDFERFAKPQQLMSYIGVVPSENTTGQQRRLGSITKTGSAHARRLLTEAAWHYRPRPNLGKTLTDRQHGQPPAAVAIAWKAQLRLHRTWTRLEARNKRRTLIAVAAARELAGFCWAITQIE

SEQ ID NO: 99317 - protein, 404 aa, unidentified
MWFVGVDWADTHHDVLVIDEASRQVGSCHVAHSVEGLRQLQDFLLSICGPERKEEMACIIESTHGLLIAALLEAGFPVYPVNPQTVDRRRSASGAKTDQIDAYLLAKHGRAEVADLRRWEPDSSLVQERKALTRDQDRLIQSQTRLVNQLTACLKAYYPVVLTFFSKLHQRSTLLFLQTYPTPEVALAASQQQIALVLKNAGHPTAEPVAAKIFQTLHQPHLMADAITTRTKARLMQVLIKQLLPLLEEIAAYDKEIARLFLRHEDKQVFSSLPRAGKRLAPRLLAEIGDDRERYAHTASLQALAGTAPVPYASGTYSKPHRRYACIKPLRNALQQLAWQSTQSEAWAQDYYRRKRKEGKSHSEALRALANLWVRIIFAIWNKKERYQTSIFETAQRLHAKPAS

SEQ ID NO: 99318 - protein, 344 aa, unidentified
MQVTTIGIDLAKNVFQVHGVDANERVVFNKPLRRSQVLPFFAKLAPCLIGMEACASAHYWARELKKLGHNVRLMPAKDVMAYVKRGKNDAIDAAAGCEAVRRPTVRTVPVKTPEQQARLMQHRVRDLLIRQRTQAINALRSHLAELGIVAAQGYEGLRVLLAIVADASDTRLPEDARASLSALVAQIASCQAEIGTIDKRLLAQHRKNVDSKRLETIPGIGFLGASAIVATVPDATIFKKGRHFAAWIGIVSREDSTGGKQRLGPISKQGDRYLRRILVTGAFAVLKQARAHPEKYPWVAQLLARKPAKVVALALANKMARVAWAVLTKKEIYRVRPITTPASV

SEQ ID NO: 99319 - protein, 406 aa, unidentified
MLFVGDDWAEDHHDVEIQDETGRRLAKARLPEGISGIARLHGLVGRFLPEDGDAAEVKIGIETDRGPWVAALVASGYQVYAINPLQSARARQGNGVSGAKSDAGDAHVLADLVRTHCHQLRTVAGDSAQAGAVKVLTRMHQSLIWDRTRQVLRLRSSLREFFPAALVAYQDLASTDVLELLAKAPEPSRAARLTHAQISAALKRAGRRDRETKTTAIMASLAAEHLTQPPLIAAAYGATVRALAAMITTSNEQITALEGQVEACFGQHPDVEIYLSQPGLGPILGARVLAEFGDDPTRYDGARARKNYAGTSPITRASGKKKVVLARYVRNNRLADALHQQAFSALSGSPGAHAYYDALRDRDIGYNAALRQLGNRLVGILHGCLKTHTPYDEAIAWNQHTQQAAA

SEQ ID NO: 99320 - protein, 405 aa, unidentified
MSSLYLGIDWSKNKHDIVAVNQQGAVIANLTVPHNPEGFAQLDQLRQNLDVSSTECVVGLETAHNLLVDFLWTRGYEQLYVIPPHVTRSARGRYRQSGARTDQSDAQVIANLLRTDLSRLYPWQPDQPATRHLRTLVSRLAFLTQQSVRLTNRLHAVLWRYYPAATLVFGRLDQALSLAFIQQYPNGHAAAQLSLAQFEAFAHQHNHHHHPKIIASFARLQQPQPQPDPALAQAYQAEALLLTQLLLHVVQAKKDTLNASKHLYQTHPDYPIFASLPGLGWRLGPALLTKFGDDRHRFPTPNSLQALAGTCPVTAWSGKRKSVRFRRACDHHFRLITQQWAAKSLLNSVWANSYYQQVRPRCHSHNHALRCLANRWLAIAWTLWQRHQTYDEAYHLKQRQLRAQS

SEQ ID NO: 99321 - protein, 397 aa, unidentified
MNRKLVSGAAGSASLPAAPGRDFAGVRRSVARAKPVHPMSPELAGEPMVNARRTLSSNRVTRTVANVMNVHQQGREAVAARRANAGIDVSKDWLDVAWADRTERFANDAGGMESLTALLRQQDIDLIVLEATGGYEKAAAAALQAVGLAVAVVNPRQARDFAKAMGVLAKTDKVDARVLRSFADVLARHEKRSQFLHEVPDEKRAELAALVTRRRQLVEMRTMEAQRMAMTRSKKARKSLNNVILFLDQQLAEIDQDLDQFTKDHFQDLRKLLSSAKGIGPVATTTILAALPEIGRLNRRAIGALVGVVPLARDSGKHRGKRRCWGGRAPVRHVLYMATVTAITHNPVIRAFHERLIAKGKPAKVALIACLRKLLTVLNAMVRDGTTWDAALHTKNA

SEQ ID NO: 99322 - protein, 389 aa, unidentified
MIYAGIDVAKDKHDCYIISSDGEVLEDHFTFPNNQEGFDSFLSLLKSFSTSIKNIEVGLEATGHYSNNILEFLHSNGLLVFVLNPLSTNLYRKGQSLRKTKTDKSDARFITMMLMTEHLKPYSPVSYHIQELKSLSRHRFRLVKERSRFKVSYSRIIDIIFPELPSHVWSTSQNSMLHTLLKFPNTKALSDCHLTSLTTTLKKYSKGKYTKDKALELREVARRSIGSTSPSQAFELQQVIRTILFLKKEIALLDNQIKNLVLALNSPLLTIPGISYISAGMILSEIGDIDRFDSPSKLLAFAGLEPSTYQSGKFTATHAVMVKRGSKYLRWAIMNAARLVCMRDETFKTYNHKKLAEGKHYFVALSHTSKKLVRVIYYLLKSNQPYCPA

SEQ ID NO: 99323 - protein, 346 aa, unidentified
MAKSITDLSSVTTVGLDLAKHVFQVHGVDASGRVVVAKAIRRNKLLEFFASLPPCLVGLEACGSAHHWARELVELGHDAGMMPPAYVKPYVRRQKNDAADAAAICEAVTRPSMRFVGVRSLANQAALMRHKAREMLVSQRTQLLNGLCGHLTEIGVIAAQGPRHARELAELIEACDETIPFEVCEALAPLVVQLRILDEAIARLDRTIAQMARKDETARRLMSIPGFGPITASAMAATIQDTSSFAGPREFAAFLGLTPKQNSSGGKHRLGRISKMGNRDLRKLLVLGAHAVLFHRKPHTDPLRTWAKKLIEKKPFKLVAVALANKMARIAFAIMRGKTVYREIPV

SEQ ID NO: 99324 - protein, 356 aa, unidentified
MSRDVKYIGMDVHKEAIVIAVVNDGGKVVMESIIETKASSLLQFIHGLSGELHVTWEEGTWAAWLYDLLKPHVHQMLVCDPRRNALLKEGNKSDKVDARKLADLLRTGMLRPVYHGEHGLRTLRELGRSYQTISQDLNRVMNRVKALYRGWSIPCAGTQVYAPRYRQEWLGKIEHAGVRRRAELLYEQLDGLQALRRTLRPELLAESRKHKASKLLRQIPCIGPIRAARLVGLMQTPHRFRSKRQLWTYSGLGIETHDSAQYCYVHGQLQRSKKPQQIRGLNRNHNHEMKEIFKGAATRASCGVGPLRDFYVTLLDKGMKPEMARLTLARKIAAIALTLWKKEERFDAEELKTQAA

SEQ ID NO: 99325 - protein, 313 aa, unidentified
MSELYVGVDVSKEYLDVASSDGTSWRVGNDEAGHQELVTRFGAAPPALVLMEATGGLERALAVQLSAAGVALRIVNARHVRHFAKATGLLAKTDRLDAQALVHFAQTLKPEPRAIQPEQTLALQALIVRRRQLVEMLTMERNRLRTAHRGVRKDLQTSIRWLEKRLAGVDDDIDGALRECGVWREKVQLLESVPGIARVTSVSLLASLPELGELNRHQISALAGVAPFNRDSGRWQGRRSIYGGRPLVRSALYMAALVGARHNPVLRTFYQRLRAAGKPAKVALTACMRKLLVILNTMLKTGKPWGGHLSAYA

SEQ ID NO: 99326 - protein, 343 aa, unidentified
MEQYGGIDVSLESASVCVVDASGRILREAKVASEPRALIAWFRGSDIQMARIGLEAGPLSQWLYAGMREAGLAVELLETRHVRNAFKAMPVKTDRKDARGIAQLMRLGWFRSVHCKSVPAQELRAILTARKLMQGKRHDVEMSLRGILRGFGLKVGPTTPRNFEGRVRELVDGHATLLTVTDALLLARACLTEQLSKLQKRLVSLARDDARARLLMSTPGVGVLVALTYVAAIDDPMRFKSSKATGAHFGLTPQKYQSGETDVTGRISKLGDASVRTALYEAANVILTRPVKGSSLKSWAMRVSKRAGMRKAKVALARKLAVILHRMLADGTTFIANRAAVAT

SEQ ID NO: 99327 - protein, 349 aa, unidentified
MSQNLNSAVAVIGIDIGKNSFHVVGLDNRGAIVLRQKWSRGQIEARLANLPPCLIGMEACVGAHHLSRKLQALGHDARLMPAKYVRPYSKGQKNDFRDAEAIAEAVQRPTMKYVATKTVEQLDLQALHRVRERLVSQRTGIINQIRAFLLERGVAVRQGLRFLRAELPRILATPPDVLSPRIVRVISDLAEDWRRLDDRIDQLSSEIAVLARQDAGCERLMSVPGIGPIISSAMVAAIGTGDAFSKGRDFAAWLGLVPKQMSTGDRTILGKISKRGNRYLRVLFVQAAWVVLIKPMSWDRHGLKHWIEAAKKRLHRNVLAIALANKLARIAWGVLAGGRTFEASKLQIA

SEQ ID NO: 99328 - protein, 322 aa, unidentified
MNKYNETFGVDISKDVFDVHGSTVGHDQYKNDESGFRKFLKELPDNSLVVMEATGYYHYRLAQFLYKNGVIVSVVNPLSIKRFIQMKLAKVKTDKSDAKAICEYGLVNEVPLYNALTATQSECLQLFRLLDTYLKQRTATKNKIHGEAFLGIPSKFVYRSLVRNKKQLNKEVAAIESKILSLVKEDQQEQLTLLTSIPGIGQKTALFLIVVTDGFSKFETASQLCSYVGITPTIRESGSSVRGRARISKVGNRKLRNLLFLCSFNACKHNKACKEVYERIVNKGKSKKLALIAISNKLLKQSFAIAKSGRPYDETYVSILLR

SEQ ID NO: 99329 - protein, 426 aa, unidentified
MKNLDVLSTLFVGIDVSAASNVVCAMDFHSNKLLEFSVSNNHPGAVKIAECIYTVMEGSSFKTVIFALESTSFYSIHIANFLASDQSLMPFNPFVYCLNPKMTANYRKSFIGMDKTDPKDAFLLADFARVGRINTQPWRGSQFLALQRLTRHRLHIVEAMSREKAYMVSNIFLKFSELSVLKEDQHPFVSNYTATAEAVLTEMLTVDELVNIPVEELISFICNASRNRFHDPEKVAAILQKAARDSYRLDKCLYEPLTISIASSFNLISAYQTEIKSIEKAIEKTIRGLNPSEYQCLLSIPGIGPVYASGILAEIGSASAFRSQDAIAKYAGLVWKQNQSGNFQAENTSLSKAGNRYLRYYLIEAANSLRHHIPEYNDFYYKKHAEVKTHQHKRALALTSRKLIRLIYGLLDKNQLYSQMRVVSTT

SEQ ID NO: 99330 - protein, 357 aa, unidentified
MKSKIKQLDFKGETIYTALDVHKKSWRVTTGCKEFEVEHYSQNSDTKMLVKHLRKRYPEANHLVVYEAGFCGFGIQRSLKKEGIDCMVVNPGDVPASNKEKRRKHDKIDSRKLYKRLAAGDLESIYVPETALEHARSLVRERSRIVQDQTRCKNRIWGLLMFSGLTVDVDRPKQYWSRKFIESLKQLDCSSDALRQALDLATDEYLLIRQLLTMATKKVRELSSSSLFAEIQELLRSIPSIGLINAMVIQTEIQDIFRFKTLDRLCSYAGIVPDLDSSGDKDRKTGITHRSNNYLREAIIESSWVIIRKDPAMLMLYKTYCARMDENKAIIKIARHLLSRIRFVWSNQTKYEIGIAA

SEQ ID NO: 99331 - protein, 349 aa, unidentified
MILVGCDLHTRKQQVALLNTDTGELWDQELSHDGDAIERFYATLPPPVTVGIESTGYSLWFHALLQRLGHTLLVGEAAKIRAMVVRKIKTDRRDARHLRDLLKDDRFPVVWIPDPATRDLRALIKHRLRFVRIRTMVKNGLHAIALNQRLALGPSLWSRAGLAQLHALVLPPHTRRRRDDSLELLHWLNGHIDELDLHVATAAAADPDARRLMTHPGVGPLTALATVLVLGPVGRFPGSKHVVSYIGLAPAVSASADKYRLGHISKQGSALLRWVLGQAAPLATRGDAALKRIYFAVLRRRGRPKAKVALARRLLIRLYVMLRDQIDYDEFCRRGRTQRPGLEPARIPV

SEQ ID NO: 99332 - protein, 345 aa, unidentified
MQPMYYIGLDVYKRKISYCVKDGSGKVYAEGSLPATRADFDLWMKTLPQPWSAAMEATMFTGWIYDQLKPHAAGLKVAHPLMLRAIAAAKKKNDRIDANKICDCLRCDFLPECYMASTAIRERRRTLRYRNLLVRQMVQMKIKISSLLMEAGVSYNKQRLHKAGYFRELLATNPDINEGLKPLLQLCRETVVRLQKTESAMVRSLERDSLLMDRVERLMTIPAVGPITALTWVLEVGDVQRFSSIKKAISYCGLCGAEKSSGSTVQRTPLSKQRNKHLQTTLIEAAKMAPRNSPDLAMLYDREKQKGNANRATLAVARKLVAYLVAVDRRQKEFLTVERENRTAA

SEQ ID NO: 99333 - protein, 353 aa, unidentified
MKSDKYMGMDIHQAMTVVAVLNADGKVILETMVATEGSAILRLVESLSAPLRVTFEETTQAKWLYEVLRTHVTEVIVCDPRRNKLLGEGSKTDKVDARKLADLLRTGMLRSVYHGHEETRKLKELVRAYETLSIDTKRTMTRIKAIFRGHGIRTPGSGVYQLKQREQWLKMLTEPGIHQRAAWLYEQLDQLRALRRKIRQTMLAESREHRAVGLLKTIPQLGPIRAAFIVATVDTPHRFRTKRQLWSYSGLGVVTHMSAEYEMREGQVTRKRKPIATRGLNPNCNRRLKDTFISAAIGGIRTEPYRSYLGRLQDGGMRAEMARLTLARKIAAIALTIWKKGETFEPKKLNWMT

SEQ ID NO: 99334 - protein, 344 aa, unidentified
MAIAVLGIDLGKNSCSVAGLDGTGRVILRRRLTRESVVRLAGTLPACVVAMEACCGAHHLGRVLREQGHEVRLMSPEYVQPYVKAQKNDERDAEAIAEAATRPTMRFVELKSEAQLDAQILHRARSRLVGQRTALINQLRAVLLERGIVVAKGRRRLEEYLIGLLDGDRPATLSPRICLLIEDMRLEWSELDQRIAALTAEFVARAREDHAARRLATIPGFGALNATALVAAIGTGETFRRARDLAAWLGLVPRQATTGGKPRLLGITKRGNTYLRTLLIHGARAALPSLSASQSPMGEWLRGLIGRAHKNKVIVALAGKLARIAWAVLRSGETYVKEGRPVAA

SEQ ID NO: 99335 - protein, 402 aa, unidentified
MNCVGIDVSKGKSMIAVMRPFGEVVVSPFEVRHTANELSELAGLLKSLDGETRVVMESTGNYHAPVAWLLHGAGLYVSVVNAMLIRNYGNNTIRKGKTDKKDAQKIANYAIDNWTELPQYFPEEDVRMMLKNCYRQYEHFSKIRTMMKNNLISLLDVTFPDANRLFSSPRRADGSEKWLDFIETFWHCQCVCGLTPAAFTKKYQKWCKKHGYNFSEDKALDIYASACGHVCVMPKTDDTEFMMQQAILQLKTVSKTLAALQQQMQTLAEKLPEYPVVMQLFGVGPILGPQLMAEIGDVRRFHSKKVLVAFSGIDAPPCQSGTMEVRSRSISKRGSSSLRRTIFLVMSVILQQKPLDEPVYQFMDKKRAEGKPYKVYMMASANKFLRIYYATVKAYLDALDAE

SEQ ID NO: 99336 - protein, 393 aa, unidentified
MFVIDRPDALAATAVENGIVAVSLELSRSKWLVTSLLPGSEKMSKHMVAAGHSTALLALLERRRRQAEEQVGGAVRVVAIEEAGLDGFWLHRLLEANGIESHVVDAASVAVPRRRRRGKSDGIDGETLLRTLLAWRRGEPRVCSMVRPPSPQEEDRRRVVRERAVLIRERIALTNRIGGLLMSQGVTDYQPTRRDRRERLDTLVTGDGRALPPQMKRELSRALDRLDLLLQQIKAVEAERDAMQEAATEAATSEAATTEDPAQLLLRLRAIGPQTAAVLMLEAFYRRFDNRRQVAAFAGLAPSPWQSGAVAHDQGISKAGQPQLRKTMVELAWLWRRHQPGSALSRWFAERARGQDRHRRRALIVALARKLLVALWRYVSAGVVPEGAAFKGA

SEQ ID NO: 99337 - protein, 357 aa, unidentified
MSSNMKKYIGLDVHKEAIAIAVLNGAGKLVMESIVETKASTLLDFLHGLRGELHVTLEEGTWAAWLYDVLKPHIEEIVVCNPRRNALLKEGSKSDKVDARKLAELLRGGLLRAVYHGENGLRTLRELARSYLTISKDQARVMSRLKALYRSWGIPCSGTQVYAPRYREQWLSKIAQPGVRRRAELFYQQMDGLSVVRHTVRGELLAESRKHQAVKILRQIPLIGPLRAALLLALMQTPHRFRSKRQLWTYSGLGVETHDSAQHRYVDGQLQRSKKPQQIRGLNQNHNHEMKRIFKSTALSASRCAGPLQDFYAGLLARGMKPEMARLTLARKIAAITLTLWKKGGRFDAEHLKSQAA

SEQ ID NO: 99338 - protein, 341 aa, unidentified
MKRILRIGMDVHSTNYTLCAMEPIIGEDDRIFANIQVTPDYKNILMFIENLKMKLGLDNEYDIQCGYEAGCLGYSLYNQLTAAGVKCVILAPTTMLTPQGQRVKTDARDALMIAQCLSYGGYHAVYIPTEEDDSVKEYLRMRDDHKTALKKIKQQINALCLRHGYHYEGTKRTIKHVAWLRKLELSPLYRETLDEYMASYDEQTAKIERFDKRIGELASGESYEEKAKKLGCFLGIKTHTALSLLVETGDFSRFAKGNTYAAFLGLAPGESSSGDKVNRTGVTKAGNRHLRQLLIEAARGICKGAVGHKSKELRARQSGNTAEVIAYADKANTKLRSRYDK

SEQ ID NO: 99339 - protein, 343 aa, unidentified
MQTVTTIGFDIAKSVFQVHGVDAAGQVVVRRQLKRRYVLAFFEKLPPCLIGIEACASSHHWSRELQALGHKVRLMPPAYVRPYVKRQKNDAADAEAICEAVTRANMRFVETKTPEQQSCLMLHRTRHLFIRQQTAVINAIRAHLAEFGIVAPVGRNGVEELLGVVADASDKRLPEIARACLAALGAQLRMLKAQILEFDRMINAWHRSNETSKRLDEIPGVGPALATALVASVADPRAFRSGRDFSAWIGLVPKQHSSGGKDKLGGISKQGDRYLRSLFTAGALAVIRYAKIHGAKHRPWLTALLARRPTKVAAVALANKIARMAWAMMARGERYKESVALAA

SEQ ID NO: 99340 - protein, 321 aa, unidentified
MTYIGIDVSKDSFVVAYSPEKNSKTKTFKNTTKGIHEFIQTISKDEHHCVMEATGNYSALLVYLLAEAGITTSLENPLKVKNFARAMLSTVKTDEIDARLIALYGEKMQPAPYKLRSDAILTLKQKRTVIRQLKKQLIATRNLKGSMEALPFFDAKCKKSIEKTIAFLEKQVKDLEEDLASLAKSEYKKQMDLLTSVKGIGITLAAALIMATGGFTYFDNAKQLTRHLGLSPTYQQSGTSVNFKGHINRNGDSSLRSQLYVAAFASLRCNTECKACYDRLRSNGKPGKVAVIAVANKLIRQAFAVVTQEKPYVDGYVSSKK

SEQ ID NO: 99341 - protein, 311 aa, unidentified
MQDIFIGVDVSMDWLDIHHLCHDHRGGERRIANGGRELTAFARRAASEGAWVIFEATGGYDRPLCQALERAGARFSRVNPARARDFARAIGVIGKTDRVDARILALMGERLRPALSEPVPAARRALQAQATRRLQLVEMRKQEVTRLKQTADAGASADIRSHIAFLDRRIARFDARIAKLVAEDAAFAHAERRLRTAPGIGPVVAATLIAELPELGGLDRRRIAALVGLAPVARDSGKRNPPRAIAGGRPVLRRMLYLAALQASRRHPRFIAFRARLQGQGKPPKVAIIAVARKLLTTLNAMLRDQTDFAT

SEQ ID NO: 99342 - protein, 362 aa, unidentified
MSDGSREQTKMTAGLDLGDKYSYLFVLDNESGEKIEEGRLRTTPEDLRRRFDSEQQMKIAIEVGTHSSWVSRLLEDCAHEVLIANPRKTRLIYGEARKTDKIDAQKLARLARADPELLYPIEHRGEESQAHLALIRSRDVLVRLRTQLINHVRGTVKSFGARLPKCSARSFHKKVADALPSELAEALEDVVATIASLTEKIRDYERRIEQVCQERYPQESGLLRQVPGVGALTSLTFVLTLEDPRRFEKSRAVGAYLGLVPGKDQSGEQDPGKRISAEGDEMLRRLLVSSAHYILGPFAPDSDLRRHGQKIAERGGKNAKKRAVVAVARKLAVLLHRLWTTGEVYEPLRNTRLSGVLGEEVA

SEQ ID NO: 99343 - protein, 342 aa, unidentified
MKITTVGIDLAKSVFQVHGVDQGGKPVVQKRLSRQQVLRYFAQLPPCLVGMEACGGAHYWARKLQAQGHTVKLMAPQFVKPSVKANKTDAADAEAICEAVTRPSMRFVPIKNAEQQSVLSLHRARQGFVRARTAQANQIRGLLAEYGIILPQGIGHVTNGLPGIVEDAGNDFPGVFRELLERLRGHLIELNRQVQELEVLIDAWHRRSEGSQKLAQIPGIGPLTASALVASIGDARNFKNGRELAAWLGLVPRQHSSGGKVLLQGISKRGDAYLRTLMIHGARSVTRVAEKKSTPTDRWTTGVLARRHKNIAAVARANKNARVVWALLAHDREYNADYKLAA

SEQ ID NO: 99344 - protein, 339 aa, unidentified
MKKVFIGIDFSKLKFDAAIYSVDTKAIVATEVFENEQSGYVDFLQWVKGNTRSQKSGMLFCGEHTGYYSGNLSVFMYESGYDMWLVSGLEMKLTQGIKRNKTDRVDACKIAEHAYRYQDKVILFQPVSKALEEIRELLSYRERLVETRKVLTTSAKEMKRVKDNGSCDYIYQDSLEYIKSLNASVRNCEKRIEALLKQDISLNTNYKLVSSVVGIGLVNAALILVATANFTLFDNPRKFGCYCGVVPFEHSSGSSVRGKTRVSKMANKHLKTKLTLAAQNAVRFDPELKEYYQRKKSEGKNNWLVLNNVKNKLIHRIFAVVRDGQMYEKQYVHPLKQAA

SEQ ID NO: 99345 - protein, 451 aa, unidentified
MSGTKKSRSKRDISPTHPDAAAIDIGATMHVAAVGPDKVSEPVRSFGTFTGDLHRLADWFKQCGVRTVAMESTGVYWIPVFEILDQRGFDVILVNARDAKHVPGRKTDISDAQWLQRLHEYGLLRASFRLKGEVAVLRAYLRQRERLLDYAASHIQHMQKALTQMNLQLHHVVTDITGATGMAIIRALVAGERDPMVLSTNRDPRCRESAETIRQALVGNDREEHIFALTQALELYDVYQAKVALCDVRIEAVLKRLRKASSGPVGKLPPVRTTKKQSNSPAFDVRAALQALLGCDITQIHGLGPYLALKLVAECGTDLSAWPNAKHFTSWLCLSPSNKISGGKVLSSRTRRSSSRAAALLRLAAVAVGRTETALGAFYRRLSARVGKAKAVTATARKVAVLFYNTLRHGIEYSDPGASYYQESYRRRVLTNLERRAKSLGYTLQPAPAPA

SEQ ID NO: 99346 - protein, 342 aa, unidentified
MGEVTIIGVDLAKNVFQVHGAAADGTVLFRKKLSRPQFARFMAEQPPCRVAMEACASAHHWAREMARHGHDVRLIAPHYVKPFLKRQKNDAADAEAIVEAALRPTMRFVEPKTADQQARAVVFRTREQFVKQRTEAVNALRSHLYEFGHVAPEGIGYVPRLAKVVDDPDTDIPELARDICRMLIEQIAHLTDRIDALKAWIAARSNEAELPRQLQTMPGVGPITALAVETFAPPMEQFRRGRDFAAWLGLVPKQHSTGGRQRLGKTSKMGQRDIRRLLVIGATAVIRWASRRGAPKGSWLARMLERKPIPVVAVALANKMARGIWAMLTRGESYRGPVLIGA

SEQ ID NO: 99347 - protein, 331 aa, unidentified
MKKKVFIGIDVSKSKLDVTYCIGDNLQAYSHFIVSNNPKGFIQILKRLNKLEGDHDLWLVCFEDTGLYSIGLALFFQEQGIDFCQESALRIKLSMGIKRGKNDKLDSREIAQYAYTHKEKLRLTDMPKERLLELKVLLSYRDRLLKQKNALLVAARESYECFGNETTQFILEDSQEIIAQYNQKLKDIERRIKEYIQDDEELRQNYDLATSVVGVGPIIIAYMLVQTNNFRLYNPREYACHTGVAPHEHSSGTDLPLRRTTSKMANKKMKTLLTNGANSAIMYDPQLKLYHSRKVKEGKNKYSVLNAVRFKLIARVFSVVKRGTPYVKMAH

SEQ ID NO: 99348 - protein, 357 aa, unidentified
MNETVPTIAIIIGVDTHKLTHAAAAISTLGVRLGTMTIPVSGTGYQALEAWAQSLGSVQAFGVEGTGSYGAGLSRFLCESGHAVLEVNRPNRQLRYQKGKNDPLDAESAARAVLSGEATALPKAGTGSVEMIRHLKVARDTAVKGRTQAMQTLKAIIVISPLVLREQLDRLTGKMALIRHLAALRPGPLTSTTASAKTALRAIARRWLALDEEIKGNDAHLEALTVARAPELMQAHGMGAGTAAEMLLLVGDNPERIRSEAAFAKLCGVCPIPASSGKTNRHRLNRGGNRQANAALYRVVITRVRGHRPTLDYMQRRTAEGKSKLEIIRCLKRYVAREVFGYLCAAPKPANTSSRAA

SEQ ID NO: 99349 - protein, 445 aa, unidentified
MSNAVAAAPSEPEWAAFAAIDWADQKNFWQLLPAGSRRSEAGELDSTPKAVEVWAANLQQRFGGRPIAVILEQTRGPLVYMLTKYPHLVLFPVHPTTAARYRETFAPSGAKSDPSDTDSLLDLLLRHRERLRPLRPDTMETRLLHFLVEERRQTVDEKTRANLRLTDCLKLYFPQVLRWFDDVTSPLVGDLLERWPTLEQLQRVHPGTLRRFFHEHNCRSEEKNAERIQAIQQATSATQDQAVREACVLIAHSLVAMLATLRAQINVFDKRIAELVADHPDGALFRSLPGAGDALVPRMIVAFGTQRDRYQSAYQMQCYSGIAPVTEASGNSQWVHFRFICPKFLRQTFHEFAGCSIQQSEWARAYYHHLRHDKNKSHHAAVRSLAFKWLRIIYRCWKDGKPYDEAIYMQSLSRRSSLLAGVLGTPTGVGWKSVAGFQKLSENNA

SEQ ID NO: 99350 - protein, 339 aa, unidentified
MSKLLKNFVGIDISKTYFDAAIIKADHPSGSMHNQFSQCQDGFKKMLTWLQQQDVLLNTETLFCMEYTGIYNRGLVNFLIEQKAQLWVEMPLRIKKSAGFERGSDDKISAIKIAGYAFRYQDKMQLWRPVDSSIEKIKHLIAQRDRVVNAITQLSVPVKELSDCGCSKEAKELEKLQRSPLKALQKTKEAIEELIVKTVQQDAVITKKVQQVQSIKGIGQVTAVAFLAYTKGFTAFSNAKELACYCGVVPFAKKSGTSIKFKPGVSLYANKKLKKLLHLCALSAIKSDKEMRAYFERKVAEGKNKMCVINAIRNKLIHRVFAVIRDDRFYEENYVRKCA

SEQ ID NO: 99351 - protein, 378 aa, unidentified
MKTTLHLGLDVHKDSITIAIAQGGRKGEVRLHGTITNDLHALEKLIIQLRKAHPGNALEACYEAGPCGFGLARRLAQLKIPCTVVAPSMIPRRSGDRVKTDKRDALKLARLLRSGDLEAIYIPEPTDEAIRDLCRARTDAVDDQRRSRHRLKAFLLRHGYRYTGKSNWTQAHLRYLRELVFPHPAMKVILEDYLMAITAATERIGRSEEAMLALLQAWRLKPAVEALMAFKGFQLVAAMITVSELGDIHRFSHPRQLMAYLGLVCSEYTSDQKRRQGGITKTGNPHLRWLLIECAQHMISPPKVSKELSRRQEGQPQEVLRLSWKAQNRLHQRFMRLAARRLQRNKALVAIARELCGFIWALLRTQPCYLETKMKQAA

SEQ ID NO: 99352 - protein, 442 aa, unidentified
MADTVVHPCEPDFVAFVGIDWGDQKHCWKLMVAGAQTIEAGELKQTPEELSSWALALHHRFGGRPIAVALEQSRGALVYQLSQYPHLWLYPVNPAAAACYRQAFYPSGSKSDPGDSKLLLELVVHHRDRLRRSAPETAETRLLRMLVEQRRQLVNEKTRWNNRLKAALKTYFPQVLEWIDIDTVLGCDLLERWPTLQLLQRAHPGTLRKFFREHNCRSASRLKERVDAIYQATPAVEDTALLEGESAIAASCVAQIRTLLASIAKLDQQIATSSSQHPEAPLFAQLPGAGAVLQPRLIVAFGTQRDRYASASEVQAYSGIAPVTESSGHSRWVHVRWACPTFLRQTFHEFAACSVSHSEWARAFYDAKIAAGKSHHAAVRALAYKWIRVLFRCWKDGRPYDEPTYLQALAKRNSPLRPSTVTSTKVGWKSVGGFKKLSTENS

SEQ ID NO: 99353 - protein, 402 aa, unidentified
MNAVGIDVSKGKSMVAIMRPFGEIVSAPFEIKHTTSDINSLVELINSVEGESRIVMEHTGRYYEVLAHQLSEANLFVSAINPKLIKDFDNDSLRKVKSDKADAVKIARYALDKWQNLKQYNVMDELRNQLKTMNRQFGFYMKHKTAMKNNLIGILDQTYPGVNTYFDSPARSDGSQKWVDFASTYWHVDCVRKMSLNAFIDHYQNWCKRKKYNFSQSKAEEIYGKAKELVPVLPKDAITKLIIKQAVDQLNSASTTVESLRTLMNETASKLPEYPVVMAMKGVGTSLGPQLMAEIGNVSRFTHKSAITAFAGVDPGVNESGSYEQKSVPTSKRGSSDLRKTLFQVMDVLIKTHPQDDPVYQFLDKKRAQGKPYYVYMTAGANKFLRIYYGRVKEYLSSLPES

SEQ ID NO: 99354 - protein, 445 aa, unidentified
MFIQSQDDSQCCYSLFIKVVILMMKLKYSICCGLDVHKNVIVATIVTTNKDGISEYLQKSFSTINSDIQRFHNWLIENNCYHVCMESTGKYWIPIFNYLENDIDVCLTHPKYVKAIKGKKTDKKDSKWIADLYKFDLVRCSFIPPKDFRQLRELSRYRFKLVCMKSSEKNRIQNCMTISNVGIASVLSDPFGKTATEIISYLLEHTADSMDEKAVRKLIKKGAKSKSDEIIEAIKGYTIETDQAKKLELARGHLEYLDDMITQTEVELYVRIKSYYEFVEFVSTMPGMTELSSTIVLAETGVDMDIFDDAKHLCSWCGLSPANNESAGKKKSVRIAKAGDYLKPMMVQCALAAIKSKKQPYFAIKYGRIKKRRGHKKAIIAIARMMMVCIYHMVSEKKPFTPTDYEELMDPQNHVESVVLNENNVFAYLESLGYDSSKLVKRNDN

SEQ ID NO: 99355 - protein, 329 aa, unidentified
MSNDDFHACFYLMNLRGESKRKGKVRVFKNTPTGFKSLVDWIEKNRVASSLELTITVEATGVYHEQLSYFVHDKSYPISILLPNTVKAFAKSLNTLSKTDQIDAQTIARMGVERKLRFWSPMSPLMRDLKGLSRQRQAFIKQKIALTNQLHADEKRAKPVKNNIKRGRKMISIYIKQIEAIEKEMKELLRKDEQLKVSVKRLCTVPGVAFITAATFLAETDGLTLFSSESQLIKYCGYDIKRNDSGTSVHGRTSISKAGNSHIRGSLYMPSMSAMQLEGPFRESYFRVVDRTGHGKMGLVAVQRKMLKVMFACHKKQEDYDPNYSKNRA

SEQ ID NO: 99356 - protein, 360 aa, unidentified
MDVITDRVCGVDIGKAILAATVRVPGEGGRARRWEQTRKFATFAGALDELAEWLVAEQVTHVAMEATSDYWRPVWWVLEQAGFEMVLVNARDVHQLPGRKTDVTDSAWLAQLLECGLLRSSFVPPPEIRELRDLTRYRKRLVQDRTREAQRVEKVLEDTGIKLSSVASSVLTQSARAMIEALIAGERDPAVLADLAQARMRSKIPELTLALRGRFTDHHALLLRVHLDHIDQLDAHIATIDDRIAAAISPFDRQVQHLLTVPGIADVAARVVIAEIGVDMSVFPTAGHLASWAGLCPGNNESAGKQRSGRTTHGNPGWARRSTRRRGPLSGRRTRGCAPATTGSPNASAANEPSPLSPTR

SEQ ID NO: 99357 - protein, 374 aa, unidentified
MFERTSVGLDVHARTVVACALDAQTGEIIPHRMTPDHGEILAWILSLPSPMRVVYEAGPTGFGLARFLLAAGIDTVVAAPSKLQRPSGDRVKTDAKDALHLARLLKLGEVTGVRVPSADQEAARDLVRSREDVRGDLMRSRHRISKLLLRQGIVYSGGQAWTGTHELWLARQRFDNPARQLTYESSLEAMHEISDRRERLDQAITVMAYGSEYTPVVRALQCLRGISTLTAFGLAVEIGDWDRFSGSTIGAYLGLVPTEHSSGASRSLGSITKTGNSHARRLLVEAAWHHRRPYNSPSRLMRSRWEEATSEARTRGHAGNRRLHERWISYLARRKRPVIANVAIARELSGWCWSLATSTHQAPASSPRPITSGP

SEQ ID NO: 99358 - protein, 355 aa, unidentified
MKNQALQYLAMDVHQATVVASVRNEQGAITMRATVATEARAILSLIRAVGARVMVAFEEGTQAQWLHDLILPHAEGVVVCNVRGKSELTNKSDRIDADALSELLRLGALKAVYHGAPSMLTLKELVRNYNAVVEDATRAMLRIKALFRARAIPTPGTSIYRVSDRAGWLDQLTLQGARVRAESLFKQLDLLRELRPKAKRAMIAEARKQSGWKPLRSIPFLGEVRTAQLMAIIATPHRFRTKRNIWPYAGLAVVTRSSADQEFAGGELRRRNRPPQTRGLNRNHNPMLKSIFKGAATSAAAKPGPLKNIYDACVARGTKPDMARVTLARKIASIALRLWKKGELWDPTKLTMQTT

SEQ ID NO: 99359 - protein, 420 aa, unidentified
MKPIKTTKRSFVNGKHLIVTADIGKDKHFGYWRCPDGTDVKPFAVPNNRAGFGEFWERVSRAQKLHNLDGIIFGFESTGPYGEPLAHFMRARGAELVQVNPLHTKRFKEVTDNSPNKTDQKDPKVIADIIAMGRFLTVVIPEGPAAELRRLSQARERSTRRHTALANQIQCLLASIFPEFLQAMKGVKSASAQYLLKHYPTPQEIAAYGLTELTKTLRKVSRGKLGADRAQALYEAATSTVGVAEGQASMVLEIQELLALMEASQRFTENLEREMIKHLAQIPYSNTLLSLKGIGDVTAAGLIGEVGDFRKFRTMGEVMKLAGLDLFEVSSGRHKGQRHISKRGRPLMRKLLYFAALNTVKKGGAMHQWYRSACDRGMPKPKALVAVSRKLLGILFALVRDHSEYVPNYPEIRYQLKEAA

SEQ ID NO: 99360 - protein, 399 aa, unidentified
MFYGLDVHKEFIQVCALAAKGTKREEYRVGGSAEEVEAFAKKLRPDDQVVLEATFHTWILHDILSRHVDRVVVANPLQVKAIAQAKIKTDKVDAFTLAKLLRADFLPEVELPDPKAWALRQLVSHRRLLVKQRTAIKNSIHAVLDRRLIHNPNKDPFSKRARQWMKNLDLPAAESFLLQNAMTLLEDLDDRIDAVDHELLEQASIESNARLLMTIPGVGVTAAIGLIAAIGDVRRFGTPDQLASYFGLVPRVSQSAGRCHHGRITKTGSSTIRSLVVESAQILARSSSPLTATYWRVRRKRGHNVAVTALARKIIVLVWYLLTKQEPYRYGKPDLARRKLRKATLPELRQRSKRVPQTLDAVYEEAGLPPLAHPSEAERRTVAINRRARTRISNSLKSQ

SEQ ID NO: 99361 - protein, 320 aa, unidentified
MPASCGVGIDVAKDTLDVAWSTDPDARWRTTNDEAGWTALIERLRALQPRVIVLEATGGYETGVASALSVAGLPVAVVNPRQVRDFAKALGRLEKTDALDAGILCEFAVRIDPVPRPLADDVLADFQALVTRRRQLVDMLTAERNRVPLARGAVRKNLRAHIVWLEKQVGHTDRDLRTRIEHSPIWRVRDQLLQSVPGIGPTTAACLLASLPELGTLSHREISKLVGIAPLPDDSGTRVGYRRIRGGRAGVRRALYMATVTAITHNPTIAAAYRRWRTAGKLPKVALIAAMHKLLIHLNAMLKHQTVWQPTPVPPSTTPS

SEQ ID NO: 99362 - protein, 368 aa, unidentified
MGRKSSKLFVGMDVHKESIDITLAEEGGEVRHYGGIGGEQSALIRTVRKLESLGKSLVFVYEAGPCGFWIYRLLQERGQECWVVAPSNTPRRVRDRIKTDRRDSLKLAGLARAGELTPIYVPDAADEAMRDLVRAREDAVATQRQARHRLAALLLRNDIRYGGKTAWTEAHRRWIARLHLPGAAQRIAFEEYVLTVNEATASVQRLTRSMEQELCHWRWQPVVHALQACRGIQLIHAVRIVAEVGDLSRFGHPRQLMAYLGLIPSEDSSGERRHQGPITKAGNRSARRALVEAAWAYRHHAAVSPIIVRRQTGLAKPVLDIAWKAQLRLCARFRRLTARGINRNKIVVAIARELAGFVWAIGQRVKLN

SEQ ID NO: 99363 - protein, 383 aa, unidentified
MASAATPVSPAEIASATLFVALELSRSTWLVALHSPIANKVSQHRLDGGDADGLLALITRKRSQAEEKLGRPVRVVCCFEAGYDGFWLHRWLCARGIENRVLDAASLLVNRRARRAKTDRLDAAGLLRTLMALERGEAQVCRVVRVPTPEQEDARRRSRERARLVVERGQHTSRIKGLLMTQGIRDFEPTRRDWPARFEALRTPDGLPLAPCLRAELLRECRRLWLVMEMIAEVEAEQKAVAEAEDGPAARLAQLRGIGLTIGLTFATVLGNEVFFRVFRNRREVGGYLGLAPSPWQSGAVRRDQGIAKAGNSRARRTAIELAWLWLRHQPESALTRWFHERVGSSKGRMRRILLVAMARKLIVSLWRYVTVGIVPEGAVLKV

SEQ ID NO: 99364 - protein, 375 aa, unidentified
MIATTRPEMSVSEPTLYVAFELGKKDWKLAMTSGFGVAPRLRSVASGEWRDVERAMAQARARFGLPATAPVVSCYEAGRDGFWIHRALEQRGIRNRVVDSASIEVNRRARRAKTDRLDALKLVMMLVRVCCGEQRVWSEVRVPSVAAEAARQVSRERTALTQEQTRLTNQLKGWLATWGATLPRRRPSGWWTTVRDWAGAPLPVEVQARVARAEARRAVLEGQIAELDDQQQAAVTTAAPASALRQLVQLKGVATTSASVLLDEGLVWRAFRNRREIGGLLGFAATPYDSGESVREQGVSRAGNNRLQTISIQLAWNWVRWQPLSALTLWYQEHFGRGKRARRIGIVAVARKLVIALWRYVTTGVVPTGAILKVV

SEQ ID NO: 99365 - protein, 418 aa, unidentified
MLVAGIDIGAELHHVAMVDEAEAVVVKATSFAEDAAGYQKLFELLGRAGARGGADLPLAPASAPPERTLVVMEATGHYWQNLFAALVTEGYAVALINPLRTHRFAGEELARTKTDSIDCLQIAHFGAQKRPAPTCLPEVAAEELRELVRLRTRLIQETVARVNQLHRLIDLGFPEFTRYLSDLNTELANAILRQYPTAQAFRALSPRRLAKLSSDGRHRVGEELARNLVEAARVSVGSQHSQAHQTGVRYACEDLQTLRKRLKQLEAEISSKLEQHQVGKLLTTITGIGDCTAAMLIAELGDPARFKSAGALAAYVGLCPGHKHSGKHQPKSSSLAPFGNRRVRRALWMPTLGAATQSNPWLMAFYRRLVERGKPHKVALIAAMRKLLAAVYSVAKNRRPFVPFLNTQSAQRLDYEKA

SEQ ID NO: 99366 - protein, 440 aa, unidentified
MKEQKSKAFPIIYPNAAGIDISSKEHYVSVNPESAEKSIRAFGCFTEDLHAIATWLKECNVDTVAMEATGIYWVSLYLLLEEAGFEVVLVTAKHVKNVRGKKTDVSDADWIRQLHSCGLLSSSFQPDSFTRKLRTYMRHRKNLIEMSATHIRMMHKALEQMNVKLQHVITDITGKSGQEIIQAILRGERNAKVLASYCDCRIKSEKKDAIIKSLNAVWKEEHIFELEQSYSLFKIYNEKVKECDALIEIHLREKTGVDNIEKPVQKLKRNKNNLNFNGKEILEELVGSDLSEIFGITESNAIEIISEIGLDMNKWPTVKHFTSWLNLAPNNKISGGKVLSSRIPKKKNHAGQIFKMAAFSVQRSNNWLAMFYQRIKNKRGTPKAVVATARKIATIFYKLIKDKVKFNPMPIDNYLDVFKEQQIKKLKRKAQSLGYQMVTI

SEQ ID NO: 99367 - protein, 393 aa, unidentified
MKQRKNAESEPVRIKKFARFIAISGLSACLNPDPDSRLTSIVKVVGLSSNPFFLKSVKDKSMENFYFIGVDVSKKKLDFCVMFEGKVVHEEETSNHQGAIMSLLHHLEEDYGIASGQMLVCAEHTGQYTFPLACACKAVECKLWLENAAEIKYSSGVQRGKNDRVDAKRIAIYASRFQDKVQYYERPTEDIERLKQLESERTLYVTDLAKYKGQMKDQKEYMPKSLYERKMKRLQALMDDLEEAIQSITDEMDEVIASCPVLFRQRELLMSIDGVGRVVATNMIIATEAFTRFGDPRKFNCYAGVAPFSYSSGSSQHSKARVSHRADKVMKRLLHLAAVAVTHRIGGELKKYYERKVAEGKNKMSVINALRAKIVARMFAVIKRNERYKPILS

SEQ ID NO: 99368 - protein, 356 aa, unidentified
METYYIGADVDSKMTELAIEKNEKIVRRYRVPTSIPAICEVLSSIDGKKHLTFEEGPMAGWLYRNLKDSVHELIVCDPRRNNLIACDGDKDDSIDSGKLAELLRGGYLRAVHQSQDMGRVVLKQWVSLYHDRVREAVRQINKIRGRCRMYGIRIPRRALRDQVIRCQWMTKLKERALAEQLSVLWIGFDTAAKQVQMSKKQLIRHSKAYEIIRYWSEVPGIALIRATTLLAYLDTPWRFSNEKKLWKYCGVGLQRTASGTDRRGRPNRGKLKLAWAVNRRLKAVVIGAAMSAINQKQNIFAFEYERMICNGLTASNARHAVARKLLSVLWAMWKTTNRFNESLVCYSPATVNGKLI

SEQ ID NO: 99369 - protein, 353 aa, unidentified
MVYTPNEYDIFIGIDVDQKSFSFTVKNHDTMNNSHKIPASPENLYQHIRNRYNNKRVICAYEVGVTGYYLHDYLTSKNIRCLMVPPPSVPKAGNDRTKNNRLDSERISQHLKNGDMNPIRVPDYDCRELRQLLRSREEYVDLRKVTKQRIKSLLLFANLHTLLKDTTQYWSYLHIKRLKELPCSPATRQRLDLLIKDLDYSRGQTVIIIKELKKLSEQNASLKRNLHYLRSIPGIGFITAITILASIGDIERLRNPRELAAFTGLVPSEYSTGERISRGRITHLGNSVLRSLLVEAAWANITKDARLRQFYDRIRAKHHPQVGARKAIVAVARKLTLIIYRVLKEQREYISNI

SEQ ID NO: 99370 - protein, 309 aa, unidentified
MSECIGVDVAKAHLDWVQGPHGEVERIPNTSAGVRRLIRWLEKLDFDRVILESTGGYERILFDALVDQGVRVVRVNPKRVRDFGKGMGILAKNDVIDAKLLALFGTKAEPAERPQKGPRARQLGDLASRRRQLIKTKTIEKNRLEHAAGWARRDGKSLVVILERRITKLDREIDRLIALDADQKADFERLQSVPGVGPKVARALLMDLPELGKLDRRCISSLVGLAPYAKDSGQKFGARRIEGGRSGPRTQLYLAAMIASRYNPVLKPMYDRLRAAGKPAKVAYIAVARRLLTILNAMVKNRTYWEAPA

SEQ ID NO: 99371 - protein, 346 aa, unidentified
MMIIGCDYHPSWQQICWLDTATGETGEKKLEHASGEAERFYRQLLASALIGMESTGNCQWFVEMAAKLGHDVWIGDAAKIRACEVRAQKHDRRDAALILKLLREGRFPRIWIPSGEEKDLRQLLIHRYKLVRIRAQVKTELQHLAMNQGITKKRKLWSKAGEKVLRELPLKPWASRRREDLFRVKEMLNGQIDLLDQAVVEVAEKNEKARLLMTQPGVGPITSMAFVVTMGDVNRFQRGKQVASYLGLIPREYSSGGHQRLGSISKQGNWFLRMLLVEAAQGAVRCDPGFRNEYLHRCHTKAKGVAKVAAARKLAIRLYWMLRTNIGYPEVVRVESSSRVALVSAS

SEQ ID NO: 99372 - protein, 348 aa, unidentified
MDHYAGIDVSLECSSVCAVDSSGKIVREGKVASEPAALIAWFGSLGFGLSRIGLEAGPLSQWLYAAMVAAGLRVELLETRHVRDAFKAMPVKSDRNDARGIAQLMRLGWFRPVHCKSVGAQETRALLTARKLVQSKLQDMENSLRGILRGFGLKVGETTRRGFADRILELVAGHPSLETIAQALLAVRAALLREFNGFEKQVRAMSRSHAQAKLLMSTPGVGPIVALTYAAAIDDPGRFKSSKQTGAHFGLTPKRYQSGETDHSGRISKIGDATVREALYQAGHVILTKPVKGCAELKGWAMRIARRAGHRKAKVALARKLAVIMHRMLADGTPFNPATAARTMVAAA

SEQ ID NO: 99373 - protein, 391 aa, unidentified
MNERDSVPADTESRCQKIFVAIELSKAKWIVVIRAPHVDKSSLFEVVGGDVDRLLVLIERARKAAVAQGFKVTEVCTCYEAGYDGFWLHRFLESQGMRNSVLDSASIQVSRRRRRLKTDRTDAGSLIRVFMAWHRGEHQACSVVHVPTPEEEDMKRLHRSRANLLRDRVRHVNRIRGLLFLQGVAHIHPNRAGWMIALRDLRTRDGRAFPVQLMHEIEREAKLLDIVKKLLHEVDLEVAALVHTQGAKRRSSTSKATHPIASRLARMRGIGPTLAGVLATELFYRRFENRKQVACYTGLTPTPYSSGSTSREQGISKTGNNRVRHNAIELAWLWLRHQPESRLAIWYRERVTNTQGRFRRIAIVAVARKLIVALWRFVETGLIPEGAVLKA

SEQ ID NO: 99374 - protein, 478 aa, unidentified
MNNELFVGCDVSKGYADFQAVCRDGTPFEAAFRLEDTRQGYGQLKAIINRWVTQGTGYLHIGVESTGGYENNWVRLILGWAEELPVRIARLNPSGVTSLRKAGLIRTVTDAVSAEAIARYVLVFPEKITWLTSRQVPGNEFAAARKFQRGTATLDKQRQQLASQLEKLMYEYFSPLLVYTRHGIPRWLITLLSKYPSPASFRRAGKKRLTVIKGITMEKAATVLDKLSAGDAEPGLLDRENIRQTARQILHLYGLIEQRHELLQSEYSDDPQVDLLRSVPGIGLQTAVLLRIEIEDISRFATAKKLATYFGVCPKFVESGDKKGQIRMSKQGRPDVRKALYMSGLSVIRHDESFKALYHRYRNKGHNHYQAIGVVMHKLLRVVYGILAHRTSYDPEVDKANQRRAKQKKRAKEDDQNRIISQQKKRLNRYQKETVDAPRSRRSVQKLREEQAASQSSTVEECAGSPNAPQTKTYENIT

SEQ ID NO: 99375 - protein, 350 aa, unidentified
MIIIGCDYHPGFQQIAFVDTETGDCGEQRLEHCEEAQKFYRELATQGKKVRVGMEASGHARWFERLLEELKIELWMGDAEVIRAKRGRKPKTDREDALHILNLLLTGDFPKIWVPSWENRDLRQLLWHRHRMVQARTRAMNQLQAVALNEGLRCKKKLWRAHGREQLEAFRLAPWASRRRTDLLELLDRLNPTIAELTQAIEQEAEKCPPAQRLMTHPGVGALTALAFVLIIGKAERFQCGKQVGCYLGFVPLEESSGERRRLGHITKQGNSLLRFLLVEAAQVTSRTLPEWRSKYMHLTMRRGRKIAKVAMARKLAIRLFWMMRQGRDYQQVMKFGSHVEQPVHRHGEH

SEQ ID NO: 99376 - protein, 408 aa, unidentified
MNENPNSSMERRQVWVGIDVGKTHHWASAVDAAGAQVWSRKIPNSEAEILNAIGSALELANVVSWAVDIKGSSTALLLALLAAHGQRAVYVPGRTVNAMTSGYRGEAKTDAKDAFIIAETSRLRRDFAVVQVDAHLVADLALLTGHRNDLVADRVRLVNRLRDMLLGIFPALERAFDYSKHKGALVLLTGYQSPKKLRERGQVRLEAWLRKRSVRGASQVAATALMAASEQHTALPGQDVAGQIVADLATQLLGLDERLSRVESQIRARFAEHPQAEVITSMPGIGEILGAEFVVAAGDLSAYADAGRLASAAGLVPVPRDSGRRTGNLHRPKRYSRRLRRAFYLSAQTSIIREGPNRDFYLKKRAEGLKHVQAVIALARRRVDVLWALLRDNRTYTPISPATTMKAA

SEQ ID NO: 99377 - protein, 414 aa, unidentified
MDILHTNCAGLDVHKKTVVATVIISKEMGKPLKATQTFGTMTSDLLALSDWLMGYDVTHAAMESTGEYWKPIYNILEDNFEVWLVNAQHIKAVPGRKTDIKDSEWIAELMRHGLIRASFVPPKGQRELRELTRMRSTFVKERATLVNRLQKVLESANIKLASVASDVNGVSGRMILQAMIAGKSTPEEMAELAQGRLRGKREILSRSLHGFVKPHHCFVLAELFLQIDGLDEAIARFDEEIQEYCRPFEEAVILLDTIPGVARRTAEVIVSEIGVDMSRFPTDKHLASWAGVAPGNNESAGKRLSGKTTKGDQALVSALTQAAHAASRTKNTYLSAQFHRLAGRRGKKKAILAVAHSILIMAYHMIKDRVPYYELGSDFFDKRNVQATTRRMVHRLEQLGYKVNLEAFTPPVAA

SEQ ID NO: 99378 - protein, 356 aa, unidentified
MNILAIDLGKFNSMCCFYNTDTNEYRFQAAATTRHYLTSVFKNHKIDLVVMEACGPSGWISDLCQELGLKTLVCSTNDAAWLWKNVKRKTDKDDSLKLARMAMMGQLTPVHVPKHPVREHRSLVKYRKKLVGRINQIKNSIRGLFAGRGIEIDKGQKAWRTGRELIDSHRKPLAECSLEELWRGQLDLELTQLDSLAQQQADVERRLDLIAKDDERIQRVQTIPGVGRRTAEAIVTTLDDVDRFDNARQVSSYIGLVPRQYQSGETDRNGRITKRGSRLLRTLLLECAWISMRYNEWSRTTYDRIHGGQQTRKKKAAIALARKIAVVAWSMLKHKTDWDPQRAGIVAEESSEPRPL

SEQ ID NO: 99379 - protein, 446 aa, unidentified
MRIVYKRCCGMDVHKNSVTACVLRIDEDGEFEKQTRYFSTMTRDLKEMSGWLASLGVEATAMEATGVYWKPVWNILETEKKLQLLLVNAHHVKHVPGRKTNQKDSEWIAELLQHGLLKGSFVPPQIIRRLRDLTRTRAKIAQNVATFANRIQKVLEDANVKLGSVATDPLGLSGRRMLRALIEGQRDPQQLSQLACGRLRKKISQLQLALEGHFTEHHGFQIKALLELVEFGEKQLCQLEAEIHRLLLLPEPEPHRSHGSAIAEVDTEVDTSSTPPTSPLQRAVELLDTIPGVDHITAWTLIAEMGANMDQFGSASRLAKWAGICPGNKDSAGKRLSGKTAKGNIWLRRALCEAAWAASRTKDTYLAAQYKHLILRKGKKKTIVAVGHSILRIAYYLLTRQCPYAELGGDFFDRSNQEAVRSRLVKKLVRMGYQVTLTPISSGAEA

SEQ ID NO: 99380 - protein, 343 aa, unidentified
MGEVHFIGIDLAKTVFHLHGAGRDGTVIFRKKLSRSRVLEFLSKWDKCTVAMEACATAHFWGREIAKLGHEVKLIPPVYVKPFVKRQKNDTNDAEAIAEAAVRPTMRFVAVKSADQQGLGTVFRSRDLLVRQRTQLMNSLRAHLAEFGIVSAKGTEAFKALIAAAHSAKTSLPDDVLEIMGLYVAGIAECTTKITVLEKKIKLRTRQDRLTKRLQTMPGVGPMTAAAIQAFAPSLDSFGSGRDFASWLGLVPKQHSTGGKARLGRISKMGQQDIRRLLINGAMSLINATLRPGKLRNKWLEALLDRKPRLVAAVAIANKMARALWAMIVKEQDYIEQPQRIAC

SEQ ID NO: 99381 - protein, 375 aa, unidentified
MTKIIRIGVDTSKSVFVLHGVDEADRPALRKKLRRKQMVEFFARLEPTRIGLEACGASHHWARTLQGLGHDVALLPPQHVKPYVQRNKNDSRDAEAICEAMSRPRIRAVPVKTMEQQAALMLAGTRDALVRRRTQLTNTIRGYAAEFGLTAAKGLDKIEPLLARIAAADELPELARELFGLYAQEYAQLKEQLRTIETRLMAWHRGHEASRRLAEIPAVGPIAASLTVMKIADPKAFRCGRDFAAWLGLTPKDHSTAGKTRLGGITRAGDEALRSVLVAGATAVIQQARKGRGRHSRWLLDLIARKPPKLAAVALANKNARIVWKLLVSGERYNPARAMRDTAASEGRVAALGEAPRRDPRLPASRADATATTGG

SEQ ID NO: 99382 - protein, 400 aa, unidentified
MNGTGRIEVYVGLDVGKGEHHGTALTPAGKRVFDKPLPNNEPRLRELFTKLQARHGAVLVVVDQPASIGALPLAVARDAGCRVAYLPGLTMRRIADLYPGEAKTDARDAAIIADAARTMPHTLRDLAPDDETIADLNMIVGFDDDLAGEVTRIKNRLRGLLTQIHPSLERVLGPGLDHPAVLVLLERYGSPAQLRKAGRRRLISTVRPKAPRMGERLVDDVFTALDEQTVVVPGTDAAALIVPSLVTSLPSVLDQRKLLAARIEELLEAHPLSRVLTSMPGIGVRTAARILIDVGDGSNFATAGHLAAYAALAPATRRSGSSIRGEHPSRRGNKQLKRAFYLAAFASLSQPDSRTYYDKKRREGKHHVAAIVCLARRRIDVLFAMLRDGTFYEPVTAATA

SEQ ID NO: 99383 - protein, 353 aa, unidentified
MTSTKYIGMDVHKESISIAVRNDAGKIVMECVIETKASVIVDFIHGLRGELQVTFEEGTWATWLYDLLKPQVTKLVVCDPRKNSRQGNKNDRIDARELADRLYMNKLNAVYHGGAGVRTLKELARSYLTISKDLARVMTRVKAIYRSWGIPCAGKQVYAPRHRAAWLAKITEVGVLRRAEFYYQQLDALRSLRHEVRRALLAESKKHKATKLLCQIPAIGPIRAALLIALIQTPHRFRTKRPLWKYSGFAIETHSSADYRSVQGQLHKSKKQVSVRGLNRDCNHDLKNLFKSAATIASVKPGPFQEFYAALVAKGMRPEMARLTLARKMATIVWIVWKRGVSFDAQYLKPQTA

SEQ ID NO: 99384 - protein, 462 aa, unidentified
MKLYLGGDVSKGYTDWVILSDKKQTVLENFQLDDTYEGHCKLYSTIEAYFDKYPGLEMYAAVESTGGYENNWVHTLKSYQKVFNLKVARINPAGVTFNRKAGMKRNVTDAISALSIAEFMIDHPENITYNQDDKWKSLCRHWNFVEMQKQQRVQTINQLETILYSANPTLMRFKKGDFPNWLLELIIQCPTADKLARAKPEKLAKIPYLSLARAKELVVEAKQNIASATDRNAEILVTQIAVQIKSFDQNIKSQMELIERDLICPEIELLKSFKGISTISAIGLLLEIETIERFPTVKGFSCYFGLHPKFKQSGDKIIGVRMSKQGSKNMRKILFNIAKGAITYNPLITEVYEKKISHGMAKMAAIGVCMHKILRIIYGILKNKQAYNPLIDKQNCERSKEKQQDKLMQENANIEKTRRYQEFDVTAPISRKQTKKRREHDLSQCEITSQSTGSTCSSETKL

SEQ ID NO: 99385 - protein, 391 aa, unidentified
MIFVGIDVAKDKHDCFILNSEGTVLADVFTIANNRIGFETLLSRIQSCSQGESKIKVGLEATGHYSYNLLGFLLDSGLATYVINPLHTNLYRKSLSLRRTKTDRIDARTIAMMLMSDVDLKSYSNTAYHNEELKSLTRYRFDKVKERAKLKSSVARLVNILFPELEKLVSSLHIAVVYALLSNYPGASYIASANTEELAETLCTASKGRYTKSKTAEIQVAAGVSIGSKMPAKSMELKHTIALIRELDKEISEVESAIDKITSQMDSPIFTIPGIGRHMGAMILAEVGDFSNFASADKLLAYAGLSPSTYQSGQLQNCYAHMEKRGSRYLRYALFNAAKYVCLWCPTFSAYLEKKRSEGKHYNVAISHAAKKLVRLIFAMQRSGKAFLADY

SEQ ID NO: 99386 - protein, 348 aa, unidentified
MTLTIVETRAVTGGVDTHADVHVAAALDPIGGLLGVREFPATAAGYAGLLAWLGGFGTVCLVGIEGTGSYGAGLARHIAAAGVRVVEVDRSDRQDRRRQGKSDPLDAVSAARAAQSGRAAGAPKGRDGQVEAIRALMVAKRSARSERTQTINQARALIVTGPDDLRARFARHTPADLAAELASLRPRPGATVGYATRIALRELGRRARFLDGQLGRLDEFIVPLVTVRAPGLLALYGVGPDTAAMLLAAAGDHPGRLRSEAAWAHLCATAPLSASSGKVTRYRLNPGGDRQANHALYRIVITRLSSHPPTRAYASRRTKEGLSKKEIIRCLKRYVAREVYPHLRPPAG

SEQ ID NO: 99387 - protein, 442 aa, unidentified
MPKSEVSQQAQEPEFAAFVGIDWADQKHAWCLQAVGSTQRESGELEHKVETVEAWVTQLCQRFGGDRPIAVALEQTKGALLYMLAKYECLHLFPVPSTMAASMRKALYPSGAKDDPTDCDLLLDLLLLHRDKLHRLTPDTEATRRVQNLVEERRKLVDEKTAQLNRLTSNLKIYFPQMLEWFEALDTELVCDLLEHWPTLEELQKVSSEDLRRFFHQHHCRNRELMERRLQGIGQARPAIQDRPVIEAKRVVVRVTVQLIRSLRAGIAELDGKIAEATATHPDFFLFASLPGAGEVMAPRLLAAFGSQRDRYSSADEMQIYSGIAPVLERSGKTKWVHFRRACPKFLRQSFHEWAGHSMVKSAWAQAYYRQRRKQGQGHHAAVRALAFKWIRILFRCWKDRVAYDEKKYLAALAKRGSPLRELLVASAVRTCEIPSEIVVNP

SEQ ID NO: 99388 - protein, 346 aa, unidentified
MKYFAGLDVSLEETAICVVDEAGAMVREARITSEPEALVAFFQGSGLVLERIGLEACSLSAWLHESLVAAGLPAVCIETRRAKAAMGAMPNKTDRNDARGLAQIIRTGWYRAVHVKSPACRSWRALLTARRLLLNKMRDLENGLRAVLREAGLKLGTPTRKEFAARVRELTAADPVLSVLAEPLLTIIAAMTRELAQLTKRVLDIVRDEPVCRRLMGVPGVGPLTALTFRATIDQPERFRHSRDVGAHLGLTPKRYQSGETDVQGAISRCGDELARTALYEAAHSLLVRSRRWSALRAWGMQVAKRRGMARARIAVARKLATILHRMWADGTEFRWGKEGTMPAAA

SEQ ID NO: 99389 - protein, 360 aa, unidentified
MGLYAGIDLHASSNYLAIVDESGKRTLRCKLPNDGEEVVSALEPYRDQMMGVAVESTFNWYWLVDTLNESGLRVHLANPAAIQKYSGLKHCDDKYDAFWLAEMLRLGILPEGYIYPKEERPLRDLLRKRGHLVKLRTSLILSLQNIVARNRGLRVNANEVKRLKKNRIPPLLEENEDLAMAGRVSKETIDFLTRMIRDIEIAVARKTSLKDSYRNLLTIPGIGRILALTIMLETGPIGRFPKVGNYVSYCRKVGSRWTSNEKAKGKGNKKNGNKYLAWAFSEAAELARRFDPECRSYYNRKMHRSNFLVAHQALAHKLARAAYYLMKDNVVFMPEKLFGRSPPAQEPGRAHVPCRERGTR

SEQ ID NO: 99390 - protein, 329 aa, unidentified
MFIGLDLHKNYLQTAVMDDQGRLLSQEKIPNKDEYIEEFTRKTLKDSHAEIVIESSSTWYHVYELLSRNQNCHIVLSNPVKTKAIASAKVKTDKVDALTLANLLRTGYIPESYIPPRHIMDLREMVRYRTSLVRMRVEAKNKIHAILLQNGTRLKEKPFTIGFVEELRRLGDYRIDGYLNVISSLSHQIQAISNTIKKEAREDESTRLLMTIPGVGYYSALLILSEIGDINRFPDSHHLCSYAGLTPSTHSSGGVTYHGSITRTGSRYLRWILTECAKAHIRSQRDSQLTRFYTEVARRRGGAKATVAAASKLLRIVYWVLKEKRPYHS

SEQ ID NO: 99391 - protein, 338 aa, unidentified
MQTYAGIDLHSSNNFIGVIDAKDKRLYSKRHANNLKQVVKALGPFKKDLQGIAIESTYNWYWLVDGLQEQGFKVHLANPAAIQAYSGLKHTDDKWDSFWLAHMLRLGILPQGYIYPKQYRSVRDLLRRRLMFVRQRTSQILSLQSMITRNRGLNYTGADVKRFRDEFIDVLFTDVHLNFTAKKQMATIRFLDKIVSQIETQVHSQIKVKKQFRMLLTTPGIGTILGLTIMLEVGDIRRFAKAGHYSSYCRCVESKKISNGKKKGENNKKNGNRYLAWAYVEAANHAIRACPKAQRFFQRKMSKSKRVLAIKALANKLTKATYYIMRDQVAFDSTKLFG

SEQ ID NO: 99392 - protein, 412 aa, unidentified
MEVIHERCAGIDISKIDVKVCIRVPGRGRQRRKEVRTFSTMTNDLLAMRDWLIAERITVAGMEATGCYWKPVFYLLEEHMDTWLLNARHMRNVPGRKTDVKDSEWIARLVEHGLVRPSFVPPEPIRHLRDLTRYRTELVREHTREAQRLEKLLEDAGIKLSVVVTNILGVSGRDMLAALIQGERDPRVLADLAIGRMRGKTDELIEALTGQFAEHHAFMTRRMLHRIDELDADIDAISARIDADLEPFRRQIELLITIPGVDRRVAEVLTAEIGADMTCFPTAEDLASWAALCPGNNESGGKHKSGRTRHGDPWLKGALGQAAICASRTKSTYLAARYRRIAARRGKKRAIVAVGHTILTSAWHMLTHDVPYQDLGGNYFLERTGRTRQTRRLVSQLTQLGYHVALNPLEVA

SEQ ID NO: 99393 - protein, 486 aa, unidentified
MNSIVLTANVQPNLDVNYIGMDVHSDNVVVCVRRNTINSSGQLVGKTIKTKKVVIKNSQEPLVELLSKYADGQQHIMTAESTFNWYWLADIAEDHGWNFRLADPCTVSQANIKAANDETDAEYLADRLRTGSLKSTSVLPRQLRGVRDLMRHRLRVMQEVSDKKVRLSNLYHNHCAHPMHGKLLAALQDAYDEINIDAVLESGICNNGSELIIGDLLTGLREAETRLAKIEAAVYGRIDEIDSYKAERMLLKTSMKGCGDVLSAIIVTEIGDISRFRTMGDFVSYCRLAPTSKLSNGKSKGQGNAKNGNAYLSWALTELATLMARFNEPIRRYLERKQEKTGLRVVAVRALAAKLARCVYQVLRKKESFDLGLAFGSKPTHGQMTAAAEAAQTPPEPALPPVPAVAGEHHCPAEESDAPIVVKEPVPVKSKRSTRKKAVSAASSEPAVAAEGRQTARKADRVKARCALTTTPPSCAGTSCVKSRRE

SEQ ID NO: 99394 - protein, 370 aa, unidentified
MLDTTTFVGLDVHARSIKAVSLDVMTGEVRAATFGYDAGAVAEWVRSVDPGARCVYESGVTGFDLQKRLSGLGVDCVVGAVSKMIKPSADRRRKNDRNDAEFLARMLSVGNVVEVWVPDDECEAARDLTRALEDARDDLSRSKQRLSKFLLRHGLVFDERTPTGRRKGNWTRAHWSWIESIRFAERADEEVLAYYVDAVRRAAEEKARLEGLVEAEARKPRWRRRVDSLRCLKGVDTASAADLVFEAGEFSRFRNARSFAAWVGLTPSEHSSGESDRRGAITKAGNKHLRKTLVEAAWHYLTCSGRPKDPARGQAPDRGARRHAAKGVRRLVERREALLARGVHGSKANVATARELACWVWAVGLMAEEA

SEQ ID NO: 99395 - protein, 366 aa, unidentified
MKKNSTVVVGRKQILKQARLTIGLDLGDRTSYYCILDAAGNVIWERSVPTTLNGIRQGFGRMPRCRIALETGTHSPWVSRQLSEMGHEVIVAHARKVQLIGQSSRKDDQLDARTLARLARIDPGLLSPVKHRSAQAQIQLTVIRARAALVSTRTALVNAARGLTKSYGQRLKKCGTEQMNRDSSEGLSQELREALDPLLREIESLNERIAEYNRRIEKIAKEVHPEVARLKQVQGVGTLIALTYVLTLDEPHRFRRSRDVGCFLGLRPGRRNSGQSEPQLHISKEGDRYLRTLMVQGAHYILGPFGQDSDLRRWGLKLAERGGKNAKKRAVVAVARKLAVLLHKLWVSGEAYEPLRNNHKGARAVA

SEQ ID NO: 99396 - protein, 339 aa, unidentified
MQIRSVGIDLGKTTFHLVALDDNGKVLLKKKFTQKQLITFTANLQTSLIGMEACGGAHFLGRALRAQGHDVKLIPAQFVKPFVKSNKNDFLDAEAVDRQNMRFVPIKTDDQLDLQALHRVRDRLIARRTSVINQLRAFLLERGLVFAKSPAKLREHMPEILENAEEDLTPRMRNLLAMLWNEWKDLELQIEEMNDEVERIASSDAACMRLRQIPGIGPLVATAIVAAIGNGAAFHKGREFAAWLGIVPRQYSTGGKARLYGISKRGNGYLRKILIHGARAVVLRSKRDRIAIGGWMTALEARAPRNVLIVATANKLARIAWAVLSSGQDYRAVQDPVPA

SEQ ID NO: 99397 - protein, 344 aa, unidentified
MRHGAIDLHKKSSRICLESPGGRYEEFNVSTERDALTAVFEKRPKCKLLIESSTESEWVARLLEQLGHEVVVGDPNFQLMYATRSKRIKTDSRDGRALCDACRLGNYRAAHRTSGPWRKVRQELAVRDALVRSRTRMINVTRSLLRQEGVRLPSGSSEDFADRFKKVKMPPELSQCVHPLVRTIRLLSGRIGRCDQRMAQLAANQERVRRLMTAPCVGLVTALGFAAVMEPAERFGSGEQVACYLGLVPSEDSSSERRCLGRITKTGDKRVRWLLVETGWRLLRSNDEDARPLRRWGEKIAQRSGRAKAAVALARKTGVRLWAMDRDKQEYRAHPPRRVMSKIA

SEQ ID NO: 99398 - protein, 348 aa, unidentified
MSKHSVQAGDIAGLLRRFAQLKEKARVRTGRDFPIIVIQEAGLDGFWIHRVLQSEGIESHVVDAASILTSRRRRRAKTDRIDGETLVRTLMAFKRGEPRVCSMARAPTPQEEDRRRVCRERKTLVGERVQHVNRIKGLLFAQGVFGYEPLRKRRRERLEDLRTGDGRPLPVHLKAQLIRELDRLEVLLEQLKAVEAERDALLKPATDEAAAPAAMLARLKGIGPETAAVLWSEGLFRQFDNRRHVAAYAGLAPTPWQSGSIDHEQGVSKAGNPRLRTTMVELAWLWLRNQPTSALSLWFHERVRRLGGRMRKTTIVALARKLLIALWRYTTAGVVIEGAAMKAAPATI

SEQ ID NO: 99399 - protein, 371 aa, unidentified
MEQPTRFIGMDVHKETIVVAVTAAGEVGKATPHGTIPNTTTALEKLVKRLRQAGTGPLKLCYEAGPCGYGVYRTLTRLGEDCLVAAPSMIPRRSGERQKNDKRDAASLAVLHRGGLLTSVWVPDAAHEAMRDLVRARLAAVRAVRTARQQLSAFLLRHERRYTAGRQPWTRTHRLWLAEQRFDQPAQQIVLEECIEAVRLAEQRRDRMDAHLRAELPNWSLFPLVQRLCALRGFDAIAAAGAVAAMGDPARFIKARDFMAYLGLVPSEHSSGQRRRLGAITKTGDVRARSVLIEAAWSYRFPARIARAKLPAIEGVPETVRQIAWKAQTRLCQRYRKMIARGKPKPLVVTATARELAGFVWAIAQLPDAIE

SEQ ID NO: 99400 - protein, 444 aa, unidentified
MSDLETSSEPKFAALVGIDWGDKKHAWALQVEGSSQIGRGEMPHAPEAIQEWVTELRRRFPTGCLAIALEQSRGPLVFALSKYEHLVLYPIHPTSAADYRKVFRPSGAKSDGPDAALHLDMLVRHRDKLRPLHPDTPQTRTLQLLVEDRRQLVNERTRYSNRLRADLKSYYPQVLQWFEDLYTPVVLGFLERWPTLEELQKAKPATLRKFFQQHRCRDDAHHQTRLQAMRTALGATTDLAVITAGRAATCAAVRLLGTLHQSIQEYDRQIDQLAKAHPDFAIFDSLPGAGEVMVPRLIAAFGTQRDRYRHAAEIQQYSGIAPVTQASGQQHWVHWRWSCPKFLRQTFHEWAEKSIPYSDWAQAYYRAQRDDKNKSHHAAVRSLAYKWLRIVFRCWKDRKPYDESIYETALRRHKTAPDPQPSPFELNVRWTSCGSFQKIALKTP

SEQ ID NO: 99401 - protein, 427 aa, unidentified
MAYRIAGIDVHKKMLAVVVADVEVDGEFHFERQKVGTTPADLRRLAAWLVEHEVEEVVMESTAQYWRPVWEALEQHWRPQRRARVGAAAGSGTLHLAQAQSNRGSGGRKKDFPDAERLVKRLVAQELTLSFVPDAEQRLWRTVMRRKYQITRNRVQLHNRREALLEEAHLKVSSLVSDLLGISARRMLQALANGETDPTALAALAAPRLRATTTQLCDAFQVCPTLHPVYRRLLKLTLEELRVIEDHLDQLDQQMADLLAAHHEAVQRLAEVPGLGVDSAQQIIAEVGATAATFPSSKHLASWMGACPGTEESAGVNDSHRCPKGNRQMRRVLNQAAHAAVKARGTIFAVVYRRIVPRLGHTQAIGAITHRLCRLIWKILHERVRYEERGPAVSVEAKKVRTRKMIRELRSLGYRVELISPPTGNPA

SEQ ID NO: 99402 - protein, 325 aa, unidentified
MTYIGIDISKATFVAAFLHGKSYRTETFPNDAKGIRRFISKLDPAIHHCVMEATGNYCFLLLYLLDKSGIRASLINPKKIKNYARVMMSVTKTDSKDACLIADFGERFKPEPYKFPSEQIMILKQKKTVLRQLQKQLTATKNLLSSLEPLPVKDKKCVNSLKQTITFLEKQIKYMQQEMEAVVTEVFDRQLKLLTSIKGIGVTLATALIIATGGFTYFDNAKQLSRFIGICPTIEQSGTSINIRGHINRNGDETLRSMLYVAAWSASQHNKACKECYQRLRGKGKSGKVAMIAVANKLVRQAFAVVTSNKSYIDGFVSTKPDSAL

SEQ ID NO: 99403 - protein, 342 aa, unidentified
MSVYVGIDVHRKRSQVAVIDAKGEVLANRNVPNGAEPILKVIGGLPPGTPAAFEAAYGTSWLVELLEDYGFGPHLVHPSRCKAIASARLKNDKVDAAILGQLLRADLLPEAWIAPPAIRQLRALLRHRVHLVRLRTRLRNRIHAIVADYGYDRPAGGYWTGPGRAWLAALELSAVSRELVEDYLGLIDALQDRIDRLDWEIRQRARSDPRVKVLTQLPGVGPFTALVILAEAGDISRFASARKLASWAGLTPTVRGSDRVAHYGHISKEGSAWLRWVLCEAAQTAKRSPEFAPAFQRIAKRRGKKIATTAVARKLATRAWHLLTDAGHAAAPPPAAPPTAAR

SEQ ID NO: 99404 - protein, 402 aa, unidentified
MNAVGIDVSKSKSVVAIMRPFGEIVSTPFEIKHTASDIHSLIELINSVEGESRIVMEHTGRYYEVLAHQLLEANLFVSAINPKLIKDFDNDSLRKVKSDKADAVKIARYALDKWQNLKQYNVMDELRNQLKTMNRQFGFYMKHKTAMKNNLIGILDQTYPGVNTYFDSPARSDGSQKWVDFASTYWHVDCVRKMSLNAFIDHYQNWCKRKKYNFSKSKAEEIYGKAKELVPVLPKDDITKLIIKQAVDQLNSASITVESLRTLMNETASKLPEYPVVMAMKGVGTSLGPQLMAEIGDVSRFTHKGAITAFAGVDPGVNESGSYEQKSVPTSKRGSSDLRKTLFQVMDVLIKTHPQDDPVYQFLDKKRAQKKPYYVYMTAGANKFLRIYYGRVKEYLASLPES

SEQ ID NO: 99405 - protein, 340 aa, unidentified
MFVNYKVMQNFYFIGIDVSKKKLDICVMSNSKVLKEEQVSNHPQAIATVIAGIKEELSMSNDCFIICAEHTGQYTYPLICACKSVGSKLWLENASQIKYCSGVTRGKNDKVDARRIAEYAMRFFDKAKPYQRPIEELMRLKQLEAERSLYLTDLAKYKAQLSDQEGFMEDKIFKRKAKRLKEMIKSLEKTLKEIAQEMADVIYSSEELSRQMRLLKSVEGVGPIVAMNMIIATEAFTRFDNPRQFNCYVGVAPFAYTSGSSQHSRNRVSQRAVKYIKCLLHMAAVAIAHKKTGDLKTYFERKVAEGKNKMTVLNAVRAKLVARMFAVIRNNRVYQPILSV

SEQ ID NO: 99406 - protein, 403 aa, unidentified
MNSVGIDISKGRSTIAVMRPFGEVVTSPFEVRHTDSELSELAKQLKSLDGETRVVMEATGNYHAPVAKQLHDAGLYVSVVNAKLVHGYGNNDLRRVKTDRKDAIKLANYGLDRWLTLPRYIPEENTRLLLKNCYRQYRQYSKVQTILKNNLISLLDTVFPNVNRLFSSPIRGDGSEKWVDFVAEFWHCRCVSEKSERAFTSKYLRWCRKHGYNFSEEKACAIYAEASGHIGVMPKSETTKLLVEQAVAQLRATSAALATLKQEMQSLASKLSEYPVVMDMFGVGPTLGPQLIAEIGDVRRFYSKKALVAYAGLDAPPNDSGDVTGRHKSMSKIGASSLRRTLFLVMSVYLQNAPLDEPVYQFMDRKRAEGKPYRVYMMASANKFLRIYYATVKAYLESLEHTA

SEQ ID NO: 99407 - protein, 324 aa, unidentified
MSDSLPTNVYVGIDVGKTYLDVAVGEQAAPWRVANDPAGLSELLARLRTAAPALIVVESTGGYEVPVLAELALAALPVAVVHPGRVRAFAKSLGQLAKTDQLDARLLARFAAAAQPRQYQLPSTDEIQIGAWLSRRRQLIEMSVAEQNRLETAPPLVRAHIQKHLAWLAAELAEVDHDLDQRVQQSPDWQAQDDLLRSAPGVGRVTAATLLAELPELGHLSPKAIAALAGVAPMNHDSGRQRGQRQVHGGRAAVRRTLYMATLVAVRWNPTLKVFYEHLVNQGKHKKVALVACMHKLLTWLNAMLRDKQPWQPDRGCKNLLATP

SEQ ID NO: 99408 - protein, 410 aa, unidentified
MSKLFVGIDVSLRKNNVRCINSNGDTVRKFNVPNTLSGAQALVDHVAQAAVLNSSQEVVLGLEATSNYGYHLASFFKSSDKMAPFSPQVHVLNARVVHQFKKSYNDLPKNDDVDAWVIADKLRFGRLPQEVFMDERFLALQRLTRSRFHLAMMISREKTYFLNNLFLKFSSLRQEKIFSDQFGATAIAVVQEFLSPDELAAMPLEKLVSFLEEKSKNRLVDSEGVAKALQKAARSSYRLSKSLADPVNASLATSISVIKAMQSELKKLDKLIAKHLEALPQTLNSIKGIGPVYAAGILAEVGDIKRFKNHKSLAKFAGLVWNEQQSGEWKAEDIRRVRSGNKYLRYYLVEAANLIRLHDQEYGCFYRVKYDEAHTHKHKRALVLTARKLVRLVYALLRTNQLYTPRKRGD

SEQ ID NO: 99409 - protein, 289 aa, unidentified
MEHELHYIGIDTAKEKLDVDVLRPDGRHRTKKFANTTKGHDELVSWLKGHKIDHAHICIEATGTYMEPVAECLYDAGYIVSVINPALGKAFAQSEGLRNKTDTVDARMLAEFCRQKRPAAWEAPHPLERALRALVVRHQALTDMHTQELNRTETAREVQRPSIDAHLLWLEAELKRLEKQIKDLTDDDPDMKHRRKLLESIPGIGEKTSAVLLAYIGLKDRFAHARQFAAFAGLTPRRYESGSSVRGASRMSKAGHVSLRRALYMPAMVATSKTEWGRAFRDRLAANGG

SEQ ID NO: 99410 - protein, 353 aa, unidentified
MTSLTDLREVVDVVIGVDTHVHTHSAAAVDARTGGVLGEITVQATADGYEQLVEFADEHAALRAWAIEGTGGHGAGLARHLSRREEVVVELDRPERAKRRHGAKSDPLDAIRAAREALARPRLGTPRSSGDRQALSVLLAARRSAVNAAGDAQRQVFSLVIAAPEPIRERFRGQRLPAMLKTAAALRVHPSWDLETTTTVTTLRSLARRARALAQEAAEHEKTILRIVRSWRPDLLDQLGIGPIVAATVLCAWSHPGRIHSEAAFAMLAGVAPIPANSGQVTNRHRLNRHGDRQLNRALHTIVLARIRHDHTTHDYVARRTSEGKTPREIKRCLKRYIARDLYRLLEHRPIPA

SEQ ID NO: 99411 - protein, 345 aa, unidentified
MQIRSIGIDLGKTTFHLIALGMRSQVVARKKFSRLQLLHYTANLPSSLIGMEAGVGSHFLGRALREQGHEVRLIPAQFVRPFVKSNKNDYRDAEAIAEAVERENMRFVPIKTEDQLDLQALHRVRDRLVARRTSVINQIRAFLLERGISFRKGPASLRRQMPDILENADEKLSTRMRRLLDFLWQEWKGLQSQIESLNADLEEIASSDASCLRLQQIPGVGPLVSTAVVSAIGNGAAFKKGREFAAWLGLVPRQWSTGGKAKLLGISKRGNPYLRKMFIHGARAAVLRVKRKESTLGRWMSGLETRTARNVVIVATANKLARISWAVLASGENYHPTHKALAFSN

SEQ ID NO: 99412 - protein, 335 aa, unidentified
MSQEKYIGLDVHQATISAAVMDAHGKLLMECLLETRADTIVEFIQGLHGTLSLTFEEGTSATWLHALLKPHVHRLVVCDPRKNALLKDGNKSDRVDARKLAELLRTKQLKPVYHEEHGIRALRELGRSYLTLTKDVTRVMNRIKALYRSWAIPCSGTKVYASRHRAAWLDKIVEPGVRLRAEHLYQQLDSLQPVRLRARQELLRESHKHPAVKLLRQIPSIGPIRAALLVALLQTPHRFRTKRQLWAYSGFAVETHDSGEYRYVGGKLQRNHERITVRGLSDNHNKDLKNLFKSAAISASTRPGPLHDFYAALVAKGMRPTMARLTLARKMATIS

SEQ ID NO: 99413 - protein, 395 aa, unidentified
MNTITTTASTTTASTNTIILAIDLGKYKSVACVHDPATGEYRFTTFETTRAELRKLVDQERPAVIVIEACLLAGWVHDLCGELGIRCLVANTASEAWKFKHLKRKTDRDDALRLAQLYLLGQLPTVTLPTTTVRQWRSLIANRQTLVGRRVAVQNRIRALFVAQGLPAPRGAKAWTETGLAGIATQAKSLAECGPDELWRGLLDLALTEYRQVGQLVAQATARLDALGKQNADVILLETAPGLGPRTAEAVAAYLIDAGRFKTGKQVSAYSGMVPRQHQSGEMDRRGRITKRGPALLRKMLVECAWCMLRYNAWARGIYQRLTGGGQRRKKQAIVALARKILVRCWAMLRDRKAWRDPQTEPKQQLPPSKRARQAEAQRRRQEKKEPALAPAATQ

SEQ ID NO: 99414 - protein, 345 aa, unidentified
MKTIMIGMDLAKSVFQVHGVDGAGQVVFRRQLKRGQVEKFFAKLEPSVVGMEACGGAHHWGRMLQAMGHEVRLMPPAYVKPYVKRNKTDGRDAEAICEAMQRPTMRFVAVKQPEQQAMMAVHRTRAMFVRQRTMAANGLRAAFAEFGVVRPVGNQGLAELMALLPEPEGIPAQAHGALMMLVRRWQDLDADIRVLEQQIVRSVRSNEGARRIMAIPGVGPITASAVVAAVPDMKQFRSGRGFAAWLGLTPRQNNSAFTRRSGGISKQGQRDIRCLLILGASSHLRQEKARKRMKVSTDPWLKGLLARRPVKVAAVAQAAKTARIIWALLAKDQCYRSPAYLQQAA

SEQ ID NO: 99415 - protein, 415 aa, unidentified
MALKIVYKICCGIDIHKNFVVACIAKTDMQGVTTYERHHFSTYTKGLKQLLKWLLDRNCKDVCMESTGKYWIPVYNVLEHDCSIVLAHPKYVKAIRGKKTDKKDAKWIADLFKHDLVAGSFMPPADIRQLRDLMRYRFKLTCFKSSEKNRYQNCLTVSNIQLASVVSDTFGKSSQKIIAKILENPDDTSFDIGPLIHGSMKNKLPELELAIDGYITPEQAAKLKIIKEHFDNLEARKAELEELILALANPYQQEISIILTAPGFKNTFTAIGIISEIGTNMEAFPSAKHLCSWAGLTPTNNESAGKKKSVRVSKAGCYIKPLLVQCANAAFKSKKHPEIRDRYLRIKKRRGHKKAIIAIARMLLTALYHMLKNGENYNSDLYQKSDILPTTREITVEQAILMAQFQGYRIKSATD

SEQ ID NO: 99416 - protein, 343 aa, unidentified
MDHFGGLDVSVKETSICIVDETGRIVREVKVASEPQALLKVLGNQAYRFKRIGLEAGPLSQWLFSALAEAELPVVCVETRHMQAVLKAQINKTDRNDARGIAQMIRAGLYRPVHVKTLRSQKLRMLLTHRKLLQSKAIAIENDLRGTLRNFGLKVGMVGTARFEARIQELVENFPDLGVLVEPLLVVRRALREQIVLLHRRLLAIVREDEVCRRLMTTPGVGPVVALTYRATVDVPARFRKSKSVGAVFGLTCSKYQSGEVDRSGKISRCGDEMMRTMLYEAAQSMMHSKKWSWLKAWAMQIARRRGMKRAIVALARRLAVVMHRIWVDGTEFRWTREQAATA

SEQ ID NO: 99417 - protein, 420 aa, unidentified
MKSPSDMEFTVFVGLDWADKKHDICLQAAGCEDREFDCFTHRVTAIEQWALSLHQRFGGRIAVALELAKGPIVYALQKYDFLVLFPINPSMLAKYREAFKPSRAKDDPTDAELALDLLVRHRGRFKPLQPQSEQMRTLQYLVEQRRRLVDDKVRYTNRLGNALKQYYPQALDWFADRDTVLFCDFIARWPTLIQVKRARKTSLVTFFRAHNMRFPKLIEKRICAIKAATPLTQDGAVITAYKLQAQVLVEQLRVTLQAIRRFDQEIAAIAPALPDYAMFNALPGAGSTLAPRLLVAFGEQRDRFAGADECQKYFAVAPVTERSGDKTWVHWRWQCSTFLRQTLVEWAGQTINKSFWAGAYYRQQREKGSSHQAAVRALAFKWVRILYRCWQTRTPYDESKYLEALRRRGSPLLKQLGETM

SEQ ID NO: 99418 - protein, 400 aa, unidentified
MAFAGWDWATTTHDFTVIDDAGSRIERAAIPHTEDGITRALARLARHGDPAQLPVAIETTRGLVVDRLLAAGHPVIPIHPNAFHAARPRWGAARAKNDPGDSFKLADYARTDHHRLPVLTPTLPQTLELQALTRQRGDHLEIRIAAVNQLAALLDEHWPGGKTVFAQLHSMIALEFLDRYPTPQAAANLTAARLEAFCRRRHYSGRRTGVELRARLRSAPTAASLLGEPVLAQLIAAQVAVVRSIQASLDAVDAVITDTVAAHPYARLLADLPRIGTLNLAQIIGEVGPILERATSFDQLAAETGIAPVTRASGKTCTVAFRHATNRRARQALVTWIDNSRRAAPWAEQRYTAARARGQRHPHAIRTLGRAWLRVLWACWRTKTAYNPAAHGTAGQPIAA

SEQ ID NO: 99419 - protein, 471 aa, unidentified
MAGRRLVGIDLGIASAHTVRVLDETGETLAKRKCWPTVASLTEIESAALVGAEEGCRLEVIMEPTGPAWLPIAVFFAARGHAVFRVSSAKASDLRKFFSHHTKTNGIDADTLARVGIVDRAGLIELSLPDAARAALDRRVRATDRLVAQASEHKVRIKDLVRQVLPMSPLTGDLGVADLAVLERFADPRRLVALGVKRLTTLIAKASHNQLGTERAARWIAAAEASLELYGAHPAVAFDDLAAEIATEVRLLRAMQTELAVHADAREAAYQRVDPAGLARSLPGLADVGGPALVATMGEPARFRRGKQFRSFTGLVPKASETGNTDRKGQPMSKAGSSLLRTTMVRAADTARKQDPQLARIYYLQMVERGKDHLGAICVVAAALAERSWTVMARGEPYEIRDNDGRTVTPGEAKTIIAEQWTVPADVRARRRSKKAGKAPKNVLTGQSRPPAQSAGRRGDLPLTQSSAVAS

SEQ ID NO: 99420 - protein, 410 aa, unidentified
MNAAGIDVSKGKSMVSVVRPFGEVVAKPFTVRHTGSELKELADYLKSLDGETRIIMAHTGRYYEPVAQFLHDAGLYVSAVNPKLIKDYGNNSLRMVKTDKADSRKIAKYGLDNWVELRQYVSMDKIRYQLKTLNRQCNLYGKTKTMMKNNLIALLDQTYPGVNDLFDSPVREDGTQKWVDFAASFWHLECVKNMSLDAFTGRYRKWCKRNKYNFSSDKAAEIYAGVQDQIAMLPKDALTKLMIRQAINALNAVSATLEKLKAEMLELSSQLPEYPAVMGMRGVGDSLGPQLMAEVGDVMRFARRSAITSFAGVDPGADQSGGHEAKSIPTSKSGPPELRKALFLVMDHLIQTKPLDDPVYQFTDKKQAEGKPYLVYMTAGANKFLRIYYGKVKAYWAKLEQPLAPNPEQH

SEQ ID NO: 99421 - protein, 393 aa, unidentified
MTGSICEHVTDVDSAKIFAAIELSKASWLVALHLPSHDKISVFQVPGGDVDRLLAIFERARETAKARSVLPTVEIHTCYEAGYDGFWLHRLLHAHGIHNQVVDSASIQVSRRHRNVKTDHTDAESLLRVLMAWHRGETKACSIVRVPTPEEEDLKRLHRSRETLLHERVRHVNRIRGLLCLQGIRHIDPGRDGWTAALVGLQTRDGRPFPVRLMAEIRREGKLLAVAQTLLREVGAELEALVRVKSSGRRQHAVRSTVLHPVALQLARLRGIGPTFAAVLSTEVFYRTFSNRRAVASFVGLTPTPYSSGTSSREQGISKAGNAWARHNAVELAWLWLRHQPASGLTRWFHARVGDAKGRVRRIAIVALARKLIVALWRFVDTGLVPDGAIVKG

SEQ ID NO: 99422 - protein, 348 aa, unidentified
MKIIGCDFHPSYQQIALVDTETGELWEGRLEHQEGEARRFYQALHGQRVRVGMEAVGNSQWFEKMLAEMGHELWIGDAAQIRRLVVRQQKTDRRDAQHILGLLRDGRFPRLWVPSAEVRDLRQLLRHRQKLVELRTQVKNQLQHLALNQGVQRKRRLWSREGRAVLEQLPLEGWTARRRAELLAMLDQLEGQVAELDQAVCTEALRRPEVRLLMTHPGVGPVVGLAYVLTIGPPQRFPRGKQVASYLGLIPREHSSGGRQRLGSISKQGNTMMRTLLVEAAQTAARFDEELRRDYGRLAARQHRALAKVMVARKLAVRMYWMLRENRPYPLRPVARMQGRPSHSVVAG

SEQ ID NO: 99423 - protein, 397 aa, unidentified
MDKVTGLRVSVDVGCYQHSVAVGLADGTLLDEFELAHDPTGFDEFFERIERHCQQHGSAVSVAMEGYNGWARPLDTLVRTRGYRLFNINNLKLARFKEIFPAAAKTDRIDARRGLELFQLREQIPTARGVLQEVQGVPLENEKLKRLTRRRRTLVEERSRVIARLQADLQAVCPSLLAITKDADNLWFLNLLSHGQDLEKLARLREKTILGIPAIGRKFGARIIAWQQGARFGHDVDWVGPMIVEDACRILQLRRAIKAIEASCKELMATSRIATLIDTIPGFATICSSELAGEIGTLDRFERESSLAMYVGMANLSNDSGKVKSSKNPKHINSHAKGAMMAAVDKHRKLVPESKRYYDKKRAEGKKHNQAIRALGRHLCRVIFAMLNHDRPYEFRE

SEQ ID NO: 99424 - protein, 344 aa, unidentified
MDISVLGIDLGKNVCSVVGLDASGAVVMRRKVRRETLIALAEKLPPCVVGMEACCGAHHLGRLFAAHGHDVRLMSPEYVRPYIKAQKNDDRDAEGIAEAATRPTMRFVELKSQDQLDMQTLHRSRDRLVGERTALINQLRAILLERGMVAPQGKRKLEQFLAVLMDEQGGAGLSSRMIVLVADARTQWAEIDRRIAAFDGEFVRWVKENEEARRLMTIPGVGAIVASALVAAVGQAESFERGRDLAAWLGLVPRQFTTGGKPKLLGISKRGNKYLRRQLIHGARAALPYVAERDTPLGRWAKELMSRAHHNVAVVAFANKLARIAWAVLRRGERFAVTGMPVVA

SEQ ID NO: 99425 - protein, 359 aa, unidentified
MQTQRKELNFEGQNIFVGIDVHLKSWNVSIFTENLFHKTFKQPANAATLSTYLKLNFPNAIYHSVYEAGFSGLHAHYELTNLGIHNIVTNPADVPTTDKEKRRKTDKVDSNKLARSLRSNELKGIYTPSQDILEDRSFVRVRSSIVKDQSRLKNRLKSMLYFYGIEFPLEFQKSNTHWSKRFMVWLKTVQLKSHSGNMALAMLIKEAEQLRALLLEVNQELKLMSLTEKYAKNMEFMRSVPGIGLVMGMHFMSEIETIHRFENTDKFAGMIGIVPDCHSSGDNDQIGEITPRGNVYLRSALIESSWIAVRIDPALSKAFSDYCKRMEPNKAIIRIARKLSNRIYFVLKNEKKYETRIVK

SEQ ID NO: 99426 - protein, 360 aa, unidentified
MRRKINENSFNDQSFYVGIDYHKKSWKVTILDEKHEHKTMSQNPEPKILANYLKRNFPGGNYQAVYEAGFSGFNACRELRELGVECIVIHPADVPTNQKERLQKTDKADSRKLARSLKNDEFDPIHIPERKLEADRALIRQRFRMVKDISRTKNRVKSLLLQFGIDIPARFTSEQTRHWSKVYINWLKELEVEEESLKLTLDNYLRIGEIQRKELLTINRQIRKLSKTEDYQNNCRLLLGIPGIGLMTAMTLLVELGDIKRFKRLDDLCNYVGLVPSMHGSGEKMETGKMVKRGRKALKIMLIEASWQAVRKDPALMMKFNELTKTMKKNKAIIRIARKMLSRIRHVLVHQEEYELAVVQ

SEQ ID NO: 99427 - protein, 425 aa, unidentified
MNYKQNEKINQVKESTLVVGIDIGSTTQYARAFDWRGIELGKVFTFSNSREGFESFKSWMQHLQDKYRKSDVIVGIEPTGHYWFDLGAYLEDEGILLVMVNPYAVKQTKELDDNSQSKNDRKDPKVIAKLVTEGRYSAPYTPDGVYADLRIMVANRKRLIREMTQIKNRFARWFAIYFPEYTDVFGDYEAQSSMLLLKKVCTPEAIVELGAEKINQIWRDAKLRAVGMKRATTLCETAKRSIGLKKGSSAARYEMKLLLEDYEYKKAQLDAVMEEIEKLCRKIPESEQMLAIKGIGVITVAGFLAEVGDVRRFESPRQIQKLAGLSLRENSSGKHKGQTTISKRGRSKLRAVLFNAAIPLIAKNPEFKSLHEYYTTRANNPLKKKQSVIAISCKLIRVFYAILAKGVTYDAQKLISDIHRQPQVA

SEQ ID NO: 99428 - protein, 356 aa, unidentified
MTKAVMAGIDLHSNNVMIGIVDQDGQRLKHQKLDCDLTQVDGFLRPFKRRLKSIAVESTYNWYWLVDGLRALSYPVVLANPAGMEQYSGIKHADDKSDAFFLAELQRLNILPTGYIYDPQLRPVRDLLRRRLRLVHQRTALMVSFKSLYTRTTGQAMSLSQLKAMAPARAGELYEHPANQLIARVQKEHIEQLDQSIGRIERAVLREVRKRPYYERLNTLPGVGRILGMTITLEVGDIERFRTAGNFASYCRAVDARRTSNEKDKGRNNRKCGNKYLGWAFVEAANFAKRYDERSRKWFDRKAAKTSTVVATKALACKLAKAAWHVMAQNVNYDGDRVFGKAAGSQVNGLVQALRN

SEQ ID NO: 99429 - protein, 412 aa, unidentified
MDTLVQRCAGLDVHKASIVACIRLAGPNGSVRKEVRTFTTMTADLEALAGWMAGKGVTHVAMESTGVYWKPVFNILEGRFQVWLVNARHIKQVPGRKTDVKDCEWIAQLLQYGLLRPSYIPELVIRQLRDLTRQRSQLVAEQTRVANRIQKVLEDANIKLAAVASDVLGVSGRAILDALIAGEATAEMMARLARGRLKAKIPQLEQALCGHVTDHHRFLLRLYLDQLQGTDDLIARLGQRIEELMAPFQGAVQRLMTIPGVDRRTAQSLIAELGHDLTAFPDADHLSSWAGMCPGNHQTAGKNQSGRTAKGNRWLRQTLTQSAWAASHTKNTHLAAQFHRLAARRGKKRALVAIGHTLLVIVYHVIKHGMVYQELGGDYLERLNPQRMTRYHVKRLERLGHKVTLEPQPDAA

SEQ ID NO: 99430 - protein, 374 aa, unidentified
MAVREEDTTKTPTIYMALDLGRRRWTVGVLLPGDRDARLFQIAGGDREALSELIRRRRQMLGDPGVRVVSCYEAGRDGFWLHRWLRDQDIDNRVLDPASLEAPRRWRRVKTDRVDTLGLLRVLLRLERGETEMTRVIWVPAPAIEDARRHTRERERLVSERTAHRNRIQGLLAAQGVTAIKVGTRDWLDRLAVACTGDGRTLGVALLAEIRREAERLALVEHQIKEVEAAQHAALKADTALAATACKLKRLRGLGEVFASGLTHEAFWRDFGNRRQVGGAFGLTPWPWDSGDMHSDRPISKVGNRRARTMAIECAWMWTLHQPGSALTRWWQKRFAGGGRRVRRIGIVALARKLMVALWRYLKENLIPEGAVLA

SEQ ID NO: 99431 - protein, 377 aa, unidentified
MQASSVNTPIGDDIATIHVAIELSQRSWVIVIHSPDRGRLSRHKLEAGDVEELLGLLGKTRSRAARTLGRSPRMVSCYEAGYDGFWLDRRLQSAGIDNLVIDPASLSVDRRARQAKTDRIDGEKMIRALMAHLRGEPRVLSVVRVPTAEQEDARRRTRERERLIKEQTGHINRIKALLRGQGLAAGEPGRRDWGATWLAQQRDWQGQPLAPLLVEELSREHARLMLVRDQLKALGEEAMPQATVGKARQLARLKGIGPVFAATLAGELFWKDFTNRRQVGAYTGLTPSPWRSGRVEHDQGISKAGNRRVRHTAVELAWLWLRNQPTSALSRWFHDRVGEQRGRIRRIAIVALARKLVIALWRFLTVGMIPQDATLKA

SEQ ID NO: 99432 - protein, 358 aa, unidentified
MEQNEVILGVDTHLDTHVGAVISGAGRLLGTLSVTTDTAGYLDLLTWANSFGQLRRAGVEGTGTYGAGLARVLRDHEIEVLGVNRPDRAMRRSRGKSDPTDAENAARAVLAGRATAIPKEQSGAAEAMRAVSVARRSAVKAKTQAINQLRALLVSVPQEIRERLLKAKTAECVEGCARLRSLGKTPVLQTLTTTLRLLAKRWLMLAEELKALDTMLDNLTSQHARRLRERFGVGPQTAAVLVAVAGDNPERLKSEAALAALCGTSPLQASSGKTVRHRLNRGGDRFANNALWTIAMVRMRSDPRTRAYVDRRYAIHHRRHTESHDEEREVSQERGSAQIDRQLPRKQCVVIVNCCRQW

SEQ ID NO: 99433 - protein, 394 aa, unidentified
MKLVGIDVGKNSHHFCVMDKETGEFNVTPTSFSNNKEGFDFLINSLKPYSKKSILIGMEDTGHYHVALLKFLLSNGYTVALINPKTTDLTRKMEGGITKNDKLDTITICNVLDTPERKKQYRITKVDRFDLYEQRQLTRHHHNLKEELNVYCNRLQKSIDLVFPEFNTLFSSKYSIVYMNLLKTFGSAEAIASTDIRTIRKCFEIKGRGNRISLTPEKLKECAKNSIGISSEVETIQIRHLVSQITLIKEQIAEIDKKIEEFSITNNSPILSIPGISHFSGTSILAELGDIGNYSKPSQIIKFAGVAPYHYESSQYNAQHTGITKKGSKYLRKTLYQIILTVINNNPVFKKYYLLKISQGKGHRCAQGHCIRKLLRIIYHLLETGQSFDPALLR

SEQ ID NO: 99434 - protein, 314 aa, unidentified
MDKGAVIVGIDVSKDRLDVHVLPMDEAFTVARDGEGLSELVARLKALSPGLVAVEATGGFETTTAAAVAGAGLPLVVVNPAQVRAFAKALGQRAKTDPIDAAVIARFAQAVSPEVRALPGAAERLLADLVGRRRQIVQMIGAEKQREKRFTEPRLQRSIRRLVMALQKELTDLDSQIDDEIRGSPAWRDKEDLLRSAPGVGPVVSRTLVAELPELGNLDRRQIAALAGLAPWTRQSGKWKGKSFIGGGRADVRSTLFLGAMVAARRNPDLKAFRDRLVAAGKPKLVALVATARKLLTILNAILRDQKPWRQQTA

SEQ ID NO: 99435 - protein, 310 aa, unidentified
METNVFVGVDVSKDSLDVAIGSQKEIITFSNDQKGVDALVKKLSQMDPALTVFESTGGYELLAASCLAEAGLPVVIVNPRQVRNFAKAAGILAKTDAIDARVIARFAEAVKPEVRPLKDRATSELTALVTRRRQIIEMIVAENNRLKLANKRNIKDIKDHIRWLEKRLDKIETDIGKTIQNSPIWRCKDNILRSVPGIGPVTSATLICDLPELGVLSSKKIAMLAGLAPLNCDSGKYKGRRRIWGGRSSVRSGLYMATLAAIRCNPAIKGFYQRLIAAGKCHKVAATACMRKLLIIVNAMLRDQTLWQQN

SEQ ID NO: 99436 - protein, 341 aa, unidentified
MTEVSTIGLDLAKNVFQAHAASASGAILFRKKLRREQVLAFFAAQPRCLVAMEACASAHYWAREIAKLGHEVRLIAPTYVKPFVKRQKNNAADAEAICEAAQRPTMRFVAVKSEAKQASAVVFRTRDLLVGQRTQIINAIRGHLAEYGLIAPQGPSHVDQLIAQIEDPSSGLPDPARSCLAVLVETLRALQGKIAALDTEIAARAKRDDGARRLMSIPGIGPLIATAIEALAPPVETFRSGRDFAAWVGLTPLQRSTGAQERLGKISRMGERTLRRLLIIGASGVVRWARRKGVPAGSWLARMLARKPPMLVIVALANKMARIAWALIAKGGSYRAPAVAA

SEQ ID NO: 99437 - protein, 459 aa, unidentified
MSRKHKKAKRAGQGGAVPSLSCIEPNAAGIDVGATEIFVAVPQDRDPGPVRSFETFTEDLHRLKSWLQHCGITTVAMESTGVYWIPLFQILERAGLEVCLVNAQHVKHVPGRKSDVIDCQWLQYLHSVGLLRASFRPEERICAIRSLLRHRDSLVQMAAAHVQHMQKALTQMNLQLHHVLSDITGQSGLAILDAILAGERNPTVLAQLRHARVQASQEVITKSLVGDYQREHLFTLRQSLQAYRYYQSLITTCDQEIAEQLQNLDSRTPPDASPLPPEPYPHRPRKNEFRFDMRSELYRIYGTDLTAIPSINALTGYTVLAEVGTDWSKFRNGDAFASWTCLCPQNKKSGGKILSAHTRRSANRVNRALRLAAQTLERSTSYLGTYYRKMRARHGAPAAITAAAHKLARIIFHLVTTGQAYDESLFAAEEQRQRKRLENKLKRSAQQLGYQLIPLGQTA

SEQ ID NO: 99438 - protein, 356 aa, unidentified
MKILSLDLGKFKTVWLVYLTGGPGEQRYGKIATSPKEIHDLLAQHQPDRLVLESGPAAGWVCDLAAALELPTQVANTNDERWRWNRVKKKTDRTDALKLAQLVEMGKLPTVHVPQPRVRQWRELIHYRHGLVDRRTAIKNSIRSIFERRGESLASGHKAWTADGIKLLARHALELNDCQPLELWRGQLHEELGQLQSLEQNIAAVEKKLDELSAADERVRQVRTAPCVGPRLGELVVAIIDDPKRFKTARQAGAYVGLTPRQWQSGQSLREGHISRMGNPLLREVLVEVSWLGIRTNAWMKQVYQSVCRGSDKRKKIAIVAVARRLFVRLWAMLRDGTIWREPLERREADPGVAMG

SEQ ID NO: 99439 - protein, 365 aa, unidentified
MKKTITAATASKRNFDGKLTIGLDLGDRSSWYCVLDERGEVVGEQKLSTTPKALRATFGAMPRSRVALETGMHSPWVSRLVSELGHETIVAHARNVRLIGESRRKDDRLDARTLARLARIDPQLLSPVKHRSRQAQADLMVIRARASLVRARTALVNAARGLTKSYGERLRGCNPRNMDLEKAQALSPELQAVLGPLLQALESLSERIAEYNRQIETIAQQSYPQTALLKQVKGVGTLIALTYMLTLEDPHRFRKSRDAGCYAGLQPGRRNSGQSEPQMHISKEGDPYLRTLLVQGAQHILGPFGVDSDLRRWGLKLAERGGKNGKKRAIIATARKLAVLLHRLWVSGEVYEPLRNTNRTMLAAA

SEQ ID NO: 99440 - protein, 397 aa, unidentified
MALSGPEGSWPMRHVEQTEAARDRAVVFVAMELSKTSWLLAARASPSGKTSSHRLNGGDVAGLLALLRRLQAREQRQGGHDVEVILGYEAGYDGFWLQRRLAAEGITCWVMDPGSLQVDRRARRAKTDRLDAAMLLRALIAWCRGDRAVCSMVQVPSVEREDARRTHRERQRLIAERVQHVNRIKGLLATQGVYEFRPLRRDRWARLAELRAGDGRALPPRLRREIEREFGRLELVLEQIEAVEAERDAAVAAPAADDADAPKVAQLAKLGGIGTELATVLVREGLHRPFANRREVAAYAGLTPSPFASGDRHRDQGISKAGNPLLRKSMVELAWLWLRYQPDTALARWFTGRVGEIRGRIRKITAVALARKLLVALWRYVTTGLVPEGARLKPSAT

SEQ ID NO: 99441 - protein, 340 aa, unidentified
MQVSTIGLDLAKRVFQVHGVDSAGRVIIRRQLRRGQVIDFFEKLPPCLVGIEACATAHHWARELMARGHEVRLMPPSYVKAYVKRSKNDAADAAAICEAVTRPSMRFVPVKGIEQQAALMLHRTRELLVRQRTQLINAMRAHLAELGIVAAQGRDGVKELIGMASSDQLPPAVRDSLRALIMQLEAAHQQIGGIERRLQAQHRTSEASRRLEAIPGIGVIGATAIVATVTDPTVFKSGREFVAWIGLVPRQNSTGGKQRLGSISKQGDRYLRKLLIVGAMAVIQHARRQPEKHPWLIQLLARRPAKLAAVALANKTARIAWAMLVRGEDYQALRRLAAAA

SEQ ID NO: 99442 - protein, 352 aa, unidentified
MERFCVGIDVSAKKLDVAYRGQRQGVVVQTFENAPASHAALVKHLAKRAGRTGTIRVVLESTGVYGIEVATALDRAGCEVMVVNPRAAAHFAKAAMQRSKTDPLDAAMLLRFAEQMLFTRWKAPSVAQMQIRMISRRVHALTATIAEEKNRLHAAGHLGEGRIIKRSIESTVRALDKEVARLRAEALKLIASEPTLERRYELLLSVKGIAEKSAIAIVAELAVLPSDMTDRQWVAHAGLDPRLFESGTSIHATARISKRGNKYLRSALYKPAQTACTHDTGVKAYAARLRERGKAPLQVHVAVMRKLLHAIHAMFASDQLFDSSRFSPAAGAVGTAEIAPSAISAVSIALRS

SEQ ID NO: 99443 - protein, 356 aa, unidentified
MSSIVSEQYEFVIGVDTHAATHTFALVNASTGAVLGNAVFATSVAGLSRAQDWLARRVAGRSALVVVEGTGSFGAILTERLQSAGREVVEAAKMPGGDRRGTGKSDELDAVRIARAVLGLPLTALRVPRALSADRARVAMRVLVVAREQMTGERTRAVNALIALVRTIGLGIDARKPLTAGQIAAIAAWRDRDEDATTATCRHEAVRLARRIRTLDGDLASNRSDISELVKQDTPQLLDLTGVGAVVAATVLIAWSHPGRVRSDAAMASLAGTCPIPASSGNTVRHRLNRGGDRRLNRALTTITIVRMKVDPATRAYVARRRAEGRTTKEIMRSLKRYITRQLFRTLAAAHPLPAG

SEQ ID NO: 99444 - protein, 437 aa, unidentified
MSNKTQQNGNYEVVNKKCAGIDVHRDFVSVTVIIETVKKGIFTDYREFETNKKSLLEMRDWLVDYKCTVAGLESTGKYWYPVYFSLEDVMQVNVYNARNMRNIPGKKTDKKDSEWIAKITRHALIMPSYIPEQHIRDARLISRERKALVQQRGSVRQRALGILDSAGIKLSSVMSDVFGVSGRNLLDLLINRKAITVKKIEGLVYGQLRKKSDSLMLAMDGYLRDTHIFLLKMLLDQENDLTKKINAIEERLEEFLIDSEEKKAVVDTIITIPGFSERSAMLLLSEVGFDLETFPSNKNFCSWVGLAPGKKESAGKNVSGKIQVRQRYLRALLIEVALASTRCKGSYVKAKYWNLKGRIGGNKAVVAIAHYLARAAYRAIKEGMPYKELTENHASLRQSKIDLKQLTKITQRLGKEAVMAYIDCDIIDENDQNNDNQ

SEQ ID NO: 99445 - protein, 429 aa, unidentified
MIMGFTKPIEHSNLTTKEGDFMNPLYVGIDVSSKSNVVYFMLPDGNKHSNFSVANSHDGSTQLVKRILSAMESKSLDTVLIGLEATSVYGDNLVYFLREDASLASFNRKIHVLNPKQVNKFKDAYNDLPKNDYVDSFVIADCLRFGRINKEVYIGDYHYKALQNLTRARFFAVCNLIKEKQRFMNVLFKKYSTMTQEKVFSDTFSTTALAVYDKFESAEALAYMDLQELTAFIIGKGKNRFPDPDAVAKAIQKAARSSYRLPKTVNDSVNQVLSISITSIKALEAQIKEFDKAISAQMELFQNVLISIPGIGPVYSAGIMAEIGDINRFENQAQLAKYAGLAWTQYQSGDFEAQNTRLIRSGNRFLKYYLCEAAFSLVRCDKEYKAFYHQKYKEVNRYQHKRALALTARKFVRLVFTLLKDNRLYRPAE

SEQ ID NO: 99446 - protein, 341 aa, unidentified
MKRYFVGLDVSKDETAVCLRDDCGVIVTSFKKPTDPDVLLRALRKDLAQIVCVVLETGRMANWLYDELSQRGLPMVCIDARQAHAVLSQMHNKTDENDAAMLSELARTGFYKKIEVKSRLAQEHRALLRAREVAIKMRMNTENTIRGLLASFGIRLPKHLKTYELRVQKVLEGQTVLAGIIKPLLTLRTEALHQVAILTKEMTHHAREDDACRRLMTIPGVGAVSAVTYVATIDNSDRFKRSRSVGAYIGLTSRRYQSGDIDYGGRISRRGDRMLRTVLYEAANSLLCRVKSGLGQHLKDWAMALKKRTSHKKAVVALARKLSVIMHAIWKDGTEFEMKEA

SEQ ID NO: 99447 - protein, 314 aa, unidentified
MEVCYERCCGIDVHKKVIVCCLRIGNKRETRSFGTSTEDIRSMAEWLLENRCEKTAMESTGSYWKPVYNVLEVLGVEAIVVNAAHMRNVPGRKTDVKDAEWIADLLQHGLLKASYIPDRAQRELREVARYRKSLVEERAREINRLEKTLQGANIKLSSVVSDITGRSSRNLLDALTGDGLNEKNIDELLCGSLKEKRAELLKVCDGYLTILQKKLVRAILDHIDDMTRRIADMDDIVRGEMKAYEEAMERLEAIPGIAKRSAQVILSEIGLDMTRFPTAAHLCAWAGLAPGNNESAGKRYSGKTRKGNATRKPP

SEQ ID NO: 99448 - protein, 340 aa, unidentified
MFPAVRRRYSHYCLLNSDGEVIEEGRVQSTETALRRHFEGEDCLRIALECGTHSPWVSRLLNALGHQVIVANARQIPAITGSESKNDRNDAEKLARFAAFDPKLLSPLEHRSEERQVDLNLIHARSTLVRARTMIVNALRGLVKSAGGRLPACSTEFLPARALAAIPPALSAVATPLVEQIGLLNAQVDGMDKQIEKLSAKYPEIVLLRTAPGVGPIVAAAYVLTLGQPDAASNRSAGAFLGLRPAQSQSGAADPQRRISKSGDCFLRSLLVQSAQYVLGRFGPDSELRRWGLKLAATGGKRGKKRAIIAVARKLAVVLHALWRSGQRFQPFPQQAAVAA

SEQ ID NO: 99449 - protein, 411 aa, unidentified
METMIARCCGLDVHKAQLTACVRLLIDGVVTEIVETFGTTTPDLLALRDWLKAHAVTDVAMESTGVYWKPVYYMLEDEFEVRLVNAAHIKHVPGRKTDTIDAAWIAQLLSCGLLRGSFVPPKPIRRLRDLTRFRKALIEERSRAVNRLHKLLEDAGVKLACVATDVMGVSGRAMMRALIEGNADPEALSELAKGKLRAKLPELRKALTHRFTDHHAFLLERMLAHIEELESDIDAISKRIDEEIRPFEPAVELLRSIPGVERRAAESILAEIGTDMSVFPTAAHLASWAGLCPGQNESAGKRKPAKTRKGSKWLRKTLTESARAAARTKESYLSERYRRLAARRGDKKAIVAISHEILTAAWHMLSTGELYREQGADTPRQRDQDRIRRRAISQLEKLGHKVTLEELPQAA

SEQ ID NO: 99450 - protein, 424 aa, unidentified
MNLTQNDRLKQVTSDTLIVGVDVGSQTHFCRAFDWRGFELSRRVFKFSNTGMGFLTFLRWTEELMNKTEMKKVIVGCEPTGCYWLTFQKFLQDHDVQLVIVNPFTVNRSMELDDNSPEKSDLKDPKTIALLVKDGRFSTSYLPSGVYAEIREASVCRDQIMKQHVRLSNQIQGWLQKFFPEYFECYADWDSTSGLMLLREAPLPQDILKIGAGGINQIWRDAKVRAAGIKRAQTLVEAAQNSVGLEAGEAARLEIWVLVNDYILKAEQLKRLDEYLEEKVKEVPNVEKLLAIKGVGMSTVIGFIAEVGDIGRFTDPKQIQKLAGLEIVKKSSGKKKGQPRISKRGRRKLRRTMYESAKALMTWNPAFQDVFLYYRNRTKNPLGGMQAKIAVACKAIRVFYVVLQTGCDFDEEKFRKDIIRPEAA

SEQ ID NO: 99451 - protein, 415 aa, unidentified
MEPEELEPIKYSTKGGIPMIAVGIDVSKSKSTVAILNSDGTTLVKPYTMLHTQADMCALADYLRAFDEPITILMEYTGHYHYPVLKKLQQEGFPVCVINPYQMKKYGDVEIHKAKTDKKDAIRIATYALEKAYKLVPYNSLEQKYEDLKFLSRQYNQRISSVSYTKVQLINLLDQTMPGITRILPLKSRNPEQCVLLLFIKRFKSFDEINKIGKTRFLSSYATLVKKTRDRHAPSKGLAIYELAANSITTRGEDPYIQLAQSQCVDLLSTSQNAADEIILQMQNIAETIPEYKVLRSMAGVGDRLGPIILAEIGDIRRFHSGKALNSFAGNDAPPYQSGQFESRNRHISKRGSATLRKACFEVMQSLKLTKPQDDPVYLFMLKKEQEGKPYNVAKMAGVNKFLRIYYARAMELYK

SEQ ID NO: 99452 - protein, 345 aa, unidentified
MSIVGGLDIHRKQITFDYLDTATGEVERGQIAPADRAHLAGWLARRFPGGQEADFALEGCTGWRYVAEELAAAGITAHVGEPADTAALRGTKRHAKTDKADSRHLRQVLADGRLPECWIPPPHVLECRALLELYHDLRTEHTAWVQRIHAVLFHQGAQRLDEGLRTGEGVAALRHITETQLSPAGQCQVATALDILAALDSRLDVVRRRLLHDARHLAGARVLAARLYGVGPVTALALTCWLGGAGRFSSARKAVRFAGLDVTVYSSAGKRSPGRLSRQGPAVLRWCVYEAGKTHARPGAPDHAYYAQVKDRIDGKRAAISEARKIIRQACHILSELGDDALAAI

SEQ ID NO: 99453 - protein, 338 aa, unidentified
MKLYGGIDLHSTNSVVAVTDENDKVVYRKRLPNDLNTILTVLEPYRGALEGLVVESTYNWYWLVDGLMDAGYRMHLAHTGAIKQYEGLKYSDDDTDACWLAKLLRLGLLPEGYIYPKEQRPVRDLLRKRSQLVRQHTANVLSVQNLMARNRGASIGANAVKRLDFDQVDQLLENESLVLAVASTLVVMRSQQQMIALVEKVAHRHMKHSAALKHLLTVNGIGEILGLTILLETGDIGRFERVGNYVSYCRCVDSKRISNGKQKGKGNRKNGNKYLAWAFVEAANFAVRYAPRIKRYYQRKKARSNGIIAIKTVAHKLARACYFILRDGVDFDVEKAFA

SEQ ID NO: 99454 - protein, 344 aa, unidentified
MEYFAGLDVSVKDTSVCIVDDTGRIVREVKVASEPEALLPVLTAPLYRFKRIGLEAGPLSQWLFSALAEAGLPVICGETRHMRAVLQAQINKTDRNDARGIAQMMRVGLYRPVHVKTLRSQKLRMLLTNRKLLQSKAVAIDNDLRGTLRNFGLKVGMVGTVKFEARIKELVENLPDLAVLVEPLLVVRRVLREQISILHRRLLAIVRDDDVCRRLMTIPGVGPVVALTYRATVDVPARFRNSKAVGAVLGLTPAKYQSGEINRTGAISKCGDEMTRVMLYEAAQVMLTRTKKWSWLKAWAIKIAKHRGMKKAIVALARRLAVIMHRIWVDGTEFRWTRKETAAA

SEQ ID NO: 99455 - protein, 340 aa, unidentified
MEKDVKCYLGMDISKLWVDITLMRVIDHQKQAAASERFDNTEAGMKALDKWLGKHQVPFDDNSLLVVENTGVYHRQVWGYCSTHGLPLHIGNATHIKYSFGIARGKSDKLDSQRLCSYALKNAEELKATPVLNPVLLQLKDLMTARSRLLIQLNSIKQYLSELKRSNSKVVQQTLEQAHTAALEGIQASLKTVEEQIKRLIQQDAAIKNNYELLVSVPGIGHLTAVYILCCTNNFICKITGKQLASYAGVAPFGTSSGTSVKGRDKVHKMANKELKKLLHMGALSAIQHYEEFRAYYERKVKEGKHELAVLNAIRSKIALRAVAVINNQHKYVDNYKKAA

SEQ ID NO: 99456 - protein, 354 aa, unidentified
MDKDKYVAMDVHKASVVVGTRDAAGKYITEAIVETKAATLLDLIRGMSGTIHLTFEEGTQSAWLYDLFKPHVAELIVCDPRRNKLLEEGSKGDRIDVQKLSELFCKGMLKPVYHGDHGTRALKELGHNYESLVSDRTRVKNRLKAIYRGRGISYQGAAIYQPKQQQEWLGKLKERGVKRRAELLYQQLASLDALVKEARREMLAESRKQKVSRCLRRISTLGSISAALLIATVDTPHRFRTKRQFWTYCGLAVVTRSSADYYFDQGQLRRSRRPVVTRGLNQNYNRRLKRIFKQAALTASRRGPFKPYYERLLARGLSEELVRVTVARKIAAVTLAVWKKGARFDPEKILKPTT

SEQ ID NO: 99457 - protein, 326 aa, unidentified
MQGKEASEQETKAKSNVGIDVSKCWLDAHVLPSSESLRVANDCQGMRQLKRWLSRFEIALVVVEATGKWHRPLCRSLAATAIPVAVVDPFRVRMFAKAQGLFAKNDRLDARVLAVFAAVLPPPVRPVAPQALEELKELTVARVSAVEQQTALKNQLSAAEGAFLKRQLVRRLARAAKDIAAIEREIVKRIRADQGLARRYAILMSVPGFGSVVAASLVANLAELGACTRRGIALLAGLAPIDDDSGQRQGARVIWGGRAGVRRILYLAAVTAARSDPELRAFYQRRIADGKRAKVALIAVARKLAVLANVLIHEDRFWEPRTPKHA

SEQ ID NO: 99458 - protein, 456 aa, unidentified
MPKDKTRPKPSGLPIIHPFAAGIDIGSRFHVVAVSPDLCDEPVQTFQAFTSDLQRMAAWLVATGTKTVVMESTGVYWVAAYEVLESHGLDVVLANAREARAVPGRKSDVNDAQWLQRLHACGLLRASFRPGRDIAELRAYLRVRESHTDYAAAHIQHMQKALTFMNIQLHHVVATITGVTGMRIIRAIVAGERDPDKLAAMRDVRCKESAETIRSALDGNYQPEHLFALKQALALYDFYQDRIDECDAEIERTVAALNAQRPVPDAPLPKAKHRNKLPSDPNFDVRSTMYQLAGTDLTQIHGIGPFLALRLIAECGTDLSRWRTAKHFTSWLALSPGCKISGGKVLSSHTRKTSNRLTVALRLAAVSIGRSNTALGAFYRRLAVRIGNAKAVTATARKIAVLFYNAMRFGMNYSDPGADHYEQAYRARVIKQLHRRAAQFGFALQPQNTPDSVGVS

SEQ ID NO: 99459 - protein, 397 aa, unidentified
MNKIVHYIGLDVHKDSIAVSIAPQNSTEVRRYGIIGGTLDAVDKLLKKLAKPEVELHFVYEAGPCGFVICRHLRSKGIHCDLVCPSLIPKKASDRVKTDRRDADQLARLYRAGELTPIHVPDQEDEAIRDLIRARTAAVHDQRRARNRLKGFLLRLGFRYTGRTSWNDAHKRYLSGLLMPRPAQQIVFQECIHAIDDAATRVDRLTQAVEEALPGWKWEPVVRALMSLRGLQELSAMTLIAEAGDLSRFENPRSLMHFFGLTPSEHTSANKRVQGPITKCGNSHCRRVLTEAAWHYRLKPLVSEAMQKRQEHQKKEVRMIAWKAQQRLNKRFKQLAVRKKSVVAVTAIARELVGFLWAIACQVKPAQRPAQPEIIRTCHGKVYRLNPQKKMPKTKNS

SEQ ID NO: 99460 - protein, 404 aa, unidentified
MIFVGDDWAEDHHDVYLMDADGARLASRRLPEGLTGIGALHELIADHVGEPSQVVIGIETDRGLWVQALGVSGYQVFAVNPLAVARYRERHQVSGAKSDAGDAKVLADLVRTDRHNHRSLAGDSPEAEAIKVLARAHQNLIWARTRHTNMLRSALREYYPAALNAFDDLHDRDALAVLSRAPTPAEGTRLSLSKIRSALKHAGRQRNIDARAHEIAVALRTEQLAAPATVTAAFAATTRATVGIIGELNRQITDLETQLATHFETHPDADIYLSLPGLGVILGARVLGEFGDDPNRYTTAKSRKNYAGTSPLTVASGKKCAVLARRVRNRRLYDAIDHWALGAINHSTGARAFYDQHRAAGDLHHQALRALGNRLVGILHGCLRHHTTYNEHTAWAHRQTAQAA

SEQ ID NO: 99461 - protein, 328 aa, unidentified
MGTVHTGLYTQEVGMSKCYVGIDVSRDKLDVYVRPTGEVWQVNNSPQGHAALAQRLGRLNPELIVLEATGGLERPVSRALAGVGLPVAVVNPRQTRDFAKSTGRVAKTDALDASDLARFAEVVQPEERSLPGDEQTQALAELISRRRQVVRMAAGEKNRRRVYSGELRAGIEAHLEWLKQAQEELDREIAARVVSDPRWKERTELLMSVPGVRPVLSATLVACVPELGQVGKKEIAALVGVAPFNRDSGKKRGKRKVSGGRGHVRSVLYMATVAAVRCNPVLRAFYRKLVGAGKVKKVALTACMRRLIVILNAIAETGIPWDEARVTP

SEQ ID NO: 99462 - protein, 414 aa, unidentified
MNNVKTKFSIFVGLDWANKKHDVCVQIGDSDKRRYEVISHTPESVDSWLNELRKEVKGDIAVAVEMTKGPIVYALQKYSFVTVFPIHGLTLARYRQAMFPSGAKDDPSDAELALDMMLNYPKKVKPLRPSSEQTRALALLVEQRRSLVDDKRRNTNRLIDALKQYYPQPLEWFSHRGSELFCDFLIKWPSLQVIKRARTTSIVKFFHARGGNAVSNTQRRVNAINEAIPLTQDNSVILPHKLLVVALCKQILTLIENIRVYDKQICLLFNDMADADIFTSFPGTGPCLAPRLLAVLGEDRARFNSSEEVQNYTGLSPVTERSGQKNWVHWRWQCSKFVRQSFIEWSAKSVHQSYWAGLYYAQQRAKGKSHQTAVRALAYKWVRIVYKCWKTRTPYDESRYLKTLKERNSPLLAT

SEQ ID NO: 99463 - protein, 356 aa, unidentified
MSRGIQYIGMDVHKEAIVIAVLNDGGKLVMESIIETKASSILQFIHGLRGELHVTWEEGTWAAWLYDLLKPHVHQMLVCDPRHNALLKEGNKSDKVDAHKLANLLRTGMLRPVYHGEHGLRTLRELARSYQTISKDLARVMNRVKALYRGWSIPCAGTQVYAPRYRQEWLGKIEHAGVRRRAELLYQQLDGLHALRRTLRPELLAESRKHKAAKLLRQIPCIGPIRAARLLALMQTPHRFRSKRQLWTYSGLGIETHDSAQYCYVNGQLQRSKKPQQIRGLNRNHNHEMKEIFKGAATRASCGVGPLHDFYVALLDKGMKPEMARLTLARKIAAIALALWKKEERFDAEQLKTQAA

SEQ ID NO: 99464 - protein, 397 aa, unidentified
MIAVGIDVSKSKSTVAILNGDGSIRAKPFDVHHVADELQALVDYIKRTSEPPTILMEPTSHYHYPLLKAFQEAELPVCLINPYQMKKYGDTELRKAKTDKRDSLRIAQYALEKSYSLIPYTPQDQKYEDLRFLSRQYSQRISTLTVAKVQLLSLLDETMPGITTILPLKSRDPDNCVLLRFIKRFKSFDVIRKMGKTRFLDSYQVLVKKTKDRFAGSKGLAIYELVLNSVTTRGENPLSAMTQDQCVDLVSTSQKAADEINLQMRIIAETMPEYKVLRSMAGVGDRLGPIILGEIGDIRRFHSGKALNAYVGNDAPPYQSGQFESRNRHISKRGNPALRKACFEVMQALKLTKPQDDPVYLFLLKKEQEGKPYNVAKMAAVNKFLRIYYARAMELYK

SEQ ID NO: 99465 - protein, 410 aa, unidentified
MRRVIGMDIHRTFAEVVFWEDGKLRPAGRVSMTRSGLEGFGRSLGKEDEVVIEATGNAMAVVRVLSPYVARVIVANPLQVKAIAHAHVKTDKIDAGVLASLRAANFLPEVWLPDSDTERRRRLVARRNQVVRHRTRIKNEVHAILHAHLIPPCPHADLFGRLGQIWLAQQLIPDDEGAAIERHLRELDRLSEDLGVLDTQIAQAGNDDPAVKRLLTITGVNLIVAAGLVAAIGDVRRFTSPQQLVSYVGLNPRVRQSGLGVAQHGRISKRGRSHARAMLVEAAWAAAKAPGPLRAFLRIRARRGHQIAAVAVARKLAVLCWHLLTKSADYQWARPALVASKLRAMELQAGQPARKGNKRGPAYAYNVKALRDREIELARHAEQAYERFVSQWQRRGTAKQRTGAANEERR

SEQ ID NO: 99466 - protein, 348 aa, unidentified
MVVIGVDAHKRTHTVVAVDEAGRKLAERTAPATADGHLELLGWSRSWPQRTWALEDCRNLTRRLEADLLKAGETVLRVPTKLMAGARRSAREPGKSDPIDALSVARAALREPNLPVAHLDGVERELRLLVDYRDVLISDRTGHQSRLRWFLVELGLPEPPARRLTLPVVLASVDLQLVGRSEPCARIARDIVARISELTTAINDLARQIGELTKTLAPSLLTLFGCGSLTAAKLFAETAGIGRFRSRAAYASHTGTAPIPVWSGNLVRHRLSRGGNRQLNAGLHRSAITQMRCPSLGQAYVAKRLAAGDTKTEAIRALRRRLSDEVFRRLQADEAARAASASVARLAA

SEQ ID NO: 99467 - protein, 422 aa, unidentified
MRVPFRRFVGRTGGRRLAPHRAKRDFIGECFPQGRSGRSCVRLVSVLRRAYKLLPFDLWEKIDVQIADRMSVETKITLGVDTHKDTHVAVALDGLGRHLGTLSVPTNTAGYRELLGWARELGSIEQIGVEGTGSFGAGLARLLKAEGIPTREVIRSKRRDQYRSGKSDPIDAEAAARAVLAGTATGEPKDADGQVEMIRALRTTRRSAVKARTQAANQMKALLVSAPEELRAQLRDLSTARLVCRASRFRLGENPDSVMAATKLSLRSVARRYRHLCEEIRELDEQLDRLVAEAAPELMAVDGVSTDTAASLLITVGDNPERLNSEAAFANLCGVAPIPASSGKTVRHRLNIRGNRDANRALYVIALGRMGRDGRTKAYVAKRTAEGKSKREIIRCLKRYIARELYRILVQPLSPLPSVSAP

SEQ ID NO: 99468 - protein, 329 aa, unidentified
MSALVCGLDVRKDSTYATILSPEGKIVNQTRMENERVLPYLSHFKVSKVGMESSNQIAQLFRQLTAKGYDVVVSHPKKTRYIAEAKIKSDRVDSKAIAELVRLDALPLAYFPTGEIAKLREKVRRRAFLVRERVKLRVKVKSVLTYEGLKWPSEHGLFTKKGVEWLHQLKIDSIESYLRILESLDEEIKLLSKDLVGVAEDDEEVKLLMTIPGIGYYSAVLMKSEIGDIGRFPFPERLCSYAGLVPSTHASGKSVWHGGITKEGSRWLRWVMVEAAQTHVHKYDTSITRAYSRIAEKRGKKIATVAAARRLLMVSFSVLKNKKPFYDQA

SEQ ID NO: 99469 - protein, 368 aa, unidentified
MFTETTSLGLDVHARSIVAAAIDGVTGEMIERRFPNDPLAICAFAAELSKVHGPLRVIYEAGPTGFELARTLQDAGFHVLVAAPSKLLRPAGDRVKTDRRDAQLLARLDRAGDIVEVRIPTRSEESARDLVRARDDARRDLMASRHRLGKLLLRHGYAFPGKTTWGPTHDAWMREIRRDALPAHGAGSAAAFDDGYDAVQHALARRDRLGTSILELAEDSEFTEITHRLACLRGISTLTGFALAVEIGDWDRFTGSTIAAYLGLVPSEYSSGQSRVQGGITRTGNSHARRLLIESAWQHKPGYLPGPTIRKRWQQVPATIAERADLGNRRLHHRWDALTKHRKRHTVANTALARALAGWCWSLATMEA

SEQ ID NO: 99470 - protein, 317 aa, unidentified
MSHLNKVCVGIDVSTQKLDVAVSNNSKVRTFPYTKTGLEQLRIFLKKENPQLVCLEATGGYERELVDHLHKHEFVVAVVNPRQVRDFARAGNQLAKTDAIDARVIANFALLMKPRITTPLPENLRKLRDFSARQRQLHKLIVQEKNRLGTTVDQDLRKMIRQTVKLFQRQLEVVRQTQQELIENDERLQAKAKIIESIPGLGPASASVLIAELPELGSLNRKQIARLVGVAPTNRDSGTMRGKRTTGGGRADIRNALLMPIVVAKKYNPTIKAFYDRLVENGKPKMVALIACMRKLLTILNVMIRDGKSWNKNLKAT

SEQ ID NO: 99471 - protein, 419 aa, unidentified
MSEDIRWLCGFDWASEKHHACVLDAAGRRLGERDVDHGGAELGEFCDWLIEKTGGTPAEIAVAIETSSGPVVETFLERGFPVFSINPKQLDRFRDRFSVAGAKDDSRDGWVLADSLRTDRPAFRRLSVEDPVIIELREWSRMGDDLTAELNRLGNRMREQLWRYYPQALQVAGDDLTAPWFLALWHQAPTPAKAAKLRQTTVERILAEHRIRRLDAAQVLLMLRQKPLTVAPGATEAASGHIRLLLPRIRLTSDQLKAVHRRLDELCAKLEAPQESEPGQGCEHRDATILRSLPGVGRIVLATMLAEASEPLRRRDYHALRALSGQAPITRRSGKSCIVLRRYACNKRLAEALFHWSRVAMQHDPISRQRYAELRRRGKSHGRALRTIGDRLLFVACTLLERGTLYEVNHERAPAATAA

SEQ ID NO: 99472 - protein, 344 aa, unidentified
MDHFAGLDVSVKETSVCIVDDTGRIVKEVKVASEPEALLKVLGNAIYRFKRIGLEAGPLSQWLFSGLAEAGLPVVCVETRHMQAVLKAQINKTDRNDARGIAQMIRVGLYRPVHVKTLRSQKLRMLLTHRKLLQSKAIAIENDLRGTLRNFGLKVGVVGTVRFEARIQELVENQPDLAVLVEPLLIVRRALREQIVILHRRLLAIVREDEVCQRLMTTPGVGPVVALTYRATVDVPARFRKSKSVGAVFGLTCAKYQSGEIDWSGRISRCGDEMMRVMLYEAAQSMMRSKKWSWLKAWAMQIARRRGMKKAIVALARRLAVIMHRIWVDGTEFRWTREQAAAAA

SEQ ID NO: 99473 - protein, 347 aa, unidentified
MRFSTKQHPFYCGIDLHARTMYVCILSQDGEIVLHRNMPASPDALLKAIAPYRDDIVVAVECIFTWYWLADLCVQEGLPFVLGHALYMKAIHGGKAKNDKIDPQKIAVLLRGGMLPQAYVYPAEMRATRDLLRRRLHLTRKRAELLAHIQNTNSQYNLPEIGKKLAYKGNRDGVAERFPDPAVQKSVEVDLALIDYYDRLLSDVELTLVQTAKQHNAQTLYRLQSVPGIGKILRLVLLYEIHDIARFPRVQDFVSYCRLVKCAKESAGKRYGTSGAKIGNAYLKWAFSEAAVLFLRNNPVGQKYLARLDHKHGKGKALTILAHKLARAVYYMLKRDTVFDMAKFLNG

SEQ ID NO: 99474 - protein, 403 aa, unidentified
MNNVAGIDVSKGKSMVSVLRPFGEVVAKPFSIGHTGSELKELADYLKSLDGETRVVMEHTGRYYEPVARFLHDEGVFVSAVNPKLIKDYGNNTLRKVKTDKADSRKIARYGIDNWAELRQHTPMDTIRMQLKTLNRQQSLYTKTKTMMKNNLIALLDQTYPGVNALFDSPVREDGSQKWVDFATTFWHVDCVRNMSLTAFAERYRKWCKRHGYNFSQSKAVEVHAGAQDLIAMLPRDALTKTMVRQAIDALNAVSASLERLKAEMCTLAAQLPEYPVVMAMHGVGDSLGPQLMAELGDVTRFTHRNAITAFAGVDPGADQSGTHEAKSTRVSKSGAPELRRALFLVMDCLLKTQPQDDPVYRFMDKKRAEGKPYLVYMTAGANKFLRIYYGRVKEYLASLEGN

SEQ ID NO: 99475 - protein, 408 aa, unidentified
MEVMYARCAGLDVHPASVVACARHAEGPRVQRTLERFGTTTQELLRLADWLEQHGCTHVAMESSGVYWKPVWHVLEGRFELVLANAMHIRNIPGRKSDMNDATWIADLLAHGLIRGSLVPPTPIRALRDLTRARKQLVRERAQHVQRIQKVLEDANIKLTGVVSDVLGQSGRAILEAMVAGEDDPERLLAHAGSRLKASHAVLVEALRGQVTDHHRFMLRLHLEQVDSLERAITALERRAEELLSPFRTEVERLTTMPGISSTAAHVIVAEIGLDMSRFPSAGHLRSWVGLCPRLDVSAGKRLSNRTRRGCPWLKTLLVQAAWAAVRHREGYLHAQFLRLKSRRGPKKAILAVAASMVSAAYYMLRNQVDYHDLGADYFHRQDRGRLARTLLKRLRALGIDVHITAAA

SEQ ID NO: 99476 - protein, 391 aa, unidentified
MSLYFVGIDISKYKHDCCIISATDQKVISKFSIKNDKVGFEELITTFNSLSSPEDIRIGFESTAHYALNLELFLENAHHSFMEVNPVLIKEYKKSTTLRRTKTNSVDCESIARWLMTVEYKPHSKGFYHAYSLKSLTRLRDRLIRQRSFYLVKITNVLDHTFPEFKPFFNERLSKTALYLLENYGSAEKMARMNSVSYEKLRSISRGKFSPQQFIALKELAANTVGVNNSIFDVELNSLLTLYKTLVTEINTLEKEINLLIEEVHPHYLSVPGIGPISAAIIYSEYGDISNFDNPGQMLAFAGIEPGINESGTESHGGRMVKRGSSQLRYALINCCLPLIRFDMTFATYYAKKRAEGKPHRVAITHVAKKLIRVIYALERQDTDFCVQKLR

SEQ ID NO: 99477 - protein, 419 aa, unidentified
MKKNTKSPGKKEQTAKRIAKARRPVQREPKEVLAELVEKLRGKLELKATTSASQPEAGPRGELSPNLDRLTVGVDLGDRWSHYCILGLQGETLSEGQLQTREAEVAEFFQALPAARVVTEVGTHSAWMREIIAGEGHEVVVANPRLMEGSKRRKRKNDRIDAKKLARLGRVDPQSLYPIRHRSREVRQDLVVLRAREALVAARTELINATRGLVKSMGTRLPQCSSPSFGHKVKDAIPEKVREALLPLVQFADALSDSIQSYDQKIEELGNGKYGHTKLLRQVKGVGPLTALAYGLTLENPEHFAKSREVGPYLGLVPKQEDSGESQPQLGISKTGDTMLRKLLVGSAQYILGPFGPDSDLRSYGQRLCERGGKNAKKRAAVAVARKLAVLLHRLWVSGEVYEPLGYASSRGIVQPAAA

SEQ ID NO: 99478 - protein, 372 aa, unidentified
MEKDSELFVGLDTSKLKISVAVADGERNGEVRFFGDISAEPASVASMVAKLAKRGAKLHFCYEAGPTGYELYRQIIELGHCCEVVAPSLIPKRPGDRVKTNRRDAVSLARLHRAGELTAVWVPDETHEAIRDLVRAREVANDGLRKARQHLQSFLLRHGRVYAGRSPWTRVHNRWLAIQSFAHPAQNIVLAEYIQAIEDAAVRLDRLTKQVAEAMASWSMGPVVKAYQAMRGVALITAVTFVVEIGDVRRFDTAPQLMAYLGLVPSESSTGDRVRRGGITKAGNVRARRVLVEGAWTYRFPARVSRDIEARLDGLPRSVREIAWKAQIRLCARYRKLIMAGKTKTVAVTAIAREMAAFLWAIGREVSPATQA

SEQ ID NO: 99479 - protein, 345 aa, unidentified
MKNTIVGVDLAKHAIQVCSFSNKKVQSNIDMTPAEFTEWLTVTNSVTIVFEACGTSNYWKQKAISLGHDARLISPKLVSAVRQNQKTDKNDALAIVQAALLPDVTFISGKSTEQQQLQSIIRLRELCIKQKTAAGNQLTALLSEFNIKTSSRNGGLNGAITATLEDAENCLSFEFREALSAAWQHYLSIAKSISVYDSCLEKAIEKHADCKKLLKLEGVGVLNAINLYIALGCADLGTFSKGKDAAACIGLTPIQHSSGGKAKLGSIGKYVKNGILRSQLITGAMAAVNHAVNRKAKTKKDLWIASLVCRRGKKCAAVALANKTVRTAFAMLTQGTEYKADLVEA

SEQ ID NO: 99480 - protein, 391 aa, unidentified
MSMYFIGIDISKYKHDCCIISAANQKVVSKVTIKNNKAGFNELLTIIHSLANPADIRIGFESTAHYALNLELFLENSLLTFMEVNPVLISEYKKSKTLRRTKTDSVDCESIARWLMTVEYKPHSKGFYHAYSLKSLTRLRDKLIRQRSFYLVKITNVLDHTFPEFKPFFNERLSKTALYLLENYGSAEKMARMNSASYEKLRSLSRGKFSPQQFLRLKELAVNTVGVNNSIFDVELNSLLSLYKSLVKEIDTIKKEINQLIEEVHPHYMSVPGIGPLSAAVIYSEYGDISNFTNPGQMLAFAGIEPGINESGTESHGGKMVKRGSSQLRYTLINCCLPLIRFDMTFATYYAKKRGEGKPHRVAITHVAKKLIRVIYALESQDIDFNAQELR

SEQ ID NO: 99481 - protein, 360 aa, unidentified
MQSTKERRDYILRNEKVFVGLDDSKKTWSLCVRSGGIIVHETSMPALYEVLRNYFNHKFPECQIQVMYEAGFRGFELHDQLEVDGWECVVTPPHTVTEEKCQRKKNDRTDCRRLAKNLENGDYRKCFVPDKGLREDRQISRTYGQVQADITRVCSRIRRMLEFHGLDNGLPAGRWSGTAYTRLRQHLGEIETSDSLRFSFEVVFRELEHLRQLKKEVLLKLRNLAKSDRYKGSVRLLMSAPGIGMLTAMRLALEWGDVSRFGRKEEFASFLGLVPSDYSSGDQERRGHITKQGNRSVRRWLVESSWIAIRHDPVLLEKFRRVLRHCGSKKKAIVAVARKLALRLRRALLSGEPYVIGVME

SEQ ID NO: 99482 - protein, 410 aa, unidentified
MEVIHARCAGRDVHKKTVGACVRIAAGQTVRHEVRTFGTTTAELDTLGAWLRAEACTHAVLESTGVYWKPVWAVLASEELTLVLAHAAAGRNIPGRKSDVKDARWLADLLAHGLVRPSFVPPAAQQALRELTRTRKQLVREITAHTQRIHKLLESANVKLGSVLTDVLGPSGRAIVEGLAAGETDVERLADRLHARSQAKRPGVVAALHGARLQPHQRVLLRQHLALIESVEASGAVIEAEIAAALESFRGAVARLVTIPGISTTAAAIVVAEIGTDMTRFPTAGHLRSWAGLCPRLDESAGKHGSRRIRKGAPWLKPILVQSAWAAVRVPNSYSRALYHRLARRSGKKPAIVAVAAALLTAIYSMLRTDQPYRDLGPHHLTEADRRRKAHRLATQLKHLGYEVTLHEAA

SEQ ID NO: 99483 - protein, 459 aa, unidentified
MGRKQSPVSAWEGLKVIHPNAAGLDIGSDEIWAAVAPDRTAEPVRKFGTYTPDLQALAAWLIACGVDTVAMESTGVYWIPVYEILEAQGLAVYVVNARHVKNVPGRKSDIQDCQWIQGLHSVGLLRGAFRPEAEIVALRAYLRHRATLIEYRAAHIQHMQKALQQMNVQLTQAVSDITGVTGLAIIRAIVAGQRDPQQLAALRQPGVKKTEAEIAKALTGNYRPEHLFALQQALALYDFYTTQVAACDAEIERQFANLKPLSDNLPPLPPTTKRDTHSKNAPRYDARSYLYHLTGVDLVAITGLNESTVQEIISEIGTDLSAFPNDKHFCSWLTLAPHNDISGGKRLRSRTLPGHNRAGQAFRMAAQSVAKSPNSAFGAFYRRMKARLGAKQAIVATAHKIARTFYHILKHRTPFHDLGGEEYERRAREREIKNLQKRAAKLGLVVTETPATPALARSF

SEQ ID NO: 99484 - protein, 425 aa, unidentified
MNYKQNEKINQVKESTLVVGIDIGSTTQYARAFDWRGIELGKVFPFSNSREGFESFKAWMQHLQDKYKKLDAIVGIEPTGHYWFDLGAYLEDEGILLVMVNPYAVKQTKELDDNSQSKNDRKDPKVIAKLVTEGRYSAPYTPDGVYADLRIMVANRKRLIREMTQIKNRFARWFAIYFPEYTDVFGDYEAQSSMLLLKKVCTPEAIVELGAEKINQIWRDAKLRAVGMKRATTLCETAKRSIGLKKGSSAARYEMKLLLEDYEYKKAQLDAVMEEIEKLCRKIPESEQMLAIKGIGVITVAGFLAEVGDVRRFESPRQIQKLAGLSLRENSSGKHKGQTTISKRGRSKLRAVLFNAAIPLIAKNPEFKSLHEYYTTRANNPLKKKQSVIAISCKLIRVFYAILAKGVTYDAQKLISDIHRQPQAA

SEQ ID NO: 99485 - protein, 391 aa, unidentified
MIYIGIDVAKDKHDCFITNSDSEVLFKAFTIANNLDGFNDLYQKIESVMDDVTKVKVGLEATGHYSYNLLGYLIDKGLPTYVINPLHTNLYRKSLSLRQTKTDKVDARTIASMLMSDVNLKSYSDTFYHNEELKSLTRYRFDKVKERAKLKTSVSRLVCILFPELEKLVPTLHMASVYALLSEFPSAKHVATAHLTRLTNLLSESSKGRYGKDTAITFRDSARASIGSNMPAKSLELKHTIKLIQELDSEIDEIENEIKIIMDEINSPILSIPGINYRMGAMIIAEIGDFNRFDSPDKILAYAGFSPSTYQSGQLDGAYAHMEKRGSRYLRYALYNATKYVCHWNPTFAAYLAKKRAEGKHYNVAISHAVKKLVRVIYHLEKTKQQYIKAA

SEQ ID NO: 99486 - protein, 370 aa, unidentified
MEQYTEAFVGIDTAKNKHALAIADPGRDGEIRYLGEIDSAPAAVQRMIRKLAGRYEKLYFCYEAGPTGYGLYRQVRALGHDCIVVAPSLVPKRPGERVKTNRRDAVTLARLLRAGDLTPVWVPDAVHEAVRDLVRARTAASEDLRRKRQQLLSFLLRHGRIYRGRKHWTKMHLHWLVQQKFDHPAQQIVFQDAVDAIEDAASRLRRLDQQVAEIVPSCSMAPVVEAYQAMRGVSFGVAVTFVAEIGDLRRFDNPRQLMAFLGLVPSERSTGERVRRAGLTLAGNKRARRVLIEGAWSYRYPARVSQALQTRLEGLPKTVREIAWKAQIRLCARYRRLTAVGKKRPLVIAAIAREMAAFLWAIAQHVAPAA

SEQ ID NO: 99487 - protein, 346 aa, unidentified
MMIIGCDFHPSWQQVSWLDTGTGEVGERKLVHARGDAERFYEQWAEPVLIGMEATGNSQWFIELVQDLGHEIWIGDAAQIRASYVRKQKTDKRDAEHILKLVVEGRFPKLWTPDREQRDLRQLVLHRHKLVEIRSRVKNELQHLAMNKGMQRKAKLWSQAGQKMLRELPLKPWAACRREDLLGLLAMLDQQVGKLDQAVQQAADQHPQARLLMTQPGVGPNTALAYMLTIGEVSRFPRGKQVASYLGLIPREESSGGRQKLGAITKQGNRLVRSLLVEAAQIVVRFDPGFRKQYLHRCHQKPKGVAKVAAARKLAVRLYWMLRTNVAYPEIVRIESSPRVPLVGAS

SEQ ID NO: 99488 - protein, 468 aa, unidentified
MIRRIQNNSKTIKKSKKPTIAQRKLEKLDYINMNAAGIDIGSKSHFVAIPEGRDTEFVREFKTFTNDLKALVDWLKKCKITTIAMEATGVYWIPVYDMLQETGFEVLLVNARHIKNVPGRKTDVLDCQWIQQLHSYGLLRGSFRPSGKILEMRAIIRHRSTLIDYSASHIQHMQKNLALMNIQLKNVIRDITGVTGLAIVRAIVEGERDPAKLAEFRDPNCKNSKEVIRESLIGNYKREHVFALKQALSLYDSYSLLINDCNYEIEMIMNELETLSDNEKWKEAKATKPQAKKHGFSFDLHQELFRITGVDLCLIPGLNVQSVARIISEIGVDMSKWNTSKQFAAWLGLCPGNKISGGKRISGKTAPNANQAARVFRMCASTLYQSYSSLGGYYRRMRSRLGSPKAITAAAHKMAIILYNMLKNGCEYMESGAEYYEEQFRKRCVKNLQKKAEKLGFDLVQKASATAT

SEQ ID NO: 99489 - protein, 359 aa, unidentified
MKKLIKEEVVTAQPTGNTVGLDLGDRWSRYCLLDANGSIVKEDRVRTTVDGIREQFGRMPGTRIILEAGTHSPWVSRELQNQGHEVTIANARKVRLIYESDRKNDRMDARMLARLGRVDTELLSPIHHRSAEAQADLAVIRGRDALVAARTQLVNATRGIVKSMGGRLPSSTTAAFARKVAASIPATLKSALNPLLESIRDLSEQIRQCDRRIEELAEKKYPETKLLQQVKGVGPLISLAYVLTLEDPKRFPKSRTVGSYLGLRPKQSESGDSAPQLGISKAGNGYLRRLLVQSAQYILSSLAPDSRLRRWGLELATRGGKNGKKRAVIAVARKLAVLLHRLWSTAEVYNPLYGLGPAA

SEQ ID NO: 99490 - protein, 413 aa, unidentified
MSVTDAPEPPRPTAGVDWATDDHAVAIVDPDGEQTHRFPVTHDAAGLRTLVRKLLAAGVAEVGIERPDGPVVDALRAAGLTVYVIPPGQLKNLRSRYGSAGNKDDRFDAYVLADVVRTDRRRLRPLLVDAPATTALRQSVRARRDLVAHRVAVANQLRAHLQIVFPGAVGLFADIDSDISLRFLERFPTQDRADWLSPKRLAAWLSSVGYSGRTLPETLHTRLRDAPTGATGPAGDTAATVTAAFVAVLRTLTTQIQALAAQIAEQLDLHPDAPIFTSLPRSGRVRAARLLAEIGDARGRFPTADSLACLAGVAPSTRQSGKVEVVSFRWGADRQLRDAICDFAGDSRHANPWAADLYQRARNRGHDHPHAVRVLARAWVDIIWACWTSHSPYDPDRHGALQRILNQDQPKTA

SEQ ID NO: 99491 - protein, 327 aa, unidentified
MAHPVLGIDVSKETLDVALIDGVRLSTKQFDNEPAGYQRLRLWLHKQGISKAHVCLEATGQYSDGVAEFLHEQNYEVSVVNPARIKHYANSKLRRNKTDKADAQLIAEYCLREKPALWSPPPVSFKHLQALIRHLDDLQVNLTRETNRLASGVRTPQVLEQLKDLITFLKQQIQQTKTMIQAHINSYPDLKRKQILLTSIRGIGALTAAKILGEIRDVTDFENARQLAAYAGLTPRNFLSGTSVHKKSRLSKAGNSNLRKDLFLPAIVAKRYNLIVKAFCVRLEQSGLRPMEVVGAAMHKLTHLIFGVLKSGRPFDENYLVNVQTRS

SEQ ID NO: 99492 - protein, 369 aa, unidentified
MEKTVYVGLDVHADTIAVALASEGRGGEMRFYGTIANSADTVLRLTKTLSRDGQIPTFCYEAGPCGYGLHRHLTRLGYECAVVAPAMIPRKVGDRVKTDRRDAEMLARLWRAGELTPIWTPNEEQEAMRDLIRTRKQTVDALKVAKQQLLSFLLRHGLRYRNGSYWTKRHRRWLAELRKFPYPHQQVAFEELKRAIDQIEARVATLDQTIETAIKSWHFAPVVDALRALRGINTTIAATVVAEIGDITRFENPRQLMAWLGLVPSEHSSGSTIRRGRLTKTGNALARTMLVEAGWSYRHPPKEGHPYLKRSAHLPQQIKDIGWKAQTRLCKRYRHLSRAGKPQPRVIAAIARELAGFVWDIARKTPLPV

SEQ ID NO: 99493 - protein, 407 aa, unidentified
MLFVGDDWAQDHHDVYLMDEAGARLAARRLPEGLAGIGQLHELIANHAEDPAEVIIGIETDRGLWVGALAAGGYQVYAINPMAVARYRDRHRVSGAKSDGADAKLLADLVRTDRHNHRALDGDSPQAEAVKVLARAHQSLIWTRARQASMLRSALRKYYPAALRAFPNLGDRDRDRDALAVLGRAPTPEQGARLSLSKIAAALKAGGRKRNIDERAREIQAMMRTEHLGAPETLTAAFAATTRATVNILLELTDQISDLETTLADHFEKHPDADIYRSLPGLGVILGARVLGEFGDDPNRFTNAKCRKNYAGTSPLTTASGKKKAVLARHVRNPHLYDALDRWAFATLLCSPGARSYYDQHRANGDTHHQALRALANRLVGILHGCLRHHALYDEHTAWDHRIPTAA

SEQ ID NO: 99494 - protein, 349 aa, unidentified
MEKCITVGMDMGDKNHNVCVLDAEGHVLKRITVTNTSKAIRKFFGELEACRVAMEAGTHSGWVSRILEELGHEVLVGNPRKLRVIWDSDEKNDTRDAEMLARIGRFDPQLLYPIHHRGQKAQEDLAVIKGRDMLVKVRSTLIAHARGTVKAIGQRISMCSAETFHVRLLAEMPAELAPALEPVMKSIEDLTCRIRHYNKLLEKLCADKYPETKRVRAISGVGPVTALAFILTLEDSARFDESRAVGPFVGLTPKRDQSGQVDKQLGITKAGDGYLRRLLVGGAQFILGPFGPDCDLQRFGLKLAARGGKNAKRRAVDAVARKLAVLMHHLWKSGATYDPLYQQNQKKAA

SEQ ID NO: 99495 - protein, 453 aa, unidentified
MNDRKYIGLDVHQATISVAVLDSAGKLVMEAILETKAETILQFIHGLRGSLHATFEEGTCAAWLHDLLKPHVAHVLVCDPRKNALIKVGNKSDRIDARKLADLLYLDKLHPVFHGEAGNRALKELARSYLTLTRDTTRVMNRLKALYRSWAIPCAGQRVYAPRYRSEWLAKITPAGVHRRAEIYYQQLDALRSLREQVRRDLLAEGRKHKAMNLLRRIPSIGPIRAVLLIALMQTPHRFRTKRQLWAYCGLALKTSTSGEYQIVEGRLRRSRKFLAIRGLNTNHNHDLKNIFKGAATRAAAVPGPFQDFHAGLVARGMKPTMARLTLARKIAAITLIVWKKGVDFDAEHLGFAFATTKWQIILLFVIYGVFYSIDEAQSKAFIADIEPERRASTMGAHNFVTGVIYLPASLIAGALWAVHPYIVFILAALLSLVAINAFMFLRPERQQESGTT

SEQ ID NO: 99496 - protein, 367 aa, unidentified
MKKVSTVAAQQQKNLSLQKLTIGLDLGDRSSWCCVLEEAGRVLLEQKVSTTPKAMEEVFGEMPRSRIAIETGMHSPWVSRLLGEVGHEVIVAHARNVRLIGESRKKDDRRDAQTLARLARIDPQLLSPVKHRSAKAQADLTVVRARAGLVRARTALVNTARGLAKSYGERLRGCNVRNMNPEKAEALSPELRKALGPLLAASAALSEQIAEYNERIEGLAQESYPQVALMKQVKGVGTLIALTFLLTLEDPGRFRKSRDVGCYLGLQPGRRNSGQSEPQMHISKEGDPYLRTLLVQGAQHILGPFGADSDLRRWGLKLAERGGKSGKKRAIIATARKLAVLLHRLWVSGEVYEPLRNSNPRAMPAAA

SEQ ID NO: 99497 - protein, 441 aa, unidentified
MKKEISFDQIYESAAGIDIGSEMIYVSVDGIKVESFGTCTADYRKCIEYLFNEKIVRIGMEATGVYWIAFYNMLEASGFKVSLINPTEIKQRKGNKTDVSDCKWIQKIFSAGLTKESFIPEGKLYEVRFLVRERLDIIDMGATYVNKMHKCLELMNIKIGHAISQIHGASGMKMLKAIIGGERDAEKLLALCDKRIIANKGDAVKKSLEANYNDTWLFMLSKNIELWEEHEKRIAQIDARISKLLAELTKGKELIDYKPNEEKKIRHHKPKINGLQDVLVNLYGVDVSRISGINNYTLLRLLGETGIDMSRFETRKHFVSWCSLSPGRNQSGKSSKFVKRAPCNKAGQIFKEVAQSLENSKFIAIGQFIRNLKHKRGASVAYKAGARKVAEAYYDSITKGSEYVEYGIKKYQEQKKQKEMALLKKLAKKHDMQITETQQRA

SEQ ID NO: 99498 - protein, 348 aa, unidentified
MSKLIAGMDLHSNNVVIGLMDMDGKRVAHQKVECQLSEVVKFLAPYRKRLEQVAVESTYNWYWLVDGLQALRYPVVLANPAGMEQYSGIKHADDTNDAFFLAELLRLKILPTGYIYDPRLRPVRDLLRRRLTLVHQRTALMLSFKSLYTRTTGQEMTLSRLKELEIKQAQDLYDHPANQLIAGMQIKHIEQLTESIEKVEKAVLDCARELPFYSKLTTLPGVGKILGMTITLEVGDIKRFAEAGHFASYCRTVEAKRTSNSKKKGENNSKCGNKYLAWAFVEGANFARRYDPQCRRWYDRKVAKTSNVIATKALACKLAKAAWHVMAEGTDYDSQRMFGQAAEHEMRT

SEQ ID NO: 99499 - protein, 332 aa, unidentified
MNAVYSGIDLHSTNSVVAVIDSTGQLLYRRRLPNELHAIAAVLAPYREVLEGVVVESTFNWYWLVDGLMAAGYRVRLANPTAIRVYSGLKHSDDETDARWLAELLRLGILPTGYIYPAAERGVRDLLRKRTANILSLQNQVQRSRGVRVGGQMFKTLTVEALAALMPQADVALALGANLQVVHCLSEQIAALERTVLARAKMRREFQQLQSIPGVGTILALTIMLEIGTIARFGSVGQFASYCRCVGSQRVSNGKKKGVGNVKSGNRYLAWAFIEAAQFARRYSEPIRRYHDRKAARTNAIVARKTVAHKLARAAYSIVRDQVAFDVTKSFC

SEQ ID NO: 99500 - protein, 347 aa, unidentified
MRFYTQSHEHYCGIDLHTQVMYLCILNQAGEVLLHRNMKSEPQAFLSAIAPYREDLVVGAECIFCWYWLADLCAREGIRFVLGHALYMKAIHGGKVKNDRIDSAKIAGLLRGGMFPLAYVYPAAMRSTRDLLRRRQYLVRQRAELLAHVQNTNSQWNLPQFAKKLDRKSNRVDVAERFEDAAVRKSIEADCALLDRLGELIKALEAYIVRNVRVHDARTWYRLRSVPGIGKVLALVILYEIQDIARFASVGQFCSYARLVRGSKESAGKKAGPMGRKIGNAHLKWAFSEAVCLMMRELPQASAYVARQEKKHGKGKAMSMLAHKLGRAVYFMLKRNDAFDVKYFFSN

SEQ ID NO: 99501 - protein, 331 aa, unidentified
MRQIYGIDLSKEKFDVNYINQADQKQHCVIKNDLKNISEFLESLPDDSHLVAEHTGVYGDLLLFLSNQMNISISLCSGYSIKHSLGLRKGKTDKIDAARIREYGERFYDTLKPSTINSELMAELQELYSLRRQLVKEKKMLLTKQKGVTRLATRSIYAKNVYTRILDQLTREINDIELQIQKIIRSDNEFSRNFDLVTSIKGIGPITACELLIKTANFKRISTAKKAASYAGICPFPNTSGQMVKKARVSPMSDKSLKSLLFMCAKSAVAHNKEYRLYYQKKQLEGKPHYLIMTNVANKLLRTVYKVIETKTPWDPNYICLDPREMKNKVA

SEQ ID NO: 99502 - protein, 368 aa, unidentified
MKGGRRSSDRGMALIAVMAMAGCSRKTPGQALAELTRRLDDGDSELHFCYEAGPCGFVLARHLLRLGFDTVVIAPSLIPRQSGDKFKTDKRDARKLARHFRSGNLTTVHIPDESDEVIRDLCRARTDAVDDCRRSRQRLLSFLLRNGHHYTGKSNWTEAHMRYLRELVLQDPSQKVILEEYLQTIDRNMQRVSDLEENMRTLQVDWTRGKFAEALQGFRGFQLIASMIITSELGDVTRFDHPRKLMAYLGLVPTEDSSGDRRRQGAITKCGNSHARWILVEVAECYRYDPKISRALSYRQEGLSKAVKELSWRAQKRLNHRYVRLAMRRLHKNKIKVAIARELAAFIWELGQILRKESPVPDSQWYAA

SEQ ID NO: 99503 - protein, 297 aa, unidentified
MQTQVTKKIDFTGKNLFIGLDVHKKSWSVTILVEGIEHRAFTQPPDPMALYNYLQRMFPGGSYNSAYEAGFCGYGIHRELNSLGIKNIVINAADIPTSQKDKLQKRDPIDSRKIARALKNGSLRGIHIFDREIEELRSLNRTRFYLMRDLRRSKNRIKSFLQYYGESIPPEYDNNQWTLNYVSWLKQVQMKTLSGQDAFSNLIRSYEYHREQLLTLSRQIRQRIREYDNELYSLLKTISGIGPLTSSALITELGDINRFPHIDHLSSFVGLIPRVKQSGETSHTGGITFRCNSYHPC

SEQ ID NO: 99504 - protein, 474 aa, unidentified
MSGETKQSKASKKRWKKRKGMCQEDRPILESNAAGIDVGAREMFVAVPPDRDAHPVRVFDTFTEDLERLADWLVACGITTVAMESTGVYWIPLYDILEARGLKPCLVNARHMKNVPGRRTDWHECQWLQYLHSVGLLRSAFRPQSDVCAVRVLIRHRDELVQMASQHVQHMQKALTQMNLQIHHVISDITGLTGLAIVDAILAGERDAAELAKLRDARIKATEDTIRKSLVGNWRPELLFTLRQSRHLYRSCQQHIVECDQEIEKLLRDFAPWVDPAEKPLPADHKRNRSNSKRRRKNGNPENGFDLRSEAYKLFGVDVTQIPGVETIALPLFSEVGRDLSKWPTAAHFSSWLALCPDNDISGGRVLWKGVRKVKSRAGQLFRLAAHSLHRSLTLMGNYLRRMKAKLGPAAATTATAHKIAVIFYTMVKKQVEYDETIWATRDTERQKRLELRLKRQATQLGYRLVPMEQNPAT

SEQ ID NO: 99505 - protein, 296 aa, unidentified
MLYLGCDVHKNYTTVSFVDENGNARETRSFFNNIDELKHSLNLFPEEEFSAVLEAGLNWGVIYDMLESVSEVKNVSLAHVPKVKAIASARIKTDKIDSKILGQLLKADLIPEVWVPPKEVRILKDMVRFRAFVVKIKTMIKNRIHDILRKSHVNPPEVKDIFGKYGRIWLEEIELSEPRMDKLLRYHLKLKDTFEDMEKELKKWINKEMKTNEDLRLVKTIPGIRDVFGPIIVLEIDDVNRFPDPAHLHSYSGLVPSTHSSGNTYYHGKLIKGNRWLRWGFIEGAHTSVRVSPYFR

SEQ ID NO: 99506 - protein, 337 aa, unidentified
MKYSGIDLHSNNSVVVVSDEVDRVLVRRRMPNDPAAILALLAAHRDDLVGVVVESTYNWYWLVDALQAAGYRVHLANTAAIKRYEGSKHSGDEDDAAYLAQLLRLGILPRGYICPPAARAVRDLARKRMQLVRSRTAQVLSVENMLSRETGAGMRSYAVQRLTAQAVAGFGFNPEVEQSMCANVAVIKTLNREIAKLEQRLHQCVRLRPEFGLLTSVPGIGQTLATLIMLEVGTIERFAAVGNFASYARCVDSARISNGKKKGQGNVKNGNAYLAWAFVEAANFARRYCAEARRFYERKKARTNGVVATKALAHKLARACYHMLKEQKSFDVKRCFA

SEQ ID NO: 99507 - protein, 453 aa, unidentified
MNHRRLVGVDLGIASAHTVRVLDGNGTTILKRKAHPTVESLASVEAAALAGTLAGTRLEVVIEPTGPAWLPIAVYFCRRGHTVHRVSSAKAADLRRFLSRHAKSNGIDADTLARLPLVDPGGVGPLVLPGAERAALDRRVRAADRLTQQAARHKVRIKALVRQLLPMTPLTGDLGAADLAVLERYADPNALLKAGKTRLTTLIEKVSNNHLGIERATQWLQAAQASVELYGGHPAASFVDLAAEVATEIRLLRAVEAELATHAAERERCYRWVDRGGLARSLPGLREVGGPALVATMGEAARFPTGRQFRSYTGLAPRASETGETDRKGQPMSKAGPRLLRATLVRAADWARKQDPQLARIYHVQMTERGKDHLGALCVVAANLAERAWAVMDRGMPYVVCDTEGRPVTPEEAKRSSPSEATLPAVHPPRIEPTSSRHPSEGPPDACLTGDPP

SEQ ID NO: 99508 - protein, 314 aa, unidentified
METTRYVGIDVSAVTLDVAVHEGSLTQVANDASGITDLVKALQDASTTLVVLEATGAYHREVTSALVAAGVPVAVVNPRQVRDFARSTGLLAKTDRLDAGVLARFAAVVRPTPRPVPSDATLELTALVERRRQLVEMLTAEKNRLSVARKPVRPSVQQIIRALEKALAAADADIDRWIRSSPVWRAQDDLLQSVPGVGPQTARLLIAALPELGRLTRREIAALVGVAPLACDSGTLRGQRHCWGGRSHIRAVLYMAAVAGSRFNPVLRAMYRRLKAAGKPPKVALVACMRRLIIILNAMVKTQRHWQAPAPLTP

SEQ ID NO: 99509 - protein, 360 aa, unidentified
MLKQSSELNFEGHNIFVGIDLHLKSWTVTILTDKLSHKTFTQPASVETLHKYLEKKFPGGVYHSVYEAGFSGLWTHYKLQEMGINNIVVNPADVPTTQKEDLGKDDSVDSRKLARSLRSGDLTPIYIPAPSTLEDRSLVRLRATIVKDMVRFKQRIKSFLYFYGVSYPLEFEKAGTHWSKRFMKWLKEGVSLQHDSGNQSLKILIQEAEQHRKLLLETTRKVRKLSCSEKYASNMVLMRTIPGVGFITAITFLTEIENIERFGNSDHFAGFIGLVPNQHSSGDKKRIGEMTFRGQDTLKKAIIESSWFAARLDPALNKSFHSYLNRMDANKAIIRIARKVLNRMYFVLKNKMEYVPSVIK

SEQ ID NO: 99510 - protein, 344 aa, unidentified
MEGYAGRQFVGVDLHRRRSVIVRTTDAGEVLEAVRIVNDVDRLAAVMGRAGEAPEVVLEATYGWYWAADALAEMGAVVHLAHPLGVKAFEYRRVKNDLRDATDLADLLRMGRLPEAWIAPPATRELRELVRHRAKLVGLRSHCKAEVHAVLAKCGVQVLMVDLFGLAGTELLDGLDLPAPYAARIASLRRLLDGIDFEIDLFAGLVRGRLARDPGYAAVQTIPGIGPVLGAVLVAEIGDITRFARAEQLTCWAGLTPKHHESDTHVHRGPITKQGSRLVRWAVIESVQILPKTTHVGGIRERIGAKRGRNIGAVAAARCQLEYVFYALRDGHVRALGTRSPEAA

SEQ ID NO: 99511 - protein, 406 aa, unidentified
MDVVYTHVCGLDVHKKNVVACVITPETKEIRTFSTMTDDLILLVDWIKSNGCTHVAMESTASFWKPIYNLLELEDIQTLVVNAKNIKNVPGRKTDVKDAEWIASLLRHGLLQGSFIPNRDQRELRELIRYRRSLIDERAREVNRIQKVLEGANIKLSSVASDVLGKSGRAMIEAMIAGEENPELLSELAQRRLKNKKAELQRALNGLIGNHQKLMLAAQLRHIDYLDEEIGRLDEEIKRRMLPFEEDLELLDTIPGVARRTAETIAAEIGTNMDQFPSAAHLCSWAGLCPGQNESAGKRKSGTTRKGNKKLRSALVEAARAAGRTKNTYLSSQYHRIAARRGANRAAVAVAHSILMIAYYILKRRQPYIELGPNYYEERKRDTIIRQSLKRLESLGLKVTVESTAS

SEQ ID NO: 99512 - protein, 415 aa, unidentified
MALKIVYKICCGIDVHKTFVVACIASTDHNGVTTYESHRFSTYTSGLKDLLQWLLKHNCKDVCMESTGKYWIPVYNVLENDCTIVLAHPKYVKAIRGKKTDKKDAKWIADLFKHDLVAGSFMPLADIRQLRDLMRYRFKLTCFQSSEKNRLQNCLTVSNIQLGNVVSDTFGKSAQAILDKLLENPADTSFDLEPLVYKNLKKKLPELRDAIDGYITPEQAGKLKVIKAHYENLVSRKAELEKLILALAAPYQQELAILQTAPGISSDFTAIGIISEIGTNMEAFPSAKHLCSWAGLTPTNNESAGKKKSVRVSKAGCYIKPLLVQCANAVVTSKKHPEIRNRYLRLKKRRGHKKAIIAIARMLLTALYHMLKNSENYNAELYRKSDLPSIDREITVEQAILIARNQGYRIRSETA

SEQ ID NO: 99513 - protein, 373 aa, unidentified
MPSNLRYLGLDVHAETIAVAVAEPGGEVRPLGIIPHRPDAVAKLIRKLASREQLRVCYEAGPCGYVLYWQLTKLGVHCDVVAPTLVPTKPGDRVKTDRRDAAKLARCYRAGDLTPVWVPDAAHEALRDLVRAREAAKGDQLRARHRLGKFLLRRGIRPPAGAKPWTQAHRRWLDSLHLELPALEATLADSLHEVDHAAARLDRLEQALDAAIAAAPETLRSVIAALQCLRGIRQITAATIVSEVGPLSRFTHPRQLMGYSGTVPSEHSSGASVHRGAITKTGNAHLRRVLVEAAWAYRFSPKCAKGLRQRQRGQPEAITALAWKAQQRLCSRYRRLLARGKPTPHVITAVARELVGFIWAIGVAVERAQAMAA

SEQ ID NO: 99514 - protein, 416 aa, unidentified
MNAVGIDVSSRKSTVAVLRPLGEVVCLPFDVTHDIAGLASLAEKLKAIDGETRVVMEHTGRYYEAVAKALHEAGFFVCAVNPLLIKEYGANSLRRVKTDKADAIKIARYALDNWADLRDFTPMDAIRYDLKTLNRQFQLASKQRTASANNLIALLEQSFPGIRKCFDSPVRSDGTQKWVDFAHSFWHVDCVRKQPFPAFCERYRKWCKRHAYLFKLSNAEEVYALAKRAVVLTPKSKVVKVLVQEAANQLISISRSVEVYRAEMDRLAAMLPEYPVVMAMYGVGKSYGPQLMAEIGDVRRFERKQALVAFAGIDPMPNQSGDKNVRSNKSSKRGSPYLRKTLFNVIRTYLQCAPQDEPVFQFLNRKRAEGKPFYVYMLAAANKFLRRYYAKLRDYFASLDTLQPVDPIPTILKATL

SEQ ID NO: 99515 - protein, 409 aa, unidentified
MEVIHPRCCGIDIHKESVVACLRLQEGRRVKTEVRRFGTTTAELLRLHEWLSHAACTHVAMESTSVYWKPVFNLLEGSFEVVLANAYHIKAVPGRKTDVKDCEWIANLLAHGLIRASFIPPPPIRDLRDLTRHRKSLVRDRVKATNRVHKLLETANIKLANVVADVLGVSGRAMLDALVAGETDPEPLAKLAKGSLTPKVKPLAEALRGRFTSHHAFLLGQMLTQLDQLAALIAQCDVRILEVSKPFEPEIQRLQTIVGVGRRSAEVLVSEIGVDMARFSTAGHLASWARICPGSYESAGKRRSVRTGTGNNWLRTTLLESAWAAAHSRKSYLGAQFRRISKRRGSKRAGIAVAHSILVIAYHMLRNGVDFNDLGADYFDRMNNAKLKRYHLRRLAELGCDVSALAVSA

SEQ ID NO: 99516 - protein, 408 aa, unidentified
MGRTAEVMAPSSSTRTDGGCPVAQVNDLSRSLTAFDPISTLVVVVEMSKASWLVSGVVPGIERQPLKKLESDATALLRLIERWRNEAMRAGRPISRITLAYEAGRDGFWLARWLITRGIEAHVIHSASVAVSRERKRAKTDRLDAAMLMRVFLGWLRGERGHCGMVVIPTMEEEAARRPSRERESLVNERSRITNRMKSALARLGIRGFKPHLRKAPERLAGLRTAEGTGLPANVIEEFRRDMARLALVREQISSIEKTRAERLERAPDTGPHAMVRLLARVIGIGIETADMLVREILSRRLRDRRAVARYAGLTGSPDESGLKRREKGLAKAGNARVRRGLIQLAWRFLMFQKDSALARWYRTRTEGPSGARKTTMIVALARKLLIALWRLVTTGEVPDGVELRPAA

SEQ ID NO: 99517 - protein, 321 aa, unidentified
MTYIGIDVSKATFVVAYSSAKTSKTRTFKNTTKGVHEFIQTLSATEHHCVLEATGNYSALLVYLLSEANITVSLENPLKIKNFARVMLTVTKTDEIDARLIALYGERMQPAPYKLRSDSILILKQKRTVLRQLKKQLIATRNLKGSMEVLPFFDHKCKKTIEKTITFLEKQIKGMEEELAALAQGEYKKQMDLLTSIKGIGVTLAAALIVATGGFTYFDNAKQLTRYLGLSPTYQQSGTSVNVKGHINRNGDSHLRSQLYVAAFSSLRCNTECKACFDRLRSNGKPGKLAVIAVANKLVRQAFAVVTQGKPYVDGFKSEKP

SEQ ID NO: 99518 - protein, 348 aa, unidentified
MAGTMMADGIVVGVDTHADVHVGVALSSLGARLGSIQVRTDAEGLVELAAWAEGLGSISCFGVEGTGSYGATLARLLHARGHRVVEVMRADRATRRSKGKSDPIDAEAAARSVLSGAACGVPKSADGAVEMIRSLRVARRSAMKAKTQAANQLHALVTTCPVDLREKLGRLPVPSLVEVAARFRVSCLDSPEAAARLALRHLARRHVALEAEISSLDDGLQILVAQAAPSLVSLSGVGTDVAGALLVAAGDNPGRLRSEASFAALCGAAPIPASSGKTSRHRLSRGGDRSANNALWRIVLVRMRYDEQTRTYVTRRTNEGLSKREIIRCLKRYVAREVYRHLEGVDGL

SEQ ID NO: 99519 - protein, 340 aa, unidentified
MRYLGVDLHTNCFTVCFRAESGRETVKTYQMKKLLDFLRSIDKKDTVAVESTGNTRFFVESIKKVVKKVVVVDPNKFDVIKKSTKKTDENDAKMLALFLSKEMVPEARMKTGLQAELSKLVATRTTLVEQRTALVNTIHNLLNSQGVKEKKESLTTVKGLARVRNLAKEKFDAIVFLQIEVLETQILSLTSGIHRLEEQMIEKGKQLEGHENLSSIKGIGDKAATTLLTVIGDINDFDDAGKLASYFGMVPRVRNSNETVQYGRITKKGSKIGRTTLVQCSLVAIRYSPYLSKFYEGIKQRRGSGKAIIATARKLLGIVYDTLKEKRVFTDFPNFKYVTP

SEQ ID NO: 99520 - protein, 373 aa, unidentified
MEKGITYVAMDTHKKQHRVALVYPNNEEILEFSVKNAPAELRKMVGKIRRNAPGKVIFCYEAGICGFTLQRRIEALGCKCSVIAPSLTPRKPGERIKTDRRDAKKLLGLYMADMLTEVYPPNEEEEAARELTRCREAAQENLKRIRHQLQKMLVRHGYVFIDGQHWTQKHYRWLDAVEFNQPLLRDVFDCYLTEMRHCLQRVQTLDKELEKLAQSEDYKEVVGILRCFYGIKTLTAISVIAEVFDFGRFASARAFMSYLGLTPSESSSGEKEHKGRITKTGNKRVRRLLTEAAWHHRHAYVVSKALNKRREGQPQWAIDIADRAGVRLRRRYRRLVNRGKLPCKATTAVARELAGFIWSALVEYEARRKRKVA

SEQ ID NO: 99521 - protein, 347 aa, unidentified
MRFYTKQHTHHCGIDLHARSMYLCIMDHNGKVLLHRNMRATPEAFLKAVAPYREDLVVAVECMFTWYWLADLRAAAGIAFVLGHALYMKAIHGGKAKNDRIDALKIATLLRGGMLPQAYVYPAKMRATRDLLRRRLHFTRKRAELLAHIQNTNSQYNLPVFEKQLTYRSNRAGVVDRFADPSVQKTIAVDLALLAYYDQALTDLEYFILRTAKQHDHHTLYRLRTVPGIGKILSLVILYEIHDITRFARPQELASYARLVKCAKESAGTIRGTSGRKIGNAHLKWAFSEAAVGFLRKNPEGKKYYARLERKHGKGKALTVLAHKLARAVYYIWKKDQVFDQEKFLAA

SEQ ID NO: 99522 - protein, 334 aa, unidentified
MGNITAIGLDLAKKVFQVHAVDEAGSVIMRKQLRRGQVLAFFAGLPSCLVGLEACATAHHWARELTALGHVPRLMPPAYVKAYVRRNKNDVADAEAICEAVRRPSMRFVPIKTTEQQSALMIHRARDLLIRQRTMLVNALRGHLAEFGLIEAQGLHKVAKLIAIVLDEEDRRISDIARQVLTVIVSQIEDTQTRIAGLEKQILAWHKNNPVSQRLATVPEIGPIIATAIAATVADPKTFCSGREFAAWLGLVPRQNSTGGKARLGRISKRGDSYLRRLLVNSAHTVLLCSKQARSLLSRKPRLVVAVALANKTARVAWAIMSRQDTYRNAALAA

SEQ ID NO: 99523 - protein, 328 aa, unidentified
MNNSNEVYDVLGIDISKAKFDVALIQGNAKIKSKVFANNPEGFAELQAWLNLQSVTNLHGCMEATSTYGNALARFLVEAGYKVSIVNPSRPKAFGKSELSRTKTDRADAKVIARFCAALKPAPWTPPALEIEQLQALVHRLDSLTAMQQQEQNRLATADPILVEAINAHIDFLKEQIEMTKKLIRQHFDQHPHLKSQRDLLTSIPGIAELTATVLLAEIRDISAFDTADQLAAFAGLTPREFSSGSSIHGKPRLSKIGNSRLRKSLFMPAIVARRYNAPISAFCDRLTAKGKSKMSVIGAVMHKLLRQVFGVLKSQRSFDPNFVQIPS

SEQ ID NO: 99524 - protein, 322 aa, unidentified
MLPTLGIDISKDSFHLELSVNEKLRHRKFANRKEGFAELCVWLAKHKAGQVHACLEATGPYSEDLALYLHQQGHIVSIVNPAQIKAFGQSELRRNKDDRPDAGLIRRFCEKQQPPVWTPPPAHWRELQALTRHLENLIETRQQQLNRLEGAKTKGVVKSLRKLVTYLDSEIARTEKQIQHHVDNYPDLKQQCQLLESIPGIGKRTAAKLLAEIEDIARYKSARQVAAYAGLTPRNNRSGTIRGKTRLSKTGNARVRKALFLPAMTAKRYNPIVRSFCQRLANHGKNKMEVIGAAMRKLIHIAFGVLKSGKQFDPNYELLFAS

SEQ ID NO: 99525 - protein, 375 aa, unidentified
MPRYSTAFGMDVHLRSTTVCALDAETGEAVTRRFRGNPWGEVAEWMSGFPGPSLAAYESGYLGFAPQRELSGLGVDCVVAAVSKVPRSAADLSSKNDRNDAARMAKAILSHDVTPVWVPSPEIEGLRDLAAAHDAATARLAAAKQRLLAFLARRGYVYGGTTPAGNPRKYWTYGFLRWLDGIHPADDGGIRALAALRNEVEAADETREALLAEYRAAVAAGPLSAEVEALQSIKGCGFALAAAFASEVGDFSRFRSGRQVTAYFGLAPKQRSSADSVRLGGISGAGNALVRKLAVEGSWCYAQAGHQPKLMPKGSGVPLEIRMHGRKGSERLLRRREEMIARGMPQAKANAATAAELVRWLWALGTMCREGAEWT

SEQ ID NO: 99526 - protein, 344 aa, unidentified
MEVIIGVDPHKGSHTATMLDRGQRELRRITVRAGCRQVAELLAWADGVKPRRWAVESAGGMGYLLAQQLVAAGETVLDVPATLASRVRVLGTGQSVKTDANDARSVAVAALHAPSLAVVRPADHVTVCRLLAKRHTDVARWRTKQCCRLHALVGELVPGGIDKEVVVTQARSLLDEIQPQDVAALERHRQAVELIADIDHLDVVLKDSRARITAAVAASGTTLTEIFGVGPIVACMLIGFSGDPSRFTTASRYATYTGTAPLEFSSGGRIVHRLSRRGNRRLNHALHCAAITQIRHRHSPGRGYYERKLAEGHTPREAIRALKRRLSDVVFRHLIADARRVANR

SEQ ID NO: 99527 - protein, 346 aa, unidentified
MNPGQKATSGKLYVGIDVSATTASVALLTDAQSVSEGFTIQQTEQAITLLGNKLLETGRAPEQVHIVMEATGTYWMKLASQLHKMGFRVSVINPSQAHHFAQARLQRAKTDEGDAETLAFLALQMQPLPWSPAPEVYEELEQRLVERDSLLSIRQQLRNQLHALRHRPRVVSEVERRKQTLLANIQSQIEVIEREIESLMRQEHAWATSAYFLRSIKGVGAITAAWLLVATHNFTDCQSPEQVAAYAGLVPYKRESGTSVRHRGRIGHAGHARLRRALYMATLSATRHNPAIKTFYDRLRAKGKPMKVARCAAARKLIHIAWAVVTKQTLYDPNYQQTREVQLQLA

SEQ ID NO: 99528 - protein, 391 aa, unidentified
MSIYFIGIDISKYKHDCCIISAADQKVVSKLTIKNNKSGFDELLTTINSLSNPEDIRIGFESTAHYALNLELFLENSLLTFMEVNPVLINEYKRSRTLRRTKTDSVDCESIARWLMTVEYKPHSKGFYHAYSLKSLTRLRDRLIRQRSFYLVKITNVLDHTFPEFKPFFKERISKTALYLLETYGSAEKMSRMNSASYEKLRSLSRGKFTPQQFLQLKELAANTVGVNNSIFDVELNSLLSLYKSLVKEIDTLEIEINKLINEVHPHYMSIPGIGPLSAAVIYSEYGDISNFSNPGQMLAFAGIEPGINESGTESHGGRMVKRGSSQLRYTLINCCLPLIRFDIIFATYYAKKRGEGKPHRVAITHVAKKLVRVIYALERQDIDYNIQKLH

SEQ ID NO: 99529 - protein, 356 aa, unidentified
MNIRRVQHFVVDGKEIFVGLEDSKKTWKLAVRSEGMLIHQASMEAKYSVLIRYLRNNFPNCTIHLIYEAGFKGFNLYDRLTDDGIDCVVIPPHVVTEPKVNRVKTDKRDARRLALILENHDFRDACHVPDRERREDRQISRTLIAMQKDVIRTRNRIRKLLDFHGIEASFPDRWGRDEFRALKKLSLPEPLKISLDVLLTQLEELWNHQVTLRTALRKLCRKERYEKAYTIARSLPGIGWFTAIRLVLELGEDLSHFTSGKKIASFVGLTCSEYSSGQTEWKGHITGMGSRFIRATLIENSWAAIRKDPVLLAKFSRIWRASGSKKKAIVAVARMLIVRLRACVILGTPYSLGVVR

SEQ ID NO: 99530 - protein, 409 aa, unidentified
MERQIERGCGLDVHRDTVAACVRVPGQGRPRDQHVRTFGTTAAALLQLRDWLGEHGVTHVAMESTGVYWKPVFYVLEEVVTCLLVNAAHIKQVPGRKTDVADCVWIAQLLEHGLLRGSFVPPAPIRELRDLTRHRKVLIQERQRAVNRVHKLLQDAGIKLASVATDILGQSGRAMLEALAQGTTDPAVLAELARGRLRAKLPALREALAGRFRPHHAFLVSQQLAHIDYLEESIATVSEEVDRLLVPFAAQVAQLDTIPGINKRTAEVLIAEIGVDMSRFPSEHHLASWAGLCPGNNESAGKHKAGTTRKGDRWLRLALVEAALAAIRTKDSALGARYRRVMRHRGHKKAIVAVAHAMLRAAYHVLAEGTTYRDPGPDYYDRRRARQATRRALELLERQGYRVTLEPAA

SEQ ID NO: 99531 - protein, 413 aa, unidentified
MDRLLERCAALDVHQASVSVCVRVSGEDGQRRELSERFGTTTPDLLALCDWLRGHAVTHVAMEGTGVYWKPVYYALESEFELLLVNAAHVKQVPGRKTDTKDAAWLCQLLECGLLRASFVPPKPIRELRDLTRYRKTLIADRASEANRLHKVLEDAGVKLSSVASNVLGVSGRLMLEALCQGGNDPVALAELARGRLRSKLPGLRRALESRFREHHAFLVSQILAHLDYLDEAIAACSARIEAQIVPFAPAVRLLESIPGVGRRNAEVIVAEIGADMSVFPSSRHLSSWAKLAPGNNESAGKRKSGSTGKGSPWLRSALVESALAATRTRGYLRAKYWRIRQRRGHQRAVIAVAHAILEISYQMLTTGELYHELGDDFFERRDAEHATRRHLRALERLGYHVTVEAAATTEAA

SEQ ID NO: 99532 - protein, 395 aa, unidentified
MGHSYSVLYKDDTCLFEDEIEHTQRGFHALLEEIQHLPERPLIVFEATGIYSRPVEKFFQDHHFSYCLLNPLEAKKQMEENTLRSWKTDKSDAHRLAQTHLKNQRQPKEVQSNFYLEMRDLARFYQEIEKKITRLRMDLHNCLQLTFPELEQFFSNRLTPYALTLIRLFPHPDFVLASTRTKIKNKLINETRKKISANRAEQKADQIIHYAQCAYPAVEKDSIHCQKTIYYAELLQDLLEQKEALATQMIKKAEGSPCFLLYQTFPGIGALTAALLLGELGDITRFKTHKQLNAFVGIDIRRYQSGKYTGQDRINKRGNPKARKIIFFTIRNMIRQQRAAPNHIVDYYYKLKKQPIPKKDKVATVACMNKLLKCMHAMVRAHTEYDYAYAVSVDH

SEQ ID NO: 99533 - protein, 362 aa, unidentified
MKILALDLGKYKTVGCTYESESGAHQFQRTFTTPADLRRLVQEVRPDRVVIEVCSIAGWVCDLMGQLGTEVQVANTSDDAWRWRKVKQKDDRRDALKAARLSAVNQLREVYIPQTEVRQWRALITYRQHLVGRRTKIKNHIRDLLVREGQLLPRAGKCWTKLGQDRLNSMARPLEEVGATELWRGELWEELQQLQMIQERVASVEEKLNALGAADKRVQLLRTIPGVGPRLSEAIVALLDQPQRFRKASQVSGYIGMVPKAFDSGESERRGRITRQGNRLVRSLLVEVAWVGLRHNRWLRQTYLRLSGGKKARKKIAIVAVGRKLLVRCWAMLRDNRPWNWQPQITEPRSNRGSEDQGETLP

SEQ ID NO: 99534 - protein, 428 aa, unidentified
MRSIGLDVHRQFAEVAVAQGGQAVPSGHRFEATPAGLLAFARSLGKEDQVVLEATVNTWAIVDVLAAHAGRVVVSNPLRTRAIASAKVKTDKIDAATLAQLLAADFLPEVWIPDPETRSRRAQVAHRAGLVQQRSRLRNRVEAVLHRNLLECPWTDTFGKRGCQWLAHLNLPSADREQLDSTLRQLDCMEAEVARADQLIAETTLGDPRIQRLMTIPGVGVTTAAALVAVVGDVARFPRPNQLVGYLGLDPRVRQSGNKPAYTGHISRQGQAHARGLLVEAAHAAVRRPGPLRAFYLRIRARRGSQVALVAVARKLAILTWHLLTKGEDYHWASPTRTAEKLRAVAIKAGAPKLPNGRPGVPRARRGAGEDLPSAHRSVEALRKRADEDGLALQAEQAYRTLVAGHARDRRGSGAAGRRLLDEAGPMV

SEQ ID NO: 99535 - protein, 415 aa, unidentified
MTETAYAAYVGIDWGTATHQVAVLDAQRAPLGERAVAHDGAALQAFTEWLTLLTGGEPARVAVGLEVPRGAVVDTLLERGFHVFALNPKQLDRFRGRYTVAGAKDDRRDAFVLATALATDRPAFRRLELEAPLIVELREWSRVEDELREEWGRLANRLREQLHRFSPQLLSLCPAADESWFWALIELAPTPPAAQRLLRAAVVTLLREHRIRRLTADQVLAVLRSAPLQVAPGTVQAASAHVALLLPRLELIDRQRRDCARRIEHLLDALATTGEHQGHRDVTILRSLPGVGRVVAATMLAEASRLLAARDYHGLRTQAGVAPVTRQSGKRLLVGMRYACNPRLRNALYYWGFISVRYDAHSRQHYRRLRGHGHSHGRALRGVADRLLTVLMAMLAQQTMYDPARRRAALAQTPS

SEQ ID NO: 99536 - protein, 332 aa, unidentified
MSIIGCDLHSRYQVIAMLEAESGEITTRRLEHAGGEAARFYGGLEKPALVGIEATGYTQWFERLVADLGHELWVGDPAEIRARAVRRQKTDTRDAEHLLDLLINRRFPRVWVPTPEERDVRQLLKHRDKLVKMQTSVRNQLHFLAMSQGVCRKRALWSERGRQELDALQLGPWASRRRQELSDLLDGLGPRIEEMDRAVKGEAARRAEAVRLMEQQGVGPVTALAFVLTVGPVERFATSRKLVSYLGLNPSEASSGGHQRLGHISKQGNEMLRWLLVEAGHTAARLDPELRRVYQRLKFRRGGRVAKVALARRLAVRLYWKLRNGTATSHAQ

SEQ ID NO: 99537 - protein, 429 aa, unidentified
MEEVDDAELVVERVAALDLGKAGLEACVRVPHPQRPGRRMQELRGYGTTTAQLLEMVAWLRQWRVQRVVMESTSTYWKGVYYLLEAEEFDCWLVNAREVKNVPGRAKTDRADAVWLAKVAERGMCRPSLVQPPEIRRLRDLTRYRRALVQDRTREQQRVEKLLEDAQIKISAVLSNLHGVTGRAMMDALIVGERDPRTLAQLAKGQARKKTGALEEALRGFFTDHHATILQMMLDNTDRISAQIAALDARIEEAIDPFSDQAARLAEIPGVDAVAAAELIAEIGVDMTRFPSAAHLVSWAKFCPQTHQSAGKSKAKGRGKGNPWLAGTLGRIAFANSRSDTFLGTRYRRLARRRGGQKAIVATGNSILTVVYHLLSDPDASFIDLGPGYYESRINKHRRARDLAIQLQALTDQHIVIRDGKAVITDTAA

SEQ ID NO: 99538 - protein, 346 aa, unidentified
MNYCGIDLGGVSSYVYVTTDRGRKLWSGPVETSKEALKARLRRFRREGLSVAIEAGNQTAWVYEVLVAMGAKVTVVNPNKVKLIAESRRKTDKVDARILCELLRIDALPHPVHMPGRQTRALRGLLVARRQLVAARTKLSNVVRGMLRQEGIRLSAGALSSLAGWERVFVNSFSCEHVMTVVRAYYQSFKALTQSVHVLERKLAERERTSPEAKRLQTMPRVGRIASLTFLAAVDDVNRFPSSRKLVGYSGLAPIVRQSSERTQYGPISREGRRELRAVWVQIAHLVAIDRHRETQPLRSWFNRVAKRRGKKTAVVALARRLLVIAYHLLREESDFDAARLKRRAA

SEQ ID NO: 99539 - protein, 341 aa, unidentified
MAEVSTIGLDIAKHVFQAHGADASGRVVFRKKITRAKLMEFFASQPRCVVALEACGGAHHWGRELGKLGHTVRLIPPAYVKPFVKRQKNDAADAEAICEAAQRPSMRFVAVKDEEQQANGVVFRARDVLVRQRTQCINALRGHLTEYGWVVPKGTAHVATLIGQIEDPNCSLPESARAIFRVLVTSLTSLEESIAVLDSEISRRSKEDPVARRLMTMPGIGPITATAITALAPPIETFATGRDFAAWLGLTPLQKSTGGKQRLGAISKMGERTLRRLLIIGGSSVVSHACRRGAPDGSWPARMLARKPRMLVTVALANKMARIVWALLAKGGVYRAPVAAA

SEQ ID NO: 99540 - protein, 413 aa, unidentified
MDIVYACCCGLDVHKESVVATVRRRLDSGKVRQQTRTFGTMTQDLLELADWLDAEGATHLAMESTGVYWKPIWNLLEERFEILLVNAQHIKHVPGRKTDVKDSEWIAQLLQCGLLRGSFVPPTPQRQLRELTRQRRQLVHAKAAVANRIQKVLEDANIKLGSVATDVLGVSGRDMLRAMVAGQDDPVALAELARGKLRAKIPGLRLALRGRVTEHHRFLLGLFLDELSHLEGLIARLTARIVEVLPSPFVEAIQRLATVPGIDVRAAENIVAEIGVNMGVFPTAGHLASWTGVCSGQRESAGKRQSGRTRKGNQWLRTTLVQVAWAASHTKRTYLSAQYRRLAGRRGKKRALIALGHTILVIVYHLLQRGTTYEDLGPEYFDRLDQDRLTRLLVRRLESLGHTVVLQPKEPAA

SEQ ID NO: 99541 - protein, 316 aa, unidentified
MNTIAPCFVGIDIAKDRLDVCCLPSGESWFTPTDPASLKALIGQLKARPVALVVLEASGGWEQRLLAELVAGALPKVLANPRQVRDFARALGRLAKTDRIDAAVLAHFGQSLRPQPRPQPEPENRRLRALLTRRRQLIAMRSAEKTRRMQCHDPEIKAAIVAMIQHLDRLVADLERHCKALIGSAPAMARLDALLRSLPGIGPIASATLIAELPEIGRLNRRQVAALAGVAPFNRDSGTRRGQRSIWGGRAELRKTLYMAALSASLHNPTFASLYQRLTAKGKHHKTARTAVVRKILTTLNAMVRDQKHFTPTLHP

SEQ ID NO: 99542 - protein, 316 aa, unidentified
MSDPPVLVGIDVSKAQLDVALRPTDDCWHVSNDESGIAGLVERLRTVQPTLVVLEATGGLEVPVTGALAEAGLPVVVVNPRHARDVAKATGRLAKTDTLEARGLAHVAEAVRPTPRPLPEAQAQALSALLTRRRQLVQRLTAERRRLQTAPPSIRADIQAHITWLARRLARTDDDVAAAIHASPLWRAKDEMLQSTPGVGPILARTLVAEVPELGVLNRQEIAALIGVAPFNRDRGTLRGKRAVWGGRAQVRAVLYMSTLAAVRHNPVLKAFYERLRAVGKAPKVALTACMRKLLTILNAMLKHRTPWHENYATHS

SEQ ID NO: 99543 - protein, 381 aa, unidentified
MAATREYEYSVLAPLLYLAFELGDTNWKLGFTIGMGQRPRERSIAARDLDALQREIHLAKRRFGLPETAPVLSCYEAGRDGFWLHRYLVEQGIQNLVVDSSSIEVNRRQRRAKTDRMDVGKLLGQLIRYRSGERKVWSVVRVPSPKDEDDRQLHRELSTLKKERTRQINRIKGVLASQGVRLPVKADFAQRLESVRTWDGSPLLARLQARLVREYERLELVGKQIKELERQRVQEIRHSQDPKVDQVRVLMRLNGIGVNSSWQFIMEFFGWREFRSGKEVGGLSGLAPTPYQSGSSYREQGMSKAGNRHIRAMAIEIAWGWLGYQPESELSRWYERRFGQGSKRIRKIGIVALARRLLVELWRYLETGAIPEGAVLKTRLI

SEQ ID NO: 99544 - protein, 380 aa, unidentified
MITVGIDIAKRNHEACFMAGDGREQQPPCRFRNNQAGLQALLKQVQQLPEPVSIGLEATGHYWLALHDGLVRAGLSVQVLNPLQTHAYRRSTLRKVKNDRKDAWLIADLVRIGRGRAAYVPDTTILQLRELTRFRCYLIDKIGDSKRKALTILDRGFPDYEGLFSDVFIQSSRALLATAATAADFASANLDELTALLTRASRGRLGQAKAQDSLGSQALGQVARFELRALLDQIAFLEQHVAAVEQEVEAPMATIEQHLTDIKGISAVLAASLLAEIGDVSRFSRLENLVAYAGIDPTIFSSGEFTASESHMSKRGSPYLRRALWLAAVSTSRWNPDLQAYLHRRLEEGKPYRVVMGAIARKLLARIYVILKENRPYEVR

SEQ ID NO: 99545 - protein, 366 aa, unidentified
MNETSTMTYAYTIGIDLGDTRHQFCMLRPNGTIEMEGKLDNHSVALQAMFATLAPSLVALEAGTHSPWIAAALEGWGHTVLVANPSELAAITKSQKKSDQRDARMLAKLARVDPELLRPLRHRSAQAQTDLALLKARHALVKVRSTLIGHCRGIVKSAGARLPKCSAESFHKQQEAVPVALREALEPLLRQVGELSQKIWQLERKIEEVAEERYPESKRLAAPGSVGQLTALCFMLVVGEAERFAKSRAVGAYVGLAPKKDQSGQVDKQCRISKAGNPYLRVLLVQCAQHLLSRRGKDCELRRWGLKLCERGGKAAKKRAVIATARKLAVQLHALWAGPEAYDPFYAAKKQARRGGGGGEAARAVA

SEQ ID NO: 99546 - protein, 343 aa, unidentified
MGVDVHKRTYSVALFCATDGQVETWNCPADVDGLVEQLRGVGCHIEHVVYETGPTGFSLCRALREAGFKASVVAASRIPRGAAAAAKSDRIDATKLATYLARGLLRSVAVPTIEEEGYRALVRRRKRVSEARAKVKQKIKGLLLATGIAEPSSLKKWVKTAAADLAALDLDPGHDGALASLIREYRFLQEEHRRLSREVGRATKRLHRERYVRLTQVGGIGEVVATTFLAEIFAPERFNRAEELTSYVGLAPVVRRSGDGPARARLRPVGQKRLRAILVEGAWQWTWRDREAKELYNRHLARSGVPQKAICVVARKLAIKLWRLSVETPRASMEGAAVGLLSG

SEQ ID NO: 99547 - protein, 344 aa, unidentified
MKKSNVIGIDLAKNVLQVCKVSKHGELVLNKAVNPSRLKELLANSTPSIVAMEGSGSCHYWGRLAESFGHEVRVINPKKVKAFLQGQKTDANDALAIAMAATQFGVRFSQVKSEEQQTLQTLETSRKFLDRELTALNNHIRAYLYEYGITMRRGRKSLRETIALVLDDVNARLPECLKNTLLLLWERYQLTLAQLKETSQAKASLVKQVEPCKRLLALESVGEVCAAMLYANIGDGKEFKNGRAASACIGLTPKQHSSGGKTHMMGINKKGGNKELRTALFQGALSVISRLPSEPKTVKQAWLIELVQRVGVKRACIALANKTVRTAWALLATGESYKPVLLSK

SEQ ID NO: 99548 - protein, 343 aa, unidentified
MSEITVIGLDLAKRVFQVHGADREGRPVLRKRLQRGQVLNFFANLSPCLIGLEACAGSHYWGRELQALGHEVRLIPPQYVKPYVKTNKNDATDAEAICEALTRPTMRFTALKSVEQQSVLLLHRTRELLVRQRTMLINALRGHCGEFGIVAAQGLSRAGELIKLVDDPADNRLPDLARQVLQCLTSQIRSIQGEIASIEKKLLAWHTSCAASRRLAEIPGVGLITATAVVASVGNANQFRSARQFAAWLGLVPQQRSSGGKERLGRISKRGDGYIRRLLVHGARAHLSWSRRKKQIRSAWLTGLLVRRPTNVVLLAMANKTARIAWAMLSRGERYQERVAAAA

SEQ ID NO: 99549 - protein, 364 aa, unidentified
MTGKEYFIGMDVHKDNVQMAVFAETGEEPIYERRLRNDTGLLVKEVVCFKQKGKTEAAYEAGSTGYVIHRAMEQAGIPCHVLPASKVAKKRSERIKTDKRDARLIGRELRSKSIRPISVPEEADEAVRDLMRCREDVSEDLRRVKQRLLKFMVRHGYVYIGGGNNWTLMHWRWMDRRQFKQEHERVVYEEYRSQIHSLEERLVRLEQQVVQTAESPRYKAAVSRLRAFKGIDYIIALSTICEIGDFRRFASAKAFMSYLGFVPSEYSSGGKRNQGGITKAGNGHLRKLLIEGAWHYTKNSRPGKRLEQRRLNSPVSAIDAADRALHRLHKKYIRLVLKGKHKNVAVTAVARELAGFIWAVQVSA

SEQ ID NO: 99550 - protein, 312 aa, unidentified
MTQIICGVDVSSKTLDARIGRKGAVERFACTAEGVAALAAFCKAHGVELVAMEATGGYEKMPFALLWTHGVPAAIVNPRSVRRFAEGMGLFEKTDRIDAGVIAWYAEVKHIVQQEPTSEAHQRLEAHVTRLRQLTELRTAQTNQRRLVTEATVLSTFDELLALLKRQTRSLERQIAALVDSDPLWQKLDPAFRSIKGVADRTVARLMAEMPEIGTLSNKAISKLAGLAPFARDSGKFQGKRAVRGGRSHVRSILFVVAELVRRYNPDFAAFHKRLKDAGKPLKVIRIALAHKLLVRLNAKAREVREQIAYAA

SEQ ID NO: 99551 - protein, 429 aa, unidentified
MNFRPIAGIDVGKFFSEMAILSPSNEVIARMKIRHDSSTDVERAVELLKKTEKDFDSRPFVVMESTGHYHKILFHSLCKAGLEVSIINPIQTDSIKNIGIRKVKNDKVDARKIALLYRFQELSTTNIPDEDIECLRSLCRQYYKLSDELTAYKNRLTGIVDQLMLNFKDVFSNMFSKAAIAVLEEYPTPAAILKANRNKLISLIQKNSRKSLKWSTAKYELLVSKAREFAPLSVHNSSNIAMLGVYISMIRTLEDNLAKVLKAIHLLIAEDMAKDMPMLALTLELLQSLPGIGLLTAATILAEIGDFSAFSKPGKLVAYFGIDPSVMQSGEFTGTRNKMSKRGSRLLRRVLFTTALANIRTKRNKEACNPVLLEFYKQKCQSKPKKVALGAVMRKIIIYIFAVLRDRKPYQLRSPQEHAHMLAAKHTAA

SEQ ID NO: 99552 - protein, 364 aa, unidentified
MQSTTTIIAFDQHAATTVAAVLLPNQRTPALHSMPSDTATIVRVVERLRRQGAVRCCYEAGPCGFELQRALTAHEVPCDVIAPALIPRRAGDRVKTDRRDAAQLAILYRAGALTPIHIPTDQEEAARDLLRCREDIRADLLRARHRLSKFLLRHGRRFTGTKKAWSKAHDAWLRAQRWPLPALDQTHAAYLRTVDEAVARLRTVEDDLRGLLTLEPLRPRVERLRCFRGIDDLTALTIAAELGDPRRFPSAPRAMAFMGLVPSEHSSGTKRARGAITKTGNAHLRRVLVEAAWHYRHRPFVGAALRRRQRGAPAAIVAQAWAAQQRLYRRFHRLAGRGKVKQQVTTAVARELTGFVWGRLDPVN

SEQ ID NO: 99553 - protein, 308 aa, unidentified
MIAQNYVGCDISKQWLDFFDETSGRLRRIDNQADAIAAYVAGLDPSRDFVVMEATGVHDRLLRHALAKAGVPFSRHNPAHTHHYSKSTRRRAKTDPLDARMLSDYGRRYHPEAEPAPREEVERLQSLAGHRDHLVEMRAALKKHLAEAFDEIVIADLEETISFLDTRIKAFESQIAEVIRQNQDTARDHALMVSVPGVSKVGALSLLALLPELGQRSPKAIAALAGLAPFDNKSGKLNRRSHIQGGRSRVRRALYMAALTAVRTCERFKTFYTALAARSGSKKLAIIAVARKLLVVLNAIMRDKIAFA

SEQ ID NO: 99554 - protein, 375 aa, unidentified
MKEKVRFLGLDVHAETIAVAIAEPDGEVRSLGTIANRAESIRKLVKKLGSVEQVRACYEAGPTGYVLYWQLAELGVKCEVIAPTLVPVKAGDRVKTDRRDAEKLARSYRSDDLTAVWVPDEGSEALRDLVRAREAAKQDQLRARHRLSKFLLRTGQRPAPGVKAWTQPYLTWVRQIRFSQIAQESTRLDYLHEVEHMAERVVRLEQAIADAVKLASPELQEVVKDLQALRGIAQISAVTIAAELGEISRFEGASQLMAYSGTVPSEDSSGKRKRRGSITKTGNAHLRRIAVEAAWSYRLRPGIGPALRKRQQGVAEEIKEIAWKAQHRLHKRYSRLAAAGKDQRKIVTAVGRELLGFIWAIGVKAEAAAKKRIAA

SEQ ID NO: 99555 - protein, 365 aa, unidentified
MPVTTTDVTTTVTIGVDTHKDLHVAVALDALGRWVAELSTPATAAGYQQLRRWARDLGQVEVFGVEGTGSYGAGLARYLCRCGERVVEVNRPDRSTRHRKGKSDPIDAEAAARAVLAGTATGTPKNGDDQVEIIRMLKMTRDSAVKGQTQAVNQLRAVLVTAPDELRESLAALGLVRLLERCAALRPGELTTPLSAAKHALKLLARRALTLRAEAKELREHLKRLTATAAPTLVELTGVGPDTAAALLLTAGDNPDRLRSEAAFAALCGTNPVPASSGKITRYRLNRSGDRQANAALHRAVVTRMHWHEPTKIYVARRTAEGKTKPEIMRCLKRYLARQVYRCLLPTVAETTRRTPPHEDRRDAA

SEQ ID NO: 99556 - protein, 346 aa, unidentified
MNNNSSKGKITVLGIDLAKNSFQLHGVDEQGNRVLKKKLTRKQLVAFIAQLPPCLIGLEACGGAHHWVRVFSQLGHTVKMIAPQFVKPYVKSNKNDAVDAEAICEAVQRPSMRFVPSKSIEQQDIQSVHRVRSLLIGRRTAQANQIRGLLMEYGIVIPQGINQLRKAIPDILEDAENSLSCYFRELLRELYEEIVHFDERIETIELKLKVISEQNEDCKRLLTIPGVGLLTATALIAAIGDISVFKSGRELAAWIGLVPRQHSTGGKPTLLGISKRGDSYLRTLLIHGGRSVVRVAHKHQDKRNQWIGEIKQRRGENISNVAVANKNARVAWALLTKKQDYCVIGA

SEQ ID NO: 99557 - protein, 346 aa, unidentified
MITIGGDSHKRTHTFVAVDDLGRQIAETTVAATSDGHLAALDWARQWPERRWALEDCRQVTRRLEGDLLRGGDAVLRVPTQLMAGARRSAREPGKSDPIDAMSVARAALREPGLPHARLDGRERHLKLLVDHREDLVGERTRIQSRLRWHLHELMPEHLVPLRTLHRFHVLEDLRTRLDALDGPVAAIARELVERTRELTVRINELTREITALVSELAPTLLGLQGCGPLSAAKLVAETAGIDRFRSRSAFARWNGTAPIPVWTGNVKFRLSRGGNRQANAAIHRIAISQWRDHGLGHDYVARRIAGGDPKRSAIRALKRRLSDEIFRRLHEDLDRRQPPENTLAA

SEQ ID NO: 99558 - protein, 438 aa, unidentified
MSIIAYVGLDVSQDDARVCFLLTDGVEPVPRWSVPNTQPGADALATTLAGLAQTYHVDQLRIGMEATGLLWWHLACHLKDAPALAAFAPRIYALNPHLIKTFRANYGALPKSDHADAFLIAERIRFGRQLPSPFQLDARYAPLQRLTRFRCHLAQNLAREKSYFLSFLFLTFSTYGQIAPFGDPFGATSSAILEEFTTEELAQPSLEDLAAYLQQKGRGRFADPAALAATLQRAARDSYRLDKVLQEPLRLVLGTTLATIRSLQSQLKSLDKTIAQELASIPQTLASVPGLGPVWTAGLIAELGDITRFDDQAAIAQYAGLTWETRESGQFQAEDTELTKRGNSYLRYYLVEAANSVRQHCPEYGRYYAAKYAETPKHPHQRALVLSARKLVRLIDVLLRDGKRYLPPDERPSGRGASVPHMARPARQRRSKRAAALE

SEQ ID NO: 99559 - protein, 349 aa, unidentified
MDHIGIDVHKRESQIYILAEGGEVIERRIRTEPERFAAVLGARPRARILIEASTDSEWVARCLEALGHEIIVADPNFAPMYATRTRKVKTDRRDARALAEACLLGAYRPAHRLSDPQRHVRGRLLVRDAVVRTRTRYISLIRALLRQHGYRVPSGSAESFIHRVQGLPLPGRLLSVVAPLLALMRPLNRQLTYSDERIEHLAIQDPRVPRLRSVPSVGPVTAAAFIAAIDDAQRFRHAHQLEAYLGLVPREYSSGETQRRGPITKAGHSRTRWLLIQAAVSILRRRPPQAEELRTWAVRIAARRGKQVAVVALARRLAGILYALLRDGSVFEPQRVRHPRLPAAAPMAM

SEQ ID NO: 99560 - protein, 412 aa, unidentified
MNIVYERCAGLDVHKKSVVVCAILPDSSGQRHKEHQTFSTMTPDLLRMRSWFTAQGVTHVAMESTGVYWRPIFHVLEGHVEVLVVNAGHIKAVPGRKTDVLDAEWIADLLQHGLLRPSFIPPAWQRQVRELTRYRTSLIEERSRSINRVQKTLEDANIKLASVASDLMGLSARAMLAALLAGEVDTTVLAELARGKMRAKREVLAQALQGYFKPHHRFLIAEQLAHIDALDGAIEHMSAEIAERLYPYEEQLRRLETIPGIKRRLAEVILAEIGPDMSRFPSAQHLTSWAGMCPGNRQSAGKRLSGRTRKGSPYLRTALVEAAHAASHCKNCYLSAQYHRLVSRRGGKKATIALGHTLLVIVYYVLAEQQDYQELGGNYFDERDRQAVQKSLVHRLEQLGFEVSLTPTSPAA

SEQ ID NO: 99561 - protein, 340 aa, unidentified
MTPIRIGLDIAKNVFQVHGVDDKGTVVIRKRLRRPDIVRFFASLPPCLIGIEACSASHHWARELIRLGHEVRLMPARYVKPYVQRGKSDALDAEAICEAVSRPTMRFATIKTAEQQAVLTLHRARELLVKQQTMLANLIRGCLGEFGIVAPLGIRRVCELIAVINDDADTRILPEARIAMRAVADQLCDLQKRIKKLEQAIRAWHRSNEASRRLATIPGVGSITASAIVATVANATEFKSARHFAAFLGLTPKQCSTGGRQRLGRISKQGDVYIRRLLVLGGTSLVRYARGAGGSVWAKQLLARRPTRIVTVALANKAARVIWALLTRGQVYQAPQPQAA

SEQ ID NO: 99562 - protein, 338 aa, unidentified
MKAYAGIDLHSSNNYTAIIDEQDKRLFGKRLPNDLGVVLSALDPFRGKLEGVVVESTYNWYWLVDGLEDAGYKVHLANPSAIKQYEGLKHTDDKWDSFWLAHMRRLKILPEGYIYPKEERPIRDMLRRRLLFVRHRTSHILSFQSAVTRNLSYKISVKEIKKLRKSDASIFYEEPFLKLAAKCAISTIHFLSERIKEIEKAVMSQVKLRPEFRHLQTLPGIGKILGLTIMLEVGDINRFPEVGDYSSYCRCVKSDRESNRKKKGEGNRKNGNKYLGWAYVEAANFAIRFYPEARSFYQRKKSTTNGIVGIKALSNKLARASYYVMRDQVPYDANHLFR

SEQ ID NO: 99563 - protein, 344 aa, unidentified
MDNHTQYSGFAGVDLAKKVMQIHFVTEDGEITDKSTKRAEFLDFFRNRGKCLIGMEACGSSQDWARKLEAMGHGVHLMSPKAVKPFVSGQTHAHNDAIGIYKAMFNGVRRVPVKSTEIRDLQTLRRIRSQVTKDKVKEINHVRGLLAEYGIVMGKSLKAFNKDISSALESLKERGDVSPLVAEELRTTVEAIKTKIKRQKKLDQEIEQLARGCKSYENFLKTPGVGPVTAAMLCVLLCDPSIFANGRQFAAYIGLAPRSRGSGGKNYVIGIPSKFNCDCESRAVFVECAQAIARCKNKSPWVEGILRRKPKKVALIAIATKLARQVWAMANKGESFKQMAILTA

SEQ ID NO: 99564 - protein, 358 aa, unidentified
MKYIGCDFHPSFQQVAMLDQETGEWVERRLLHTEEARVFYEGLQGSVLVGIEASGNTQWFESLLARCQHQLWIGDAAEIARQDGRKQKHDRRDAKLILKLMLENRFPKIWVPTVAERDLRQLLIHRQHLVRMRTRVKNQLQHIALNQGWQKKRKLWSEAGLESLRNLKLEPWTQQRRDTLLEMLEELEEKIRPLDLAVAKEAEACEAARRFMTHPGVGPVISLATVLTLGEVQRFPNSRSWVSYLGLNPSEESSGQRRRLGAISKQGNPFLRYLLVEGAISAARGDKSLARMYARLKAKKHHGVAKVAVARKLAVRLYWMARTQKSYPEVVRTQGSQSHSVAEVMADVLSRPPASHQK

SEQ ID NO: 99565 - protein, 334 aa, unidentified
MKSYSIFMGVDISKLTLDIVGINSENIIVNNSLEIDNNKKVIKRYFKGLSTKYPNDSFLVCFENTGLYGYYLAAVLYELQIDYVVVPALEIHLSKGLVRGKSDKKDALMIARYALSNQYKLKLSSLNNYDINKLKMLNNQRDKLVKSISIFKQAYESKDFLPKELIKETLRINESILKNLKKNLTKLEAEIEKVIKANRDLKTNYDLVKSIPGIGTQTSIYLLIITNNFTAFTNARKLACYAGVAPFPYQSGTSINGRTKVHHFADKKLKSLINMCALNAKRYDAQISLYYEKKVTEGKNKMLVMNNVRNKLLHRVMAVIKRQTPYVNTYKFCA

SEQ ID NO: 99566 - protein, 369 aa, unidentified
MQENINVATLVDLRKRKTVGRMTIGIDLGDRKSHFCVLNDQAQVIARGFLPTTITAFRREFEGLPPSLVAIEAGAHSLWAHQVLKVCGHEVLVGNPRKIRLITESDRKSDRVDAESLARLARADRLLLSPIQHRTQEKQVQLSVIRARHVLVRSRTALINCARGLVKPMGLRLPACSAEVFPKRAHSTSLPELLHVALAPLMKQIEAVNEAVREYDRQIEQIAATQYPETYLLKQIKGVGTLISLTYVLTLEDPHRFSKSRDVGAFLGFLPREKQSGERAPRLGISRAGNEYLRTLLVQGAHYILGPLGPDTDLRRWGLQLAARGGGGAKKRAVTAVARKLSVLLHHFWKTGEVYDPLRKTQIAEIPAA

SEQ ID NO: 99567 - protein, 347 aa, unidentified
MNYCGIDIAMKFSYIYITDSWGRKKISGEIATTSMALTQRLRPYVRQGLKIAIEAGNQTAWIYDCLTRLGAEVVVVNPAKVKLIAESRRKTDKIDAKILAELLRLDGLPEPVHMPGRGTRELRGLLVARKQLVQARTKLCNVARGMLRQEGIRLPTRYLSTFKGWQTLLAHEGYECKHITSVLSAYYESFVSLTRSIRALDKELAQREQNDKRASRLQTMPKVGRIASLTFIAAVDDIKRFGASRKVVRYSGLCPTVRSSGERTEYGSISREGRSDLRAVWIQIAHLVASDRNRQTARLRHWYQKVLRHRGKKTAMVALARKLLTIAYRLLYDEADYRSVMVSQKAA

SEQ ID NO: 99568 - protein, 416 aa, unidentified
MRTKPTMIVAQREVLYMSIELSASQWKLGFTTSLCQRPRIRNMSAGQLEQLELEIAAAKARFKLDDSVPVVSCYEAGRDAFWLHRCLVSMGVESHIVDPASIQVNRRKRNAKTDRIDAQKIVNALIRFKTGDKFACRMIRIPDKAHEDARHLSRELKSLKKERTAHVCRIQSLLVTQGCELAINRNFSNNLDGIRGGDRKPLGDRLVARLKREHQRLVLVTEQIRELQKEQFALLRKARTEIARSDRSYQDQLTKIAEHLVTLRGIGSVTAFTLSGEIFAWRDIGNRRQLAAFVGLTPTPHSSGDLEKEQGISKSGRGDLRVLMIEVAWLWLRYQAESKLSKWYAKRFANGTSRQRKIGIVALARKLLVALGKYVRDGELPEGAQLSEKISAQYLTSLNSKAPRNKPQNQSIATAT

SEQ ID NO: 99569 - protein, 346 aa, unidentified
MTIVEAARAVTGGIDTHGEVHVAAALDEIGGLLGTNSFRADPDGYSALLSWLESFGEVSKVGIEGTGSYGAGVARFFARAGVHVVEVDRQNRQARRQAGKSDPLDALEAARAAQSGRAHGTAKSRDGSVEAIRVLVVAKRSARGARIKALGQMRQLTFSAPDQLQSRLKGLPIATFVTAAQGLRPTRSPDVVTAATKASLSSLAHRVADLEAEISDLDAMITPLLEETAPELLAVYGVGIDTAAALLVAAGDNPERLHSEAGWAHLCGVSPLEASSGKVTRHRLNRGGDRQANRALWHIVITRLASDPRTQAYMERRVKDGRSKSEAIRMLKRYVAREVYRYLPRA

SEQ ID NO: 99570 - protein, 428 aa, unidentified
MNYNTQNKKIQYITEKTLIVGVDVGSQVHYARAFDWRNYEYSKKPFSFSNDEEGFMAFMNWMNGIAKTYNKEKIVPGMEPTGHYWFNLGMFLQNNGMKVVHVNPHHVKKSKELDDNNPNKNDRKDPKTIAALVNEGRYSYPYIPTGIYADIRNLSVMRFQVQEEITRIKNRIARWFSIYFPEYKEVYKKLDAVSGIMILKIAPLPADIVKLGVEGINKIWRNAKLRAAGVKRAKTLFNKAEHSVGNQESSDTARLELRILLSDYEMYNNRVQNIMQLIEEKLKEIPHIDKIMEIKGIGITTVCSFVAEVGDIRRFDNPKQLQKLAGYAIVNNESGKHKGESRISYRGRKRLRYILYEAAISLIGKNQEFKEIHKYYITREKNPLKKMQSVVAIACKLIRILFMILTKGISYDGEKMLSDIKRENISAA

SEQ ID NO: 99571 - protein, 364 aa, unidentified
MKRKVYVGMDVHKETIQIAYLTSNTKEMVKEQQIKHNEVHIKKFINKLKTEWNEIHCCYEAGVTGYPLYRYLKSLGVNCILVAPGKIPRQSSDKIKTDKRDAIKLARLLRSGDLESIHVPSEEDEAVRDYLRSRDSLRLDLGRNRQRLMKFLLRKGNVYSTTKYWTVSHYKWLNNLHFENEILHETFNDYYSRVRVQEENLKAMDQKIQEIAKSEAFRERVGILRCFRGVDYLTAMFLLSEVNDFRRFKTAGSFMSFLGLVPGEYSSGSKRKQTGITKTGSPRLRRILTEAAWQHRFPGTGSKIVAARRTGQPALVVALAEKASLRLHKKFRNLQLSGKTPQVMITAVSRELSGFLWAAMNLVA

SEQ ID NO: 99572 - protein, 360 aa, unidentified
MKIDKYVALDVDSANIVIGVYDGKGQQIMRGCIRTNGNDIRQFFKGLNGTVHVVFEEGTQAAWLYDLIRPLVAGVTVCDPRENKLLKSGNKSDDIDVDKLARLLRLGDLQAVYHGEETIQGLKHLVGAYENLVSDTIRAMNRLKAMFRGRGIGNRGTKVFSNDGRDEWLSKLTIEGLRARAGYLYREIDCLLKLRTEAKKAMCSEAIKHSGYKLIKSVPGIGPVRTAQIIATAGTPHRFRTKRQWWPYCGLAVVTRTSADYEWVGENVRKRKRAPQTRGLNKNYNRRLKQVFKGAALNAIRTNEQFKQYYQRLIDKGIRLEMAQLTVARKLSAITLAVWKKGEKFDPERLNQAEQSTGNQ

SEQ ID NO: 99573 - protein, 359 aa, unidentified
MEQCTRQTNTVVGGVDTHKDLHVAAVVDEYDHVLGTHCFPATRQGYRQMLQWMQSFGVLRQVGVESTGTYGAGLLRYLQAAGVEVLEVTTPDKHDRRRRGKDDDLDAQNAAHAAFARRRVVTPKTRDGMIESLRVLKACRKTAVAARKIALQVIQNSIICAPEELRDVLRNLTRMQLIRTLAAWRPDLSDYRNVTSAYRIALKSLGRRYLELHDEIADLDAMIGAIVEELAPSLVARNSIGRECAAQLLLTAGDNAGRIRSESSFAALCGVSPVPASSGKVVRHRLNRGGDRAANSALHVIAIGRLRTDPKTKAYIARKIAEGHSKLEALRCLKRYIALEVYALVRERHREIAQTRIVT

SEQ ID NO: 99574 - protein, 429 aa, unidentified
MYNKNYISVGIDVGSAFSFMTIVAPDGSVIQKPFKITHNKPDSLEKAVSAIKKAEELHSLESRTFLESTGIYHFPLFCYLVDCGFHVSIINPIITHSANNTSIRKVKNDKVDSIGIAKLGLSGDIPVSQFPAKLVLEIRSLTRKYYDLTDERSAHINKLKGDLHTVFPQYLDIFCDVTGKTSTMILRQYGTPDKILRGHKKTMIEKISKASRKGLSKAAERYEKLCAAATAAKTFGCQIDSIYFNISLTLDLIEKLDSALDSILQRIHQLVTFNKSEKFIQQIKWLDTIKGVGFLTAVTIMCEIGDFSAFRNPKQLFAYFGLDPEVNQSGKFVGTEMHMTKRGSRIARRAVFAVALASIRTKRNGGINPYLREYYEKKSGQKPKMVALGAVMHKVCNIIFAVLRDEKEFELRSPEEHCRQYQRPALQAA

SEQ ID NO: 99575 - protein, 441 aa, unidentified
MDEVTDEPLYRDRVCGIDIGKAQLVATIRVPSDKDPARRMAETRTFGTTKKEVLALADWLRCWQVPAVVMEATGDYWKGPFYRLEAEGFECVLADAKQVKNLPGRPKRDPADSRWLAACFERGAVTSCFVATPEFRVIRLHTRYRRDLIEERTRDRQRTEKLLEGAAIKLSCVISDLHGVTGRDIMDHLIAGERNPRVLAQLARAAARRKITELEEALEGAEFFTEEHAALLKSMLERIDRGTADIGGLSEVIERLLAPYEEQLQQAESMPGWGRRAAQDAIAETGVDMSRFATGAHLVSWGSRAPLDHQSGARKGRAKTKKGNRYLAGTLGETAISAGRTQTREGARYRRIARRRGKAKAQVALGNTQLKVLHKLLSNPGMRYQDLGPDYYERRADLRRQIAHHIGSSAPSASKSPSPASPTPTRQARHQPPDPYRSRRP

SEQ ID NO: 99576 - protein, 340 aa, unidentified
MTTMTLGLDVSKRYLDMVGMDADGAVVERKRHTWAKLLERTAAMRPVRIGLEAGGGAHHLGRRLQAQGHEVRLMPPQHVRAYVKGNKTDSADAQACAEAVQRPTMRFVPIKSCAQQELQALQRIRRRLIEQRTAVINQIRGLLREFGLSAPKGHGHLSRRLPDLLAEAEREVSPELIAEIQDLRAEWSDYDHRVSRLEDRLHDQARRDDGYRRLREIDGIGLVTASAVIAAVGDARNFDRGRDFAAWLGLTPKEHSTGGKQRLLSISKRGQPELRTLFVHAARSVLLNMARRSGGQGPWLRRLMQRRHRNVAIVALANKLARIAWAVLAKGERYRPQPAA

SEQ ID NO: 99577 - protein, 343 aa, unidentified
MDYFAGLDVSVKDTSVCIVDSTGKIVREVKVASEPDALLAVLRNPAYDFKRIGLEAGPLSQWLFSALAEAELPVICVETRHMRAVLKAQINKTDRNDARGIAQMMRVGLYRPVHVKTLRSQKLRMLLTHRKLLQAKAIAVENDLRATLRNFGLKVGVVGRVKFETRIKELIESFPDLVALVEPLLVVRRVLREQIAILHRRVLAAVRDDEVCRRLMTVPGVGPVVALTYRATVDVPARFRKSKSVGAVFGLTPARDQSGERDRPGAISRCGDEMMRTTLYEAAQVMLLRSAKWSWLKAWAMKIAKHRGMKKAIVALARRLAVIMHRIWTDGSEFRWTRGAAAV

SEQ ID NO: 99578 - protein, 377 aa, unidentified
MHSENIAAYIGLDVHKETLAVAIAAPERLGEVRYYGTINNEAQAVRRLFQKLQGLYGNILSCYEAGPCGFGLYHQLTAMNIKCQVIAPSRIPKSPTDRIKNDHRDAISLARLLRAGELTPVWIPDLTHEAMRDLIRARAAAKRDSRVARQRILSMLLRTDKHYAGKHWTGKHRTWLANQSFSQPSQQIAFQHYCQSLEQIEDRILQLDQEISRLLPEWSLCNLVCQLQALKGVGQLIAITLVAELGDFSRFSNPKQLMAFLGLVPGEYSSGNSIRPRGITKVGNSELRRLLYEAAWSYRTPAKVGAWLIYYRPDSVTQYSKDIAWKAQQRLCSRYRTLTAKGKKSQVAITAVARELTGFMWDIALAAQSSFSQQKQN

SEQ ID NO: 99579 - protein, 343 aa, unidentified
MQTIRTIGLDIAKSVFQVHGVDACGEVVIRRQLKRRYVLAFFQKLPPCLIGIEACASSHYWSRELQALGHTVRLMPPAYVKPYVKRQKNDAADAEAICEAVTRANMRFVPIKTPEQQSCLMLHRTRHLFIRQQTAVINSIRAHLAEFGIVAPVGRKGVTELLHVVADPSDKRVPEVGRACLAALGDQLLSLKQQILEFDRMIMAWHRSNQTSKRLHYIPGVGPMLATALVASVADPRTFRSGRNFSAWIGLVPKQHSSGGKDRLGSISKQGDRYLRSLFVAGALAVIRYAKIHGTGHRPWLTALLGRRPTKVAAIALANKIARMAWAMMAKGERYRNPVALAR

SEQ ID NO: 99580 - protein, 364 aa, unidentified
MQKISTMRMSGKSIFKGQLTIGLDLGDRFSSYCVLNEAGEIVLEHRLATTPEAVKQVFGSMPRCRIAMETGTHSPWVSRLLAALGHEVIVAHAQKVRLIVKSRRKDDRLDARTLARLARIDPELLSPVQHRSAQAQLHLTEIRARAGLVSARTALVNAARGLVKSYGERLRKCGTQQFRRETTSRLSAGLREALDPLLREVESLNERIKEYDRRIEKMAQEMYPETTLLKQVKGVGDLIATAYVLTIEDPHRFRKSRDAGCFVGLQPGRRNSGESEPQLHISKEGDEYLRTLLVQGAHYILGPFGEDSDLRRWGKKLAARGGKNAKKRAVVAVARKLAVLLHRLWVSGEVYEPLRNSQAMRAVA

SEQ ID NO: 99581 - protein, 364 aa, unidentified
MVKRGHRFPGPKHQMEKRSMDHFAGLDVSVKETSVCIVDDAGKIVREVKVASEPAALLVVLNSPAYHFKRIGLEAGPLSQWLFSGLAEAALPVVCVETRHMQAVLKAQINKTDRNDARGIARMMRVGLYRPVHVKTLRSQKLRMLLTHRKLLQSKAIAIENDLRGTLRNFGLKVGMIGTVRFEARIKELVENMPDLAVLVEPLLVVRRVLGEQLAILHRRLLAIVRDDEVCRRLMTVPGVGPVVALTYRATVDVPARFRNSKAVGAVFGLTCSKYQSGEINRTGAISKCGDQMMRMMLYEAAQVMLTRTNKWSWLKAWAMKIARRRGMKKAVVALARRLAVIMHRIWVDGTEFGWTREHAMAAV

SEQ ID NO: 99582 - protein, 406 aa, unidentified
MNGVAVRGELLAAGLARWILEWIRHQSAQSVIDHGLHKHHRGSVMNRNTGMSAGQIIGLINGLQVVGLDIAKSVFQLHTVDMGSGEIVNIQLKRAKVLEHFSNRQPCLIGIEACGGAHHWARELKALGHCVRLIHAKAVRPFVQGNKTDATDARAIWLAVQQPGTKFVGVKTQQQQATLTLHRQRELLMKIKTMQSNALRGLLYEFGATFAKGKRALFSEIEAALESLVQDIPQYVADSLREQVQRIKQVEQDIQTIEQRLAQQLKSEPSMKRVAQIPGVGLLTATAAIATMGEASVFKSGREFCAWLGLVPKQRGTGGKVQLLGVSKRGDSYLRTLLIHGARSVLTHSKQPGPWLEQIKERRPANVVIVAQAAKMARTIWAVTAKEQDYQRGYQSVRPCMNVQAA

SEQ ID NO: 99583 - protein, 344 aa, unidentified
MQHFAIDLGSMESQICVRSPDGEIALERKVATRSLKSYLSKQPHSRVIVETCAEAFRVADIALELGHEVRVVPATLVRSLGVGARRIKTDRRDAQVLSEVSCRIDLPSVHIPTDVARQRRSMCGMRDELVSSRTALINCVRGWARTQLLKIVSGVVTTFPKRMREAASRVPEGLPEYAERLLQTIEALTKQIAAADAELEQLANEDALCQRLMTVPGVGPVTSIRFAAALDDRSRFASAHAVQSYLGLTPGENSSSQRQQRTGITKAGPAPVRRVLVQAAWNFRRIRPNDPISLWALEIEKRRGRFVATVAVARKLAGLLYALWRDGSKYEPSHQSKRHHDAAI

SEQ ID NO: 99584 - protein, 344 aa, unidentified
MGEITTIGVDLAKNVFQLHGSDAQGRVVLRKQLKRAQFLSFFVNLPPVLVAMESCSSAHHWARELSKLGHQVRLIAPQFVKPFVQGSKNDVSDAQAICEAVTRPTMRFVAIKSIEQQSTLALHRARQGLIRARTAQINQIRALMGEFGWVSPQGPHQLLANLPAQLEQARETLPAVFIELIEILRGQLLGLNERIEAITKLIVQAIGNDPVAQRLQTIPGIGPLSASALAASVGEVKSFKNGRSLAAWLGLVPGQHSSGGKAKLLGVSKRGDSYLRCLLVHGARSVFYSATRASAKKPDPWIEKLKQRKHVNVVSVAIANRNARIAWSVMAHGHSYEAQPRRAA

SEQ ID NO: 99585 - protein, 415 aa, unidentified
MALKIVYPICCGIDVHKTFVVACIASTNSKGITTYKSHRFSTFTKGLNELSQWLCEHGCKDVCMESTGKYWIPVFNILEPSCNITLAHPKYVKAIRGKKTDKKDAKWIADLFKHDLVAGSFMPPLPIRQLRDLMRYRFKLTNFTSSEKNRFQNSLTVSNIQLGSVVSDTFGKSAMNIMDKLLDDPSDTSFDLEPLIHGSLKRKLPELTLAIDGVLAPEQAGKIKVIKQHYENLESCKAELESIVLSLADAYTEELNLILTVPSFKNIFSAIAVVSEIGVHMDVFPTAKHLCSWAGLTPSNDQSAGKRKSVRISRAGVYIKPLLVQCATAVVKSEKHPEIRNRYLQLKRRRGHKRAIIAIARMLLTAIYHILKNKEPYNPELYRKNDVRPVEREITVEQALQLAQAQGYRIMVAPT

SEQ ID NO: 99586 - protein, 455 aa, unidentified
MPVHRPAKPKKSRRPADPLAGLPPLHLNAAGIDVGSAAHYVAVPPDRDPEPVRRFDSFTADLHALANWLEACGIDTVAMESTGVYWIALYQVLEARGFEVRLVNARHAKNVPGRKTDVADCQWLQQLHTFGLLKDSFRPEDSICVLRSLLRQRENLVAAASTCVQHMQKAMVEMNIQLANVISDITGETGLAIIRAMLAGERDPVRLAQLKNPRIQASTDTIVRSLQGNWRDELLFILGQSLWLYECYQAKIAECDLRLETQLRSFDEKATPPPPLRPRRPSRGSNRPAFDLQSHLHRITGVDLTRIDGLNVLTIQTIISEVGLDMSPWPTEKHFTSWLGLCPDNRISGGKVLKRKTRKVINRAATAFRLGAWNLLRSQSALGANYRRLRARLGAPKAITAMANKLARIFYRMLKYGQDYVDQGMEYYESRFREQQLKWLQKQAKMLNMQIVPVQ

SEQ ID NO: 99587 - protein, 391 aa, unidentified
MTKRRAKVVNDLSRSLVPLDMDTTLIAVVEMSQSSWLVGGIVPGVERQPLKKLAIDPNALLKLLLQWRSESEKKSYRIGRIAVAFEAGHDGFWLARWLLAQGIEPHVIHASSVAVTREHRRAKTDRLDTELLKRAFLGWLRGERGHCKMVAVPTLAEEDAKRPSREREALVAEATRLMARLKAAFVRLGIRSFNPKLKAAPERLGALRTPSGERIPANTLAALKRDMARHRFVKAQIREIETERLARLEAAPAAGTNPMVRLLARVVGISIETADMLVQEVLSRRLRDRRALARYAGLTGSPDESGAKRRERGLARSGNARVRLGMIQLAWRFLWFQKDSALGRWYRERTAAAPGARKTLIVALARKLLIALWRLVHEGVVPEGLRLRPVI

SEQ ID NO: 99588 - protein, 379 aa, unidentified
MKTVCGLDIHKDSVFVCILNESGKKIESKIGVLTKELVELRQLLIENNVSEVAMESTSIYWCPVWGILEGICTLYLINPYFIKQLPGRKSDIKDAAWIAECVLKKLIRGSFVPPKLVQDMRYFNRRIYDLNKDIVRKRAKLDAVLQRCNIRLSNYVSTTTGKAYQEIINLICKGIVDPTILIERVHGRTINRHGREVICASLEGNISRVDILIMGQLKAEIDFAELHKEECQNELNNICKIELNEDFEHILSIPGVKNRAATAILSEIGPDMTSFETPSALVSWCGLRPSNEESAGKIKSRKITHGNRYIRQTMIECAWSASRTQDCYFSNFFIHQTAVRKKTKMKVIVAIARKLLIAIWHILKKKECYLDYSKLAQIG

SEQ ID NO: 99589 - protein, 354 aa, unidentified
MKTYVGIDLHSNNSYFAVMSETGERLFHKRYSNKKTDIMKALDQVNKFGEIKRLAVESTYNWYWLIDFLHELGYQVDLTNPAAVHQYNGLKITDDKSDAYFLAELLRLNILPKCWICPKEDRPLRDLLRTRMHFVQNRTSLKNSLTSLLARQTGQQLSYSKLIALGRDEVNKLVGHEDITYRISQLCSQIYTLDRSIKDIEKRAFEQKKLSPEFQNLNTVPGIGKILALVIMVETGDINRFKKSGKYTSYCRCVGTDRKSNGKSKGSNNKKNGNKYLSWAYAEAAINCKRLNQSANKYWQKKAARAPRILAYKSLAAKLTKACYYIIRDQREFNEKLIFGYEGETGAELLKTAI

SEQ ID NO: 99590 - protein, 342 aa, unidentified
MESVQGLVVGVDTHKDTHSAAMVDEIGGVIAALDVGANRNGYRSLLEWARCQSSRRIWVVEGTGSYGAGLAAFLSAEGEVVFEGDRPQRRKRGAAGKSDQLDAIKVAREALARPHPAVPRRRGQREAIRILLTTREGAVQAYRQGLNQLYALVVSAPEPIRERLIRLKGEQLIHACMRVRGASDLESSVSATTMRQIARRLNLLRSEAADYERQLAELVGAAAPSLLAQPGVGPITAAQLLISWSHAGRIRHEGAFAALAGVAPVPASSGRVVRHRLNHQGDRQLNRALHVVALSRSGFHRPTRAYIARRTAEGKSTREIRRCLKRYLARRFFRLLQRLDNP

SEQ ID NO: 99591 - protein, 391 aa, unidentified
MSMYFVGIDISKYKHDCCIISAADQQIISKFTITNDKDGFEQLLTALNSLSNPEDIKIGFESTAHYALNLELFLENAHHSFMEVNPVLIKEYKKSTTLRRTKTDSVDCESIARWLITVEYKPHSKGFYHAYSLKSLTRLRDRLIRQRSFYLVKITNVLDHTFPEFKPFFNERLSKTALYLLENYGSAEKMARMNSASYDKLRCISRGKFSIQQFLRLKELAANTVGVNNSIFDLELNTLLTLYKSLSDEINTLETEIIKLIEEVHPHYMSIPGIGPISAAVIYAEYGDISNFSNPGQMLAFAGIEPGINDSGTESHGGRMVKHGSSQLRYVLLNACLPLIRFDLTFATYYEKKRAEGKKHRVAITHVAKKLIRGIYALERQDVDFNVQKLR

SEQ ID NO: 99592 - protein, 414 aa, unidentified
MKKRSYRAKKVNQINWNQTKENLSGAAAVLAVDIAKEKQYALLTNEATTVSELMYWHHPEQTPEVLSNLEALASPISVVMESTGTYGDALRYQFRCAGFDIYQVSAKRVSDAREVYDGVPSMHDAKAVTVITQLHRAGVSQPWRELSAEERSLDALRREYDMYQSQYQRNKNRLEAYLSRHWPEVGYLLPFDSVTLENLLIEYGSPQRLAADAPAAAQKMRRWSKKQLSREKIEQVIESAGHTLGQPCIEIERRYLQALAAEMRHGRLQQKQSKQALEATISRDDELREVGLLIGRVTTAVLVSCNLDPRKYDCARSYQKALGLNLKEKSSGRHIGQLKLTKRGSSIARRYLYFAALRLINTHPVVKVWYQNKVDPRMKNKTVIALMRKLAKALWHVGRGARFDAHKLLTVSAG

SEQ ID NO: 99593 - protein, 452 aa, unidentified
MKVMEHGMAQSKPKERGRRLEVTNPNAAGIDIGSASHYVSVPAERDDEPVREFKSFTVDIHKLADWLTACGVDTVAMESTGVYWIPVYEILERRGFKVLLVNARHVKNVAGRKSDVLDCQWLQQLHSYGLLRGAFRPADQVCVLRSLSRQRAMLLRLQARHIQHMQKALVQMNIQLANVISDVVGETGQKILRAIVAGERNEYVLAGMRNVRIKASEEEIVQSLRGNWRDEHVFALKQALELFDFYAKQVADCDALMEQQMVALHQHDRLPGKARKTSHRNKPKFDLRTRLYQMCGVDLTRIDGIDVCTAMTVLSEVGVDMSKFPTAKHFAAWLGLCPGTKISGGKVLGSKTQKCANKTAQALRQAASCLKNSQSALGAYYRRMCAKMDKPKAITAAAHKLARLIYSMITKGEEYVDQGQAYYEERYRQRVEYHLRKRAESLGLRLVPMGVA

SEQ ID NO: 99594 - protein, 332 aa, unidentified
MKSLFTLGIDMAKDSFVAILIDSQGKTILPATTFKNNSKGFLKLIASIPKPSSTNVILESTGVYGKLFIKALSGSQVNLFEVNPLIIKRFSSSMVQTKTDQADALTIAQAGRLLASSQPETLNKYRVKHDSDRENLALWIAEYKRLSSANARLKQQIQNIRHHAAPKMNVILKRRQEEQQQIQKQLKITKKEIDALLKEQADEDAKCLTSITGVGTLTAATALVSVQNISRFPSADSLKAYWGMYPRRRQSGKREARFHMATHGNKLMRHMLWNAAKSAARHNPVCKELFDRLVARGKTEPAAYGAVARKLVQIIYGVLKNKTMFEIQPQNT

SEQ ID NO: 99595 - protein, 414 aa, unidentified
MTSNVNIAAGLDIHNAFVLATILWSTGQMIQERFSRTQEGLIQLKNWILSHNCEVIACESTSDFWVPIYELLNNLVPVIVGNARDIKALSHKKTDKVDSELIAHLALHGMIQPSRIFSKSHREFRKILRLRHRLVEKRSSFKNQIRGILNTEMIHIRSVLSDIFGKSGLLILNGIINGMPLKDIIAILPPRIQQKSDSIEAVLKQSISHSALFQIKVLLDVIKCLDEQEKLLKESALHFAFENYPREMEILMSIPGIGAVSAATLIAEIGNIHDFGSGDKLAAWLGLVPTVYQSAGKLRMGNITKRGSVHARWILNQIAHAATRCKINSFRTFYERKHIVIGKAKAIIALARKIATIIWHLLMHDEYYEDPVFGKKNIPKLSKVAIPREVTIEQLLEIFAKADILLKSPDPDIL

SEQ ID NO: 99596 - protein, 330 aa, unidentified
MKFKWFVGIDISKKTLDSTLFENGNNKKSPHKQFNNDGKGHQTLVKWLGSQGVSLDEVLFCMEHTGVYGLNLAVFLEKNELVYSMVSPLHIKRSLGLVRGKNDKVDSYQIARYCYLHREDIRQTKLPHESIQELKGLINERERLVKVQTSEKIVLSELRKSNSSNTIRRIEARIVIFSEDIKCIEQEMEQIIEAEASISKNYKLIRSVIGIGLVNSVLFLVYTCNFQSFKDARKYACYGGVAPFENSSGTSIKGKTRVSHLANKRIKVNLSNAARSAIQNDPELHLYYERKAKEGKEHGIIMNAVKFKLITRVFAVVNRGTPFVKMRQAG

SEQ ID NO: 99597 - protein, 346 aa, unidentified
MDHYAGIDVSLECSSVCVVDANGRIVREAKVLSEPEALIDWFRSLGFDLARIGLEAGPLSQWLYAAMKKVGLAVELLETRHVSDAFKAMPVKSDRNDARNIAQLMRLGWFRPVHCKSMGAQEIRAMLTARKLIQAKLQDIENSLRGILRGFGLKVGKTTKRSFAARISELVGGHPALEAIATATLAVHMVLLREFNGFEKRMRAMSLLDAKARLLMSTPAVGPIISLTYASAIDDPSRFASSKRAGPLFGLTPKKHQSGETDYSGRISKNGDAAVREALYEAAHIILTKPIKGCAQLKSWAMRIAKRAGMNKAKVALARKLAVIMLRMLKDNMPFNPVAKAIAAAA

SEQ ID NO: 99598 - protein, 369 aa, unidentified
MGDRITYIGLDVHKDGIVVAVAEGGRRGEVREYGRIANTPAALQRLARKLSRAGVKLRFCYEAGPCGYGIQRQLSALGHECVVVAPSLIPKRAGDRVKTDRRDAASLAKLHRAGELTAVWVPDPGHEAMRDLVRARLDAVRALRRARQQLSGFLLRHGCHYGRPAWTRLHRRWLAGLKFEQAVHHIVLEDYIAAVEAAEARRDRLTAQIEAMLPDWTLAPVVAALQTMRGMALVNAATLVAELGDLSRFANPRQLMAYLGLVPSEHSSGGSTRRGGLTKAGNSAARRLLIEAAWTYRFPARVSRELRLRQEEQPRPIREIAWKAQLRLCARYRKLARSGKPANVVTAAIARELAGFIWAIARHVSPAAG

SEQ ID NO: 99599 - protein, 430 aa, unidentified
MKSNTQNAKIEAITEKTLVLGIDVGSETHYARAFDYRGIEYSKKPFKFSNTEAGFVTFKEWILDIKERHEKDKVVLGMEPTGHYWFNLGKFLQDNEMKPVLVNPHHVKKSKELDDNNPTKNDRKDPKVIAGLVREGRYMIPYLPDGVYADLRTASNIRFQLQAELTRIQNRISRWFNIYFPEYKTVYGKPDAKSGMLILKAAPLPEDILTLGIDGVNQIWRDAKLRAVGKARAKTLIEAAEHSVGSKEGAVAARMEIRMLLEDYESRSIRLQEVMTLIEGLVKQIPMAEKLLEIKGVGIRTVSGFLAEVGDISRFNNPKELQKLAGLALVENSSGKHKGETTISRRGRKRLRYLLFEVAMSLVTKNPEFRELHNYYTTRRLNPLKKMQSLMAIAAKLIRVFYVMLTKGVNYDPKKMVNDIKRPAVYLQTA

SEQ ID NO: 99600 - protein, 344 aa, unidentified
MSKRSMICAGIDTGKHKLDVALDGRAERLRVDNTPDGHGSLSAWLRQHHVGRVGIEASGGYEQPVVAHLRRDGFVVVVFQPAQVRAYARFHLQRAKNDSIDAALIAACAAASGTIHPPPDPRLAVFAEHLTLIEQLTEQRTCCKNRREPCRDARIQHFWDIEVARLKELLRRELAQLEAAIRQHLDLAERLDLIASVAGVGMRTAIAILVRMPEIGQVSREQAAALAGLAPYDDDSAERRGARHIAGGRERLRGRLFSAALAAAFHWNPHLIAFYNRLIAAGKPHKVALIACARKLLIYVNTVVARGTPWRKANAPSHATPITRQSASWFDQGTASSSRPAIAA

SEQ ID NO: 99601 - protein, 353 aa, unidentified
MTGTKYIGMDVHKESISIAVRNDAGKLVMECVIETKANVILDFIHGLRGELHVTFEEGTWATWLYDLLKPHVTKLVVCDPRKNSRQGNKNDRIDARELADRLYMNKLSSVYHGGAGVRTLKELARSYLTISKDLGRVMSRVKAIYRSWGIPCAGKQVYAPRHRAEWLAKITEVGVLRRAEFYYQQLDALRVLRQAVRRDLLAESKKHKASKLLRQIPAIGPIRAALLIALIQTPHRFRTKRPFWKYSGFAIEMHSSADYRSVKGELQKSKKQISVRGLNRDCNHDLKNLFKSAATIASVKPGPFQEFYAALVAKGMRPEMARLTLARKIATIVLIVWKRGVSFDAKYLKSQTA

SEQ ID NO: 99602 - protein, 345 aa, unidentified
MEHYVGLEVSLKLTAICIVDRTGKIEREGVVASDPETIAAFIRSHAPHVARVGLETGATSTWLWTELNKMGLPAICIDARHAKAALKLQINKSDRNDAVGIARIMQCGWYKEVRVKDLDSHALKALLVSRALLVKIKRDIENQIRGLLKNFGLVIGQAKMNVFSVRAAELAEARPELTVAVEPLLRAREAIGRQIADLDRKVMRLARNDAQVRRFMTAPGVGPITALCFLATIDDPTRFKRSRSVGAYVGLTTRRYASGEIDWTGRISKCGDKMLRCYLYEAANVLLTRVAKWSALKAWGIRLAKRSGLRKAKVAVARKLAVILHRMWVEGSEFKWSSKEANQPA

SEQ ID NO: 99603 - protein, 392 aa, unidentified
MQVVTDRAEAPTAIQTDLRAIFVSLELSRSTWLITSLSPGGGEKMSKHSVQGGDIAGLLRRFAQLKEKARARTGRDFPIIVIQEAGLDGFWIHRVLQSQGIESHVVDAASILTSRRRRRAKTDRIDGETLVRTLMAFKRGEPRVCSMARAPTPQEEDRRRVCRERRTLVGERVQHVNRIKGLLFAQGVFGYEPLRKGRRDRLEDLRTGDGRPLPVHLKAQIIRELDRLEVLLGQLKTVEAERNALLKPATGEVASPAAMLAQLKGIGPETAAVLWSEGLFRQFDNRRHVAAYAGLAPTPWQSGSIDHEQGVSKAGNPRLRTTMVELAWLWLKNQPTSALSLWFHERVRRLGGRMRKTTIVALARKLLIALWRYTTAGVVIEGAVMKAAPATI

SEQ ID NO: 99604 - protein, 329 aa, unidentified
MSLYAAIDLHSSNSVLAVMDGDGKALLQCRRPNDLPRLLADLAPYQSDLAGIAVESTYNWYWLVDGLMDHGYAVHLVNTTAIPQYDGLKHGDDHSDALHLAQLMRLGLLPEGYIYPRDQRATRDLLRRRFALVRQAVRLMLSIQSSFSRSTGKQLSGNALRQLTAAQLESLFPDLSTRYGVLIQFKLWLTVQDQITALERWVRKDLARPDLLMRLRSVPGIGPILGMTILLESGAIERFACVGDYASYCRMVESVRLSSGKRKGHGNRYLCWAFMEAANYAVRFHPSIRRWYERKHRVVAIKAVAHKLARACYHMLHEGTSFDPSRAFG

SEQ ID NO: 99605 - protein, 351 aa, unidentified
MRTSQKTPGLIATIGIDLGKNTFHLVGFNKRGAIVLQQKVSRAQLERRLANIPRCLIGMEACSGSHHIARQLSARGHEVRLIPAQYVKPFLKGHKNDYRDAEAIAEAVQRPTMNFVAIKTPEQMDLLALHRVRSRLVSQRTGVINQIRGFLIERGITVRQGVAPLHRALPDILSSRPEALSRRMVSLIADLMQDWRRLDERIEVVSNEIEALAQQDDNCQRLMTVPGVGPIISSAMVAAIGNGAGFKQGRDFGAWLGLVPKQESTGDRTILGRISKRGNKYLRTLFVQAAHVVLVRRPSTAMRGLWPWIEQASKRLHRNMLAIALANKLARIAWAVLARGHAYQPRITAHA

SEQ ID NO: 99606 - protein, 339 aa, unidentified
MQLYAAFDLHANNSLLGIIDGDGKRIFNKRLHNERELILEVLRPHKEHIVGIAVESTYNWYWMVDALMEEGYRVHLANPSEIQKYEGLKHADDNHDAFWLAQMLRLGILPEGYIYPKQERPVRDLLRKRGHLVKIRTSLILSLQNIITRNCGLRLNVNDVKRLKENRVSPLLEENDDLALAGMVSKETIDFLTHKIRRIERTIQGKIQLKQQYRYLLTLPGVGTVLALTIMLETGPISRFAKVGNYVSYARKVSTKWTSNGKKKGKGNKKNGNRYLAWAFSEAAELARRYNSQARAYYNRKMQKTNFMVAHNALSHKLARAAYYIMKDQVPFKPVKLFR

SEQ ID NO: 99607 - protein, 351 aa, unidentified
MVTILKEPPRVVVGVDSHKNTHQAAVLDMNGALLGNEQFPASSAGYKELEAWLATLGEIDRVGIECTGSYAAGLTRFLRERDVPVIEVNATHRAVRARRGKDDPIDAEMAARKVLSGEARALAKDTTGAIESIRLLKVARESAIKARKVALVQIRDVLITAPAELREHIEAAGGPRHRLNRAAALRPDTGHLDDPLQAAKIALRTLARRVKVLDEEIAEIDAHLEPLVAKCAPALLECRGIGTQHAAQLLVTAGQNIGRLSSDAAFARLCGVAPIPVSSGNTHRMRLHRGGDRRANMTLHMIAVARLRLDPATKIYMERRRAEGLSKRDIIRCLKRFIAREVFQALKRDLL

SEQ ID NO: 99608 - protein, 424 aa, unidentified
MENTLARKLKQVPEGYLVVGIDPHKKKHAAVAIVQDFTTRAKYKFDNTKEGLETMLGWAKVEMVKSDCRGVIFAIETGGHYWRNIAYFLDERGIPFRFINAFTLKRRREGKDLNRRKNDYRDSEVAAQLLCTGEFTESKLLQGAYAELRAAHNAYRRLVKERTRIINLVKGLLDGLFPEFTQVFKDPCALTALSVLSTCPIPNVIAKMREDEFIAIIEAKHQGRHLMRRKLRTLRYSARTSIGIVAGARSVASEISFLAEKFDVIRRHIATMEMTLVELVDETEEGKYLLSIRGLSYIGVAGLLAELGPFRSYRNAKQMIKMAGSNPTESESAGKRKSNTPMSRKGRPGLRYCAWTSVIPMLRLNSDFRAWAKQRRERPAHANPLSGREVVGAALNRLLRLAFILVKKETFYQLPQPHLVEVVT

SEQ ID NO: 99609 - protein, 437 aa, unidentified
MAKLLRFAKTVAVTLAATLRNCFLKREELPPGAVVIAFDPHQHQHRAVAGQVGGALLEKPFTVYNSRQGFDFLLKKIAHYLKQTGAPEVYLVFEPTADFFRAFGYLLEDLGYHVHLVNSNQVASMRQALFHNGDKTDDIDAFVILELAVQGYSFQARLHREEFRNLHKAGRERHDLREKQSALQMQITALVQEVFPELRQAFKNLFGQTCLALLETTPLPAPIVALGEDALTERLKAASNRRLGRKKALQLLELARLSIGVTAANEAVVARLQRLVASWRGLHQQLQQVATEMETYLPDAAQPLLRIQGLSTVLVATLLGEIGDWTFFAHATQLVKLAGMSPQRWASGDHQKAPHLSRKGQPLLQYTVYLCALSLVQHNPAFRAYYQSLCQRGKPKMVALCAVGRKFLHVVFAMLQHGTEFDPHLVGAGQNQPTPAD

SEQ ID NO: 99610 - protein, 395 aa, unidentified
MTQEGPDRLSLYCLVPAIGFGESLFNNVIREWGAEMNNPSSSNHQGIVGGVDTHKDLHFAAVVDAYDRVLANNSFPTTRHGYKSMLNWMQSFGEVKRIGVECTGTYGAGLLRYLQQFGIEILEVTAPDKTDRRKRGKDDTIDAENAAHAAFAGIRTVTPKTRDGMVESLRVLKMCRKTAVAARRIALQMIQMNIISAPEAIRESLRTMTRMQLIRTLAAWRPDLGGYRDISTAYKIAFKSLARRYLELHDEIADLDVMISVIVDELAPELIAGKAIGYESAAQLLITIGDNPERLKSEASFAALCGVNPIPASSGKVNRHRLNRGGDRAANSALHIIAIGRLRTDARTKEYVEKRLTQGHTKLEALRCVKRYIAREVYYTLRKRNNYINSVQIAA

SEQ ID NO: 99611 - protein, 340 aa, unidentified
MKKFLFIGIDFSKSKFDVTVLKSIDQQDFVQAIFLNEEKGFNDFLKWVTKQSDVPKQDWLFCGEHTGLYSLGLTDFLIKKNLFIWLENPLQIKCSWGIKRAKTDKIDSLEIARYALRFEDKAVACKPANKDVESLRLLFAYRGRLVKNKVSLEVSAKETRRVITRDDTSRFIFENSQRDIDRIKKEIEIIETKMHDIIMSGELKENYLLVVSIKGVAMITTIALIIHTDNFKAFDTARQLACYCGVVPFEKTSGTSINKGNHISQLANKEIKTLLTQCARCAVQYDKELAAYYTRKIAQGKKDRVVINNVRNKLIHRIFAVVNNRIPYRVNYLNPFLDCA

SEQ ID NO: 99612 - protein, 394 aa, unidentified
MDATPISLGIDIGKTHHHAIARTATGAVVLDRRVANDQAALEALFADAGRWGPVQVCVDQPGSIGGLTVAVAQAQGLPVSYLPGRRMRQVANTFAGQTKTDARDAAIISEAARSMPHTIRPLVALDPVIAEVRLISGQDDDLAKHETALTNRLRGLLNHLHPPLEQVVGPRLDNAGVLSVLQRWPTPQALGRLGERRLTDQLRMAGSRRAPTLAADIIAALRRQTVVLPGTAQLSLILPQLAEQLLLLRRLRAALAATLEILLAQVPQAASVRSMPGFGLRTTARTVVELAGKTFASAGHLAAYAGIAPVTRQTGASRAHHRRSRHGNRALQRAWFLTAVASLTTDRTYYDRKRREGQHHPKATMALARRRVDVLFALLRDGTLYEAKPPLPTL

SEQ ID NO: 99613 - protein, 407 aa, unidentified
MIFVGVDWAEAHHDVHVEDGDGKRLGRARLPEGVEGIARFHDLIAPFADDPTEVVIGIETDRGLFVAALVAGGYDVYAVNPMSTSRYRDRHSASGAKSDTGDAKVLADMVRTDRHNHRLIAGDTEGVEALKVLARAHQRMVWSRGRQTNLLRSTLREFYPAALVAFDDLSSPDALEVLRMAPTPTLGANLSQSKIAAALRRGGRQRRIDESAVKIQTALRSEQLQAPAVVATAMGASVAATVAVIAEMCNQIAQLAAELEANFEQHPDAEVVRSLPGLGTVLGARVLGEFGDEPNRYATAKSRKNYAGTSPITRASGTKRTVLARHVRNQRLADALYLWAFASITASPGARIYYDQRRAAGDSHHQALRALGNRLVGILHGCLAHHVAYDEQIAWGHRPESNLQEAA

SEQ ID NO: 99614 - protein, 274 aa, unidentified
MIVIGIDPHKQTHTAAAVESGSGELRGERTVKARREGHERLLVWARALGSERLWAVEDCRHVSIALERFLLASGERVVRVPPKLMAGARKGARSYGKSDAIDALAVARAALREPSLPVARLAGAEREIRLLADHRDDLVQERTRIQQCLRWHLHELEPELELPAGCLDRRVWLERLGRRLARSERSVQVRICRELVARCGELSRRAAELERELARLVSAQAPTLLELPGCGVLTAARLVGETAGAERFTGEAQLAMHAGAAPLPPRAAAGSVTV

SEQ ID NO: 99615 - protein, 413 aa, unidentified
MEILVERACGLDVHQATVVACVLAGEAGRKPTKEVRTFGTCLRDLEELRDWLTDRGVTHVGMESTGVYWKPVYTVLEGSFELVVGNAHHIKNVPGRKTDAKDSEWIADLVRHGLIAKSFVPPKPIRVLRDLMRYRRKLLNSRSSERNRLLRLLETANIKVASVATDVFGKSGIAMLEAIARGETSGETLAEFAKGRLRNKREKLAVALDGRVEQHHRFLLRLQLDRLRGFDASLRTLDECIDAKMDPYLTQQQALEEIPGVGVTTARALIAEIGVDMTVFKNDHHLAAWAGVCPGNHESAGKPMRGTARRGNVHVRSEPWSKPRSRPCGRRAATSGTSTTASRREEAASAPPSRSATRSSSPPTTSSRTADPTATSVVATSTRCTKSARRAAWCVGLRPWDFGCRSSPRQLER

SEQ ID NO: 99616 - protein, 311 aa, unidentified
MLSEQRRLFYACKISNNEKGFQKLRAWLDGHGCDETLHCCCEATGNYYEAAAEYLAAHYKISVENPRKIKAYAVSELKRSKNDKQDAKTIAEFCEEKSRKLKTWKPKNQTEKELQSITRYIARLKQQKASETVKRQTASDNIKDLIDETIDYLGSKIKEAEGRLKTYISQNPELKQKLNNLTTIPGIGIQTAAIIMAALSGNNDFKTAKQFTAYLGLDPAEYKSGTSVKGKDRISKVGDCMTRAALFSPALVAYRIDTFPRLVANMRQNGKHIMKILTAIMRKLAVVAYTLHKTDTTFEKQRHTRIRQKAA

SEQ ID NO: 99617 - protein, 354 aa, unidentified
MKYFAGMDVSLEETAICVVDETGQMIKEARATSEPDALHALLASFNLPFERVGLEACSLTAWLHGELTSAGWPAICIESRHAKAAMGAMPNKTDRNDARAIAQIMRTGWFKAVHVKTPTCRSWRSLLVARRAVLNQMRTIENVVRAILRETGLKLGTPARKDFIVRAREFVAGEKGLAMMIDPLLEILATMLREFTRLTKQVLVIVRDEPVCRRLMSTPGVGPMTALAFRATIDRPERFKKSRDVGAHLGLTPRRYQSGETDIQGRISRCGDELARTALYEAAHSLLIRSKKWSALRAWGMKIAKHRGMARARVAVARKLATILHRMWVDNTEFRFGREQAANPTIKAITVVAA

SEQ ID NO: 99618 - protein, 312 aa, unidentified
MADMVRLAGLDVSKDKLDVYVTPSGESRTVDYDRQGLAGLQRWLVGLGVAVVAVEASGGYEREVSEVLEEAGLIVHRLNPLRVRRFAHLKGRLAKTDRLDARTIAEFARTWPQEHQLRRDPRRERLAEHLLVRRHTQQAILDCVNQLEHLRDGRLRRLVTARKASMARTLARLDRCLVELIAEHDDLAELSQRLRSVPAVGPVLATTLIALLPELGSLTRRQVASLVGVAPFDRSSGRQIGAKSIQAGRGLVRNALYMAALVASRHNPAIAAFAERLAGKPGKVRLVACMRKLIVTLNAMVRDGSQWQPRTA

SEQ ID NO: 99619 - protein, 347 aa, unidentified
MVHVGLDLSRTRLDVHVMDEAGAPLAVTTALPEAGGLAALVSRIDAEFGAPVYAAIESMNGARFVHDQLELAGWQVEIADAQKVKGLAPLACKTDKIDSWVLAELSRRDLVPAIWLPTPRVRAERERARWRLHLVRHRTALKNRIHATLLAFGHPCPVSDLFGTGGRELLARLALPEPWAGDVTAALHLIDELDHEVAECERVLRQVGADHRYVPLLMTTPGIGWVLGYTIAAEIGDISRFASPTKLAGYTGLCPRVYQSGGKDHRGPLAKNGPKYLRWALIEAATHASRHPVYAERYRRTKTRLGRQRGPKIAQVDLARKLAEAIWHMLSTNRPFAPAGAAQSLAS

SEQ ID NO: 99620 - protein, 313 aa, unidentified
MSLEEQRIVVGIDVSKARLDIAAKGEEWPVNNDLDGIGKLISLLQTLNPGLTVVESTGGLERLVVAELWAAGLPVALVNPRRVREFGKSIGLLAKTDRIDARLLVRFGEAVKPDPVCLPSEEEQKHSALMTRRRQVIEMLTMEKNHLCSSHPAAKESITKIKTVLQQELDELDHQIENFIDQFPSFKKKDEILRSTPGVGKVTAAILLSDLPELGKMDRKKIAALVGVAPFNNDSGRFRGKRRIKGGRPSVRTVLYMATLSATKFNPVIRTFYEHLVLQGKAKKVAIVACMRKMLIFLNSMIRDMQPWRSSIA

SEQ ID NO: 99621 - protein, 340 aa, unidentified
MNPTTYGLDIAKRVFQLYWVDSLSGEIVNRQFGRDDLVGFLAKRPAGRVALEACGSGHWWARKIKALGHDVVLLHAKFIRPFVQTNKTDAADARAIWTAVQQPEMRTVAAKTEDQQAMLCLHRMRALLVKFRTMQINQVRGLLYEFGATFRAGRVAGLNEVRERMAELEEALPGAVLVGLQDELRRIDAIDADIDRLEKQIGDWQKHDAECRAIAEVPGFGRLTATAFVATIGDAKTFKSGRQVASFIGLVPRQSGTGGRLRLGSISKRGDAYLRTLLIHGARSVLCHAKTPTPWQEGIQERRPNNVAVVALANKMARTAWAILAHGKAYQRNHVSVRPA

SEQ ID NO: 99622 - protein, 374 aa, unidentified
MIVDVLKVNHPFKYVVIAMESTEFYGVHLANYLSASNLLAPFSVRVYCLNPKEVKNYKKSFNDIGKNDGIDSFVIADFARVGRISIKPWCGSQYLALQRLTRHRMHITECISREKTYMLNNIFLKFSEYALLRDGEHPFSNKYGAAAEATLTEFTTNEEIVNSSVEDLVAFINTKSRGRIADPKETAKIVQAAARNSYRLDKCLYEPLTISIASSFNCISSFEKELKAIDKAILQTVQGLNPEEYTVLNSIPGIGKVYSAGILAEIGSVRAFQNANALAKYCGIVWNDNDSGDFEAKDKRMSKAGNSYLRYYIIEATGSVIRHCPEYERFYQKKYAETRNHQHKRALALISRKFIRLFYGLLDKSQLYSPEKSR

SEQ ID NO: 99623 - protein, 412 aa, unidentified
MEVVHTRYAGMDISKKDAKVCVRVAGKGRRKTVETVTTWGSMTNQILALRDHLIAQQVTCVVMEATSDYWKPFYYLLEDLPGVEVMLVNARHVKNLPGRKTDVADATWLAQLGAHGLVRGSFVPPEPIRQLRDLTRTRTAITRERAREVQRLEKLLEDSGIKLSAVASDILGVSGRAMLEALIAGDRDPAALADLAKRRLRHKIPELTEALVGRFNEHHAFLARVHLDLIDRHTAAIAQLTERIEVVIEPFQGFRDLICTIPGISTLLADVIIAETGADMSVFPTAKHLASWAGTTPGNNESAGKVKSSRTRPGNPYLQGALGAAAMWAAQNPHTFMGARYRRIAARRGPQRANVAVQHTLLTAIWNMGTTGTLYEDLGGDYYSRLNPERTRTRAVRQLEAMGYRVTLDNAS

SEQ ID NO: 99624 - protein, 384 aa, unidentified
MLGGSNQRKLRDVSRPAAAGLDWMGGTAVPLGCLAPWGSMVRPSFGSCPQQMIGSTSRMQGKEASEQETRNKSSVGIDVSKCWLDAYITPSGGGLRVANNGVGIRRLKRWLSAFDIALVVVEATGKWHRHVQRSLAASAIAVAAVDPYRVRMFAKAQGVLAKTDRLDARVLAAFAAVMQPAVRAPAAPLMAELAELVAARANAVAMQTAVKNQLAAAQTKFLKRQLKQRIERAAEDVAALNGEILKRIEADEVLARRYAILTSIPSFGFTVAATLIACLAEIGSLNAKQAGMLAGLAPVADQSGEREGVRVIWGGRAAVRRILYLAAVSAVRANADMKAFYARLRASGKAPKQALIAVARKLVVLANTLLNENRFWQSSAPKHA

SEQ ID NO: 99625 - protein, 457 aa, unidentified
MKNHTKKSKQKKGKRQPLSIVHPHAAGIDVGAHKHYVAIPAECRDQTVRHFGCLTPDLHEMAKWLKQHRVDTVAMESTGVYWIPIAQILDHYGIEVNLVDARAAKNVPGRKSDVQDCQWLQELHSFGLLRAAFRPTNRMVVLRSYWRHRKELVKAAAEQIHLMQKSLELMNLQLHKVISDITGVTGMKIIRAIVSGQRDPLVLAKLRHRSIKSSEETIAKALTGDWRQEHLFTLEQALEAYDFYHRQIAACDQRIACYMKTLPSKGDVKDTARCSGGYRRKNQVHFDLRSELHRITGVDLTSIDSIDVLTAQTVISECGYDMSRFPTEAHYSSWLGLSPNNVITGGKVRRRSTRKVYNRAADALRLAAQSLHRSKTALGAYYRRMKGRLGPAKAITATAHKLAILIYRMLKYGMEYVDRGQEAYEQQYQERLLQSLRKRAKKMGYEIVALESGEVVS

SEQ ID NO: 99626 - protein, 407 aa, unidentified
MKPSWLHDVGVDGPRRHRMCQNEVVEDLKQREPSVSKIIRIGVDTSKSIFVLYGVDADEQPVLRKKLRRRQFLEFFAKLEPTKIGMEACGAAHHWARELRALGHEVVLLPPQYVKPYVKRNKNDMADAEGICEAMSRPRMRFVPVKTAEQQAALMLEGTLGGLVARRTQLTNTIRGYAAEFGVTAAKGLDKIGPLLARLTEEAGVPPLAKQVFAVYAKEYRQLKEQIAKVEAKLMAWHKSNEQSRRLAEIPGIGPKGAVLLTMKVADPHFFRSGRDLSAWLGLTPKDHSTAGKMRLGVITRAGDERLRSVLVVGATAVIKQVKAGKGKHPRWLVELVNRKPPKLAAVALANKTARIAWKLMVSGERYDRTRASHREGRGAALVEGFAPRPSLPPCPTAREAPAPSDV

SEQ ID NO: 99627 - protein, 326 aa, unidentified
MMSLPNRTSDATITVGIDVAKATLEVALSDRDVTLSLTNDEAGHAALLVHLRDLQVGLIVLEATGGFELDCALALQRAGLPVAVINPRQARDFARAMGRLAKTDSIDARVLADLARVLLQRNDLSKLIKPLPDAAQLKLQALVTRRRQLRTMLMAEQNRMAMPGTLARRSLNTIIKALGREIARLDTELMAVIREQHAELAALLDSVKGVGKVTITTLVAEVPELGKVNGREVCALVGVAPINRDSGTMRGKRAICGGRPNVRKVLYMAALVATRHNAVIKTFYQRLLAAGKPKKVALVACMRKLLTILNAMVKAHKPWDESLHTA

SEQ ID NO: 99628 - protein, 355 aa, unidentified
MSKLKYIGLDVHQASISVAVREESGRLVMESILATRAAAILEFLGGLRGTLHVTFEEGTYSTWLYDLLVRRVHQVVVCNPRKNALLKKGNKSDRIDARKLAELLRSGLLSPVYHGQNSIRTLQELTRSYLTLTQDTTRVMNRLTAIYRSQAIAYGSKKLYTRRHRGEWLGKLQQPGLLRRAERLYEELDLLQQLRRKARQEVMVESQKHPVCARLCSIPYLGPIRAAVLAARVQTPHRFRTKRQFWAYCGLGLETRSSGDYQQIEGQLQRSRKKVLIRGLNLDHNHDLKNIFKGAAMSASIFSGPLQEFYQERLRAGIQPEMAQLTLARKIAAIALTIWKKGDRFDRTKLKAQAA

SEQ ID NO: 99629 - protein, 367 aa, unidentified
MGKHSTAGESVIIRNGTNRRLTVGIDLGDRSSRYCILDEQGELLTEGSVATTKKGFAQVFGSKPRSRVALEVGTHSPWVSRYLGDLGHEVIVANARRVRLITDSTRKDDRLDAKTLARLARIDPELLSPIRHRSAQAQADLMIIRARAVLVEARTMLVNAARGLTKSCGERLRGCSTRQVGEELAQSLSEPLQNALKPVLAEVESLTQRIREYDRQIENIAKASYPETERLQQVQGVGALTALSYVLTVGDPQRFRCSRDAGVYFGLRPRRRDSGGNQPQLGITKEGDAYLRKLLVQCAHHILGRFGADSDLRRWGLRLAERGGKNAKKRAIVAVARKLAVLLHKLWVSGEVYEPLYVHKDRKTTAA

SEQ ID NO: 99630 - protein, 386 aa, unidentified
MPTEAATCAAVIGLDVGKFSHWACHVTRQGEVLRSEPVANTEHDLDGLSAQAEAGTLVVVDQVRNIGSLAISRARLAGLPVAYLPGIAAHGAAKLFAGDAKTDERDAAVIAKTALGIPDSLLPVPKHGERLEAARSMAAQRSHMAACSTRGKNRLRSILLESCPEFEALADLADPHWLRMMESLGGPWGIVDAGKAAVGAVTRGANRARIDAAVAAAASTRPSEYRVMAENPQVKVLARRIRESAEEAARLDAEITALLAGDETYACLPTIPGIGPRTESELVTSIDIGDFPDHDHLASYCGIAPRNRRSGKSISSVSSSRQGNKRLKNLLIFSCNSLSRSKGRFGDYYRSCRERGMCHGEALKAVARKRLKVIYAIMRDKVPYSA

SEQ ID NO: 99631 - protein, 356 aa, unidentified
MLNDKKYIGMDVHKESISIAVRNGAGKIVMECVIETKASMILQFINGLRGDLHVTFEEGTSASWLYDLLKPHVTKLVVCDPRKNASMREGNQNDKIDARRLAELLRLDHLSPVYHGEHGLRSLKELVRSYLTITKDLGRVMSRVKAIYRSWAIPCTGKQVYAPRHRVEWLGKISEAGVRRRAEFYYQQLDALRSLRREVRRELLEESKKHQAWKQLCQIPSIGPIRAAVLLGILQTPHRFRTKRQLWTYSGFGIETQSSADHRSVDGQLERVKKPSSIRGLNRNCNHDLKNLFKGAAIVASSKPGPFQEFYTTLLTKGIRPEMARLTLARKIATIALIVWKRGVNFDAQHLKPQTA

SEQ ID NO: 99632 - protein, 403 aa, unidentified
MTSCSYFAGIDWASRTHAVCVIDATGKVVLRFDIAHSAEGIERLIRQLRSFKGLAVAIERPSGVLVDALIEAGLTIVPIHPNVLKASRARYHGAGKSDPGDAYMLADLLRTDGHRFRPLAPQSDEIRALRALVRTRDDLVAERVALANQLRSLLESFWPGAAEIFAEIDSPIALAFVARYPTPQSAERLGEKRLASFLAQHSYCGRRPVATLLERLRTAAGGSPGELEAEAKGELVRALAAILERLVAELGKLTARIEHSVANLADGQIIMSFPRSGRVCAAQILAELGSVRERFPTEAQLAAEAGVAPVTYASGKHRGVVFRFACNHRLRRAITCLADNSRHANRWAADVYQRARARGCDHPHAIRVLARAWVRVLWRAWFTKTAYQAHLHRSAAAFINATG

SEQ ID NO: 99633 - protein, 404 aa, unidentified
MYNAVGIDVSKGKSTVAVLQPGSTVIRKPFDVSHTSQNLNELADYFSSLDGTTKIVMECTGRYHEPMVKALSEAGLFVSIVNPHLIKNFGNNSLRKVKSDPADARKIARYTLDNWTELRQYSGMDNTRTQLKTLNSQFSFFMKQKVAAKANLIALLDNTYPGVNKLFDSPTREDGSEKWVDYAYSFWHADCVRKIGLKAFTERYKSFCKKHHYIFQQDKPEKLFNASKELVAVFPKEKTYKLLIQQSIQQLNLASEHVERLRREMNELASTLPEYSTVMGIYGIGKTYGPQLIAEIGDVSRFTHREALTAFAGVDPGVDESGQHKSKSNRASKVGSARLRKTLFQIMTTLLQNAPEADPVYRFLDKKRSQGKPYYVYMTAGANKFLRIYYGKVKECLRNLEQTE

SEQ ID NO: 99634 - protein, 333 aa, unidentified
MTTTPPRASGFAASGSNWGIDVSKDWLDGAQWPEQRTWRVTNSPDGWTTVIGWATAEAPARIVLEATGGYETDVVVALDAAGLTPVVLNPMTARRFAQSHRHLAKTDRIDALMLARFGAERQPTPRPIPSETMRNLVALLAVRDDLVSARVATRNRLHQAVAIVRPHLERQLAGLGEEIAAVEVDLARLIATDVAITAMVTRLMSVKGIGHLLATTITVGLPELGTVPAKNLAALVGVAPFANDSGRRHGARSIRGGRSRMRRALYQAVTTMLQWDPRMRAFYQRLKERGKPHKVAMVACMNRLLRLLNVMIRTECLWDELDVNQPVKDAGTP

SEQ ID NO: 99635 - protein, 320 aa, unidentified
MTQEFKTFVGIDVSEDWLEVCVLPQATRRRFAQDAPGWQELCRMVAEQPAPLVVMEATGGLERPAARLLSAAKIAVAVVNPRHLRQFAKGLGWLAKTDRLDGALLARYGALARPAARPPLSVAQARLQALVLRRRQLAQAVNAEGNRLRRAAEPVIRDSVTAHLAWLKAELAVLDGQIAVALEAQPDGAERAAILASVPGVGPVATSSLLALLPELGRRDGKAIAALAGVAPIAQDSGKRRGQRCIQGGRAVVRGALYMAALVASRHNPVIRAFYQRLLADGKAKKLALTAAMRKLLVILNAMLRDRTSWNPNHAAATNL

SEQ ID NO: 99636 - protein, 411 aa, unidentified
MIKENYIYVGIDLHKETHTAVMIDCYNQKLGEITFPNRPAGFPKLVAKVKKCNTDGKTIVFGLENAYGYGRALAVWLIDKGYLVKDVNTAISHRQAKHRGAMYRKSDSDDAEAIALATLNMLDKLPDAYPNDAYWSLGQLVHRRDNIMKQRTRLVNQLHEQLCIAYPSYKQFFNDISRPTALYFWEHYPSRKYLKGKSVEDLRAELAPVSHNKCSTKTCEKILDAVASDKVKNNAYQDARDMVTLSIVSDLQHYDKQLAEVDKMLEQMYKMLGCTLTTIPGVNVITAVKILPEIGDIKRFSNANKLAQFAGIAPLHLSSSGKGKDVATKQGNRRLQATIYFLAIQMVQVSSKGTPRNSVVRAYYEKRKAEGKTSQQALICISRRLISIIYGMLKNGTEYRMPVVENAGETV

SEQ ID NO: 99637 - protein, 360 aa, unidentified
MTGTMTWVGLDVHARSTHAAAIDTMTGELRREKFGPGLDAPVAWLLEQPGPVRACYEAGPTGYGLYRQAVAAGVSMQVIAPGKTPRGPSDRVKTDRKDAELLARLLLSGGLTRVVVPPPEVEAARELTRAHDACRRDLMTARHRVSKMLLRHGRVYPKASTWTMEHRRWLSRQTFDEAPSQVVFNDLLTAIDALAGRKAQIALGISQLASDERWWPTVARLRCFRGIDTLTAFSLHLELGGDWQRFERPTALGAWLGLTPTLSQSGESSSRGGITKTGSVLARRLLVESAWHYARTPAVGQALAGRQDGQSAEVIAIARRAQHRLHKVHGRMRSRGKPGNVIVVAMARELSCFLWAAATE

SEQ ID NO: 99638 - protein, 372 aa, unidentified
MQTIHRSRTLFVGVDVHKDTHTAVGLSPFGEKVFEMTIGNEAEDFISLIEKTKVEAEKSGLVPSFGLEDVHSWGERLSSFLVEEGLPVRAVAPILVDHRRSKTTHPEKNDSLDASGVAEVMIQRIDSLPLYKLTDEAQKAKQIRELSLEREWLVKERARLKNQLHILLHRIHNTCYRTKFKDPFSKKALRYWMRSVPKNTDVILEQRMKRAVRRILDLREEIQEIEEELTALMKDNGQTLSTASGCGVVIAAEIIGEIGDINRFHSPGALAKYAGCAPREHSSGKTIRWRKTRSGNRRLNRAFHRMALSQISRSGNDAARTYFKRKISEGKTKAQALVCLRRQLVNVVWMMMKHRTEYRLPVGKAGYPQKND

SEQ ID NO: 99639 - protein, 317 aa, unidentified
MNGTMTWAGLDVHARSADAAAIDVLTGELTRARFGVGTEQVVEWLLALGAPARVVYEAQPTGFALYRAARAAGIEVEVIAPSKTARPAGDRVKNDRKDAELLARLAMAGQLSVVAVPSEFVEAARHLARTREQVRGDLMSARHRVSKLLLAHGRVYDGKTTWSRAHRLWLGRQRFEQEPAELAFIDLLAAVDGLIARRGALDERLSRLASDERLWPTVARLRAFRGIDTLTALALHLELGGDWQRFSSPRKLFSWLGLIPSLDQGAAIASATALHTSPCSSTLRARSPRTCTSAASAWGTSARSSAARKSSTVATSS

SEQ ID NO: 99640 - protein, 340 aa, unidentified
MSEITTIGLDIAKHVFQVHGVDGCGVAALRRKLRRSEVLSFFQGIDPCLVGLEACATGHYWARELIALGHEVRLMPPTYVKPYVKRQKNDAADAEAICEAVTRPTMRFVPVKSEEQQGLLMLHRTCELLIRQRTMLINALRAHLAEFGIVMRQGKAGVDLLIALVEDDEHDLLPAMAREALLPLTAQLEDGRARIASIDRRIHAWHRSNEQSRRLETIPGIGPITASALVATISDPSLFASGRQLAAWLGLVPRQNSSGGKERLGRITKKGDPYLRRLLVVGAHAVLRYARRMPTRTGLWASALLARRSYKLAAVALANKMARIVWAVMSRNEDYRPQAA

SEQ ID NO: 99641 - protein, 353 aa, unidentified
MIIGCDYHPSFQQIACVDTETGELKEQRLAHREGAEEFYRALAARGQQVRVGMEASGHARWFERLLAELQFELWMGDATEIRRKRGRKQKTDRQDAQHILGLLLKDDFPPIWVPSWENRDLRQLLWHRHRMVQARTRMMNQLQAVALNEGLLWKKRLWRERGRQQLEAIPLAPWASRRRHDLLELLDRLNPTITQLSQAIEQEAEKHPAAQRLMTHPGVGALTALAFVLIIGDAKRFQCGKQVASYLGLVPLEDSSGNRRRLGHITKQGSSILRFLLVEAAQATVRSLPEWRSKYLHLMMRRGRKTAKVAMARKLAVRLYWMMRQGWDYQQWSKFGSHAGQLGTGDGVQSNIE

SEQ ID NO: 99642 - protein, 365 aa, unidentified
MTKVRTWAGLDVHAAATVACVVDAPSGEMSVHRLAGRTSQLTAFCAQLPAPVRVAYEAGPTGFELARALDAAGLACVVAAPGKIERPAQDRVKTDRRDAERLVRLLMIGGLHPVRVPSSEEEALRDLVRAREDIRGDLMRSRHRLSKLLLRHDVRYDDTASAWTKAHRAWLSRVDLGERAAQTTLLDYLGAVDALVIRRDTLERMIGELVPVSPWAEPAARLRCLRGIDTLSAVGLCAEIGDFARFDRPSKLASYLGLVPSEHSSGQTRRQGAITKSGSRHARRLLVEAAWHYRRPPRTGTTLQRRQEGQAAQVIAISWKAQQRLHQLWRRLDGERGKRKTVVAVAVARHLAGFCWAITNTDPDT

SEQ ID NO: 99643 - protein, 335 aa, unidentified
MKHYAGLDLSMESTQVCIVDDNGRKVVSEKVESSPEAIAMMLERYGPIERAVIETGRMSPAICLGLRELGIPVVCIDARQAHQSLKAMKANKTDPHDAAGLAQLARTGFFKEVHVKSPAAHGVRSVITARSHLVEARVRLDNTIRGLCATFGYRPGAGQGKAFLERIMQAAHIPGLGDAIASLLSVRAELVEQIKEMDRRLRVIASQSQACEILMTIPGVGVQTSAAFAAAVDEAGRFRQSRNAGAYFGLVPRRHQSGELDWTGRITKQGDSTVRKLLYEAANSILTRSRETFALKTWAMKIAKRRGLKKARVALARRLAVIMHAMLRDGTLFQA

SEQ ID NO: 99644 - protein, 347 aa, unidentified
MNMSKFTKKQWFIGIDISKEWIDVHVVYEKTPEKFTEKQFKNNLQGFDEMLNWLIKNKTNLSECMFCMEHTGTYGLMLFYWLNQHGFEFCVEPAIQIKRSMGLVRGKNDQVDARRIAWYAMTNKIRLKPFEVPATHLVQIKQLLTYRDQLVKVKTGFLNSLKSHQQYQQITRLDFVTQDIQQQIQQLTDRIDELEKQIIQIINSDEDLKKNHDLATSVIGVGLIISAFMLVTTNNFTSFENGRQYASYSGIAPFEVSSGFYRGKAQVSHLANKRMKTLLANGANSARIWDPELKMYYERKRDQGKEHQVVITAISCKLVNRVFASVHRKTAFVTLSKNYAKKNLVIS

SEQ ID NO: 99645 - protein, 387 aa, unidentified
MGRVVIGMDPHKRSATIEIIDDRETVLAGGRFGTDRDGYRAMLAAGRRHPDRIWAVEGCNGIGRHIAQRLVADGETVVDVPPKLSARVRVFATGQGRKTDPVDAHSVAVAALRAKGLRQVVVDDETVALRLLVDRRDELGRARTDLVNRIHKLLLELLPGGAKTFLRADQARALLATIRPRDLVGRTRRRLASELIAELVQIDKKIKAANTELTDLVTASGSSLQDLNGIGPSGAARLIGDIGDIRRFASRGHFASWNGTAPLDASSGDQQRHRLSRAGNRRINRVLHIMAIVQLRHDTAGRAYYRRRLAEGKTAMEAIRALKRRLSDVVYRHMLRDIQRTATGPGGQPGATLQSSAADPNPEVNTSEKSLPGPADHHPRTPNTDAA

SEQ ID NO: 99646 - protein, 325 aa, unidentified
MTYVGIDISKSSFVAAFPQEKGYNTETFANDAKGIRKFIGKLSADTHHCVMEATGNYGLLLLYLLDKAGITASLVNPKKIKNYSRMIMSVTKTDDMDARLIAEFGEKMTPAPYKLPSETLMLLKQKKTVIRQLQKQLTATRNLQSSLEPLPVKDKKCLASLKQTIAFTEKQIRHLEEELVQTAGSVFEKQLKALTSIKGIGVTLANALIIATGGFSSFDNAKQLSRYIGICPTIEQSGSSINIRGHINRNGDANLRSMLYIAAWSASQHNKACKECYQRLRQRGKSGKLAMIAVANKLVRQAFAVATSNTSYIDGFVSTKPDTAV

SEQ ID NO: 99647 - protein, 400 aa, unidentified
MLSIGIDVSKGKSTVCGMKPGGEIVYTPFEVQHTRKGMLELVSLLRSSGEEVRAVLESTGSYHCPVVAALLENGIFVSVVNSLRMKRFCSQSIRKVKTDRIDAMQIALYGLAYWQELQPTKLPEDTYRELQLLARQYYQMTSLLIKAKVDFNAICDQVLPGMQELMSDHAGRHKLSDFVLRYRHTTHILEMGETRFRKDYCKWAEKKGYRNCERMAALIFATAQNGIPVLPNAPSTQIVITEAIRVLHTVEASRDAILTQMQALAKTLPEYSLVREMPCIGDTLAPRLIAEIGDVRRFHSKRALIAYAGIDAPPYQSGKFCANNRHISKRGNRYLRKTGYEVMQSYVMHKPANDPIFTFIEKKRGEGKSGKLAMVAGLNKFLRVYYGKVTELYRSLPAIE

SEQ ID NO: 99648 - protein, 318 aa, unidentified
MSTEIFVGLDVAKDHLDVALRPSGEGWRVANDEAGTGQLLARLRALHPTLVVAEATGGFERAAIAALAAAGIPVVVANPRQVRDFARATGELAKTDQLDAAILALFAERVRPAPRPLPDAAAQLLDALLTRRRQLLEMLVAEKNRLGFAPKPLHRSIGQHIRWLERQLDDVTTELTHQVEQSPVWRAKDDLLQSVPGIGPVVSCTLLGELPELGTLSHKQIAKLVGVAPLARDSGTLRGKRMIWGGRASVRTALFQAALSARRWNPAVRTFYDRLRAAGKPAKVALIACARKLLVILNAMVRSNTRWQALTPSAQHSC

SEQ ID NO: 99649 - protein, 341 aa, unidentified
MEQIIRIGMDTSKNVFQLQGVNAVEQPILRKTFSRKEMVNFFEKTARTTIALEACGGSHHWARLLSCLGHEVKLIAPQLTKPYVKRGKNDAADAEALCEAMSRPTMRFVPVKTADQQAALMLAGMRKRLIRNRTQLANAIRGFGMEFGIVATSGMCRIEPLLERIAGDQSLPDLARELFAVHGDEYRGLLSEIKRIEEKLMDLHRADECSRRLAEIPGVGPVGASLLMMKTPDPRMFKCGRDWIGLTPKDHSTAGKVRLGGITRAGDEMLRSVLVVGATAVLQHVGAGRSRHASRGSPNCCNGKSLSWLRWRSLTRLLVLPGKLMVSGETYRRMEGQPKAV

SEQ ID NO: 99650 - protein, 393 aa, unidentified
MICVGIDVAKDKYDCFILSSEGEVLADVFTIPNNAEGFDTLLQTIRRCARPEDKIKVGLEATGHYSYNILGFLLNEGLDTYVINPLHTNLYRKSLSLRKTKTDRVDARTIAAMLMSDVDLKSYTDTAYHNEELKSLTRYRFDKVRERAKLKQSVSRLVTILFPELEKLVSTLHMASVYALLSEFPGAKQVSEAHLTHLKAVLYDASKGRYGSDMATTLRDAARCSVGSVMSAKSLELRHTIRLIHELDAEIEDIEAAIQSMMGEIQSPITTIPGMGVRMGAMILAEIGDFSRFDSPDKILAYAGMSPSTYQSGQLSLSGAYSHMEKRGSRYLRYALYNATKYVCLWNPTFAAYLAKKRAEDKHYNVALSHAAKKLVRLIYALEKSKRPYSTAA

SEQ ID NO: 99651 - protein, 419 aa, unidentified
MDVVHTRCCGLDVHKQTVVACVLLSGPTGGPPRREVRTFGTMTDDLLMLADWLAAEGITHVAMEATGSYWKPIWNVLEGAFDLLLANAQHIKAVPGRKTDVKDAEWIADLLRYGLLRPSFVPDRAQRELRELRELTRYRTSLVQERAAEASRLQKTLEGANLKLGDVASNVLGRSARAMLEQLVAGQTDAVALAQLARGRLREKIPQLERALAGRVAPHQRFLLAQQLAHLAYLDAAIERVSAEVAERLRPLGATLERLDTIPGVGRRTAEILLAEIGPDMGRFPTAGHLASWAGMCPGHDESAGKRRSGKTRQGSPWLRQALVEAAQAAGRTRGTYLSAQYHRLAARRGKKKAVIAVGHTILVTAYYLLAREQAYEDLGPDYFERRDRAAVERRSIRRLEALGYRVTLEPLAPAPSAA

SEQ ID NO: 99652 - protein, 389 aa, unidentified
MTAEGAVSSKPLILFMPPPSGAPAGPVGIPFQGITDAKGGERMRFYTRQHKYYCGVDLHARSIYVCILNQEGAVLVHKNLRAKPDAFLAVIAPYREDLVVAVECMFTWYWIADLCAREGLTFVLGHALYMKAIHGGKAKNDRIDSHKIAHLLRGGNVPFSYVYPQAMRATRDLLRRRNFLMRKRAELLSHIQNTNSQYNLPEFDGALRYPANREDLSDRFTDDSVKKSIETDLGLIDVYDKHLKEVELYLTRHARVDNPNSYHILKTVPGVGQILGLVLLYEIHDIARFPRVQDFVSYCRLIRCSKESAGKKLGTGGRKIGNAHLKWAFSEATCLFLRGNGAAQKYLARLESKHGKGKALGILSRKLGTAVYYMLKRQEAFDMNKFFEK

SEQ ID NO: 99653 - protein, 346 aa, unidentified
MTHSTTVGVDLAKNVIQISVVSARGKELSNRSFTRKKFAEFLGKQKPSLVAFEACATSHYWARAAQRHGHEARIIPAKFVAPFRQGHKTDCNDALAVAEAARRPNIKEAPMKTVEQQGLQAIHRSRQLLIQECTALSNHLRGLLMEFGVVIPQGFASLLRAVPEVLEDGENELPDLYRPTLHRMYTRLLELRQDIEAMTREVEVLVKQHPICSRLTALEGIGPIGALLLYATMGSGIAFSGSREFAAYLGLAPRQYSSGGKTNIVGLSKKVGNCRLRSILILGARAYTYRLKEPKSSKDRWLKDAIDRNGHSRAAIALANKNVRTAWAMVTQGTEYQRRGQLKVAA

SEQ ID NO: 99654 - protein, 363 aa, unidentified
MTHTNKSPTTIGIDLAKNIFHFHALDKQGNTLWAKTMRPQNAIIFLEAYEPCIIGIEACGGSHYWHRTFTSLGHEVRMITPQRAKAFREGQKNDKNDAEAIAHAVMNQQTRLVAPKSPRQQEVSSVNAMRNLQIRQRTQTINHIRGTLSEYGISCPKGASFFENNIEDILQKEIKLQEESKKKKLPHGVIQGLFAQIITLKGYRDQIKQFNQQIAALSNDEDACKRLKTIPGVGEVISTQLYGHGGNVAHYKTSSDFAASLGLVPRQYSTGGKQIYGSISKRGNIAIRANMIHGARSVLSAANKKRKPGESSGNVLIDWGLQCYDRMGMNRASVAVANKMARISWKILKTPDEVFLSSMSQAA

SEQ ID NO: 99655 - protein, 313 aa, unidentified
MKHIPSNIFIGIDVSKDRLDVAVAPSGESMGFANSEDGIVLLADFIKPRDPALVLFEATGGWEMNAVRHLAAQRLPLVVLNPRQVRDFAKATGQLAKTDTIDARILARFGEAVRPEVRPLKPVELRKLEALNTRRRQIVEMITAEQNRLVSAPEWVRPDIEELLEILKKRLAAINRDLNKLIRKSPLWREKDKILQSFPGVGPVMAATMIADLPELGTLNRREISALVGVAPLNCDSGTYKGKRRTWGGRAAIRSVLYMCALTAIRHNPVIREFYQRLRRAGKLPKVALTACMRKILVILNAMMRSGNCWQTT

SEQ ID NO: 99656 - protein, 388 aa, unidentified
MRAADQHSHDPVAIHADLGAIAVSLELSRSTWLVTSLAPGSGEKMSKHSVAGGDIAGLLQRFSQLQDKAERRTGRRVPIIVIQEAGLDGFWIHRVLQSEGIESHVVDAASIATSRRRRRAKTDRIDGEALVRALLAYKRGEPRVCAMVQVPTPDEEDRRRVSRERKTLTAERVEHVNRIKGLLFAQGVEYEPLHRNRRQRLQELHTGDGRPLPEHLMRQISRELDRLELLLEQIKAVEAERDALLATAREASTPTPVAMLLGLKGIGAEFAMVLWSEGLFRAFDNRRQVAAYAGLAPTPWQSGTVDREQGVSKSGNPRLRTTMLQLAWLWLRHQPESAFSRWFHERVSRNGGRLRKTMITALARKLLVALWKYVTAGVVIEGAVLQTA

SEQ ID NO: 99657 - protein, 404 aa, unidentified
MAKYHVGVDISKHNHKVCIRNLAQDSYSGVFSFSVNHQGFDKFQGTLEKLSPNKEDFLIGIEATGNYGVTLAYFLLSHGYEVVEINPYRANQFRKAQGRKAKTDRIDARSLATILSLGNYKPLSIPDPVIDNLRELTRFRADMVKDRTALVNQLHGALSTLFPEFAAVFSRLDSPTSLALLIAYPGPDYICRAGEAKVGEILANVSRGRMGKSLAKAVVEAARSSVGAPQRQPALAIKVSILGERITDLAAAIEKVEKEIAQLFKNLPYDPKDFPVGDVVSLSTIISEIEDIHRFPTLKQFLSHFGWCPQSFQTGNYRLEHPRMSHAGNKYVRRVIWMLSIGAVRSVPRYRAYFQRRVEAGKSKMHTLVAVGRKLLSAFYAILKRGIPYNPNWEVNRHFALARS

SEQ ID NO: 99658 - protein, 386 aa, unidentified
MATPTTPRMTQDSLSQSTLYLAFELGKNTWKLGFTIGMAQQPRERTIPAGALETLQKEITRAKQRFGLPEDACVVSCYEAGRDGFWLHRYLAAHGVTNHVIDSASIEVNRRQRRAKTDRLDVHKLLTMLLRHMAGERKVWSVVRVPSVEEEDRRQLHRELTTAKCDRTRLSNRIKGLLAGHGVRLVLQGDVDAQLDQLHQWDGSPLPPALLSRLKRAWQQVCFLTAHIQTLEAQRRAVLRRREDAVVDQVRQLFTLRGIGVNSAWLYVMEFFAWRDFQTPKQVGALAGLTPTPSQSGQSRRELGIAKAGNRHMRAMAIEIAWAWRRFQPTSALSQWYEQRFGHGSARLRKIGIVALARKLLIALWRFLKTGVLPEGAVLKAETLGQ

SEQ ID NO: 99659 - protein, 337 aa, unidentified
MEYFAGLDVSMAETQVCVVTRDGAVIHKAKVPSTPADIAAELAQVPACRRIVFETGRMAPMLYHGLRQFGLPVVCVESRQAYQALKLLATHKTDHNDARGLAHLARTGFFKPVHVKSLPAHAVRSLIIARKKLVGQRVTLENQIRGLAVVFGVRLPRALSSTFIRQALQASDGIPGLSAAIQGLAAARAAVLAAIVAIDGDIRRMVRASDACRRLMSIPGVGQLTALAFTAAVDDPGRFRRSRDIGAYLGLVPRRHQSGEIDYTGSISKCGDRRVRTLLYEAANVMLTRYKGPLKLKDWALAVARRSTMRKARIALARRLAIIMHAMLRHGTEFKPA

SEQ ID NO: 99660 - protein, 412 aa, unidentified
MSIALPNQQFVGKPYKILHNSMDSLTAAVSKIKEAEELYSLESRIFLESTGIYHYPLFCYLRDKGFNVSVINPIITKNSTNINIRKVHNDRFDSKKAALVGLKPDLKVSLMPSDLALNCRNLCREYYDLMDNRSAYVNKLQGELRMAFPQYLGIFSKVTVNTSLTLLETYTSPAAFIEADRQEIIDAIKSTALFGLTYALNKYNAIIQAANEANEFGYIIDSNIKRIRLYIGFIRKYDEEIKGILGSMHELVDANEATDFVRQIHLIETFKGAGFLSAVSLMGEIGDFSAFSKPKQLFAYFGLDPAVKQSGKFEGTKTQMSKRGSAIARRVVHTLALQSIGTSRTGEAKNPVLRDYYLKKCESKPKLVAMGAVSHKVCNMIFAILRDNKPFEIITPQEHIKKHNAAKCDIAA

SEQ ID NO: 99661 - protein, 413 aa, unidentified
MNAIYERCCGMVIHKNTIAACLIKGKKKEIRTFSTMTSSLLGLIDWLKSADCECVAMEATRPYWKPIYNLLEMEEISTLVVNVQHIKAVPGRKTDVKDSEWIADLLRHGLLNGSFIPKREQRELKELVRYRRSMVQERARELNRIQKVLEGANIKLASVISDIDGKSSRRMLDMLISGCTDVQSIADKVLRQMRKKISQIEEALRGFMGDHQKIMLRMMLKHIDILEEQVLTLDREIQARMKPVYEQVSLIDSIPGVGERSAQIIIAEIGTNMNQFPSASHLASWAGLCPGNNESAGKRKSGKTRKGSDILKATLIECAKVAGHLKNTYFSAQYKRIAARRGTNRATVAVAHTILKIAYLMLKNNASYKELGPDFFELRRKSEIVMKSVKRLETLGYTVTIEQALTPQLLVNN

SEQ ID NO: 99662 - protein, 360 aa, unidentified
MTVTTQTPTITRSGHVVIGVDTHKHVHVAAVLDPVGGILETLTIPTEAAGYRRLLEWAASFGQIIAFGIEGTGSYGISLTSCVRRAGHKVVEVNRPDRRLRRMNGKSDTLDAENAARAVLAGYATAVPKTADGSVEMIRQLKIAHDTAVKARAATMVTLKAVLVHAPDELRHAVAGKTPVMLARHLAALRPRGLATPEDASRHTLRSLARRWQYLQKEAHELEGMIEELVLATAPQLVEPFGIGVDTAAEILIVAGDNPERIHSEAALAKLAGISPIPASSGMSTGRHRINHGGHRQLNAAIYRTVIVRMRFHEPTITYVARRTAEGKSKRDIIRCLKRYVIREVYHLIRPRPTTGQVRG

SEQ ID NO: 99663 - protein, 343 aa, unidentified
MEQITTVGIDLAKNIFQVHAVDAAGRVVLQKAFRRPQLVTFLQKLPACLVGLEACGSAHHWGRFLTQSGHHVRLIPPAYVKPYVRRQKNDVADAAAICEAVTRPSMRFVPIKTEEQQAALMLHRARSLLMSQRTALICALRSHLAELGLTAPRGVRNLRLLLDVLIDETDDSLPALARAALRPLADQLASMGARIAELDHQLLAWHRANATSQRLATIPGVGPVTASALAATVADPAMFASGREFSAFLGLVPRQSSSGGKVKLGGISKMGDRYLRHLLVSGAVALLSHARTRKGPLDIWAKGLMAKNKPIKVVAVALANKMARIAWALMVRGETFRLTTHAA

SEQ ID NO: 99664 - protein, 421 aa, unidentified
MRKADTRKVKAIGDDTLIVAVDIGMEMNRGYCTTPDGRSSKTFKFDNTRAGMDTLWDMITINKNRFKCNEVIVGYESTGPYGEPMLHYLMKKPVRIVQVNPMHTKKVKEINDNSPLKTDDKDPRVIADIIRWGRALSIVIPEGDAAYLRRLNNSRERHVRERMALVNQLQQLVFLLFPEFRTVIKDIKCKTPLYLLRKYPTPETLSVLDKDVLGEEMRKRSRGKLKEHHADMLINLARNTVGIREGAAGLSMDMRHILIQLEMLTNLIAELESEMEIALGRIPYSPKLLSIKGLGVVSVAGLIGEIGDFKKFKTQSEIMKLAGLDLYEISSGKMKGQRRISKRGRSLIRKILYYTAIQTIRKDGILHDYYTRLTDGGMKRMKALIAVSRKLLGIIYAIVRDDSEYSANFESMKRQVIKKAA

SEQ ID NO: 99665 - protein, 317 aa, unidentified
MAKHTTICAGIDTGKRKLDVAIDGRAERLQVNNTADGHEKLIEWLRQHRVKRIGIEASGGYERAVVAALRRKRFVVVVFQPAQVRAYAAFHLQRAKNDKIDAALIASCTAAVKKIHAPPDPRLEPFADHLTMIDQISEDIARLKTRREPCRDPRIRQLWKEEIARLKKLEKTELKSLATAIRQHRDLAQRLDLIHSIDGIGLRTAVAILVRMPEIGRITREQAAALAGLAPYDDDSGNLVGVRHIAGGRERLRHALYAAAFAAAFHWNTQLIALYERLTRAGKLHKVVLIACARKLLIFANTVVARGTPWTTHAATA

SEQ ID NO: 99666 - protein, 379 aa, unidentified
MLVYHNSGLLRPSAPLKTLGERNEKSRNQIRRNRLWKKTLEVIRIGDNSLHQRQQFSTTEIGISKLINWLNPNDVVGLEAGSQSFRIAKSILNKGVQVIVLNPGNLATIYQSLKKTDKEDSLKIARLIQRFPIEELPVVPIPNDEEEDNRRLCTEQENWTRQLTQSKNRLHSLFTQAGLTHITKKHLRTKANREISVALLPSRYQKEAERILKVLDLVEQNLKLIEEEIQEALKKNKAYAQTIMSMPGIGMITSLAIMSYMGNCKRFSSAKQAAYYVGLVPRVDISGDSAYYGRIVNRGCHSIRRVIVQAAWSLVRCQYGGKIKEFYQRLYPKKGAKKSIIATSRKMIEILYTMIKTGELFDSMPEKVLNRKLTQYGLM

SEQ ID NO: 99667 - protein, 345 aa, unidentified
MQITTVGLDPAKRVFQIHAVDASGDVVVCKALRRSQVLPFFTKLPPCLVGMEVCGTSHHWARELTELGHEVRLMPPAYVKPYVKRGKNDAVDAEAICEAVTRPTLRFVAMKSAEQQAALSLHRTRNLLVKQRTQLVNMIRGLLAEFGIDIPQGLERALGLARQIAAKQVTPEVPAMATQILGLLSGQVLDTHVRLQAIDRSIIALQRSDDMARRLSTIPGIGPVGATTLAASVADPGQFRSGREFAAWLGLTPSQNSSGGKDRLGRITKMGDRYLRKLLVIGATSLIRRARYKPETADPRLVALLARKPARVASVAMANKMARVVWAIMARGETYQARHAPQQAA

SEQ ID NO: 99668 - protein, 367 aa, unidentified
MKKVSTVGAKPSKKISQQKLTVGLDLGDRNSWYCILDESGQIQLEQRVRSNAKALREVFGQLPHSRIALEVGTHSPWISRLLSELGHEVIVANARKVRLIGESRKKDDRLDAQTLARLARIDPGFLSPVKHRSAQAQADLMMIRARAGLVRARTALVNTVRGLAKSYGERLRGCNVRNMNPEKADGLSPELQSALEPLLAGIEELSEQIREYNERIEKLAQESYPQVALLRQIKGVGTLIALTFLLTLEDPHRFRKSRDVGCYLGLQPGRRNSGQSEPQLHISKEGDPYLRTLLVQGAQHILGPFGVDCDLRRWGLKLAERGGRNGKKRAIVATARKLAVLLHHLWVSGEAYEPLHNSRRTAVAAAA

SEQ ID NO: 99669 - protein, 328 aa, unidentified
MCTLGIDVSKNKIDLCLLTAGPGGKKKHKVLTNEPAVARKVVDWLNAQKCVPESVTVVLEATGIYHENLAYGLHEAGVSVCMANPCRVREFAHGMDILNKNDAVDAFVLACYGELKSPAVWVPPSPEVRKLRALLRQRDALREDVQRTVNRLEKANSTSTPQEVIRSLERTKSWLSEELARIEKLITDHTDNDPGLKADLDLLKSIKGVKDQVGREMLALLKDGMFKSASQVAAYLGLTPVEKTSGSSVRGRPHMSKTGPSGVRAKLYVAALTASRWNKQAKAIYERLVAKGKAKKAALGAVMRKLVHLCFGVLKTRLPWDENYVATA

SEQ ID NO: 99670 - protein, 471 aa, unidentified
MKKRRFVMAVLNIGVDLGVTTKHHAEVKNGEGIEVCSSVTFAGTKEGFDMLSKHVLKHVDKEAKLRFICEPTSMSWFPLAVYAKRNGHEMMRVKAQKSHDLRKYYSRHSKSDKLDAKALAMMPIVDRESIEEVYLPDKVTNALDRRCRQREKISKEIASIKIRIKSLYHWVMPGLTDCFEDAYGERAKAFYKKYTNPFNVKHLGTSRLRRVLEKAGRQQTTEALAERVYEAAIKGCELYDHCGEYIDFDELQKEVECELQLLESHEKVQKKVDEAINRLYKRAHPTKNLETIPGIGETLGPVFVGIIGNSDRFSSQSKARGYSGMIPKQKDSGESSKKGLNITKDGPSRYRRALYLASDTGRQWDPQLAKIYYDQMVYKGNCHTQAVCAVSTHLIGRIVRVLKDKRPYKLQDLNGKPITKKEAKLLIMREFNVPEEVRKQTRSRRTKKGYKRDQNRDIAKMQSSRSAQYPS

SEQ ID NO: 99671 - protein, 427 aa, unidentified
MNFTQNEKLKQLSERSIVIGVDIASELHYARAFDWRGVELGKVFKFENSAEGFKNLYAWIERIKRQAQKDSIVVGAEPTGHYWFGLASYLKEQNIKLVLVNPFHVKRSKELDDNHPSKTDAKDPKTIAKLVIEGRYNEPYIPEGLYAELRIAVTCRVRIQKEMNSIKNRIQRWLKIYFPEHETVFGKFDATSSMLVLQVAPLPRDIERLGVEGINRIWRDNKLRAVGMKRAKSLYEAAQKSIGCTEGESCSRMEIQLLLQDYHTKTAQYQAVTETIDGLCRQIPEVAKLLEIKGVGLVTVAGFLSEVGDIKRFNSPKQIQKLAGLALRESSSGKHKGQTTISKRGRARLRAILFQAVMPLVAKNAEFAEIHNYYTTRTQNPLKKKQSLIALSCKLIRVFYAILTKGTDYDPKKLIMDIHRPVEYLAA

SEQ ID NO: 99672 - protein, 364 aa, unidentified
MFHFTTLFIGMDVHKESFLLCYYDMMANQFKHSTKVGPNVSYIVNYVNELRRLYGQDAEVLCGYEAECLGFTLYHQLQAHGIPCIVMAPTTVMKEGSKRVKTDKKDAAQLAKALAFRSYRPVHIPTAEDEQVKEYIRMRTDHKVAMKKIKQQLLAFCLRHDFRYTEGRNNWTQKHVRWLHSLNPKGLYAEILTEYLLTYEKLVDQIARYDARIEQLGQSDSYQEEVSQLSCFIGVKTLTALSIVTEIGDFNRFATAQHSASYLGLTPSENSSGDKERRGAITKAGNSHVRRLLIEAAQSLAKGTIGYKSKELKRRQSGNRVEVIAYADKANERLRRRYRTLVLGKNKKQNVAKVAIARELSGFI

SEQ ID NO: 99673 - protein, 341 aa, unidentified
MKLIRVGVDLAKNVFQVHGVDRNEKAVWRRKLARESWIKVLLETAAPSCEIGMEACGGAHHWARLLQAHGFKVRLVAPQFVKPYVKSNKNDANDAEAICEAMSRPHMRFVSVKTVEQQDIQAVHRIRAELTKQRTAKANQIRGLVAEYGLVAPKELMHLRRALPCWLEDAENGLSARFRRLLNGLWGDLRTLDERMAELDREIAVIAQNDPAAKRLQQLRGVGPIIATALVAAVGNGEQFANGRQMSAAFGLTPRQHSSGGKERLLGISKRGDAYLRVLLIHGARSVIHHSKGKDDRLSQWVTRLAARSHTNVAAVAMANKTTRMAWAMLKNGTDYQPATS

SEQ ID NO: 99674 - protein, 344 aa, unidentified
MQIAVIGLDLAKNVFQVHGIDDSGHAVLKRKLTRSEVPPFFAGLAPALVGIEACHTAHYWGREIAALGHDVRLMPPQFVKPYVKSQKNDAADAEAIAEAVQRPTMRFVPIKSADQQAVLMLHRTRDLLIRQRSSLISAIRAHFAEFGIVVGQGIRNVERLLALLETAGDQRLPGLAAEMLSILAAQLRYVAAQVKEVEVKLLAWHRANETSRRLQSVPGLGPITASAIVATVGDPKQFKSGRQFAAWLGLVPQQRSSGSKERLGGISKRGDGYIRRLLVHGARAIVGWRKRSATHKTPWIERLLARRPTNVATVAYANKLARIAWAIMMHGNRYNPALAFATIP

SEQ ID NO: 99675 - protein, 348 aa, unidentified
MENVCRIGMDTSKHFFQLHGVNAAEEPIVRKKLRRKDMVTFFEKLAPTVVAIEACGGSHHWARLLSSFGHQVKLIAPQLVKPYVKRGKNDAADAEALCEAMSRPAMRFVPVKTAEQQAAVMLVGIRDRLIRNRTQLANSIRGYASEFGVTAAKGMAHLGPLFERIRAEESLPDLARELFASQAKEYEQLQVQIDEVDAKLKAWHHANECSRRLAQIPGVGPIGAALLLMKTPAPEMFRSGRQFAAWIGLTPKDHSTGGKVRLGVITRAGDQALRSVLVVGATALLRFVVNGKSKSALSPWLEQLLKRKPAKLVAVALANKLARIAWKLMVTGQSYVRKSAPVSAAGVA

SEQ ID NO: 99676 - protein, 404 aa, unidentified
MIFVGIDWSERHHDICVVDADGTQLARARVPEGIDGVGKLHGLLARHAQEPEEVIVGIEIDRGLLVGALVAAGYQVFAINPLSVDRYRDRHSTSGAKSDPGDAKVLADLVRTDRHNHRPVAGDSELASEIKLLARTHQSFVWERQRHVNRLRSALREFYPQALEAFGTDLASTDAIAVLQAAPTPELGRRLSRSKIAAGLRRGGRQRNVGVRAEQIQLALRSEQLRATEGLERTYGVITSSLLDLIAGLNTQIAGLERDLHRSFERHPGAEIILSQPGLGSTLGARVLGEFGDDPTRYGDARARRNYAGTSPITKASGTRRVVLARFARNERLHDACHLWAFTSLTKSPGARRYYDSQRERGKTHNQALRALGNRLVGILHGCLKHGEHYREDIAWRTREAKAA

SEQ ID NO: 99677 - protein, 479 aa, unidentified
MAVGRMNRKQRKELTRQLRSEDPGLDVVHPRAAGIDVGNGAHYVAVRPDQDREPVRRFECFTADLHRLADWLQACGVATVAMQSTGVYWIPLYEILEERGLEVYLVNARHTKNLPGRKSDVQESQWLLKLHTYGLLNNSFQPTAEIRTVRTYWRQRAEHVRAASTCIQRMQKVLTQMNVQLANVISDLSGLTGQTIVRTILAGERDPKKLAELSHPRIQASREEIAKSLEGNWRPELLFVLKQEVEMYDIYQQRIGECDRELKAHLKRFADNVHRKPAEAGPVSEEQKDKKVPAKLPRSGKRAQGNAPCFDLRSELYRISGVDLTRIDSINVVVAQTVISEVGLDMSRWNTEAHFASWLGLCPDNRISGDKVLSKGTRHVINRAATALRMAATTLLRSRSYLGAQYRRLRARLGAPKAITAMAHKLARIVYRMLKYGQDYVDKGMQYYEDRHRRQQIELLQKSAAKLGLQIVEIQAVGG

SEQ ID NO: 99678 - protein, 415 aa, unidentified
MSSFFIGLDVDSKKFVSFITDEMGNTISKPKSFPNSPSGAQSFLLFLLELISKSPQPISSILIGTESTSIYDWHLANFLSESEELSSFSTKVYRLNALRLNRFRKSLSEFNKTDKTDAEAIANYLRLSKSLPSPHVPNDPYSSLKTLTRYRYHLVKTIIREINTFLSYLFLQYSAIVQTKPMKPLIGHTISTLLSSFSPEQLVSLSLTELASLISKESKNRCSEPQKISQLIQKAVRESYRLRPELSRTLTFILANLVRTIRALRNNLKEINKAVSEELKSFPNTLTTIPGVGEILAAGIIAEIGNIKKFQSHNQLAKLAGFVWPEYQTGNFTAQDKRMPKSSNKYLRYYLTEAANGVRKYDSVFSEYYWKKYQETRTHQHKRALALTTRKFIRLVFNILSTNLPYQPKRSNAYA

SEQ ID NO: 99679 - protein, 418 aa, unidentified
MTFNKTEKVKTINKKTLVAALDIGKKVHYGYFRAPSGKDFQPFAFYNTRNGFDKFWERLCRFKEKQMLEEIIIGFESTGPYAEPICHYLRHKSVKLVQVNPMHTKRIKELTGNSPNKTDKKDPRVIADVMSLGHSLTVIVPEGAAAHLRRLTQARERAIEQRTAMSNQLQHLVFLIFPELVHIIKPSTKTGMYLIKHYSDPKKLLFVGIDKLNAIIKKVSRGRLGTDRAEQLHGAAKKSVGITEGKESILFEITHLVSKIESENHYVEDLEKQMGDYLEKIPNSHSILSIAGIGHVTAAGLIGEVGDFRKFKTISEVLKLAGLDLYEISSGAHQGCRRISKRGRALMRKLLYFAAINTTRKNGILHGSYQRHLAKGMPKIKALMAIARKLIGIIFALVRDHSNYIADYSSQLVFKKAA

SEQ ID NO: 99680 - protein, 473 aa, unidentified
MLWTTVDLEHSFVRVSQKVSVRWGAATGPVDCCYEHASQTLILDVPLPLSTPSTVGKEPTMEVLHPRCAGLDLSKRDAKVCIRIVPTGRARAVEEVSTWSSMTGDILALRDRLIASQVTCVVMEATGDYWKPFYYLLEDGPFEVMLVNAHDAKNLPGRKTDVSDAAWLAQLAAHGLLRASFVPPEPIRELRDLTRTRTAITRERTREAQRLEKVLEDAGIKLSVVASDITGTSGRAMLAALVAGERDPAVLADLSIGHLRLKIPALNQALVGRFTAHHAFLVDLHLKLIDQHTAAINVLTARIEEAMIPFRAARELIASIPGIGVPTADVIIAETGADMSVFPTAGQLASWAGVCPGHHESAGRSKSSKTRPGNRWLKGALGVAALSIARHPGTFLNAKYRRLAKTRGNARAVVAIEHTLLVLVWNLLTTGAFYQEAGPDYYTRRDPQRAKNHAIHQLQALGYDVTLAPRGAA

SEQ ID NO: 99681 - protein, 320 aa, unidentified
MNTTTVASLRNKERHIGIDVGKSFLDLYIFELDLHWQEENNPEGIKRLITALRRYKLTRVLVEATGGYERSFVEACAEKSLPVIIVQPIQVRQFAKAQGILAKTDKIDARLIAMFGKVLQPEVRPLPDKKVRLIRDLLARKRQLNETRTQELNRQHKAPKVLAASHKRLIKILDKEIAWVNDKLTQQVSEITEWQRTVEILRSVPGVGDGVAFTLLGELPELGKLSNRQVAALCGLAPFNRDSGQMKGKRRIKGGRAPIRTVLYMAMLSAIQHNPVMKKFYEKLVAQGKHKKVAITACMRKMMTILNTMVRNNQEWQMNH

SEQ ID NO: 99682 - protein, 435 aa, unidentified
MSIDKIERFVCCGMDVHKDILVATIGITDRSTLITQYVQETFNSFNSDLYRLCDWLASHHCSEVCMESTGKYWIPVYNVLEEKGFTVCLAHPKYTKAIKGKKTDKKDSKWICDLYKHDLVRGSFIPPKEIRELRDIARYYYKLIGMNSSESKRYQNCLTVSNLGIGSIFTDVNGKSATRVMEAVLAADDPNDISDEDLLKLVHKSCKKKDQLLDAVRGCRIESDQRFKMREIQKHKEELDQHLTACFAEMIKRATPFFHQFLHIVEIVGISLLSAILIISEIGVDMTVWEDARHLCSWAGLTPGNNESANKKKSTRITKAGQYLKPLLVQCALCATKNPNGYFGIKYRRIKKRRGHKKAIIAIARMMLICIYHMILTGESFKPSDYDELMNPKPRKPRELTIESAVDFLKSSGTDIDAIIASLREGPPDQITVQS

SEQ ID NO: 99683 - protein, 432 aa, unidentified
MKHNQSSKQNQRISRISETTLVIGTDIAKHNHVARAFNYRGIELGKRCLFQNDENGLLNLLAWAESIKQEQGLTDVLLGVEPTGHYWFPLFHFLKQRGVEVVLVNPHHVKKSKELDDNSPTKNDIKDAKVVAKLVIDGRYTQPQLPEGVYADLRVLMNQRDRLCGDLNRVKGRIHNWLDRFFPEYRQVFKDWEGKASLITLTHFPLPKDVVAAGETTIVAIWKKNGVKRAVGPKRAELLYRKAQKSIGLTEGATAAKHELAMYLEQYAMLCRQIEQLMEHVAALVEQIPGASHMMSIPCIGLVTVAGFLAEVGDLSGYDHSQQIVRHAGLSLRENSSGLHKGETTISKRGRCRLRALLYRAALTMVAKNPEFRALHVYFTTRRKNPLKKKQSMIALCNKLIRVLFELGRKQKNYDSSKVLGPHREAQFQAAA

SEQ ID NO: 99684 - protein, 460 aa, unidentified
MTLLAQLGIPLPSRYYLSIDVGYKEHVAVVISLQTFARGDDRWKRARCVHFPSTHSGLKKLQQYLDRFCSDPAAFLGLCEPTGGFYGATVFQYLLDRGYRMLLVDNATTRHMREKIFPHMPKTDEMDARVMARIGYLHEAVGEEFTLCPLELPDPDSAHLLALCRDSWKLSTTINRARNQFTQLMAVTFPELKTFFTSSVSTVAPVSLIAAYPTPALLATAPPEEVRQVLEQAGDYRHIHRVEELQVLARNSSGLPPDPGRAWRMRWVTDFLLTNFRHQAALDKRIKELVEEWEGYERIAQVPYSSPITLGVILAVTGDVSRFSNYRKYVAYTGYFAGLETSQTIDRTRMSKRGNRDLKRALFQIAAPLVWFDQGDNPYKELYQRKQAEGREWYKAMPFVCAALARHIYHCLKFKDPYRAEKAFQGSSPLPVSEQVLVDLRSDFDERFEVMEAYLCQIGG

SEQ ID NO: 99685 - protein, 459 aa, unidentified
MAKKSLKQRGNSKFKQPLRVLNPNAAGIDIGAKEHYVAVPADRDEQPVRCFKAFTQDLHALARWLKQCSVTTVAMESTGVYWIPLYQLLQDYGFEVKLVNARHVKHVPGRKSDVQDCQWLQQLESFGLLTASFRPEGKICVLRSYMRQREQLIRSAARPVQQMQKALAQMNLKLQHVISDLTGVTGITIMRAIIGGEREPLKLAALKDRRIKSDTATIAKSLEGDYRAEHLFVLRQALGLYDYYQQQIAECDAAIHKAMKTLETRAAAPLPTGKRKRPSRHNPFNFDAQNELHRVIGVDLTNINGISEATAQLVLSELGLDIVNKWPTEAQFTSWLGLCPNNEVSGGKVLRRGTRKVVNRVANALRLCAESLLQSKSALGAYARRMRARRGTPLAITATAHKLARLIYRTLKYGEEYVDFGQQLYEEKYKTNLLKSLTRTARKLGYELVMQPSSPDVVP

SEQ ID NO: 99686 - protein, 356 aa, unidentified
MAKTKILARERRIALGLDVDREAAVVMALDVSNGEILFQGRLTQETEDWQRFLAHFPGCDLWACYEAGYTGFHLCRMLREQGVDCHVVAPSQVPKSANSKQQKTDRRDALILAQLYFHPPRSFVRIPTEREERDRQLLRTREQMVRDKTRTQNRIKALLAFHHLAWPRSESSGYWSQADRHALREMTLPDPLRVCLDTHLDMLEGLSVQIRSFNQQIIALSRTEAYHDRCARLRQLPGVGLLTAMAFLLEVFRPEEFLTAEALACHVGLTCCEWSSAQRRRQGHITHWGSPILRRMLVEAAWSWVRKDPDAKRRFEAISVSSKRKKIAIVGMARRLAIVMWAMTVKQEDYAYRWAA

SEQ ID NO: 99687 - protein, 412 aa, unidentified
MLKIVYPICCGIDVHKKFLVACIAFTNDKGVTTYKSRRFSTFTNNLRKLSEWLSSNSCTHVCMESTGKYWVPVYNILEATCKITLAHPKYVKAIRGKKTDKKDAKWIADLFKHDLVAGSFMPPLPIRQLRDLMRYRFKLTNFSSSEKNRIQNCLTVSNIQLANVVSDTFGKSSMRIIDYLLENPDDKDFDFVPLLHPSMLDKVDKIRLALDGIITPEQQQKMNIILQHYDGLEKCKSNLESLILSLSEPYAKERTLVSTVPGIKNPFSAIAIISEIGADMSVFPTAKHLCSWAGVTPQNNESAGKKHSVRISRAGVYIKPLLVQCANAVVKSDKHPEIKGRYLSIKKRRGHKRAIIAIARMLLTAIYHILKKGEPYNPELYKKAEPFPASREITVEQAILIARRHGYSVVKD

SEQ ID NO: 99688 - protein, 451 aa, unidentified
MSLEVVNPNAGGIDVGSKSHWVAIGQDAQDIREFGVYSQDNQELCKWLSENGIKSIAMESTGTYWQNLFSALTAAGFEVILVNGRQTKNVKGKKTDIKDCQWIQKLHSLGLLSHSFLADSTTEVIRTYSRHRQNLIQQSGRTVLKVQKYLRLMNMRLDVVVNDVVGLTGTKIVSAFIAGETSGKKLAQYRHYNCRKPENEIAKALQYNGRADYLFALKQEWETYLHIQKQITEVDTQIKKLLEDIINKHDNKKQHISNKKPYKRKNKNTIRATDMNQISYKYFEGIDLMEIEGVNDATIMTIISEIGFNGIKKFDSAKQFTAWLRLAPNNKISGGKVLAHHIPKGSSRMKIALRNAANAIGNLKEGHLADFFRRINYKKGRATAINATARKLAVIIWNMLVKEQNYNPPTQYKFLDEKRRLGIVKRLKKQITKFEIKAEQLGFATSSLSGL

SEQ ID NO: 99689 - protein, 400 aa, unidentified
MSLDPHEKPAAIQTHIGAIFISLELSRSKWLITSLVPGGGQRMSRHSVEPGDLAGLLARFWAIRDKASARTGISYPIIVIQEAGLDGFWLHRALEQEGIESHVVDAASIAVSRRRRRAKTDKIDGEALLRVLLAFKRGEPRVCSMARAPTPEAEDRRRIGRERKTLIVERVRHVNRIKGLLFSQGIGDYKPLRRDRREALEAVRAGDGRALGAHMKAQIGRELDRLELLLGQIAAVEAERDALLARQAEAETEAARGAQGAPARIQMLMNLKCLGPDTVAMLWTEAFYRSFDNRRQLAAFVGLAGTPWQSGSIDNEQGVSKGGNHRLRTAMIELAWLWPRHQPGSALTRWFRERTKGASKLQKKKMVVALARKLLVALWRYVDAGVVIEGAVLKSAAKAN

SEQ ID NO: 99690 - protein, 352 aa, unidentified
MAVYIGVDLHVRTQTVCWLDTGDGEQHEVTLDHERDDVRAFFSRFAAPALIGVEASGYSLWFHRILEELGHRLLVGDALAIRQFARRRQKNDRRDAQLLLDLLCHNDFPIVHIPSPASREVLALLRYRHRLVRIRTMLRNGLQAVALSHRLRLGPKLFTQRGQQRFAALPLTGAFAVQRQHSLLLLASLAEQILAVEAELALRAQSDPRVQLVRTHPGVGLLTSLAVVHVLDPVSRFDRARRVAAYCGLDPKERSSGDTQRFGHISKQGNRLLRFLLIEAAHTAIRDDDELRGFYFHLTAKKNSSIAIVAVARKLVLRLYSMLRDDIDYDQFRRRGRDARRARENTSQAASG

SEQ ID NO: 99691 - protein, 379 aa, unidentified
MDPANSDTPAETILHGALELSKNSWLLALQFPDRVQPSLYPIGGGDAVGLIAKLMAARDRWAKVSGKAPSIVLCYEAGYDAFWLARFLKARGIECLVVDAASMRVNRRARRAKTDRIDVGMLLRALIAWGQGDRHVWSVVRVPSVDEEDLRRSHRERDRLVRERTAHINRIKGLLFGQGIRGINVKTKYKTLQIDKLVTGDGGPLPPRLASEITREIARLALIQEQIAALERERDQAPTPCKATEKKRLQLMCLTGIGPAIAAVMTREVYYRQFDNRRQVAGFLGLATSPHDSGDVERSQGISRAGRGQVRGIMIQAAWLWLKHQPKSAITRWFVQRTAGQSARIRRIMIVAVARKLAIALWRFLEQGLVPQGAMLANR

SEQ ID NO: 99692 - protein, 392 aa, unidentified
MNRIVYIGMDVHTSNYTLCSLDPGYGVEKDNYFAEVQFTNNFVTNVVNYVSNLKKKLKDCEFVCGYEAGCLGYSTYKDLTKVGIKCVIMAPSTMAVQKGGKKVKNDRRDARVIAQCLAYQTYKEVYVLSEHDEAVRGYLRMRDSHNKALKRIKQQIIAFCTGHGLFSPTKSNWTVAHLKWLKDLKFNDPVEQEILNEYLSSLTFLSDKIKAMDVRIEELASEKQYCENVKKLRCIKGIETNVALTLLAEIGDFNRFSKPTDFAAYLGLIPGEQSSGDKVRGTGITKAGNSTLRRKLTESAKGYWRGRIGIKSATFKKLEKELPKEVTEYALKANTGLQRKFFNMTHVKGKNMNVAASACAREMACFVWGLITNHYEKAPTVPKTDEELLDLN

SEQ ID NO: 99693 - protein, 319 aa, unidentified
MMSVYVGIDVSKQTLDVATYPIAQSLHVSNTATGHQQLHKWLQQHDEVVQIALEATGRYGEAVRDFLVAEGYAVSYLNPRQIHAFAQIELHHHKTDRQDAQLIARYCALFEPDLYRPRPTLRKRLQQRSRRLDQLKKMRQQEINRLQSGLQDTFVREQIETVIAYFDSLIQQTQQAIHTMIASDDALTAQQRLLCSIPGIGKTTADLILAEIDIDNFDDARQLAAYIGITPQHFESGTSVKKRAAISKQGNARLRCGLYMPAIVAKRYNPACQRLAARLTDKRKHGKVIVIAVMRKLVHQVYGILNSGRPFDPNFEQIA

SEQ ID NO: 99694 - protein, 431 aa, unidentified
MMAQNEVVVVGIDVAKDKVDACIRAFKLRQTWLSTARGHRKLVAWLRKHQVNKAVMEASGGYERDWARVLREAGIEVRIVDPKRVRSFALSAGRLAKNDAIDAEMIAWFAETFSEAPGQPHDAAREELQALVKARLDLIDFRMRLVSRSEHAAPGLVQKAHAHILKSLASEIAKLEAAISAKIKSTPDFAERAEIIESVPGFAQTSSANLVAGMPELGQVSDEIAAALIGVAPYDDDSGKRRGERHIKGGRRWVRNAIYMPCVGAATQNNPVLKAYYQRLLAKGKEPKVHHRLHAQADRHPQHHDRTTAEMGSQPLCAELTERTPTALGPRPSACKANGPVNGRGQGRSRRRRGRVSASLEAGRSPGYFGTVALISGGREFKHNSGATRREDEKPCPSTSLRAQRSNPFSPRMRTDGLLRFARNDERQCLQ

SEQ ID NO: 99695 - protein, 425 aa, unidentified
MSERDYNRQVVKRERINRATLVVGVDVGNAWNAVGFMDKEGNVLGSCAKLYNSREGFEQFVKMTEGFKERQGMKDVLIGLEPTGHYWRKLAYFAQDQGYEVRFVRTTALKHHRELDESSSAKSDKRDALTIANITREGKYIDTVIEDGVVRQLRTLSKLRERLLRYSVGAKNALHAALDDYFPELHEIFWSMNSRSLWAILDRCPFPEDMVLMKRSILRELIACSSRKKAGADQKAKALYQAAKKSIGVKRIGSADRYRVKICLQEVKRTVLMLKDIDRQMKSVLKEIPSSEYLLSIPGIGPLSAAIFLGELGDPAYFQNARQIVKYAGYDPQESDSGYRVSRKFISKKGRWLFRKCLFFISMRVVVLTNYFQEYYQRKLQTKNRVGQLPRRKKILCAVAIKLIKVIFALLRDKRRFQDTGTVAA

SEQ ID NO: 99696 - protein, 350 aa, unidentified
MSISTTLPCVVTFAGIDYHKKFSVVTLGDQAGKTVTTQRLPNDAHAIRTFFNDFPNIQCAVESCRGYEWFVDLLKEIGLTVHLANPYEVALIARSRCKTDKVDSRILMELLVMGFLPVCYQPTAEERRLRERLRWRCHLVRNATRIKLRIHSLIDKENLGPNVSRSMFVGEGRKLLEQTELKAPGRQELMKKHLKLLKHIEEVVDAEDAWVKKAVKTNSDAQLLKTIPGVGDFSALLILAEVGSISRFKRSAQLVNFAGLVPSVRQSSNSKFTGPITKQGSPILRWILVQDAWRAIRTCQPLRHFYMNVSKRCGRNGAIIATARKLLEIVFRVLKDQTPFDATRIGKQPA

SEQ ID NO: 99697 - protein, 354 aa, unidentified
MAEALADAIAFVGIDIGKNSFHVVGLDRSGAIVLRQKWSRGQVEVRFANMLPCLVGMEACVGVHHLSRRLKALGHDARLMPAKYVRPYSKGQKNDFRDAEAIAEAVQRPTMKFVATKTADQLDLQALHRVRERLVSQRTGIINQIRAFLLERSIAVRQGIRFLRAELPRILAMPPDVLSPRMVRIVEDLACDWRRLDERVEGLSNEIETIARQDAGCERLMSVPGIGPIISSAMVAAIGAGDVFTKGRDFAAWLGLVPKQISTGDRTILGKVSRRGNRYLRVLFVQAAWVVLIKPKIWERHGLKPWLEAARKRLHHNVLAIALANKLARIAWSVLARGRAFEVRKINQAAPQPT

SEQ ID NO: 99698 - protein, 318 aa, unidentified
MLDPESGQLVEERFLADRESLARWAEPWRGRVAAVAIEATTGWRWVWRELAGMGFEVRLVEPVQARGLLGRRRSAKTDRLDARWLARLLAKEMLPESWIPPAEIQELRDRTRLRKALSEDRRRWGQRLHAFLLHEGWPCTRSNLLRPPGLRWAASLRLPAHARLQVDSLIAVMAALEAQLETVDAELRRFAHGDERCQALQSIYGVGPIIACHLLAEIGEARRFRRPEQITRLAGLDPMVEESGESRRRGKLAKAGSPHLRWALVEAAVHAHRPTAPDLALYRATRERQHTAAARLTVARKIGKRAFHALRELELAAA

SEQ ID NO: 99699 - protein, 418 aa, unidentified
MEVLRERCAALDISKRDVKACVRVPSPHRKGARSQEVRTFASMTNALLQLREWLISERVSVVTMEATGDYWKPVYYLLEDAGFELMLVNARDAKGLPGRKTDVSDSAWLCQLTECGLLRASLVPPEPIRRLRDLTRYRTTTTRERNREAQRLEKALEDACVKLSVVATDILGVSGRAMMQALIDGEHDPEILAGLAKQKLRLKHDALVEALAGRFNDHHAFLCGIILRRIDELTAVIEEVTSRIDAELVPFDDAVEHLVTVPGIDRKGAAVIIAETGGDMSRFRTAAHLASWAGVCPGSHESGGVRKSGTRRNGNKALGAALGTAAMGAARTKNSYLRERYYRLAARRGKQRAIVAIEHSLLTAIWHMLVNNIDYHELGPDHFTRREPAHVMRRITKQANALGFTVRFDPLPETAGAS

SEQ ID NO: 99700 - protein, 324 aa, unidentified
MIKTVIGIDISKSTFDVALLKNEKIKTKKFTNNSNGFAELKKWLTNNEASDVHACMEATGCYGTKLAEYLYVNNFMVSVVNPARIKGFSQSKLCRVKTDKADCQLIAQFCQMIQPDPWKPTDQHIQKLKEWVHRLDILLSNKLQEGNRIEGSSPEVVADIQAHIEFIDERIKKTQALISNHIQQHEDLNDNYKLLATIPGIGDKTISVILASLSNIEDFDSAKQVAAFIGLNPKHRQSGSSLNMTSKISKTGDAKLRKAFYMPALVSIRYNPIINEFSQRLTEAGKPKMVVLIAAMRKLIHIIYGVLKNKTPFNENIMKKVIDV

SEQ ID NO: 99701 - protein, 403 aa, unidentified
MQHVIAFDVSMGKSYMVIYNAQKQCIFEREINHSKPDFEELRKRIDQLMNENKKSPHIFFEATGVYSRQLERFMQDNKFEYFLLNPLEAKLQCDSLRIHKTDRSDAHQLALTHFTASRREKTGTDNLFYQLKSLSRFYNELDDELSLIRSRMHKVIQLTFPELEQIFITKSDLFLNFVQLFPHPDFVQNLSKTVMKNQIRKNTNKNISIRIAEKKAMEVLEAARYSYPAVRQDDVLCEQLKSYAKRYQELLHQKEQCITKMVRLAESRAEYPIILSFPGIGPNTAIRLLAEIGDITRFKNNKQLNAFAGIDIRRFQSGKTVFKDKINKRGNKHLRKLLFLIIQNMIKLRRYGQNHIAEYYDKLKTQPYNKCHKVASIACVNKLLKLLFYLITHNIHYDYRLTA

SEQ ID NO: 99702 - protein, 416 aa, unidentified
MDVLHPRCAGLDVHKRTVVAAARLVEDGKVNMEVRTFETTTAGLMALAEWLSNRAVTSVAMEATGVYWKPVWHILSSVGGFELVLANALHVKAVPGRKRDVSDAAWIADLQAHGLIRASFVPPREVGELRSLMRTRKQLVRERTSHTQRIQKTLEEANIKLDSVISDVLGQSGRAMLEAMIAGESDAKRLARLANPRIKAAPETLERALDGRLGEVQRLLLRVHLAQIDAVEASIATIDRHVETHLDPFRTAVEQVVTVPGMGVRSAMAVLAETGIDMSRFPSQGQFLSWACLVPRSDESAGKRRSSRLRPGGNWLKTMMVQCAWAAVRKKGSRFAALFERLSAKRGARRAICAVAAEMLRTIYHMLKDGTCYEHKRLSLHRQATPQEEAKRLIRRLARIGYVADIKPIPTPAPSV

SEQ ID NO: 99703 - protein, 347 aa, unidentified
MKDVTTIGLDLAKHVFQAFGADVDGTPLFNRKLRRAEVLRFFERLPPCLVGMEACSSAHHWAREISAFGHDVRLLPPQYVKPFVKRGKTDAADAEAIAEAVTRKTMRFVPVKTAEQQAAVMVLRTRALLVRQRTQAINALRAHMGELGIIAPTGIANVKALAPIIRDEEDTRLPPAARFALTEIINQIEMLATQIDKLEREIVIQAKQDDEMRRLATIPGVGAIIALAVKAFVPDPAGFKSARHFAAWIGLTPKAHSSGGKERLGRISKMGNPVLRSLLTTGAASVLRHVQYRDRVWPWLKNMLTRRPFKVVAVALDNKIARMIWALLTRGGVYRNPIGIEAEPVAG

SEQ ID NO: 99704 - protein, 467 aa, unidentified
MTPRKDKHFRFTHAHEPLQVKNPHAAGIDVHANDHWVAVPPDHAPPSPADQPAHLPKHIRKFGTCTADLELLADWLAACGVTTVAMESTGVYWIALFELLEQRGFHVYLVDPRQSRHAPGRPKSDVLDCQWLQRLHSYGLLTASFRPEDEVVVLRSYLRQRQMLIGYAGQHIQHMQKALEQMNVKLTEVVSDVSGVTGMLIIKAILRGERDPQRLAKYRHRTCKRTEAEIARALYGNWRTEHLFALQQAVTLYEAYQRHLRHCDEQIAACLQTFADQSKGQPLPPPPQRRKRNINGPAFDVRLALYRMTGQDLTLLEGIDESTALVLISEIGIDMSPWPTIKRFISWLGLCPQHRGSAGKIRSRHVRRGANRAARALRLAAQGCHHSKNALGAFYRRIQARGGGPKAVVATARKIAERVYRLLKYGLAYVRQGMEAYEQAYQNRVVKGLARKAKELGFQLVPTAGTT

SEQ ID NO: 99705 - protein, 408 aa, unidentified
MKRYYIGVDWGDRLHQVYVGDEEGKKVREVKVQESPEGLAEIGRWLDEKRAEGLELWAAIEKPAGRIVDFLLDHGVEVYPVNPKAVDRVRDRYRMSGSKSDPFDAYVLAEFLRTDQAHLRALRPSSEKAQELKLLSRDQRRVVRHKTRFLNQLTTTLKEYYARPLEVFEDLETEIALDFLKQYPTPAHLSALKRKEFNRFATKQHHLSKQRCEELWEELNKPQLAVPEHVVRAKAQLVEVLIEQLRASIKAVKIYNHRVESFFASSPAAEFAKTLPGAKSGTLVAAIWAELGDAQGRWESSGHLQAEAGVVPVTKASGKSRVVHFRFACNKPLRHTMYWFSFVSLNHSEWAMLYYRGQRDKGHNHHQALRALGAKWLKIIFVMWRDHKPYDENYHLANIARQKMRQAA

SEQ ID NO: 99706 - protein, 328 aa, unidentified
MCTLGIDVSKNKIDLCLLTAGPGGKKKHKVLTNEPAVAHKVIDWLNAQRCVPESVTVVLEATGIYHENLAYGLHEAGVSVCMANPCRVREFAHGMDILNKNDAVDAFVLACYGELKPPAVWVPPSPEVRKLRALLRQRDALREDVQRTVNRLEKANSTSTPQEVIRSLERTKSWLNEELARIEKLITDHTDNDPGLKADLDLLKSIKGVKDQVGREMLALLKDGMFKSASQVAAYLGLTPVEKTSGSSVRGRPHMSKTGPSGVRAKLYVAALTASRWNKQAKAIYERLVAKGKAKKAALGAVMRKLVHLCFGVLKTRLPWDENYVATA

SEQ ID NO: 99707 - protein, 330 aa, unidentified
MRILGIDLAVTAKHRAILADERGRFISPLLRFRTCQADLERVYALARQGMASEEPLAVVLEATDIVWYPVAVFFQQRGATVYLVNPRMAADLSRFYRRYAKSDRLSAQTLARLPVVNPDRLYPWVPLKPGYLALQRGCKELDRLTEQASAIRNRLQSTDHLGWPDLHQRVFADPFSPAARWFRDHFYDPRRVVAAGVSGLRQAWRAAEVYDGDEDWIEPLLTLAQEVLSLYGEQGGYLDYSALADEVRREQRRLADLEADAHFVRLQVTRPRYRQLHPSRNLETIKGVGEDGAAVYVAFVGDPDRFANHRAFRSWSGMIPSSDQSGEREG

SEQ ID NO: 99708 - protein, 337 aa, unidentified
MRFCGIDLHSNNCVVVVTDEADRVLVNRRCRNDLATILAVLAPHGAELAAVVVESTFNWYWLVDGLRTAGYEVKLANTVAMRRYDGLKHSGDEDDAAYLAHLLRLGILPTGYIHPPEQRSLRDLARKRVQLVRSRTQHVLSVENIVARERGAGLSSAAVQRLSGAAVEELGFDADVCLAVKSNVAVIAALSQQIALVEARLLEAAKLRPEFALLRSIPGIGEVLSIVIMLETGEIGRFAGAGNFASYARCVDSARYSNGKKKGEGNTRNGNAYLAWAFVEAANFARRFSAEARRFFDRKKARTNTAVATKALAHKLARACYHVLKDGKPFDVKRCFV

SEQ ID NO: 99709 - protein, 439 aa, unidentified
MKSKSSRKPNPVDPVAEEIPDAEHELVIERVAAIDVAKASGKVCVRLPGQTGRRFSRVWDVPARTGAVSELAEQLIESGVEKVTVESTSDYWRIWYYLLEAAGLDVQLVNARDVKNVPGRPKTDKLDAVWLAKLTEKGLLRPSFVPPAEIRQLRDYTRLRVDLTRERTRYWQRLEKLLEDALIKISAVASTLDTLSTRDMIEALIAGERDPGRLADLARGKMKAKRSELIAALDGRFDDHHRELARMLLDQIDTLTAQIATLTSRIEQLLAAMPDTRSRGDGGTGGDPDRPSTGHGVEPETAARFTDATLLTPVERLDEITGIGELNAQVVLAEVGLDMTRFPTPAHLVSWAKLCPRTIQSGPVTRGGRTGRGNPYLKGALGEAAAAAARTDTFLGERYRRIVKRRGKLKALVAVARSILVIVWVCPERGREFDVGRAS

SEQ ID NO: 99710 - protein, 451 aa, unidentified
MSKPQVIDDEEHERVHERVAAVDVAKDSGMVCTRLPHPSRPGARPSTVWTVKARMGAVGKLGRQLKDSGIELVTLESTSDYWRIWFFVLEACGLAVQLVNAAQAKNLPGRPKTGKLDAQWLARLTELGLLRASFVPPAAIRALRDYTRARTRLVQERTRCYQRLEKLLEGALVKLSSAASKLTTESAKDMVKAMIAGQRGPRTLAALARTRMKAKHDDLAEALDGMFDDRHGELAGLLLDQIAFLDERVTQLTARITAAVAAMPAAWGVDGDGTTGPDAGTGPDAVVLPAAARLAEIPGVSQDLARAIIAETGLDMSRFPTAAHLVSWAGLCPSARQPGPRTRAGKKSQGDTWLRGSLGQAATGAARTDTFLGERYWRIARRRGKAKAQVAVAGSILVIIWNLLKDPAARFTDLGPGYYQARTDKVKKIKNHIRQIEALLGHPITITPKAA

SEQ ID NO: 99711 - protein, 394 aa, unidentified
MLRRGLPGLAGQSLEQGGRVVGQHSRAFVGIDTSKLRNAVAVAEEGRGGDVRYLGEIDTAEAATRKLVVKLAAKYRQLTFCYEAGPTGYGLHRLIGKLGHDCIVAAPSLIPKKPGDRVKTNRRDAVGLAKLLRSGELTAVWVPDERHEAMRDLSRAREAARKDLKGKRQQVSSFMLRLGRHYPGKKTWGPAHMKWLMLQKLEHREQRIVLEELLGAVRQESERVERLEQAIRDAVPEWSLAEVVTALQAMRGIDLVAAVTVLAEIGDLSRFQTPRELMAYLGLVPSESSTGDTVNRGGITKAGNGRARRILVEAAWSYRYPPRVSREKQMKVAAAPRAVREIAWKAQMRLCGRFRSLTRRGKRPTVVATAIARELAAFIWAINREVVRSHAMAN

SEQ ID NO: 99712 - protein, 374 aa, unidentified
MKKVYIGIDTHKDTNVLGFAFEGRGKAELIGRVSADLNRTLDAIRKFMKKHKLEKEQLHICYEAGPTGFVLARRLLKLDFDCIVVAPSKIPQKPGDKVKTDRKDARKLARFHRAGELTAVHIPDLEDEVIRDVCRARTDAVNAKVRAKKQLLGFLLRNGYRYTGKSNWTEAHMRYLRELVLPTPAQKIVMEEYIQTIDTARKQVARFEEKMLELLKTWQRRELVEAVMGFKGFKEVAAMVIVAEIGDFKRFKHPKQLMGYLGLTPSEDSSGGKRRQGGITKCGNGHARWMLVECAGHYQTPPKISKALSKRQEGVSVEVRKVAWHAQNRLNKRWTKLMFRGVHFNKIRVAIARELVSYIWDAAHIVDAEPSLPL

SEQ ID NO: 99713 - protein, 318 aa, unidentified
MVIGIDVAKQELVVAARPSGGRWTVSNDDGGVQVLTERLRSDAPELIVLEATGGYELMSVTALVAAGLPVVVVNPRQVRDFARATGQLAKTDRIDAEILALFGERVRPAVRPLADADAHELAGLLARRRQLLEMLGAERNRLGQVFAGGPVVRKSLRQHIRYLEKQLGGVDGDLAALIRRTPAWRERDDLLRSVPGVGPIVSYTLVAELPELGQLSRREIAKLVGVAPLSRESGTLRGRRFVQGGRAQVRAVLYMGALVASQHNPRIRVFYRRLVAQGKPKKVALVACMRKLLTMLNAMARTGEPWSASHTATDLIPA

SEQ ID NO: 99714 - protein, 325 aa, unidentified
MAAALDPVGGLLGTREFPATAAGYAGLLGWLGKFGDVALVGVEGTGSYGAGLARYLAAHGVRVVEAGRADRQDRHRNGKSDPLDAVSAARAAQSGRAAGAPKGRDGAVEAIRALMVAKRSARHERTQAINQARALILTGPDELRARFAGHRAAALAEAVAALRPRPGDAADFAVRIALRELGRRVEFPGAQIERLDDLIIPLVTARAPGLLSLYGVGPDTAALLLIAAGDHPERLRSEAAWAHMCAVAPIPASSGKTRRHRLNRGGNREANHALWRIVITRMSAHPATRAYVQRRTAEGLSKKEIIRCLKRYVAREAYPYLRPGA

SEQ ID NO: 99715 - protein, 321 aa, unidentified
MHSIAGIDISKDHADVAFTPVGPVQRFASDPIGRRQLIQALKEARMDRVVLEATGGYERLILMEIAASGIEVVRINPRQIRDFARATGCLAKSDPIDAKIISRFGHALQPSVREVPDPELIAFQELVSRRRQIVRMQTAEKTRRKQALEDEVRSSIERMLAFLEDELAQVDRELDERVGQRADWSDRARVLREEPGVGVVTARALLIDLPELGRVSRRQIAALAGLAPIIRDTGKKRGVRKIGGGRASVRHTLYMATLVATRHHPKIKAHYLHLQRMGKCKMAALTACMRKLLVILNAKLRDYFGSQAVASPAGSIAAASS

SEQ ID NO: 99716 - protein, 396 aa, unidentified
MKDCNQLTFKLNNKKVTNMKTVLQSKDNAFNPVLYMAFELSDKKWKLGFSNGERIRLKTINAGDWSALLAEIERAKAKLNCPADARVVSCYEAGRDGFWIHRALQGEGIESRVLDSASIEVSRRKRQVKTDRIDAGALLRLLMRYVNGEKAALHVVRVPTVAEEDQRRLNRERERLLKERGAHSARIKSLLVAHGIRLTRLSELPRLLPSAKAAVTGYALPADLKAELEREYERYVLVDRQVKALEHLQRERAASVDSVAIHMIEQLRSLKGVGWQSSWVLSTEFFSWRQFKNGKQVGACAGLTPTPFDSGDSTREQGISKAGNKRIRKLMVELAWLWLRYQPHSALSQWFEQRFGSGGKRMRRIGIVALARKLLIALWRYLEHGVLPEGAVLKAI

SEQ ID NO: 99717 - protein, 353 aa, unidentified
MTVYVAVDFHAREQTIRYCDLADGEIHRAKLRHQHDDVRGFYKQFTGEVIVGFEASGYSAWFEQMLAELGHTIWLGNPAEIRRKAPRRQKNDDRDTDLMLDLLLKGDFPRVHSFSEESRTVMRQLRYRHKLVKVRTIAKNSLHAIGINAGLPLKRKLLTQEGIEQLRALQLSPVLQQQRDEWLELIALMNKQIDKIEEALQQRAKGDATVTLLRTHPGIGLLTALALRYTLDPIARFPSTRHVTAYVGLDCVEDTSSERRRMGSISKQGSRILRFLLNEAGQTAARRDPDLKRFYKRLLHRRDKPKAKVAVARKLLVRSFIMLRDQIEYAEFVRRGVAARVARETHSPKMTDL

SEQ ID NO: 99718 - protein, 353 aa, unidentified
MKSRMESKMSSPVVIGVDIGKDVFHLVGFTADGKIAFRRRIKRLALKDVFEKLPPCIVAMEACLSAHFVSRTLRALGHEPRIIPAIYVKPFVKGQKNDYNDAEAIAEAALRPNLRFVQEKSQDQLDLQACHRVRSRLVSRRTATINQIRAFLIEQGIAVRAGPRALRKSLFPILENRKDEISPRTAKLIRGLYDDWCCLDERIETVTGEIEILSRSEAKCRQLMSVPGVGPLISTAMVAAIGSGEAFERGRDFAAWLGLVPRQYSTGGRSILGRISKRGSKYLRTLLIQAAKVLLMRPHNWARYSFGPWLNAASERLHRNKLAVALANKLARIAWSVLRNDKAFDTHLEVAAI

SEQ ID NO: 99719 - protein, 358 aa, unidentified
MKLFVGLDVSLEKTAICVISEHGKIVKEAQVASEPEALSCWICDQDGAIAAVGLEAGPLSQWLHRGLSDAGLPVVLMKTRQVKGALKAMPIKTDRRDAEGIARLLHLGWFRPVHCKSVSAQEVRAVLSARKAVQQGFITLEMSLRGLLRNFGLKVGTISRGRFEQRIRELAAGNPMLEAATEPMLRARSALRRELAGLERNVRQLSQEDPVCRRLMSMPGIGAVVALTYRSAVDDPARFTSSKKVGPWVGLMPSRNQSGERDVLGGITKAGDVNLRRALCQAATVMMYEEGQKTVRGTVFPTIGGRASWLRTWAAKLARRRGAKRAMVGLARRIAVILHRMWKDDSDFRFDIPVLHAG

SEQ ID NO: 99720 - protein, 455 aa, unidentified
MKEQTKPGSKRGQKEEGLPMLNRNAAGIDVGNAEHHVAVPAGRDVEPVRKFGSFTADLHRMAEWLRACGIETVVMQATGVYWFALFQILESYGLQVSVVNARHTKTLPGRKTDVLECQWLQKLHTFGLLNNSFRPAEEIQVLRTYLRQRENLVAAASKCIQHMQKALTQMNVQLANVISDISGKTGLAILRAIVAGERDPIKLSSLKHQRIRASRAVIAQSLEGNWRGELLFVLEQSLELYDLYLGKINECDQRIATHLNTMDTKAQGNPAPIPQVEASDTHQHPFSLRDHLCRIAGVDLTKVAGLNVQTVQTIISEVGVDMSRWNTEKQFASWLGLCPDNRISGGKVLKRGTRQVVNRAATALRMAAWTLIRSRSALGANFRRLRSKLGAPKAITAMAHKLARLIYRMMRFGTEYVDNGMESYESRYRQQQTKWLAKQAAALNFQLIPVSDVIG

SEQ ID NO: 99721 - protein, 340 aa, unidentified
MSLYGGIDLHANNSVIVLLNEQDAVIYQKRLPNDLLTILEQLAPYHTEMKGLVVESTYNWYWLVDGLMEADYRVHLANPAAIQQYNGLKYTDDHSDARWLAHLLRLGVVPEGYIYPKAERAVRDLLRKRAHLVRQHTANVLSVQNIMARNTGARFSVKRIQELTKEDLSTLLAEASQVLAVTSSLVVLDCLRQQIKTLEKTIHKCLKHTPAYEQLLTVQGIGTILAQTIALETGAISRFPTVGNYASYCRCVDSTKISNGKRKGTGNVKNGNPYLAWAYMEAAQFAMRFQPAAQRFYQRKLAKSRNNTVLARKAVAHKLARACYYIMRDLVSYDVTKAFG

SEQ ID NO: 99722 - protein, 439 aa, unidentified
MSKCSFEQEQDKEEMHMKNSHRRFDNPAGMLYVGIDIAKEFHCARALKSFDSGTTEPLFFRNRREGFKKLKKGVKKWLESYGCDGVVIGMEPTADYWRPLYAYLIGNGFRVNLVSSLKVRRAKDLMDNSPLKSDRKDALVIAKLTKEGNLLSFCPREKEIEEVKVCVRHIEDLEDMACREENHIEHYLSVHFPDIGDILELRSVTMRKFLMIFTTPAEVVEAGVEKIRDLLKEASRGRMNPSKADEIFAAAKDSVGLPCTHAEKLSVRFHLESLERISENLGQFRKHLEELLEPMGEYHILRSIEGVGLMCSATIIADLGDLTLYSNYRQVIKKSGLNLFSLSSGNYKSREHISRRGSSFLRRNLYMAALQHTHSGSAFYDKYSRMRDSGKGFRTSMIAIMRKILKVAYTLVRDDRVFDKDHVRGAGRNEIVIRRARAA

SEQ ID NO: 99723 - protein, 343 aa, unidentified
MDHFAGLDVSVKETSVCIVDDAGRIVREVKVPSEPKALLKVLTNPAYRFKRIGLEAGPLSQWLYSALAEAGLPVICVETRHMRAVLQAQINKTDRNDARGIAQMMRVGLYRPVHVKTLRSQKLRMLLTHRKLLQSKAIAIDNDLRGTLRNFGLKVGIAGKVKFEARIKELVENLPDLAVLVEPLLIVRRVLREQTAVLHRRLLAIVRDDEVCRRLMTVPGVGPVVALTYRATIDVPARFRKSKAVGAVFGLTCSKYQSGEINRTGAISRCGDDMMRMMLYEAAQSMLVRSTRWSWLKAWAMQIARRRGMKKAIVALARRLAVIMHRIWIDGTEFRWTREVAAA

SEQ ID NO: 99724 - protein, 350 aa, unidentified
MTIVENRTITVTGGVDTHLDFHVAAAVDSNGGVLGVETFGTTTGGYRNLVGWLAGFGTIGLVGVEGTGSYGAGLTRHLTGKGIRVVEVDCPNRQARHRAGKTDAIDAIAAARAALTGTATGVPKSRTGNIEAIRILTIARRSAANEWIAVVSQIRHVTFTAPDEIRSRFIGMTPITLVRTTAALKPRRTDADIVRYTTLSTLRELGRRALFLREQNMRLNAEMRPLICEVAPSLLEVCGVGFDVAAKLLVAVGDNPHRIRSEAAFAHLCGVAPIPASSGKIQRHRLNRGGNRQANSALYRIMLTRLSSDPRTKAYVAKRTAEGKTMGEIARILKRYIAREVYPHLPSTIG

SEQ ID NO: 99725 - protein, 339 aa, unidentified
MNLNAVGIDIAKNVFQVCWVDPASGELVNRQVKRASLLQLFANRERCLIGMEACGGAQHWARMLIGLGHDVRIMAGKAVKAFVNRNKSDFADAKAIWMAVQQPVKCVAVKTESQQAILALHRMRQQLIKFRTMQINGLRGLLAEYGEVMGVGRAGINRAIAPILAKLGDRLPAVFIESLQDQWGRIGKLDDEVAAIEQKLKAWMKEERACIVLAEIPGVGLLTATAAVATMSNPQAFKSGREFAAFLGLVPGHTGTGGKTKLLGISKRGDTYLRTLLIHGARSVMAHQKTPPSWLAELQLRRPHNVVAVALANKMARTMWALLAHDRPYKQDHISAVPA

SEQ ID NO: 99726 - protein, 385 aa, unidentified
MSRSKFDPRRSLVALDQHKCLIAVVELSLSTWLVGGIVPGIARDPLKKLTPPDPETLLRILYRWRDEAVKAGCSITRIVVGYEAGRDGFWLARWLQAHGIEAYVMHPTSIAVSREHRRAKTDRLDVSLLKRSLLGWLRGEEKHCSMVAIPTVEEEDTKRPHREREQLVGKCTGTVNRIKALCIRHGIRGFKPKLRNAAQRVCTLRTPAGEALPPNTLAELQRELEHLRFIKQQIKQIEQARLQQLEQTPQQALNATRRDLLRVRSVGIETADLLTSEVFTREYRDQRAIARYVGLTGSPDESGSRRREKGLAKAGNARVRRGMIQLAWRFLIHQKDSSLVQWFEACIAAGKKRKTMIVALARKLLIALWRFVTLGEVPEGVILVD

SEQ ID NO: 99727 - protein, 369 aa, unidentified
MASLQARPVVTGGVDTHRDVHVAAVLDGLGRLVATGSFPATPAGYRTLTGWMKSFGTIDTVGVEGTGAWGAGLTRHLTAARVRVIEVTRVNRQRRRRYGKTDTTDAISAAKAVQSGEATGAPRGGTGPVESLRLLRIARRSAMKQRTAVANQLHAVIVTADDTIRAQHQGLPLTRTVTIAANYRPGDPLDPTQAAKWALKTLARRYQHLTEELDTLTSHISSIVTAIAPKGLLDMCGVGPHVAADLLITAGTNPNRLANARSFAALCGTSPVDASSGLQQRHRLNRGGDRQANAALYRITIVRLRWHQPTRNSMTRRLKDGKTKAETIRCLKRYIATTTTSPNPPLDIYRSIPTLASHAGEETRPSVLN

SEQ ID NO: 99728 - protein, 321 aa, unidentified
MYNIKQFYGVDISKSSFDVVDQNAKHDQFSNDVRGFKKFLKTIRKDSLVVMEATGYYHYRLAQYLFVKGITVSVVNPLSVKRFIQMKLSKIKTDKSDAKAICEYAQAAKVPLYKARNHVQAECLQLLSLQDLYLKQRTAVKNKIHGEKAMGTPSKMASRSLTRMLKQMEKELAQLELKLESLVEKAHEDQLMQLTSIPGLGKKTAILLIVLTDGFNSFENARQLCCYTGITPTIRQSGTSVRGRSRISKVGNRKLRNLLFLCSFTACRNNKACRELYDRIVEQGKSKKLALIAVSNKLLKQAFAIAKSGTYYQENYMSKLV

SEQ ID NO: 99729 - protein, 415 aa, unidentified
MEVMFDRACGLDVHRDTIVACFLAGANEARPKKEVRTFRTHTRGLFELRDWLLEQKVAAIAMESTGVYWKAIYGVLETETWSLVVANAEHVKKVPGRKTDVKDAEWLARLLRSGLLRASFVPPPPIRDLRELSRYRTKLVQERVRERTRTIKVLEAANVKLAGTISDVFGVSGVAMLHALAAGTSTPRAIAELAKGRMRKKIDALEVALDSRLTEVHREMLRIALRRLERADEDIRDVEALIEMRLSPYAVEREKLDQIPGVDRTVATAILAELGPDMSAFPSAGHVASWAGVCPGKDESAGRQRSGRPASGNHHLKTLLCEAAHAASKQRGSYLKDKFHRLKARRGHKRAIIAIAHKILVAAYHVLSGKRDYRDLGPNYLDELDRTRTAKRLTSRLQALGFSVALSPAGPAAPG

SEQ ID NO: 99730 - protein, 358 aa, unidentified
MADLETTVIGGVDCHLDTHHAVALDTHGRRLGDQSFPTTSHGYHQLLAWLQQFGRVHAVGVESTASYGAGLTRYLVGAGLTVIEVNQPHRQVRRRRGKTDALDAEGAARSVLAGEATAVPKDTTGSVEAIRQLRLARASAVKARTAALTQLGEVIATAPAALRERLSGHASLHARATRCARLRADQARLQLPLEAAKFVLRSLSQRILALDAEIARFDAHLATLVASVAPRTTALLGVGTLTAAQLLITIGQNAARVGDEAAFAHLCGVAPIPASSGKTNRHRLNIGGDRQANAALYLIAVCRLRYCERTRAYAARRTHAGRSKRDTLRCLKRYIAREVFHTLRADLAAFRAAQPAPA

SEQ ID NO: 99731 - protein, 319 aa, unidentified
MHCIGVDVSKQELVTFDGTTERVFANKPGLAAFRRFVGSAADVVIVFEPTSTYSRRLEMLCRTERIACCQLNPRVVPHYRQVGKGRSKTDKTDAELLYRYGIERGQEEAGQLTNDALAQAVAARLACHRVVQKARVAYQGLLDALEHDPATEKGLLSGLRREVEDLKLRETRQLEEAQAVVAADADGAKRLNVMLSIPGIGPITALTLLALFRKYPGVNRQQLVALGGLDPIQVQSGTSVHGKSRISKRGNREVRKCLFEATLSATRFNPGIRAIYRRLKDEGKPDKVARIAAARKLLLLAHSIYESGEPFRVPTEEVS

SEQ ID NO: 99732 - protein, 368 aa, unidentified
MLYVAIDQHAKQITVVIRNDQGEDVLKRQVSTRREKIEQFFDSVVALDCEFMAILESCGFNDWLLEELRNRKCREIVLIHPEKPSKKKTDRRDARKLCDLLWVNRERLAAGKPVHGLRRIYIATKREKDDRQITSLRQGLGRRRTRVLNKIQRILHRYNLMWDYPTKSFQTVAGKNWLKKLSVPEIDRFELDLLLEEWTSIEVQIKQVDAKIVERASRREPGKVLNATQILMTAPGVSFYSGLGLSSRIGPVERFPRPRSLANYFGLTPSSKNSGESKDRLGSITKEGSRFARFLLGQLVLHFLKQDPKMREWYRRIKLRRGSKIARVAVMRRITTIFWHMLKHQEGYTIGGPPPRLRDQSADRCSAA

SEQ ID NO: 99733 - protein, 404 aa, unidentified
MTESSDCESVQVFIGVDVGKDTHHAVAINRSGKRLFDKALPNDENKLRSLISDLKQHGQILLVVDQPATIGALPVAVARSEGVLVGYLPGLAMRRIADLHAGEAKTDARNAAIIAEAARTLPHALRTLKLADEQIAELSMLCGFDDDLAAQTTQASNRIRGLLTQIHPAPERVLGPRLEHPAVLDLLQRYPSPEKLASLGEKKLAAQLCKLAPRLGKRLAADIAQALAEQTVVVPGTNAAAVVLPRLALQLITLRKQRDEVALEVEQRVLAHPLYPVLTSMPGVGVRTAARLLTEVACRAFASAAHLAAYAGLAPVTRRSGSSIRGEHPSRRGNKALKRALFLSAFTALRDPLSRAYYTRKNESGKTTQSGAYRPGETTLRRSVRHDARRDFLYPAGVITCLTT

SEQ ID NO: 99734 - protein, 339 aa, unidentified
MARYIGVDLHRNQFTACTIAENGREYLKKYRLEQLTQFAAKLRATDEVAVEVTGNTRLFYEAVAPRVAKVAVVNPSQFRVVRDSVKKTDANDARTLAFYLSKGMLPEVRMKEKLHAQLASLTQTRDTLVKQRTALKNKVNNLLSARGVNLPREALSSDVALERVLAMPLDAIVMIELRVLVGQIRALNASIAELEKAIKAEGPKLPGHENLKSIKGVGHLGATVLLSVIGDIKDFAHPGKLASYFGIVPRVHNSNETERSGRITKRGSKLARTTLVQCAMVAMRYSPYLAKFYRKVQSHRGTGRAIIALAKKFLGVIYNTLKNNWVFADFPNFVLAEAS

SEQ ID NO: 99735 - protein, 410 aa, unidentified
MELLHRRCCGIDVHKETVVACLRLVSDDKVTTEVRTFQTTTADLLRLSEWLTANECTHVAMEATGVYWKPVWHILDDGEFELVLANAAHVKNVPGRKTDVNDAMWLAELLAHGLIRASFVPDAQTQEMRNLLRTRKQLVREQSSHVLRVQKTLEDANIKLDSVLTDLMGKSGRAMIEALIVGETNPAKLAGLADRRVKASPEEFREALRGRVTKHHRFLLRLHLNQIDALDAAMATLDAQVEANLGPFRTAVDLIVSIPGIKNLGAHVIVSEIGIDMSRFPSAAHLISWACICPRNDESAGKRRSNRMRKGGTWLKTTLVQCAWAAVKKKDSYLQAQFYRIKARRGPKKAIMAVAASILTAIYHMLKDGTMYHDLGRDHFDRRSTDQQKNRLVKRLADLGYAVEIKPIAA

SEQ ID NO: 99736 - protein, 389 aa, unidentified
MTQVDDLSRSLAAFDQNSTLTIAVEMSAASWLVAGVIPGIDRLPVKKLEPDPDGLLRLVERWRAEAVKAGRTIARIVLAYEAGRDGFWLARWLRTRGVEAHVIHSTSVAVSREHRRAKTDRLDTGMLIRVFLGWLRGERGHCGMVAIPTLADEDAKRPSRERENLVAERTRISNRLKSALARLGIRGFKPMLRKAPQRLAALRTLEGVPIPPNTVAEMQRDMARLAVLREQIEEIERARLQALQQAANSGPHAMVRLLARIVGVGIETADMLVHEVLTRNLRDRRAVARYVGLTGTPDESGSKRREKGLAKSGNSRVRRGLIQLAWRFLRFQKNSALARWYRARTEGPKGARKTTMIVALARKLLIALWRMARTGVVPVGVELRQLASA

SEQ ID NO: 99737 - protein, 358 aa, unidentified
MAVIEGTRRIVGGVDTHKDLHVAAVVDEQDRVMETRSFATTRQGYRQMLAWMRSFGELQRIGIESTGSYGAGLLRFMQQAGIAVLEVTTPDKQDRRRRGKNDDLDAQNAAHAAFAGQRIVTPRSRDGMIESLRVLMACRKTAVSARRVALQMIHNTIVCAPDGLRDQLRSLTRMQLVRTLASWRPDLTAYRDLESAYRIGLKSLARRYLELHDEIADLDAMVAAIVDELAPNLIARNSIGHVGAAQLLLTAGGNPERLRSEASFASLCGVSPVPASSGKTVRHRLNRGGDRAANSALHIIAIGRLRTDQRTKDYVARRIAEGHSKLDAIRALKRYLAREVFTLITQRRKEINATRIAA

SEQ ID NO: 99738 - protein, 415 aa, unidentified
MLKIVYPICCGIDVHKTFVEATIAATDKTSITTYKTQRFSAFTKDLKSLAQWLSDNNCLPVCMESTGKYWIPVYNILEPFCRITLAHPKYVKAIRGKKTDKKDSIWIADLFKHDLVPGSFIPEKQIRDLREILRYRYKLVCFAASEKNRMQNSLTVSNIQLASVVSDTFGKSAQAIIAHLLANPGDTAFDFRPLLHGSMRKNEEQIALAIEGTITPVQASKIHTCQQHVDQLSQYIEHLEALADALAIPFEAQLRILESVPGISHVSALVILSEIGSDMTQFKSAKHLTSWAGLAPSNDQSAGKKKSTKISRAGVYIKPVLVQYALAAISDKSFPHYRQRYESLKHRRGHKKALIAIARMMLTAIFVMLTNGELFNPDMYAEALRKPAYILSPELQLAHLAKRLGYSVVKVPDSV

SEQ ID NO: 99739 - protein, 371 aa, unidentified
MKADKRGKVKGCKMNSIVAGIDLGDKESLATILSPIGDVADRFSFPMNEEGYAYFANRVPKNARIAFESTIMAYPISRALRTHGYSDITVAHPKTLTWIVRSKKKNDRVDSLKIAKLHMAGMLPESHLLDRDQQIARDLLVQRVKLGVEIGRLKNSLIGYLKREGIYDDLPKASDSFSIKRRQAIHSLRFYDDRDLILRTMMERLEFLERQCIPLENNVRMNARANDDVKLLMSIPGVDYYLASLLSSFIGDVNRFPSDDHLASFFGIVPTSRDSADVKRRGRMTKDGSSIARWALSVMVDTVTQHNEPIREYYASVKKRTSSGKLAHVSTMRKLTRMLYHMLKTKQHWKWENPLLTERKMVRLEDGGDGS

SEQ ID NO: 99740 - protein, 377 aa, unidentified
MRRIKFIGLDVHAETIAVAVAEEGGEVRSLGVLANREEAVRKLVRKLGAVEDLRFCYEAGPTGYVLYWQLTKLGAQCAVVAPTLVPAKAGERVKTDRRDALKLARNHRAGELTAVWVPDAAHEALRDVVRAREAAKKDQLRARHRLSKFLLRQGWRPASGVQAWTLKYLEWVKREVHFEQPAQEATLLDYVHEVEHAAGRIVRLDRAIEEAVKQAPPQMRAVIEGLQALRGIAQISAVTIVAELGEITRFRRARQLMGYGGIVAREHSSGTSTWRGGITKTGNAHLRRVVIEAGWSYRHRPGVGAALRKRQEAVSAEVREMAWKAQHRLHARYRQLLARGKSKGQAVTAVGRELLGFIWAIGIRVEAEHQESQRQAA

SEQ ID NO: 99741 - protein, 345 aa, unidentified
MKKLVKQIVGIDVAQNELVVCLGRMADDWSPELYANKAFANNSKGFIALENWVKKFIDPAVPVRFVMEATGVYHESLAYYLFDLGHVISIVLPNKISNYFRTLEVKTINDQTASHAIALFGLERKLEDWKRPNAVFKRLRQLVRERDQLVQERTIVKNQLHAEKSEAEPGSSSMLRMKKRIVLLDKQEIEIKEEIQAIVKKDTSTNNAVKIISTIPGIGLLTAVTVLAETNGFELIRNKRQLTSYAGLDVVQKQSGTSVQGKPRISKKGNKYLRKAMYLPALSVMRCDERFKGIFARVVAKNGIKMKAGVAVQRKLLEMTYTIFKTNQPYDKDYFKKQIEEQIIR

SEQ ID NO: 99742 - protein, 350 aa, unidentified
MEYIAFDAHKKYTMASVEDRGGRILREVRVPHRRETIGQFLAQWTLGSPVAVETVGNWYWLVDEIERAGMQPRLVQARKAKLMMGLVNKTDKLDARGLNHLQRTGTLPTVWIPPGELRDQRELPRTRMVFARERTRLKNRIHATLAKYALSVPDVSDLFGRQGRAVLTTRLAELPPHTRFATEQLLVQLRGVEEQIDHCETRMRQTFQQTPALEWLMTLPGVGLILGLVILLEVGDVRRFPDAEHLAAYAGTTPQVHGTGGKIWMGKLRTDVNHYLKWAYLEAASAISTHRAHWPTRHVVRLYERVRARKGHEKAIGAVGRHLAEATYWMLTKEEAYRAPQRHPSASTKA

SEQ ID NO: 99743 - protein, 313 aa, unidentified
MTMVRTPSRFLGCDVGKDEVVIFDSASRAVTRLANTPETLADFAARLDKDVLAVCEATGGYEAALLDALVGAGCPVHRADARKVKAFIRSFGTLGKSDDIDARALARYGEERHAKLPRWQSPDRNRAALAALVLTRQDMVASRTAWSNRRKAPGAITALIDPICQTLDAQICAIEAAIETLLNNCARLQQAIATLRTIKGIGPITAPALIALMPELGTLDRKQATALAGLAPHPNQSGKHDGYRRVRGGRPEVKRLLFTPAMTAARHNPTLRTFYQRLISSGKKPILAIVAVMRKIVVIANARLRDQFAQQLS

SEQ ID NO: 99744 - protein, 339 aa, unidentified
MNRIVVGVDIAKRVFQLHWVEPQTGEIVALQLKRGKFLEHFANRPKCLIGMEACGGSQHWARSLQKLGHEVKLLSGRIVKPFVGGNKNDAADARGIWTAMQQPGIKAVAVKSEEQQAVLALHRMREQLVKFRTAQINGLRGLLTEYGEVMPQGRAGIKRDIPGALGRLSDRLPAIVIDTLREQYARVGELDEQISQIEGRLRQWQREDSATRRIAEIPGVGLLSATAAVATMGDARAFKSGREFAAWLGLVPRQTGTGGRVRLLGISKRGDKYLRTLLIHGARAVLSHSKSPPEWLTELVKRRPKNVAVVAMANKMARTIWALMAHERTYQPGYVSRPT

SEQ ID NO: 99745 - protein, 317 aa, unidentified
MTTEVFIGIDVARDSLEIAVRSTGEQWQVGNDAAGTATLLPRLHALRPTLIVLEATGGFELPVLAALGSAGLPVVAVNPRQVRDFAKAIGKLAKTDAIDARVLAHFAEAVRPPVRPLPDAATQALGALVTRRRQLVEMITAEENRRAGALPPVRADIQQTIAFLRTRLKGIDQDLSQAVRNSPLWRDQEHVLRSVPGIGPVVSVTLLADLPELGVLGRKQIAALVGLAPLNRDSGTLRGKRTVWGGRATVRAVLYMAALVGTRFNPVLRALYTRLLAAGTSKKVALTACMHKLLTIVNAMLKHHQRWQLTTSLSQAS

SEQ ID NO: 99746 - protein, 285 aa, unidentified
MRFYTQQHRFYCGIDLHARTMYVCIMNQEGTIIVHKNIPSKPDTFLRIIEPYKPDIAVAVECIFTWYWIADLCNQINIPFVLGHALYMKAIHGGKTKNDKIDSQKIAALLRGGMLPVAYTYPQNMRSTRDLLRRRMYLMRQRSQLITHIQNTNSQYNMEPFGKKIAYKSNRKDIAELFSDSMVRKSIDVDVKLLDTYDKLITNIELEILRKARQHNPISLHLLRTIPGIGQVLALVILYEIHDIHRFPKVGNFISYCRLVKCQRESAGKKSASRNTKIVARHLFI

SEQ ID NO: 99747 - protein, 410 aa, unidentified
MTDGQVTVGIDIGSHMHRVAIGTPEKKIAEEFDLPHNKDGFEKFFERISYYENTYQVPVVVAMEGFNGYARPLDQMVQKKGYRLLNVNNLKLRRFKEIFPSPAKTDAIDARKILELVRLQPLLTDQEVILQEVREVPREHQMLKRLTRRRRQLVCEKAAVLNRMQSDLHAVSPELVELARNKDGLAFLRFVTCREDLRQLERVQKRTLLGIKGIGKGFAGKIQEWQKKAQFSEEAEYAGPMIIEDARRILELKKRIKGLDTQIGELCERSRLAEIVRSIPGFGLTCTSEIVAEIGTMDRFRSEQSLAMYLGMAPLDNSSGRRKGTRHAKQVNIRARTAMMTAMNRHILRVEESELYYRKKRNEGKKHNQAIRSLGRHMVRVLWSMIKDGHFYEERAIDNIIEVTKEQIPA

SEQ ID NO: 99748 - protein, 356 aa, unidentified
MNKRSKLNFSGQAIYLGLDVHKKSWSVSIFTKHGEYKTFSQPPQVEVLIQYLQRHFPGARYHSVYEAGYCGFWIHDRLREKGIENIVANPADIPTQDKERRGKRDRIDCRKLARGLRGGDIQGIYTPARWKLEDRSLIRTRLSMGRKQARCKNQIKSMLLFYGVNIPEQREMGHWSRRFIRWVEEIRMERSSGDVALKLHLEELCHLRQIIAKLNRSILALARTEEYRLWILLLKTIPGISTLTAMIVLTELYEITRFRSIDQLCSYVGLIPDTQGSGEKEHVGGMTQRHHSSLRWLLIEASWIAVRKDPAMMEAFNEYCKRMRKTKAIIKIARKLLNRVRYVLKNQAEYVTGVIE

SEQ ID NO: 99749 - protein, 316 aa, unidentified
MDVAFKSVVGIDIAKRTLDVHVLPERTSLKQQNDSKGRGQLREKLPPPGECLIVVEATGGYERALVAELIDAGYQVTVVNPRQVRDFAKACGTLAKTDRVDAAVLALFGQRMGELRIQAKIPEKQLELQDLVARRRQLVELRTAEMNRKEHVGSKFVKKSLQESVDALNKQIRRFEKRIAALVQSDDDWKQKLEIVQSAPGIGPGTSATLIAEVPELGQLSRRKISALVGLAPFNRDSGEFRGRRAIRGGRSSVRCSLYMATLSARRSNPVIRAFAERLKALGKKPKVIITACMRKLLVILNTMVKNKTHWNPATT

SEQ ID NO: 99750 - protein, 397 aa, unidentified
MYIVGIDIAKRKHEAAVIDGEGTVIIKPFSFTNNCSGYNRLLAMLTKAKLPLDEVSFAMEATGHYWLALFTRLQKEGFRVQVINPVQTNSIRSFYIRQAKTDPRDALLIAEVIRFGHFSESTLHPENIYELRELCRGRHAIVSMQADVKRKVVALLDQVFPEYETAFTNLFGDTSMAILQTCPTPKELSEMPLEELCHLIEVSSRKRFRMAKAQELQELARNSFGFAMAGDVFSTMIRLYAKHLDFLKQQVREMDCKIAEIMETLDTPITTITGIGPTLGAYILSEIGDISRFSSAAKLAAYAGIDPTMRQSGEYNGVRNRMSKRGSPYLRHAIWLATSSAVLHDPALKLYFQKKRDEGKPYMASVGHACRKMVSIIYAVMRDNKAYTPCIPNEISA

SEQ ID NO: 99751 - protein, 421 aa, unidentified
MFSESEDDEQIIERVAALDLGKAELVCCVRLPGKTGTRRVQEVSTHTTMTRSVTELANRLVDLRIERVVMEATSDYWKPVFYLLEAHGLQPWLVNARDVRHLPGRPKSDVLDAVWLCKVAERQMLRPSFVPPAEIRQLRDLTRYRMSLVATRGAEKNRVEKLLEDACIKLSVVASDIFGVSGRAMLAALVAGERDPGRLAEMARARMRAKIPQLREAFTGFFTDHHALLLAQMLARIDGIEADIALLDERIEAHLVPFADAVERLDEIPGIGATAAAVIIAEIGVDMSRFPTAGHLCSWAKFCPGIKSSAGKSKGRGSTGHGNRYLARILGEAAVTAGRSDTFLGERYRRIAKRRGKKRAQVAVGRSMLVVIWHLLADPDARFVDLGPDHYTRSINTETKKRNHIRQLQALGYTVTIEPAA

SEQ ID NO: 99752 - protein, 340 aa, unidentified
MKEVTTIGLDIAKQIFHAHGAGSSGAPVFSRRITRQKLIQFFASQPRCVVAMEACAGAHHWGRELMRLGHEVRLIPPAYVKPFVKRQKNDAADAEAICEAAQRPTMRFVPVKSEAQQASAAVFRARDLLVRQRTQLLNALRGLLAEHGWVAPKGLFHASAMMAKIEGPSCELPASARDVFLVMIASVRALDERIHLLDREITKRAREDETARRLMTIPGIGPITATALLTLAPAAESFRKSRDFAAWIGLTPLQRSTGGKAKLGSITRMGERTLRRLLILGSAAVVLHASKRGAAKGSWLEQMMARKPRMLVTVAFANKTARIVWALLAKGGVYRAPAVA

SEQ ID NO: 99753 - protein, 352 aa, unidentified
MVVVVGIDVHKGTHCAVAVDEAGRQLHRPMTVRATDAGHRQLLRWARQTFPEGGVEFAVEDCRHVSGRLERALLDAGASVVRVPPKLMAQTRTSARTRGKSDPIDALAIARAALREPDLPRAEHTHVSREVKQLVDHREDLVNMRTGLQSRLRWHLHDLDPELDPPSRGLDRFTVLDRLENRLKSLPLSTVRRIALEQLADIRALTLRINALEKELADLVRVQAPQLLTLPGCGVLSAAKLIGETANPTRFRSEACFAMHAGVAPIPASSGKTDRYRLARGGNRQLNAALHRIAVTQTRLNGLGQVYYQRRRANGDSTMEALRALKRRLARVVFHLLRPTDSAAGTCLPAAA

SEQ ID NO: 99754 - protein, 434 aa, unidentified
MSSRLHVGIDFSTKWVDVCLLSPSGEPLVAHQRFDNSLPGFQDVKQLLLDILEAQGYTGADISGEATGMYWLPFYLQLATDPDLAAHDAQVYLLNPRWVAWYKRCFSQADKTDAHDAYFIADRTRTHPPGVPWSADPAALALRCYTRQRFHLVQSLAREKNFFCAYLFLKANAYGRLKPFSDVFGASSRLVLGRFVTLDTLADLPVADLAAELDEMSRHGLRDPMHNATQLQRVARESFPLPKKLVQPVQDILDSTLDTIAFLESQIHKVEQRIEIQLVHHPAIRQLQTIPGIGPAFAAGIGAEINPVHRFLTGTKWDRRRHRQRPKNLRDAEDAVAKIAGLWWPRAQSGDFEAQDRHMSKAGNAYLRYYLIQAAEHLRWREPDYRCYYQRKYAETAKYKHKRALVLTARKSVGLFVGLLHRNEPYCSREERRT

SEQ ID NO: 99755 - protein, 377 aa, unidentified
MSSPILYLGLDVHKDSVTVAVFAAAGSEPRLLEKLPYDLHKIRRFLQRLSRNGEQIRACYEASGAGYVLQRQLQQWGYHCDLCAPALTPTRPGNRRKHDKRDAAQLGKWYRDEDLVLIRIPDEAEERVRDVVRCRETFQKEILASRHYVLKFLRRRGFVYRDGTNWSQKHFTWLRQLLSAHALAAEDELVLSEYLALLEYKLQRREELDRRIEELALRPLYQPVVARLRCFRGIDTHAAMVLATEIGDWRRFDSPRKLMAYLGLVPTEDSSGLVHRTGSITKAGNSHVRHVLVQAAWNCRRQPAAGTTLKARQRGQPPQVIAHAWQAQHRLHKLFGRLAARRGAPIAAVAVARELVGFLWAALQDLEAAGSTRSQAA

SEQ ID NO: 99756 - protein, 343 aa, unidentified
MAYFAGLDVSVKETSVCIVDDAGKIVREVRVASEPEALLQVLTNTIYRFKRVGLEAGPLSQWLYSVLAEAGFPVICVETRHMRAVLKAQINKTDRNDARGIAQMMRVGLYRPVHVKTLRSQKLRVLLTHRKLLQSKAIAIENDLRGSLRNFGLKVGMVGTVKFEARINKLVENLPDLAVLVEPLLIVRRVLREQLGILHRRLLAIVRDDDVCRRLMTIPGVGPVVALTYRVTVDVPARFRNSKAVGAVFGLTPAKYQSGENDRTGAISRCGDEMMRMMLYEAAQSMLVRAAKWSWLKAWAMKIARHRGMKKAIVALARRLAVIMHRIWVDGTDFRWTREVAAA

SEQ ID NO: 99757 - protein, 402 aa, unidentified
MHYLGIDVSKASHQCVILDAEGEALGKSFTIQSSKDDFANLVKKLSDLNIPQTDITAGLEATGNLWENLYVYLKERGFNIMLLNPFQTSKFHQAMLKKAKTDSIDALVIAGLLRSGCAASSYIPDEEIQSLRDLIRLKDGYLRDTKNYKRKAYSLLSLVFPELLTLIKDPFNISCTEILSKYQTASDFKKLKSKDLLKVARGHQGNNYDEAWADKVIQAAKDSIYSGKASRARGIVVKSLVLNIKNLKEQMIELDNEIQNILKTDDDSSNNDIDNLLTIPGVGPKTIAIFIAEVGDITRFASCKDFIGFVGLYPKIEQSGSSLNRAKLTTKGSRLLKHALYMASVASLIHNPYLKSVYNDKISQGKCAKQAIIVVARKIASIMYSMLKNNTAYNPGRVAIAV

SEQ ID NO: 99758 - protein, 347 aa, unidentified
MELGAHAGISLDPPEQLLELTLAVIRLGKRGSSRPFQTIRSPVMNGIGIDVSKRQLDVGTTDGKTLQVSNSRSGFAELDLWLQGHPAVQIVLEATGGYEQPVLDFLHNAGHPVVRANALRARKLAQGLGHMAKTDRLDAYALAKMAALVKLRSYQPLEPWQREMRDFVRARRQAMHALTVARQQQEMVGNRELRRLLQANITCLQKTVERLGKRISEQVSKQPQLAVLKSMKGVGPGLQAVLASYLPELGKISGKAVASLVGVAPMSHDSGTMRGKRSIHGGRAEIRQVLYMASMSAMRHEPRLRDFYQSLRARGKEGKVAIVAVMRKMLVILNARMRDAQSRPIPT

SEQ ID NO: 99759 - protein, 399 aa, unidentified
MDVIALDVSNGRSYCVLYQDNICQFEGEIKHNKKGFMRIKQLVESCHSVPEIVFEATGVYSRVIERFCQNNNFRYYLMNPLEARKQTDSLRVNKTDISDAHKLAQTHYFHERKPTNNFTPQYQKMRQLSRWYESNEQEIKKARNQLHVFLVQSFPEYEKYFSSISSEFALEIIQLFPHPKRLEELSRTKIKNLILKSTRKKISSQRALIKAEEILGLSEQSYPAVSEDSIEVRLVAHWANELLQLILLKNEIKKELTNKALYFKEFYIYKSFPGVGELTAALLIAELGDLTRFDNPKQLNAYVGIDIQRYQSGNSGTYDRISKRGNTFARKILFNTVNNMIRAQKSGPNHIVDYYYRAKEKPRTKKHKVALIGCIDRFLKSIHHLVFLGQLYDYNLSPQ

SEQ ID NO: 99760 - protein, 402 aa, unidentified
MNCVGIDVSKGKSTIAVMRPFGEVVVSPFEVCHTASELSELARLLKSLDGETRVVMESTGNYHAPVAWLLHGAGLYVSVVNAMLVHDYGNNSLRRGKTDKKDAVKLANYGLDHWLTLPRYVPEEDARLMLKTCYRQYQQYSKVQTMLKNNLISLLDTAFPDANRLFTSPPRADGSEKWVDFVAAFWHCECVCGLSKKAFTTKYQKWCRKHSYNFSEDKALDIYVSACGRFGVMPKTKTAKLLVEQAISQLQATSAALAALKQEMQSLAASLPEYPVVMGMFGVGPTLGPQLIAEIGDVRRFHSKKALVAFAGIDAPPYQSGQIDVRSRSISKRGSASLRRTLFLVMGVLLQGAPMDEPVYKFMNKNRSEGKPYRVYMMASANKFLRIYYASVKAYLDSLEHN

SEQ ID NO: 99761 - protein, 322 aa, unidentified
MTSSKLATRVIGIDVSKDKLDISDSEGKIKKEVKNSTASIVKYIVKKIAEPGEAFVVCEATGGYERTLAKAMHTAGVAVCITNPFQVQQFPRGIGVLEKADPIDAGKLRQFGELVDLQPTAPKSAEHERHEALVRRREQLLTLISMEQNRRAQSYDPTVTAMIDKILKVMKTQQKSLETEIEAMLKKEAETNPAVAVVQSVPGIGPVTTSTLICDLPELGKLNRSEIAKLAGVAPIVNQSGKRDKQRSIFGGRSHVRRVLYMAALVATRHNPVIKAFYTGLIARGKEKKVALVACMRKLLTILNCMVCNNETWRTEKVVTGT

SEQ ID NO: 99762 - protein, 373 aa, unidentified
MKYTTVYVGMDVHKESFTLACYTNEKEEAEYVQRTEAHYSKVISYLEAMRFHYGDDVTFICGYEAGCLGFTLYHQLTNHHVRCVILAPTSMPVQQGKKKVKTDKRDARKIAKCLAHHDYSAVHVPTAKDEETKEFIRMRDDHKLALKKIKQQILAFCLRHNYCYPGGTKYWTQAHLKWLRDLKPGGVYQEILEEYLLTYSNLVDKLERLDKRIEELAADKEYAESVHKLICFLGIKTQSALSVITETGDFKRFGNAQQYASYLGLVPGEDSSGEDQNRLKITKAGNRHLRMLLVEAAQSYGRGQIGHKSKELKKRQEGNLPEVIAYADKANERLRRRYYRMVLSQNKRSNVAKVAVARELACFIWGMMTGNVA

SEQ ID NO: 99763 - protein, 314 aa, unidentified
MPETERFIGIDVAKAELEVVERPSGARWTVPNDVAGWGQLRDQLAATRPTLVVLEATAGYELGVVATLAAAGLPVAVLNPRQVRDFAKAIGRLANTDALDAAVLAQFADVVRPTPRPLAAPVTQALEAWLTRRRQLVEMLAAEEQRRGRAPRAIQRHIEVHVRWLRRELGAVEKDLTDTLRASPVWREQDELLRSVPGVGPVMAATLLAALPEVGRLNRKQIAALVGVAPMNRDSGTHRGRRAIWGGRAHVRATLYMATLTAIRCNPVIRPFFTRLVGAGKPKKVALTACMRKLLTILNAMMATRTAWKPAIVS

SEQ ID NO: 99764 - protein, 351 aa, unidentified
MKRINKQIQGEELFVGIDLHKLRWHVTIRTADVQIFSNSIAGRWEELKKVLNRYKDCRIHAVYEAGCFGFWLFDHLTQYGVDCIVTPPSLIPQEHGNRVKTDRLDSRKLARLLAKGLLKSIWVPSAKERFHRQVIRRRRQLVGDRVRTQNRIKSELCFYGIDLPTPRSKWSQVYFANLQRIKFNNRWMQQSFNQLLEQYEFLSAQIDKQTQLLKKLAQLPLYHDRVKILCSIPGIGLLTAMEILLELQDFSRFRRAEQLAAYVGLTPSQYSSADKIRMGRITGAGKNTVRSALVESCWLLIRKDKAMRKKYEQIKARAGGKRAIVAVSRKLILCIRRLLLDNRLYIYEPVS

SEQ ID NO: 99765 - protein, 411 aa, unidentified
MVHARCAGIDISKKDAKVCVRVQGTGRRRTAASVTTWGSMTNQILALREHLLAEKVTCVVMEATGAYWKPFYYLLDDGLDVMLVNARDARNVPGRKSDVSDAAWLADLGAHGLVRASFVPPPPIRELRDLTRARTVITRERSREAQRLEKLLEDAGIKLSSVATDITGASSRRMLEALIDGQQDPTVIADLVHWRMRPKIAALMEALTGRFSEHHRFMTRLFLDRIDAHSADIARLDARIEAAMEPFASARDLLMSIPGISRITAEAFIAETGADMSVFPTAGHLASWCGLSPGSNESAGRVKSTKTRPGNPYLKGALGVAALSVVRRKDTYFWAKYRRITVRRGPMRALVAVEHAMVVAAWHMLTNGEFYHEPGPDYFTRRMPAKTQARAVAQLESLGYKVTLEPLADTA

SEQ ID NO: 99766 - protein, 412 aa, unidentified
MQTLIERGCGLDVHQATVVACLLMVRRDGKVQKQIRTFGTTTRELVSLREWLRSEGCTHVAMESTGVYWKPIYAILEGALEIVVANAQHIKKVPGRKTDVKDAEWIADLLCHGLLRSSFVPPKPIRELRDLMRYRRKLVESQAAERNRLLKVLETANIKLANVATDVFGMSGRLMLRALIAGKATPQEMSELAKGLLRKKIPELELALEGKLEQHHRFLLELQLQRLEAAEKDLAVLEQRIRQMLEPYAAQLALLDEIPGVDWTLAAVIIAELGVDMSVFGSVSQLASWAGVCPGNNESAGKRKSSRIPSGNVYLKSGLVEAANAAARAKGTYLRDKFFRLKARRGYKRAVVAIAHKILVAIDHMLSQQVSYNDWGDLYLDKLNKHHLTRNLVHRLERLGYTVTLTLEQKAA

SEQ ID NO: 99767 - protein, 416 aa, unidentified
MISAAIERCAGIDVGKKFLAVCVMVGPLQGEPQVEIRKFGTIRAELEGLRDWLQQQGVTHVVMESTGSYWKPVFNVLEDAVKVYLANPQEVKNRKGHKTDNKDGWWLAHLLRHAMIHPSFIPPRAIRELRDLTRRRKRLLGAGTSERNRVQKVLEDANVKLGNVLTDLFGVSGQLMLEALLKGQATPEEMAQFAKGRAKKKIPQIIAALEGHQMSEHHRRMIRYSMEHMRFLEEQIEQLDQDIVAKIQESGLEPQWQLVQSVPGVREASAAAILAETGTDMTQFPSEKHISSWTGICPGNNRSAGKNRSSRTTGGNRWLRSTLTECAWAAAAKKHCFLKDKFWRITTKSGGKKAPAVIAIAHSLLILTYQVLSTGQAYQEKQAPVSDPRHKQRMIRHHIRRLGKLGVSVHGHDLGS

SEQ ID NO: 99768 - protein, 324 aa, unidentified
MTDAVLGIDVSKNTFDTNLGAGIKARSQSFANSPDGWHHLIAWLGEHKIGQVHACLEATGRHGLGIALALHEAGHVVSIVNPAQIRDFARTKLGRNKTDQVDAVHIREYAELFKPRPWTPPSPAMRRLCELQTIRAGTVAGLTEWKNRRGSGMADDLALSLAETTIQHFTSQLKAVDQAIAETIDNDVELSAKRDLLVSINGVGEALAGIVLAELPGSDILGCSAAVAAYAGLNPQQHQSGISVNRPVRISKIGNAVLRTALYMPALSAMRYNPAVVALVDRLKAQGRLKGKQIVIAAMRKLLVLCFGVLKTGKEFDPAMAMGK

SEQ ID NO: 99769 - protein, 331 aa, unidentified
METDQYIGVDLHKASFQVCAITPRGERLWEARFARTPEGIAAFVARCTPRSAVAVEATTPTWHFVDQITAHVATVCVVDTRKTKLKAGYAAKTDRLDARRLADALRRESVVSIYVPPPAIREQRELARHRLMLTQMRTRVLQRMRALRLRQGLGDPPTKRLRSAAGQAWLDALELPSQAHRVLITLRQIERDLCAQLAPVEADIAREASADPIVQRLQQVHGIGPVLGLMLRAEIGDIRRFPTPAHLASYAGVVPQVDSSASRTHYGRITKDGSPWLRWALVAVGVQTLRRQDPLGRWGRKLAVRKGAMKAHVALAREMCREIMEAWRRAA

SEQ ID NO: 99770 - protein, 347 aa, unidentified
MKFYTKLHDFYCGIDLHARILYVCILNHHGEKVLHQKIKAEQTLLSQLIAPYLGNIVVGVECMHCWYWVSDWCEQQDIDFVLGHALYMKAIHGGKAKNDKIDSYKIACLLRGGNFPLAYNYPQAMRSTRDLLRRRTKLVRHGAQLKAHIVNTNSQYNYPALELHMKNPSVREAFRHRFEDDVVQRNINFDLAILDSYAKELKYLEYFIERKAKQHRPDYYAQLRTIPGIGIILAMTILYEIGDIDRFESVQKFASYCRLVKCKAESAGKTYGTSGNKIGNGHLKWAFSEAAVLYLRGNDKARRYLNKLQKRMSKAKALSVLAHKIGRCVYYMLKHKTVFDDERFLTS

SEQ ID NO: 99771 - protein, 343 aa, unidentified
MQTITTIGLDIAKSVFQVHGVDAGGQVVIRRQLKRRYVLAFFQKLSPCLVGIEACATAHHWSRELQSLGHTVRLMPPAYVKPYVKRQKNDATDAEAICEAVTRANMRFVPTKTPEQQSGLVLHRTRHLFIRQQTAVINAIRAHLAEFGIVAPVGRHGVEELLNVVADPNDKRVPEIARACLLAFGAQLRSIKEQVLEFDRLIRAWHRSSEMSMRLDEVPGVGPVLATALVAAVADPKSFRSGRNFSAWIGMVPKQHSSGGKNRLGNISKQGDRYLRGLFVAGALAVIRYAKIHGTKHRPWLTALLARRPTKVAAIALANKIARMVWAMMARGERYKEPVALAR

SEQ ID NO: 99772 - protein, 372 aa, unidentified
MNTIAYIGMDVHTTNYTLCAISENSNNFYGRVTVPPEFKELERYFKNLHEKKGITHFICGYEAGCLGYSLYYALTEHQWKGFSVECLVIAPTSLPMPKGGRIKTDTRDALMLAQSMFNGTCSYVYIPDQSDEAVKEFIRMRDDTQQQLVQTKLRINAMCLRQGYDYKEPSRWTQKHLEWLKKLQFKEKLFRETLDEYLFTLNQQTESVARYDRRIEELAQAKRYNERVRMLCCLKGIGVHTALSLLVEVGDFNRFPAAKNFSHYLGLVPGENSSSTSTHRLGITKSGNNHLRWLLVEAANCYSRGNGLKTKAMKAKQEGCPKEIIAYADRAALRLRKKYVRIQLRSKACIAKVAIARELACFVWGMMTGHTA

SEQ ID NO: 99773 - protein, 405 aa, unidentified
MGEGRFAGADWASEEHACCVVDGAGRIVEGRRYRHDERGLAALCARLLELGVALVAVERPDGLLIDRLLDGGLAVIAIHPNQVAAMRPRFSAAGGKSDSFDSFVLAELARTDAHRFRVLVPDSDETKALRALSRAREDLVGHRIALANELRAQLECFWPGAAKVFADIDSPIALAFLRRYPSPADAHGLGEQRMARFLARHHYCGRRAPAELLARLRNAAHGRADQLEAEARRAIVLALVAALEPIVARIAELTSEIRGALHEHTDGPTFRSLFRDPKSAVCAAAMLSEIGDCRQRYPTTAALAADGGQAPVAVESGKSKHARFRWACDHRLRAAIGTLADTSRHHNPWAADIYARARARGCTHQHAIRILGRAWCAVIWRLWQDHDVYDPARHTALRQLLATRG

SEQ ID NO: 99774 - protein, 438 aa, unidentified
MSNKVFFNLDDLFISVGIDVGADFSWMSIALPNQQFVGKPYKILHNSIDSLTTAVSKIKEAEELYSLESRIFLESTGIYHYPLFCYLRDKGFNCSVINPIITKNSTNINIRKVHNDRFDSKKAALVGLKPDLKVSLMPSDLALNCRNLCREYYDLMDNRSAYVNKLQGELRMVFPQYLGIFSKVTINTSLTLLETYTSPSAFLKADKQEIIDIIKSTARFGLTYAQNKYNVIIQAATDANQFGYIIDSNIKRIRLYISFIRKYDEEINNILKSLHELVDANEDADFVKQIHLIETFKGAGFLSAVSIMGEIGDFSAFSKPKQLFAYFGLDPAVKQSGKFEGTKVQMSKRGSAIARRVIHTLTLQSISISRNGEAKNPVLREYYLKKCDSKPKLVAMGAVSHKVCNMIFAILRDNKPFKIIAPQEHIKQYNAAKCDIAA

SEQ ID NO: 99775 - protein, 449 aa, unidentified
MTEPQEIEDEEHEQILERVCAIDVAKASGMVCTRVPHPSRPGKRRTRVWEVAATTNAVLDLGAHLAGEGIEKVTLESTSDYWRIWFYVLESCGLDVQLVNAGDIKNAPGRPKTDKLDSVWQAKLTERGMLRPSFVPPAEIRRLRDYARLRTDLTRERARHWQRLEKLLEDALIKVSGVASTMDTLSVRDMLEALIAGERDPEVLAGLARGTMKAKRAALIEALTGRFEDHHAELARMLLDQIDFTGTRITQLTTRIGELIAAIPAAQGVDADGTTGPGAGNGPDAARPDALTRLDEIPGISAHGAQIILAEIGLDMTRFPTAGHLVSWAKLCPRTIQSGAKNRSGKAGKGNPYLKGVLGEIAAAAAKTDTFLGERYRRIVKRRGKLKALVAVARSILVIIWHLLARPAARFHDLGAGYYDMRTDKNRKTRNHIRQLEALGYTVTLTSAA

SEQ ID NO: 99776 - protein, 410 aa, unidentified
MSESPYAFYVGVDWASETHQFTVLTPERHLEAERRIEHTGRALSEMADWLTALADGEPARIAVAIEVPRGPVVETLLERGFHVFAINPKQLDRFRDRHSPAGAKDDRRDGFVLADSLRTDRPAFRQVHVDDPLLIQLRELSRAEEELQTELRRLSNRLWEQLQRFYPQVLRLSPAVDEPWIWALLQLAPTPVAARALRRATLARLLARHRIRRVTAETVLAELHSPALRVAPGTTEAAREHIALLLPRLQLLHEQRGRCARRIEQLLDALEGPDAEHRDVTVLRSLPGVGRVIAATMLAEAARPLAERDYHAVRTQGGVAPITRQSGKSVLVSMRYACNHRLRNALYHWGRVSAQHDPSTRRHYRALRQRGHGHARAIRGVIDRLLVVLMAMLRTGTTYDPARRRVPAAA

SEQ ID NO: 99777 - protein, 410 aa, unidentified
MIKENYIYVGIDLHKETHTAVMIDCYNQKLGEITFPNRPADFPKLVAKVKKCNTDGKTIVFGLENAYGYGRALAVWLIDKGYLVKDVNTAISHRQAKHRGAMYRKSDSDDAEAIALATLNMLDKLPDAYPNDAYWSLGQLVHRRDNIMKQRTRLVNQLHEQLCIAYPSYKQFFNDISRPTALYFWEHYPSRKYLKGKSVEDLRAELVPVSHNKCSTRTCEKILDAIAGDKVKNNAYQDARDMVTLSIVSDLQHYDKQLAEVDKMLEQMYKMLGCTLTTIPGVNVITAVKILAEIGDIKRFSNANKLAQFAGIAPLHLSSSGKGKDVATKQGNRRLQATIYFLAIQMVQISSKGTPRNPVVRAYYEKRKAEGKTSQQALICISRRLISVIYGMLKNGTEYRMPVVENAGEK

SEQ ID NO: 99778 - protein, 342 aa, unidentified
MAAFIGLDVSQKLTAICIVNEEGRRLWRGQSASAPEAIAKAIALQGAEDAVIGLETGPMSTWLVHELRARFLNVICIDARHAKAALSMQLNKTDRNDAEGIAHIMRTGWYRPVSVKSFDAHRVRALLGARLQLVGMVTRISNHIRGVLKTFGLLPGGMRGRPFTERVEALVADRPDVAPIILPMLAARSKLREQIIAFDKAIRAVVKESPACRLLMTAPGMGPITALAYVSAIEEPSRFSRSRAVGAHLGLTPKQYQSGETDRCGRISKCGDELARLCLYEAATVILSRVKRSFALKSWAENIAKRSGTSKARIALARKLAVILHRIWISGEPFDWSLPAAG

SEQ ID NO: 99779 - protein, 455 aa, unidentified
MYLPDWKWIPIRKELIHMSNNVIFNFDELFISVGIDVGADFSWMSIVLPNQQFVGKPYKILHNSMNSLALAVSKIKEAEEMYSLESRIFLESTGIYHYPLFCYLRDKGFNCSVINPIITKNSTNINIRKVHNDRFDSKKAALVGLKPDLKVSLMPSDLALNCRNLCREYYDLMDSRNAYVNKLIGELRMVFPQYLGIFSKVTIDTSLILLETYTSPSAFINADKQEIIDLIRSTARFGLTYACNKYNAIIQAANDADEFGYILDSNIKRIRLYIGFIRKYDEEINSILESMHELVAANEDTDFVKQIRLIETFKGAGFLSAMSLMGEIGDFSAFSKPKQLFAYFGLDPAVKQSGKFEGTKIQMSKRGSAIARRVIHTLTLQSISASRTGESKNPVLRDYYLKKCESKPKLVAMGAVSHKVCNMIFAILRDSKPFEIITPQEHIKKYNAAKCDVAA

SEQ ID NO: 99780 - protein, 447 aa, unidentified
MKEQKRKVKANTVKVDHRNIVGIDIGKRKHAATAVTPKGEVIASLKSFENNRADVELLERQVLQPTTNRSKPLIAMEATGQYWSALHDELQRRGYSCVVLNPIQTGNRGNKRIRKAKTDPLDSVLIARTILAGDAQATLVPDEPIYELRLLVRHRWRMIKVHGAVLRYAIGLLDQAFPEYDGIFCKPFITSIRTLIREVGLTPKTLNAKQADVKKILEKASRKRLSAETIDELLKRAKISIGTQQGESVVNGQFRMVVEYLDFVEGQVQSINKQLRERMVALDSPLMSLGIGAEVAATILAESGDITRFPGPGEYSAFCGLDPSVRDSGDSIRGVSHISKRGSPLLRWALYVSAPTMITKHRDFAKIYERHVNRHKGHRFALIAVAHKLARVIWRLVKRQTSRIGKTFTVLILALTLQEMFGRSSMSRMRQVLSSSCVPLPHCPGSN

SEQ ID NO: 99781 - protein, 464 aa, unidentified
MEKEQAKYLGIDVSKGYADFYLMDACKSSIERSFQLDDNLEGHQELASYLTKHSSDGQKIICGLESTGGYEQNWLSVLKMYGKHLPVEVYKLNPKGVKHQIESTLKRTITDSVSAEGIADYLANNYQHKQQDWLKSTFQDDQVKAGKHCYHFINGLIKQQTARNNQIEKLIYQNFPELLTYCKQGIPNWMIRLLIKYPGVSSVRRAHVEGIHRIKGISKAKAERIKELAKTSIAFSSHPVEEHMIKMLAEDLQHHQVRIDELKDCLSEIYTNRHTNILTSIRGIGDWTATALLMLLDPIDRFESTNQIAAFYGVNPKFRQSGDGKWGMHMSKQGSSEMRYLLYIAANNVVLHEPYFKKIYHRYISRGMKPRVVRGIIMHKLLRVVYGMLKNQTTFDMSTDEKNQQKQEDHPQLPGIKASRRYQKLGTTAPISRSNYKKRRAVLECQISETDIITASSSTTPIQR

SEQ ID NO: 99782 - protein, 440 aa, unidentified
MNEIDSIRLEQFRQLKKKIRGSNEYLIVGIDVAKDKHNAFFGTATGKTLFKRLVFENTSEGFKRLLIQADAVTIQHNLTKTVFGLEPTANYHKPLGEFLLKGGYMVVLVSGVAVKRNRELLDGRWDKHDTKDSANVADLISQGKCLFYEYPSMVLRELRSLLSLKRRLKKQEHGLRVRIRNHLLATYFPELDRYFGQSDSGSLEIVKWCLDPSVIAGLKYDEFVRLVAPHTRTIGQRDRLKAIWKKAADSIGCNAGESLEFEVKVMVEGLKHVQETISEVSGKIEEICCEFPEYRYLLTIPGFGPDVSSKTLGAIDDPFRFKTGKQVLKMAGLDLSAERSGKNSDAAIPVISKKGKADLRYALYQAAMIASTRNQYFIIYFTNKLRGREKEKGIKTKMRVKLAAKMLIIVYPVKCEAYFTGAWTLMKKKELFIPDYLNID

SEQ ID NO: 99783 - protein, 451 aa, unidentified
MPKLRNKAVSLPVIEPNAAGIDIGATEIFVAVPAGRDPEPIRSFPTFTVDLERLADWLQQCQIRTVAMESTGVYWIPLFQILEKRKIDVRLVNAHHVKNVPGRKTDVSDCQWIQHLHAVGLLRGSFRPDDEICAIRSLWRHRDNLIQLATLHLQHMQKALDQMSLQIHHVISDLDGTTGLAIMDAILAGERDPLKLAQLRHPRIRASEETIMKSLVGDYREEHLFTLRQSLKAYRYYQELIQEVDAQVKQMMQRLPSKVAEGEEPPQGSKRRARKTPWRNEPPQLREDLYRTFGVDLTEIPGVNSLTAQMLLTEIGPNLDRFPTAAAFCSWLRLCPDPKISGGQVLSSRTRPTKNRAALALRVATQALHRSDCFLGDYFRRMKARMGTPKAMTATAHKLARIIFHMITTQQPYDATVFQKQEERRKHQKSARLHAQARELGFQLIPINVVP

SEQ ID NO: 99784 - protein, 334 aa, unidentified
MKMDSVYIGVDVSKAKLDVYVPAKREGLRVATFEVDNNIAGFRKLRDAARSANATVCVEPTGGYELELIAFMHKFNVPVAYADALRVRQFAKAEGSLSKNDCIDAALISRFAAKIGVRVLDRQEVAAVELKRKTKFRQTMISLRTTLKNRMETEIDKEMRGMLNEQIRHIDRMIKKIERSSMETVSNNPSMKSIVERFAKVGGVGEVTAISLLSGLPEIGHLSDSKLNRLAGIAPEEKSSGTREWQRRIWGGRKDVRNALYMATTAGLQWNSILNDYYRKKRAEGHPHKWAMIPTMRKLLSLLNRIARDPNFSPIPEPESTKDNARAGRKKKTA

SEQ ID NO: 99785 - protein, 410 aa, unidentified
MQVVYERCCGLDVHKKTVVACVLVTETGGQMQRHIRTFSTMTAGLLALADWLESMSVTVVALESTGVYWRPVFNLLEEGRTIILVNAQHMKAVPGRKTDVKDAEWLADLLRHGLLKASFIPPAPIRELRDLTRYRKTLVQERAQEVNRIQKVLEMANVKLSSVATDVLGKSGRDMLQAIIEGTTDAQVLANLARGLLRKKLPQLQEALDGRVQTHHRILLQHLLAHVAFLEQALEQLQQEIEQRLLPFQEGMRLLMSIPGIAELSAAGILAEIGTDMSRFPSAKHLASWAGVCPGNKQSGGKRLGGKMGKGNVTLRALLAEVVWVISHTKDNYLSAQYHRLARRIGKNKAAMAVAHSVLVIIYHVLRTGEPYSDLGADYFQKQDAKRLAQRSLRQLEALGYEVTLTPKVA

SEQ ID NO: 99786 - protein, 345 aa, unidentified
MKIVGCDLHTRYQQIAMLDDETGELVERRLEHANGEAKQFYESLSGSVRVGIEATGHTRWFERLLAELGHELWVGDAARIRAAEVRKQKTDARDAALLLELLLSGRFPRLWRPSSEDRDLRQLLWHRQQLVWMRTSIANQLHALAMGEGLCKKKQLFTKQGRAELEALNLDPWASRRRQELLRMLDQLDVSLKQFDEAVNEQAAQSAEAVRLMTHPGVGPVTSLAFVLMVGPVTRFQRSKQLVSYLGLNPREHSSGGKQKLGSISKQGNPMLRGLLVEAGHTAARLDPELRRDYQRLRLRRGGSVAKVAIARKLAVRMYWMLRRQENYTQLVRMQGSSRGTLVQQ

SEQ ID NO: 99787 - protein, 580 aa, unidentified
MIRGCQSQELTPNLDTKEDLREFYLKQEDESSHRLNAYVSRFSLDDYQINFLPGLGHTHFVYDIPDGPVADLHIRPLGQDVRHGPVVSFTGQFRDLDIHQGRSAFIFLNAQPFIQGVMGIAFRIGHPCAGKSHRAKKELHRPLIVSLHFPAFALFLLFDRLVKLGKNFFQGIRKKPMHKPRQIFFRFHQIRGILQDFVNFCYNHIQEKAPPLGSVVVDTSIAGRLLFFCLSDRSCTYTYSNAGCWDGYRKEKHYACFVAERGRVLKKPFPVLQSKEGLEWFYQCIVEAMKEFGKTEVIVGIVPTGHYWLNLAYFLDEKGIPLVITNPMHVKRSKGLDDNLPNKHDAKDALVIARLVKDGRFSYPRILKGMEAELRVRATFCSKLVEEQGAVRNQMIRWLDRYFPEFTQVFPSFGKMALAVLEYTPFPSDLAGKELEEVLALYRQSEGLQSPQKPKAKKLIELAQHSIGVTEGQQMARIEIATLVRRYRQLEKEIEALTEQLIELVQTSVEYEWLKTVPGLDDATSVELLSEIGSLSHYQDPRQLIKLAGLTLREHSSGQHKGQNGSRSVEEGGCATSSSA

SEQ ID NO: 99788 - protein, 312 aa, unidentified
MDFLHTPPLRCLGVDVAKDSLVASEGSRILTVDNNRCGVRALLKTMRPDFVICEPTGGYELMLLEECLKVGIACHRADVMKLKAYIRSLGTLGKSDAIDARQMAAYGCERWARLPLWHAPDADEVELQALVRRRTDLVALRVAEQNRSKAPGAKAIAASFKAMLGAIQRQIDALDGQIAALVERSDRLARRIRICTTVSGVGTLSAANLIAQLPELGSLHRRQAAALAGTAPHPSESGNAKGRRRQRGGRPQAKTALFMPAMCAAQGKGQFAPFYERLIRNGKPPIVAIAATMRKIVVTINARLRDDLLQQS

SEQ ID NO: 99789 - protein, 311 aa, unidentified
MTQSTIGIDISKDILDVHRLADGATCRFANTAAGHKVLVAWIGCEGARVIFEPTGPYHRAFERALTRAGLPLVKVNPRQARRFAEATGRLAKTDRLDAALLARMGALLDLPARPMRSDFLAELSELHHAREALVKDRTAARNRAKILTLPLLKRQNRQRLHHIERQIAAVEAQILARLEADPELAHRFAIVTSIPGLSRLSAFALLIEMPELGTLEPKQAASLAGLAPVTRQSGRWTGRASIGGGRASLRRHLYMPALVAARFNPDLKAKYDQLIEAGKPAKVALTAIMRKLLVLANALLKTGRTWSPKMA

SEQ ID NO: 99790 - protein, 409 aa, unidentified
MRLFVGLDVSSFDIKACILNGEGKKLDSFSVNNDWPGATALKERVLQCIANQEIETFKIGLESTSVYSFHPSMFLHYDEDLQRFGAKVFLMNPKQIANFKKSYSDMDKTDEIDAFVIADYLRFGRNQMSIVKESQYVALQQLTRSRYQLVRMLTKEKQHFLQHLSYKCNTFSQEVDSSIFGNAMMELFLEKFSLEELADMPLEELAEFLQKKGKNRFGDPKCIASTIQKAVRSSYRLDKVVEDSIDVLLGTSIAVIRTYQQQIKELEKSIKRIMAGLTQTLESIPGIGPVFAAGIIAEIGQIERFDDETKVAKYAGLYWRTHQSGRFTAENTSLSRNGNHYLRYYLVEAANSVRRHVSDYQEYYVKKYNEVPKHQHKRALVLTARKLVRLVDALLRSHQLFTPERCVKV

SEQ ID NO: 99791 - protein, 496 aa, unidentified
MARKTKRKQSTFERLTSGKMNRKQRKEWELRLNSDTPRLDVVHPDAAGIDIGNESHFAAVAPEKDQRPVREFGSWTRELHQLAEWLKLCGVKTVAMQSTGVYWIALYDVLEKYGFEVFLVNARHTKNVPGRKSDVQECEWLRKLHTYGLLRNSFRPPEHIRGLRTVWRLRDRHVQEAGRCVQHMQKTLTEMNVQLANAISDISGVSGQAIIRAILGGERDTHKLAALRDRRIAASEEEIARSLEGNWQEDLLFELRQAVEAYEFQQQQLAACDRQLQIYLAALPDRSINLDDSATGTTPPQGPGCGGEGGGKKRRKNKRPSQNAPKSFDLAGELTRVCGVDATRIPGVDVMTIQTVVAELGTDLKSSWSTESHFASWLNLSPKRDISGGKVIRHRREKTSNRVAAVLRMGASTLLRSDSYLGARYRNLRARLGAPKAVKAMARYLACLIYRLLTQGQEWIDRGAERFELQRQQRELSALQRRANSLGFQLVAQTTA

SEQ ID NO: 99792 - protein, 376 aa, unidentified
MRKVALDLGARKTAYCEVREGKVVQRETVTAVQSLDSLLGPEQPPAVVAIEACREAWYVHDLLTSWGNEVVLVDTTRSRRLGIGQHGRKTDRIDAEVLALALERGGIPVAHVLSPRRRELRRWLGVRRALAETRAQFVTTARGIAREYGSPLPHCATERFVSNVCKKQLAPDLQAALEPLLKMLEINSIQLENVELELAKLCVTEPVIALLATAPGVGPVVATCFVSVIDEAKRFRCAHHVESYLGLVPSEDSSGGKRRIGAISKKGNKYMRALLIQSAWTILRTADRSDPLRLWAEAVAARRGKPVAVVALARRLVGVLWAMWSKGTAYEAARLAAAGSRGLSQAAQSLEFRAEALKKASKKQSMKKLTAAAVTH

SEQ ID NO: 99793 - protein, 324 aa, unidentified
MTDRSEFVVGIDVAKDKLDVALRLPTEKWRNKVVANNPRGFAALLEWLAKQGVSHAHVCMEATGVYWEGVAEQLSDAGFVVSVVNPAQIKAHAGASGIRTKTDLVDAKLIGDFCWRQAPAPWQAPSRSVRALKALVARREALVGLRTEESNRLLVAHESVRDSIQAVLNHLDQQIASIEKKIRQDIDDDPTLREQKELLESIPGLGKITIPTLLSRYGGVLRFAKAKQAVAYAGLDVAHHESGTSVRGRPRMSKTGPSKLRRALYMPAVVCMTHTAWGKAFARRLLAAGKSKMLIIGALMRKLVEIAYAILKSGKPFDPALHMA

SEQ ID NO: 99794 - protein, 459 aa, unidentified
MQNSCQNDPGSKRQIEGLPVVRRNVAGIDLGSERHWVCAPTVDGTGREIAHFGATTPELMRMGKWLQERQVESVAMESTGVYWIAPHEVLEGMGLEILLVDTRQLAQVPGRDKKSDPRDCEWIQRLHSCGLLRGSFRPREDVCMLRTLVRDKANLVAEAGDWVRRMQKSLDQMNVRVHRAVSDVDGATGMAILRAIVEGERDARELAKLRDRRCRKSEEEIAEQLSGHWREDHLFSLRQSLKMYDAIQQGIADYDREIMRQLGTMQQEEFQGQPAPPVKNPQKAQAIKKRGQEPMRQALYRMSGADLTSMDAIGVETVQVVLSEYGPDLSRFATEKEFVSHVTLAPHRPTSGGKPVKKKRRNSASTRVAGALRMAALSLRHSQTALGAYYRKLAWRKGGDVAVFATARKLATLIYRLLRWGQPYVDEGAEAYERRYHQFRITALKAKARELGYQLVQNA

SEQ ID NO: 99795 - protein, 403 aa, unidentified
MNSVGIDISKGRSTIAVMRPFGEVVISPFEVRHTDSELSELARQLKSLNGETRVVMEATGNYHAPVAKLLHDAGLYVSVINAKLVHSYGNNDLRRVKTDRKDAVKLANYGLDRWLTLPRYVPEEDTRLLLKNCYRQYRQYSKVQTVLKNNLISLLDMVFPNVNRLFSSPIRGDGSEKWVDFVAEFWHCRCVSEKSQKAFTNKYQRWCRKHGYNFSEAKAHTIHAEACGHIDVIPKSETTKLLVEQAVAQLRATSAALVALKHEMQALASMLPEYPVVMDMFGVGPTLGPQLMAEIGDVRRFYSKKALVAYAGLDAPPNDSGDVTGRHKSMSKVGASSLRRTLFLVMSVYLQNAPLDKSVYQFMDKKRAEGKPYRVYMMASANKFLRIYYATVKAYLESLEHTA

SEQ ID NO: 99796 - protein, 438 aa, unidentified
MKVMYERVAGIDVHKDMIKVAVRSPGDKPWTRKTEILTFRTFYGVLRAMARELRRRGVTHVVMEASGVYTEPVYYALCEEDFTEVAVVNPAHAKALKGHKTDARDCARLAELSGCGLLQGSYIPAAGLKEMRDLSRYRMKTVQARTPEIQRLAKALESAGIKLGSVASEITGKGPVAMIEALISGERRGAVMADLARGRARTAGKLADLSMALEGRFTDHHALMCRLHLDRITALDAAVADLEARIAATAADWQREIGLLKTIPGFGDIVAWAWIAEIGPAPHQWFASHRKLASWVSLAPGSNVSAGKRKYGRTGDAGTYIKPMLIQAAWAAIQVRGRLQARYNRLVRRLGGPKNPAAKKKAIVAIAHTLLKIACTVLKTGTGYQEPGADFYTRRESPGHRQAWLERQIQKLHPGCTVTITISPSPDPAPEAALPPGA

SEQ ID NO: 99797 - protein, 341 aa, unidentified
MERYVGLDLSRKRLNWCWVDDRCEVVDEGAVAPQPHGLARLVLELGQDVLAVIESMTGARFIHDQLELAGWDVRIADAQRAKGMAKLACKTDRSDARTLAQLAALDLVPEIWLPDPRVRQERELARFRIHLVKQRTMLKNRIHQTLMTHGIACPVSDLFGVGGRQLLERSAMPPAWRESTDACLRLIADLDREIDRCAAQISRQQPDHPYLPLLMTVPGIGPILGYTIAAEIGDIHRFATPRKLVGYTGLCPRVHQTGERDHRRSLSKRGPETLRWALIEAAQHAARNAVYRDCYHATRERAGRHRGTSVANVTIARKLAEAIWWMLHRQQRFAPAGAIGV

SEQ ID NO: 99798 - protein, 355 aa, unidentified
MLGTKYMGMDVHTATISVAVLDAAGKLIMDSVMETKARTILQFIHGLRGDLHLTLEEGTWAAWLYDLLKPHVTNIVVCDPRRNALLKEGSKSDRIDARKLAELLRANLLRPVYHGEKGLRTLKELARAYLTIGKDLTRVMNRVKAIYRSWGIPCAGRSVYNPRHREEWLRRITQASVRRRAELYFEQLDALVLLRKQARKELLAEGKKHQAWRLLRSIPALGPIRAAVLMAIIQTPHRFRTKRVLWKYSGFGVVTHTSADHRYVQGHLERSKKPALVRGLDPVHNHDLKDVFKGAASQASTGKGPFRDFYEALVAKGMRPEMARLTVARKIAVITLTVWKKGVAFDAKYLKPQTA

SEQ ID NO: 99799 - protein, 398 aa, unidentified
MATGIFHKNFPQVDELQKKVDETDYIIGLDLHKKTTAITVVDINKPDKPVFQRKRLKNIELAEVLRHFPGKKVIVAEAAYGWFPLRRMLCIMENVTFVLFDPRKTSAWIKTSGIKNDRIDSEVLSYACLKGGLPALAVYMPGEQCRDKFKLVILRDRLVGQRTQVKNQLKAIDRDYGINPYTGEVADLSGEVAFMQGLLKKQLGNLNKRVKDVETKMTKTGRKDPVIALLRSIPHIGPITAFALRNKMENTQRFQSAKHLCSYFGFGIRQKQSGDGNITGKLTKRGNTLIRKLLMQGSQGLRSNYPDYVELYFPGLAKPEQMKNFKHANKVAVATARKNLTFVYRTWKTGEMFDINTYREKREEMLKDPRRLKSEEADADLRTVDPEYTLGSNAGLTV

SEQ ID NO: 99800 - protein, 418 aa, unidentified
MDKNDDSRLEEFRQLKRDIRGSTRHLVVGMDIAKERHHAFFGTPAGKVLLHRLVFDNTRDGFEKLCFQADILKTQHGLAHVVFGMEPSSDYHKPLGEYLIEHGHGVVLVAGTAVKKNRELLDNRWDKHDTKDAANVADLVTQGKCLFYEFPSLSLRELRSLLSLKRRLKKSEQGYKVRIRNHLIAQYFPEMDAYFNYAEGLVRCLDPKKLAGLHLQEFARMVSLGNAHQMSRLEEIHTKAAVSIGCAAHPSVAFEASLLLDGLKSLHLMILETDRRIAEVCKKFPEYPCLLSIPGFGPDISAKVLGALGNPHRFENHRQVLKMVGLDLSADRSGKRTDVTPVISKKGKADLRYGLYQAALIASTRNTQFMTYFTNKLKGREREKGIGTKMRVKLSAKMLVIAWTLMKKKEMFDPGCLG

SEQ ID NO: 99801 - protein, 353 aa, unidentified
MKRDKYMGLDVHQAMTVAVVMDAEGKVVLETMVATEAAAVLRLVKSLSGPLRVTFEESTQAEWLYELLRSHVTEVVVCDPRRNKLLSEGSKADKVDARKLADLLRSGMLRSVYHGHQATRKLKELVRAYETFSLDTQRTMNRIKAIYRGRGIATPGRGVYQARTRDQWLAKLAEPGLRQRAAWLYQQLDQLKPLRKQAKQVMLAESRAHRAVSLLRTIPQLGPIRAAFIVATVDTPHRFRTKRQFWSYVGLAVVTHMSAEYEMKAGKVVRRRKPVATRGLNRCCNHRLKEVFVSAATGGTRDESYKLYLERLINNGMRADMARITLARKIAAVALILWKKGKEFDPRELNRTT

SEQ ID NO: 99802 - protein, 313 aa, unidentified
MAKLVRKITLGIDVAKDECVVYDWHTAEIVNLPNQPTAIKTWLQSLHGPVQIALEPTSHYHLVLVEAALARGHTVYLVNPRQLAHYREAVNVRNKTDPQDAWLLARYLAHEGTELRPYQPQCRQAQQLWTLLKRRAVVVQARQQLQQSFSDIKLSARALFSHFRHLLERIDLRIGKLIRALGWSAHYQRCVSMPGIGLLNGAALVAAYHRGAFANSDAFVAFLGLDIRVRESGKYRGKCKLTKRGEAELRRLLYCAAQGARSYRPFEVYYQRQLAKGLSKTAAKIVLARKLVRIAFTLMQNQTMFVKQPESAG

SEQ ID NO: 99803 - protein, 403 aa, unidentified
MNAVGIDVSKGKSTVAIFQPGEQVILNPRDFRHTQSDISSLIKIIRELDGETKVCMEHTGRYYEPVANWLSDAGIFVSAVNPSLIRKFGGDSLRTPKTDKADAKKIARYTLDRWTKLKQYGHMDETRNQLKTMNRQFGFYMNQKTAMKNNLIALLDQSYPGANTFFDSPARSDGSQKWVDFVYTYWHADCVRSKSLEAFTEHYKSWCKRKGYNFSASKAEKIYHDSAGIIAVFPKNANTKMLIHRAVEMLDLTSKTVESLRTEMDQTAASLPEYPVVLAMNGVGPTLGPQLMAEIGDVTRFEKRGSLTAFAGVDPGKNDSGQYSQKSVPTSKKGSPHLRKTLFQIMESLIQRSPADDPVYAFMDKKRTQGKPYYVYMTAGSNKFLRIYYGRVKEYLSTLSVSE

SEQ ID NO: 99804 - protein, 350 aa, unidentified
MRHLQLKDGDRLRRQCIGVDISKKKFTFCLCQSTEQDMHFYSKPKEYENSDTGFKHLLEWSGKEVDSSVPVTYLMETTGCYHEPLALFLARKGITVIIVHANKAKNFARLNGQRTKTDPVDSKMLATMGCDMPGLKPWPLPDEKYLRLRDMSRLSEQLDKTHAQVLCRMEAVTHSGYITKSVLRAHKSLLKSIEKVQATNEQDMAELVNGDPVIKAGVENMESIKCIGRKTAVLITAETLGFHQMTSVKQVASYAGLDVKKEQSGEVDKKGHVTKRGNAHIRAALFLPAMVASWSNPPLMEDYNRICVSHPQSKTIAQVALERKLLCLMYSIWKSGKKWDPEYEKHKEEA

SEQ ID NO: 99805 - protein, 413 aa, unidentified
METEHKHALHALYVGIDVHAREHRAALIPRTLLEEGTNWRKVKLLTIRNSAAEFERLDNAIRSHVSGVKEVAIAVDFTGGHYSEPLVYFLQTRGYDVYYLETKGVKAARVAFLDEENKSDAIDSASIAYLLYLRDIHGLSFRISATPAELGSKALALKSLVLQRWQLNKLANQATNRLHQLLLAVFPEGELHHFNELVRIARDYPTPKDIVASNGLDGVGGLRPREKAKILNLAANTVGIPGDSYRCLIRELSQYRAHALARRDELTSLLRAQVRAHPYGEILLSFPYLGEIAAATIISIIRDIRRWPDKKKFKKALGVYARTAQSGTSLASGRRGKEGSSHGRRVLFQTCLSCIRGNARDNDFKDYYLRQVSRGKARMKALVSTMGKLAEIIYHCLKTGELYRYQRKYRAGL

SEQ ID NO: 99806 - protein, 425 aa, unidentified
MLGVGIDWSEEFHLVALGKPGEGVIDIGRVEHSPKAVDALVAKIAALEPDPVEVRVVIENRHGMLVERLIDAGYVVVPVNPDLVARRRGPAKKKDDTEDARIACLIALDRFERLRPLIPHGDLAGELRAIARDDARAARDERRLLNRLRQDLITTFPTALAIAGDDLGAPSFLRMLERWPTANFLAEAPRDELVAFARSCKHGWPERFADKVEAALAHDHFVARDYLVRAKADTIRLAATQLLAIGAQRRAWERRMGELLLGAPRRGRAKQPREDELGQGFPGGEIYLSFPGLGDRLAARIAGEIGDHPEQFETPNSLQCYGGKASVTRRSGKSELVVACRLAHNRYLGDAVQQWAFCSLKRSGWAREFYDGQRAKGKGHHAALRALGNRWLEVLWHCLRKGVLYDESVHVANPNRALGRTAKAA

SEQ ID NO: 99807 - protein, 458 aa, unidentified
MGNRPRQREKEVPNQFQQMNPHAAGIDVGSRSHFVAVPEGADEKPVREFSCFTGDLHRMADWLDACGVKTVAMESTGIYWIPVFEILERRGFEVKLVNAHHVKNVPGRKTDVSDCQWLQRLHSYGLLEGAFRPPDQVCVLRSYIRQRMNLIRYAASHIQHMQKALSQMNLLLHNVVSDITGVTGMRIIKAILAGERDPLVLAGFRDPRCKNSQDTIARSLEGHYKPEHLFSLKQAVELYEFYQAKIVDCDRQIEEQLGVFDDQTDGQQTTPPAKGKVGGNAPGFDVRGDLYRMTGVDLTRIEGIDAYTALKVVSEVGIDMSRWKSSKQFASWMGLCPGNKVSGGKRLSGKTKSVANRAAIALRIAANSLYRSKSALGAYLRRQKARLGAPKAITATAQKLARLIYSMLKNGTQYVDAGQDYYEQRYRARVVENLKRRAIELGFTLVKTTIPCPEMCTE

SEQ ID NO: 99808 - protein, 347 aa, unidentified
MEQYVGLDVSQEETHVCVVDRDGEKLWEGHCASTPEAIGQTVIEYAPDAKKIGLESGHLSTWHWHGLTDMGLPAICIDAYHAHGVLRLQMNKTDKNDAQGIAQIMRCNWYKEVTIKSFENHESRALFRTRSNLVSMRTDVVNQIRGMLKTFGIIIKGIAGVAFESRIQEIIDEGTALAPPLQIQLEMLRMLKQKIDELDELVLDHAYACQDCRILMSIPGVGPMTAANFVLAVYDADRFEKSKSVGAYFGLTPRRRQSGDMDYNGRISKRGDRVIRHQLYEAANSILTRVKKPSSLQAWGLRIAKRSGMKKARIAVARKLAVIMHQMLQTGELFCFNPATGERAMYA

SEQ ID NO: 99809 - protein, 330 aa, unidentified
MKKINIIGVDISKNTIDFHCHGHQFTPEPVGNNLKGHRQFERWIKLKVSKQKEEVLIVMEYTGIYTYNLERFLGDRGWNYVKRPALDIKRSTGIQRGKSDTADARMISRYGWLNRDVLKPHQPMNDNLVALQQLLSYREKLVSDKASHQVRLKELKEQLSDKLHEKISQSSQFVIDMLTLEIKELDKTINNHVAEDESLQRNFELLTSIRGIGPIIAITLIVVTENFTRFDSHRKFACYCGIAPFTYTSGTSIRGKTRVSQLANKKVKALLTLAVFTAIQHDQDLKIKYEQKRKEGKPAMSVINIIRAKLVERIFTVINRQTPYILKPAA

SEQ ID NO: 99810 - protein, 323 aa, unidentified
MTYIGIDISKDSFVAAFPKVSGYQTQTYPNTVKGIRKFIGSLSVTEHHCVMEATGNYGFLLLYLLDRQGIASSMVNPKQIKHFSRMMMTVTKTDPKDACMIAMYGEKMNPPVYKMPSETVMLLKQKKTIIRQLKKQLTASKNLKSSLVMLPFQDKNGMKALDKTISFLASQIESLESELADLASSEFDRQVKLLTSIKGIGITLATALIVATGGFSYFNNAKQVSRFIGICPTYQQSGTSVHIKGGINRNEDASLRSLLYVASWSALRGNTTCKECYARLKANGKPSKVALIAVANKLVRQAFAVIKSDAPYVDGFVSTHQTK

SEQ ID NO: 99811 - protein, 373 aa, unidentified
MPKYSTAFGMDVHLRSTTVCALDADTGEAVTRRFPGNPWGEIAGWMDGFPGPSLAAYESGYLGFAPQRELAGLGVECVVAAVSKIPRSAADSASKNDRNDAARMAKAILAHDISPVWVPSPEVEGIRDLAGAYDGAAARLATAKQRLLAFLAKRGFVYGGTTPAGNPRKYWTYDFLRWLDKVRPEDDGGVRTLAALRNEVEAAAEARADLLSEYRAAVDASPIAAEVAALQSIKGCAFALAAAFSAEVGDFTRFRSGRQVTAYFGLAPSQRSSGGSVRLGGISGAGNALVRKLAVEGSWCYAAARHQPKLMPRDTGVPLEIRMHGRKGSERLLRRREEMLARGVPAAKANAATAAELVRWLWALGMMCREGAE

SEQ ID NO: 99812 - protein, 442 aa, unidentified
MVAVMIGIDPHKASHTAVAIDPAEVPLGQLRVRACAAQAERLLAWAQAWPQRIWAVEGAGGVGHLLAQQLAAAGERVLDVPPKLAARVRLLATGNINKNDPNDARSVAVAALRSAGVREVRRDDHAAVLKVWSKRYRDLGRARTQMACRLHQVLCELIPGGVPGEITAGQAERILASITPAEAVEAARWELAAEFTEDLRGIDARIRQTRNKLAAAVRAAGTSLTGLFGVGPVIAAAVIGDVRHVARFPDRDHFAAYNGTAPIEVSSGGRTIWRLSRRGNRRLNHAIHMAAVTQIRYRHSQGHAYYQKKLAEGKTGKEALRALKRQISDAIYACLQADAQRATARMKSPGGQPGNGSDSSAAGSHPGHRLFGQATPGPVTYPTAPTASFPAPLPSRASGRTGQGPGAARPRQRRQQGVLDPAAREPIMPAAGRKATGPADHR

SEQ ID NO: 99813 - protein, 347 aa, unidentified
MTYFTGIDVSLRSVSICVVDEHGEVCREAKVNAQVDAIAAWLHAFSPELKSVGFEAGALSQYLTYGLQAAGFEVICLEARQVKNTLDAMRNKTDRNDARGIAQILRTGWYSRVHIKSLHSHRVRALLASRKAILAKCVDLENELRGLLRVFGIRLAPRVGHGSFDAQVRQTFADDEMLSCALVPLLDARTVLYKTYLKLDNAVKALTKADPLCVRLMSIPGVGPVTALTFKSAVDDPARFKSSRNVAAHFGLTPKRYQSGEMDNPGHISRAGDADVRSALYVAAHSLLTRNAQWSSLKAWGMRLAKTRGHRRAVIAVARKLAVILHRMWVEGSEFRWGSQEPIAVKA

SEQ ID NO: 99814 - protein, 376 aa, unidentified
MQASNARTPIRNHSATIHVAIELSMKSWVIVIHSLDQDRLSRHRLEPGDGEGLLALIGKVRTRAASVLGRAPVVASCYEAGYDGFWLHRRLVAAGIENVVIDPASLAVDRRARSPKTDRIDGEKMIRSLMAYRRGEPRVLSVVRVPSPDQEDARRRNRERERLIQEQTGHTNRIKALLRTLGLAAGQPSRRDWAAWLAQQRDWAGKPVPANLKAELEREHARLMVVGEQIKALSKLPAPEETAHKAVQLMRLQGIGSAFAGTLTGELFWKEFKNRREVGAYPGLAPSPWRSGRVEHDQGISKAGNRRARHTAIQLAWLWLQHQPGSEPSRWFHARVGDQRGRVRRIAIVALARKLIIALWRFLTTGLVPTGAVLKA

SEQ ID NO: 99815 - protein, 350 aa, unidentified
MMIIGCDLHTRYQQVAMLDTETGELVERRLEHESGEARSFYAALSGPVRVGIEATGHTHWFEAMLAEFGHELWMGDAAKIRAAVVRKQKTDARDAAHLLDMLSSGRFPKIWRPLPGERDLRQLLWHRQKLVWMRGAVKNQMHALAMGEGVCRKKKLFTAKGRKEFEALVLGPWASYRRQELLRMFDELQSSVARLDQAVELAAKNQPLAVRLMTHPGVGPVTSLAFVLIIGPIDRFERSKQVVSYLGLNPQEHSSGGRQRLGSISKQGNPMMRSLLVEAGHTAARFDPQLKRVYQRLKFRRGASVAKVAVARKLAVRMYWMLRDTADYAQLVRMQGSPWATLVENSSSLG

SEQ ID NO: 99816 - protein, 377 aa, unidentified
MDKDSRFVGLDVHAETIAVGVAEPGGEVRSLGTIPNTPEAVRRLVKKLGPPETLRVCYEAGPTGYVLYRQLSALGVPCAVIAPTLVPVKAGDRVKTDRRDAEKLARSYRSGDLTPVWVPDPGHEALRDLVRAREAAKKDQLRARHRLGKFLLRQGRRAPTGIKAWGVKHRAWLQTIRFAHAAQDATLLDYRTEIDHAADRIARLERAIATAADLTPAPVRAVIAGLQALRGIAKLSAVSVVTEVGALSRFAKPRQLMGYSGAVASEHSSGPHRRRGGITKTGNAHLRRIVIEAAWAYRHRPAIGGTLRTRQEGLSEEVKALAWKAQHRLHGRYARLIAKGKAPTQVVTAIGRELLGFIWAIGVHVEQHAAGGAPAGA

SEQ ID NO: 99817 - protein, 352 aa, unidentified
MGERWSPHLPHLTRTVARNLRFRIYKAEKLGTLIMTNVSYTFNIGLDISKKKLDVSFSDNKTACYDNDLNGFKQLLKQISDKGRTRVAMEATGGYERSLVQFLQEKGIAVSVVNAKRVRDYAKALGKLAKTDKIDSHVIRLFTEAINPNVTEQLSESQQSLDSLTSRRNQLVKQRAIEKQHLETVINKETKRSINRTIKFLDKEIGIIEEKINKLIDLDSNLKEKVNRLTTIKGIGPVVAVTIVSDIPELGALSNKEISALVGVAPFCRDSGGMRGKRTIWGGRSQVRSVLYMATLSAVKYNPAIKVFYERLVNKGKPKKTALVACMRKLIIVANSMIRNNMEWNPHHGELA

SEQ ID NO: 99818 - protein, 355 aa, unidentified
MNDEKYIGLDVHQATIVVAVMDSTGKLVMESILKTKAATILQFFAGLRGTLSVTFEEGTWSAWLYDLLHSRVDKLVVCNPRKNALLHDGNKSDRIDARKLAELLRGNQLKPVYHGETGVRMLRELSRSYLTIVKDLSRVMNRLKAVYRSWAIPCAGRDVYYRRHRAQWLAKIHEAGVRRRAERLYEQLDMLQHLRQQARRELLAESRKHTITAKLRQIPYLGPIRVALAVALIQTPHRFRSRRQLWAYSGLALETRTSAEYRFVEGQVRRSKKLLCIRGLNKDYNHDLKGLFKGAATMASVRPGPFQDFYQATLAQGIKPTMARLTLARKIAAITLTLWKKGENFDAEKLKSQAA

SEQ ID NO: 99819 - protein, 362 aa, unidentified
MLYSGVDLHRRLIVICTVDESGTVVAHTKMKTDPVLVSEYFHRWPDQHRAVVECTTGWYWFSDLLRSLGVDMVLAHAKYLKAISYAKVKTDAVDALTLAQLLRMGYIPEAHQLPPQFRSMRDLLRQRMVMDRTRTTCIRRITSLLAQFNITKLPVSPYHSGFADFLKLCEIPEEYRMTLMLYHQQCLQATEHRKQLEHYFKAQLLPSATVQRLLSIPGIGNITASMIAMETGDIDRFADAKHYCSYCRLVPGAKNSGGKHSHRSGSKDGNQYLKFAFTESAVKAMQFYPEIKHFADRLEHRSSKAIARTVVAKELAKISYHVLSRQQDFTSFKGIEISKLRYWPRTRKPVRLTGGDPRPPSV

SEQ ID NO: 99820 - protein, 329 aa, unidentified
METMTHSAEDSKATVRPTSITVGIDVSKHHLDAARYPTGETLRVDNTRKGHSALLRWIGDPGRVQRVVFEATGPYHRFLEERLAARGLPVAKVNPRQARHFAEAIGTLAKTDRVDALMLARFGALLEPPVRAVRPEYQVQLCELVAARRALVKDRTATLNRLQTLSIKILKRHADHRLRQIAAQIISIDDEIKTLISNDPVLARRQQVLMSIPGLGVTTVHTLIATMPELGSMEEGQAASLAGLAPMTQQSGTWRGKSTIRGGRAALRQALYMPALVAMRFNPDLRRVYDRLVASGKHAKVAIVAVMRKLVVLANALIRDDRIWAPKAA

SEQ ID NO: 99821 - protein, 323 aa, unidentified
MNNNSKNAYIGIDVSKAHLDIHIRPIAKQMKIENSQRGMKRLLRFLKQTEYSVQQIVCESSGGYQRLAVRILEEEGYNVWSANPALVKSFIRSEGVLSKTDAHDAKMIALFAEKKEQSYEKEPWSQEMEDLQELVKRKADLVQMLAMEKTRLQSPTVNKACSRLIKGHIRQLEKQIKKVDTITDEQRLLNPVWKKKTEIMQSIPGIGRETAVNLLTFMPELGKITGKQSAALLGVAPYANESGCYRGKTSVRGGRSIPRRLVYMAALSASRANPVLKQFYNRLRTKGKKPKVAIVAVMRKLITFINVLLEKEKLWDSNHYKIA

SEQ ID NO: 99822 - protein, 420 aa, unidentified
MDEITQEPGALVERVAALDIGKAALTACVRVPHEDKPGVRRQEVRSYATVTPALLDLRDWLTCQGVTLVVMEATSAYWKPPFYLLEDGVACQVVNARDVKNVPGRPKTDKLDAVWLCKLAERGMLRPSFIPPRPQRQLRDLTRYRRTLTHERTREKQRAEKLLEDAQIKLSSVISDIFGASGRAMLAALITGQRNPHDLARLARGSMRAKTSALQEALTGHFTEHHAFMLGMMLDRIDALTAQIHTLTTRIEQAIAPLAAQVAQLDEIPGIGVTAAQDILAEIGTDMTRFPTPGHLVSWAKFAPRARQSSGRSKAATTGQGNPWLGGTLGEAAAGAARTKTFLASRYRRIARRRGNKRALVAVGNSLLTVIWHLLSDPGAHFTDLGPDWHDRLAPLRRKRQLIAELERLSGKKVTLHDTA

SEQ ID NO: 99823 - protein, 321 aa, unidentified
MESAIVGIDIGKKELSATLLLGDKETNGVFRNSTAGFAMLGRWLGKHDVEHAHICMEATGTYGEALAQHLHDAGHVVSVVNPARIKGFGQSELSRIKTDKADARLIARFCRAMQPEPWQPPAPEVKELKALVRRLDELKGMLTQETNRLGTADDVVKPSIQDMIGLIESRVHQVTQQIRDHVDRHPDLRGKRDLLETIPGIGPGTSAMILAEFGDVSRFPDAGSMASFCGLTPRHRQSGTSVHGRSMLSKTGSARIRKALYMPALAAIRYNPIIRAFRARLLANGKLKMIVVGAVMRKLVYIAYGVLKSGKPFDPFLATTA

SEQ ID NO: 99824 - protein, 347 aa, unidentified
MKRIAVDLAKSVYQVAESIHVGRVDRRRRLDPEAFRRYVQEQPEPVEWVMEACGTAHYWGRVAQARGHRVVLLHPRYVRPYRRRNKTDRNDCDAILEAARCADMHPVPVKSHEQQQVQQLHNLREAWKKTRVQHINLLRGILRELGVAAPSGTQAFLRQACELIERAEVCALRGALQMVLAEISLCEQSMRDSEEQLARWHADDDIVHKLDEVSGIGLLTASALKTAVGKPERFASGRHLSAWLGMTPNEYSSGERRRLGCISCKGNTYVRTLLIHGARAALLAAKRCQTRTPERLTQLQRWALQTAERIGHNKAAVALANKLVRICWAVWCHERRFSGDWQSARPA

SEQ ID NO: 99825 - protein, 357 aa, unidentified
MTIVCGIDAHDKELVCRIWRSDRIEETKRARNTDTGRKRLWEYLARLRKDLGGEKVVAGYEACGLGYTIYDEAIEAGFICYVLATGKMAKSPMDRKRKTDEYDAQKISELLRSHELAGLTLPTVWVPSMVVRDDRELIRRRFDVKADSTRIKNQIHGLLKRQGIKRPEEFVNPWTKPYVAWLKSLELPPGTRAHLASLIQQHLSLAENVRALDKAVETLSMMERYERQVQALTTIMGVGVLTSMVYLTELGDLNRFPNRRTVKAYIGLAPTSHESGEIKNRKGHITRAGPSRLRAILNQAVWARLTHDDAERKWFEGYVATHSGGKRKAVVICMARLAQLMWHRALDAQHEYERRVA

SEQ ID NO: 99826 - protein, 346 aa, unidentified
MIPVASDVHKGRCWMAMIPPGEDVKMLEPIECTREAWRQRWAELPPDAEIALEVSTSGYFVMSVLEEAGWRERAHWVHTAGIDSLRKQKSDRLDTRRLVKKLAVHDVDPLPEAWFPPPAIRALRLLARQRCGIARLRAQTKNRVQSLLEMHGLRPQRCVFTAKGRAWIQQQALPAAAQLCFDRFFRLYDFLSAERETSEAELLAAAAAFPQVALLQTIPGLGHMLAAVVWSEIGDLDRFDSADAVLNHTGLVPSSYASGEVSMQGPITRQGPVWLRWALITAANALTRSKSPLGKRYWHLRRCHKHPNVAKAAVAGSVARCVYGVLKHGAPFQAERWGRRAGKLGQ

SEQ ID NO: 99827 - protein, 413 aa, unidentified
MVLGIDVGSETHYARAFDYRGIEYSKKPFKFSNTEAGFVTFKEWILDLQERHEKDKVVPGMEPTGHYWFNLGKFLQDNEMKPVLVNPHHVKKSKELDGNNPTKNDRKDPKVIAGLVKEGRYMIPYLPEGVYADLRTASNMRFQIQSELTRIQNRISRWVNIYFPEYKTVYGKPDAVSGMMILKQAPLPEDILTLGVEGVNQIWRDAKMRAVGKARAKTLIEAARHSVGAKEGTMAARMEIRMLLEDYESRNNHLQEVMTLIEELVKQIPMAEKLMDIKGVGIKTVSGFLAEVGDVSRFSNPKELQKLAGLALVENSSGKHKGQTTISRRGRKRLRYLLFEVAMSLVAKNPEFRELHNYYTTRRLNPLKKMQSLMAIAAKLIRVFYAMLTKGVDYDPKKMVSDIKRPAVYLQAA

SEQ ID NO: 99828 - protein, 382 aa, unidentified
MCKVIMIGCDLHDKTMLLKIAVDREAAVTRSVRNTADGRRKMIADLKTQKKQAGAGRIIFAYEASGLGFGLYDQLTDAGIECHVLAPTGLERSVQHRRRKTDERDAEQLLGALRAHVLAGNELPSVWVPDRQTRDDRDLVRARVDIADKLTMVKNEIKSLLKRNGIRRPAALGKGWTRSYYSWLEQLADEQNPQLAPGASVSLASKLREIQFVEAEVLRLDEQVIALAMTDRYRGAFYELIRLKGVGNLTAMLFLTEIGDLSRFKNRKQIAAFFGLAPSTYESGQADDRKGHITRQGPARVRKVLCQATWARVRTDERTRAVYDRLVERNPKHKKIAVVACMRRLGIEMWHRAQHHPRPHSGSTQRDRPAAPSPSARAPASG

SEQ ID NO: 99829 - protein, 397 aa, unidentified
MYIVGIDIAKRKHEAAVIDGEGAVIIKPFSFTNNCSGYNRLLAMLAKAKLPLDEVSFAMEATGHYWLALFTRLQKEGFRVQVINPVQTNSIRSFYIRQAKTDPRDALLIAEVIRFGHFSESTLHPENIYELRELCRGRHAIVSMQADVKRKVVALLDQVFPEYETAFTNLFGDTSMAILQTCPTPKELSEMPLEELCHLIEVSSHKRFRMAKAQELQALARNSFGFAMAGDVFSTMIRLYAKHLDFLKQQVREMDRKIAEIMDTLDTPITTITGIGPTLGAYILSEIGDISRFSSAAKLAAYAGIDPTMRQSGEYNGVRNRMSKRGSPYLRHAIWLAASSAVLHDPALKLYFQKKRDEGKPYMASVGHACRKMVSIIYAVMRDNKAYTPYIPNEISA

SEQ ID NO: 99830 - protein, 344 aa, unidentified
MGEVITIGLDLAKHVFQVHGVDDAGQVVVRKQLRRGGVVEFFNKLPACTVGIEACSSAHYWAREIAALGHTVKLMPPAYVKPYVKRGKNDASDAEAICEAVRRPTMRFVPVKSAEQQANAMIYKVREVLVRQRTQSVNAFRAHLSELGIVAAQGVGRLADLMAVVRDQSDVRLPDAARWAMQELAGQIEALDRRIERLDAEIVSQVRLSEVGRRLTSIPGVGPITAGALLAMVPDPAGFRSARHFASWLGFAPRQKSSGGKQRLGSISKQGNRYLRTLLILGAANVLRFWRKDKPISAWLAALRARRPFRVVCVALAHKMARIVWALMVKGGVYRAAQPADAAS

SEQ ID NO: 99831 - protein, 339 aa, unidentified
MLYVGIDIAKNKHDVTALNVPGKTVLKPLTFSNNKAGFELLDLSIRQINQDCLIALEDTGHYAFNLLNFLHEQGYKVYTYNPLLIKEFAKSLSLRKTKTDKKDAHGIALKLLSNPNREQFQHDNRQVELKILARHIHRLKKKQSDWKVQYTRCLDIIFPELDKIVGKHSEYTYQLLTRYPNPQKRIEAGFDKLIEIKRLTASKIQDILSVAPRSIGTTSPAREFEIIKHYKRLIDKAKKCVNDLMAEFNSVITTVTGIGNRLGAVILAEIRNIHAFDNPAQLQAFAGLDSSIYQSGQIDLAGRMIKRGSPHLRWALIQAAKACPRFSPAFKAYLKTKLE

SEQ ID NO: 99832 - protein, 349 aa, unidentified
MSAKFSFEIAVIGIDIGKNSFHMVGLDRRGAIVLRQKWSRRQVETRLANIPPCLIGMEACVGAHHLSRKLASLGHAARLMPAKYVRPYSKGQKNDFRDAEAIAEAVQRPTMKFVATKSAEQLDLQALHRVRERLVSQRTGIINQIRAFLLERGVAVRQGSRFLRAELPRILATRCDALSPRMVRMLEDLAGDWRRLDERMEGLSSEIEIIARQDVGCERLMSVPGIGPIISSAMVAAIGTGDAFSKGRDFAAWLGLVPKQISTGDRTILGKISKRGNRYLRVLFVQAAWVVLIKPKSWDRHGLKPWLEAAKKRLHHNVLAIALANKLARIAWSVLAHSRTFEASKIQAA

SEQ ID NO: 99833 - protein, 392 aa, unidentified
MKKIVRFVGLDVHAEMITIAVAEAGEGGEVRSLGNIPNRPECVHKLIRKTLREPRGAKTLKVCYEAGPCGYDLYWQLVELGVHCDVIAPTLIPVKPGDRVKTNRRDALKLARCYRAGELTPVWVPGPEQEALRDLVRAREAAKKDQTRARHRLQKFLLRKGLRPEKGVGSWSVRYLQWIKGLRMPAAAEEVVRLDYLNEVEHCAGRVERLEQSIEEACAGASDQLREVIKALQAMRGIKLISAVTLAVEAGEFSRFKQAKQLMGYAGNVSSESSSGTGAPQRGPITKTGNSHLRRIITECAWAYRHKPGLSKALRARQKGVAPELCEKAWKAQHRLHKKYWRMLSSGKCQQQAVTAVGREMLGFVWDIGRTVENELRSKALRAAGQGNKAIA

SEQ ID NO: 99834 - protein, 342 aa, unidentified
MDHYAGIDVSLECSSVCVVDAGGKIAREGKVASEPEALIAYFGSLRLCVVRIGLEAGPLSQWLYAAMKEAGLAVELLETRHVRKALETMPVKSDRNDARGIAQLIRLGWFRPVHCKSIGAQETRAVLTARKLVQSKLLDVENSVRGILRGFGLKVGHTTNRSFAGRVEDLVVNHASLHMIAAALLSVHAVLLRELKAFDKRVRSMARVDVKAKLLMSAPAVGPIVALTYASAIDDPGRFTSSRRVGAHFGLTPKKYQSGETDYTGRISKIGDATVRTALYEAAHIMLIKPIKGCAPLKRWAMRIARRSGMKKAKVALARKLAVILHRMLANATPFNAAMAAA

SEQ ID NO: 99835 - protein, 411 aa, unidentified
MDIVHERAAGIDISKRDAKVAVRVPGKRAGTFATSVTTWGATVGQILELIDFLAAQHVTTVVMEATSDYWKPFYFLMEHSLPVMLVNARQARNIPGRKTDVSDAAWLAQLAAHGLLRASFVPPEPVRELRDLTRARAIAVRDRTRQVQRLEKFLESTGIKLSSVASELMGASSRAMLDALVAGERDPVVLAGMAKGVLRKKTPELEAALHGRFTEHHAFLVSEYLTQIDTATGMIDRLTARIEDAISPFRAARDALTTIPGISVTVADVIIAETGGDMTVFETPGRLASWAGVCPGQNESAGRVKSSHTRPGDKYLKAALGVAALSVSRSKGTYLAARYRRIAARRGPIKAVVAIEHTILIAVWHMLTTGETYLDPGADYYTRLDPQRAKNKAIRQLQNLGYEVVITPAAA

SEQ ID NO: 99836 - protein, 346 aa, unidentified
MLYAGLDLSRKRLDFCLLDGEGATVEVGAAPPDADGLVGLTRRLDRHREPIRAAIESMNGAQFVHDRLELQGWQVEIADAQKVKGLAPLACKTDRIDAWVLAELTRRDLVPAIWLPDPLVRAERERARWRLHLVRHRSSLKQRVHAVLLTHGRPCPVSDLFGVRGRQLLARLGLPEPWQATIEASLRLIDELEREISDCERELRRLGADHRYVPLLLTVPGIGWVLAYTIAAEIGDIGRFPSPRKLAGYTGLCPRVYQSGERDLRGPLAKQGPKYLRWALVEAATHACTAPVYRDRYQQTKARIGKQRGAKVAQIDLARRLAEAIWHMLSREQPFAPKGATDPLAA

SEQ ID NO: 99837 - protein, 426 aa, unidentified
MFSESHDDEQIIGRVAALDIGKAEVVCCVRLPAAQGGKRRVQEVTTHTTMTRSLTELANRLVELGVERVVMEATSDYWRPPFYLFEAHGLRPWLVNARDVKHLPGRPKTDVLDAVWLCKVAERQVLRPSFVPPADIRRLRDLTRYRVDLVGVRNAEKNRVEKLLEDACIKLSVVASDIFGVSGRAMLAAMITGERDPRVLADLARSRMRPKIALLTEAFAGLPLGTFDDHHRFLLSRMLERIDRSDADIAALDAEIEAHLVPFGDAVDRLDEIPGIGPTAAAVIIAEIGLDMTRFPTPAHLASWAKFAPGINSSAGKNKGNGSTGHGNRYLARALGEAAVAANRTHTFLGARYRRIARRRGKKKAIVAVGRSMLVVIWRILNDPDARFEDLGADYYDRHVDTATEKRNHIRQLEALGYRVTLEPAA

SEQ ID NO: 99838 - protein, 338 aa, unidentified
MSTYVGLDVSQKETEICVVDVEGRRIWRGKCRTEPNSIAVALREHAGGAVRIGMETGPLSIWLWRELRALGLKVDCIHARRVAAALSLQVNKTDANDAHGIAQVVRSGWYRAVAVKSLASCRIRAILTARGQLVSIRTTLSNQIRGLLKTFGVVLAPGKGGTFDKMVLSRCPEDALVRSAIEALLCAWRVAGERQRALDAQLIRIARASEVCHRMTSVPGVGAITALTFATTIDDPKRFGRSTDVGAYLGLTPRRYQSGEVDIAGRISKSGDRAARSLLFEAANTLLTRAKKDSDLRQWGLALMIRIGAKKAKVAVARKLAVILHCIWTDGTAFEGAR

SEQ ID NO: 99839 - protein, 429 aa, unidentified
MKNSVANKLKQVPVGYLVIGIDPHKKKHAAVIMTQDFTTHSKFKFNNSKEGFEMALERIRMEMVRTGSRGAIFAIETGGHYWRNLAYFLDERGIPFRFINQFTLKRRREGKDLNRRKNDYRDSEVAAQLLCTGEFTDTKLSHGVYAELRAAHNAYRRLVKERTRIINLVKGLLDGLFPEFTQVFKDPCGLTALSVLSISPVPEGIAAMTEDEFVNTIRTGHRGLLMRKKLCALHYAAQTSIGVKADAKSVSYELSFLVEKLQLIKRHICRIDETLVRLVNETEEGKYLLSIIGLNYISVAGLLAELGSFKQYRSAKQLIKMAGSNPTESESGGKRSAHTPMSKKGRPVLRYCAWTAVIPMLRFNPDFRAWTKKLRERPVHANPLKGREVVGAALNRLLRLAFVLVKNQTFYQVPEIESMPEPELLPVAS

SEQ ID NO: 99840 - protein, 374 aa, unidentified
MEMIVVGADTHKGSHTVGAVDAATGGAMADLTVRAKRRSFDDLLVWARGLGGERVWAIEDCRHVSGALERFLLARGEQVVRVPPKLMADARRSARERGKSDVIDAVQIARAALREGLATLPIARLAGPELDVRLLVDHRERLVGQRTALINDLRWQCHDLWPEYEIPSRALISACWQERVAGRLARAEQTARVRVARDELRRIRELTRSINALERELAGLVADLAPRLLAEPGCGALTAAKLIGEIAGIGRFATDAKLARMAGSAPIPASSGRTQRHRLDRGGNRQINCALHRLAVCKARRDPDTAAYLARKQAEGKSRREALRCLKRHLARRVWRLLQPPCEHHAPTAPPPPARPTRTVTIHCNTPSGRFSLT

SEQ ID NO: 99841 - protein, 479 aa, unidentified
MVQRRLVGIDLGIASAHTVRVLDEGGREVCRRRCEPTVASLAVVEQTALAGSVAGTRLEVVVEPTGPAWLPIAVFFTVRGHLVFRVSSAKAADLRRFLKRHAKSNGIDADTLARLPLIDPDGLRPLQLPDAAAAALDRRVRACDRLTMAAAEHKVRIKDLVRQVMPCTPLTGDLGKTDLAVLERYADPRALLRLGRDELTALIVTESKNHQGQARAEQWLAAAQAAVELYGDHPAVAFTDLAAEIATEVRLLRAIDAELSLHEAERESCYRWVDPSQLARSLPGLAKIGGPAMTAVIGDAARFPTAAHFKSYLGLAPRASETGDTDRKGQPMSKAGSRLARSTLIRAADWARKQDPQLARVYHQQMVERGAEHLKASCVVAARLAERLWTVMNRRMPYVICDIDGTPVTAEQAKQIIAEQWTVTEEVRRRRRSNKKSRAGKAPQQALTGHDKDARSVTRRPSPHRSSATPSRTVKPTLT

SEQ ID NO: 99842 - protein, 397 aa, unidentified
MYIVGIDIAKRKHEAAVIDGEGTVIIKPFSFTNNCSGYNRLLAMLAKAKLPLDEVSFAMEATGHYWLALFTRLQKEGFRVQVINPVQTNSIRSFYIRQAKTDPMDALLIAEVIRFGHFSESTLHPENIYELRELCRGRHAIVSMQADVKRKVVALLDQVFPEYETAFTNLFGDTSMAILQTCPTPKELSEMPLEELCHLIEVSSRKRFRMEKAQELQVLARNSFGFAMAGDVFSTMIRLYAKHLVFLKQQVQEMDRKIAEIMDTLDTPITTITGIGPTLGAYILSEIGDISRFSSAAKLAAYAGIDPTMRQSGEYNGVRNRMSKRGSPYLRHAIWLAASSAVLHDPALKLYFQKKRDEGKPYMASVGHACRKMVSIIYAVMRDNKAYTPYIPNEISA

SEQ ID NO: 99843 - protein, 343 aa, unidentified
MGIDVHLKSWSVTILSETSVLKKFSQPPQPEALHKFLTANYPGASCHSVYEAGFCGFWIHERLTALGIDNMVVNPADVPTKSSEKLRKTDAVDSSKLARSLRAGELKGIYTPDSKTLEMRSLIRLKNSITKDTTRQKNRIKSQLRYLGIEIPTEFVEPHSCWSKRFIAWLRQVQTLTPSGRRAIDILIAHLEELRRQKLEMTRALRELSRTERFAEPLRLLMTVPGIGQTTGMIFLSEICDISRFANAEQLAAYIGMIPMCHSSGEKDGTGDITVRKHASMRCNLIEAAWVAIRQDPAMNLFYTENCKRMIPNKAIVKVARKLVNRIYFVMKHRQAYVNSIVS

SEQ ID NO: 99844 - protein, 322 aa, unidentified
MAMLSFCGVDVSKDRLDVIVLPEQQCSAVGNDAAGWSQLIEWLRGFSISAIGLEASGGYERGIMRALLAAGMSVRQINPFKLRQFAKASGVLAKNDRLDARMIASFVAVMPTHPVQRRAPAVERLAEMVTVRRQLSDEKIAAENASRMLENPMLQRLSRRRIARLAADIAEIDERLVEIVLSDASLAERYRLLTSMPGVGAVLACTLIALLPELGRLSRTKIAALIGVAPYDFESGKLKGKRCIWGGRTPVRNVLYMAALSASNWNPTLKAFHDRLAATGKKPKVVIVAVMRKMITMLNAMVRDNIVWADRYGVRHSVPNAR

SEQ ID NO: 99845 - protein, 330 aa, unidentified
MKITEILGVDVSKSSLDCFLYSRQLSLEPTANNEKGFKSISKWLKKNVGKDLSSLMVVMEHTGIYTWQLEQYLHKHCIAYVKRPALDIKRSVGMVRGKSDKVDARFISKYGWMRKEELTAVKPLSSKQFSLQQLMSYRDKLVADRASYQSRFKELSEQAGKNLNEKMGASAQYIMEVLAVEIKQTEAEIKKLINEDEELQTNYELIISVVGIGFATAVHVLISTENFTRFTDPRKFNCYCGVAPFEHTSGSSIRGKTRVSHLANKKLKSLLTMAAISAVRFDPELKAKYEQKVKEGKAKMSALNIIRAKLIERIFAVIRKQTKYQLRLAA

SEQ ID NO: 99846 - protein, 437 aa, unidentified
MQEVEGEPLFCERAAGIDIGKQMVAVTIRVPSEAREGGRQQETREFGTTRRQLLALADWLRCWGVERAGMEATSDYWKPVLFLLEREGFDCLLYQASQVKALPGRPKTDKLDSVWLARITEQGSLAGSFVPPEEIRRLRTHTRYRRRLIQGRTAEKERCEKLLEDAHLKLSSVISDIHGVSGRAMLRAIIAGERRPEVLAEMALGRMRSKIGRLEEALDCSFFTPEHAFILEMMLGNIDHLTAQITVLDEKIAALCEPYERQVAQLDGIPGFGVTAAQDLIAEIGVDMSAFPTAGHLASWARVAPRARESGKRKGKSATGRGNPYIGGTLGETAVSVGRTQTFLGAKLRRLCRHMPKKKAQGAIMRTQLVIAHALLSDPGAEYRDLGPGYYEHRADTRRQARSHIRAIERLGYKVTIEPLAPEADPETGELITRTAS

SEQ ID NO: 99847 - protein, 355 aa, unidentified
MKNQAIQYLALDVHQATTAATVRDERGSIRMRATIATEAGAIVTLVRGLGPRVHVAFEEGTQAQWLHDLLQAHAERVVVCNVRGRSETTNKSDRLDADWLSEMLRVGSIKSVHHASTSLLTLKELVRCYTNLVDDSIRVMQRIKAIFRARGISTPGKSVYRASQRKRWLSKLESRGARTRATTLYEQLDLLIKQRPAAKAAMIAEARRHHGWKILRSIPFIGPVRAAVILAIVATPFRFRTKRQLWPYAGLAVITRSTGDQEIVEGKVRRRKRLPLTRGLNRNHNPVLKSVFKSAANAAAATDGPLRDFYDCCVGRGVRDEMAKLTLARKIASVVLRLWKKGELWDPTKLTMQTT

SEQ ID NO: 99848 - protein, 353 aa, unidentified
MTVYVAVDFHAREQTISYCDTADGEIHRTKLRHQHDDVRKFYEQFSGEVIVGFEASGYSAWFEQMLAELGHTIWLGNPAEIRRKAPRRQKNDRRDANLMLDLLLKGEFPRIYNFSEESRTVMRQLRYRHKLVKVRTIAKNSLHAIGINAGLPLKRKLLTQAGIEQLQALQLTSVLSSQRDEWLELIALMNKRIATIEEALQERAKGDADVTLLRTHPGIGLLTALALRYTLLPASRFSTTRRVTAYLGLDCVEDQSSERRRLGSISKEGSRLLRFLLNEAGQTAARRDPELKRFYKRLVHRRDKPKAKVAVARKLLVRSFIMLRDQIDYAEFVRRGVAARVARETHSPNLTDL

SEQ ID NO: 99849 - protein, 322 aa, unidentified
MIVSNQRCVGIDVSKSTLDIAISNIARSFTVPNEDGGFNQILKELKRNETQLILMEASGGLESGVAGYLQSEGFDVVVINPRQARDFARAMGYLAKTDQIDARVLLQMAKVINQHPEREKYIRPLPDAHRQLLAAMVVRRRQLTIMLTAERNRLHPSHPQNHESIRFIISVLKSEMARIEAEMSAYISKNFSELSALLSAVKGVGAATVAVLLAEVPELGTLSRREISALIGVAPVNRDSGTMRGRRTVFGGRASVRTALYMSALVGTRHNPVIKEFYTRLVAAGKPKKVALTACIRKLLTILNAMLKNNEAWDPLYHQHAS

SEQ ID NO: 99850 - protein, 312 aa, unidentified
MDAFIVGIDVSKDRLDVAVRPGGEVFAVSRTGSGIDELIERLKSRSIKLIAIEATGGFETVVAAGIAGANLPVVVVNPAQVRAFAQALGKRAKTDPIDAAVIAHFAEATNPQIRQLPDATARLLAELVARRRQIVEMIAAESQRARHITAPCLKKGIARLHKALEKELSELDDDISDHIRGTPAWAEKEDLLASVPGIGPTIARTLIAELPELGALDRRQIASLVGLAPWTRQSGQWRGKSFIGGGRSSVRRVLFMGAMVAARFNPELKQFRDRLVAAGKPKLVAIVAVARKLLTILNAILRDRTPWQPKTA

SEQ ID NO: 99851 - protein, 362 aa, unidentified
MSKKVINNQAILRQCVGIDISKDSFVACISHKTSTDEIIVKSTKKIPNSLIGYHTLQEWVSKFTNSEFPLIYVMEATGIYYEALAFDLLERGKSVSVQLAKNVKFFMQSHNIKSKTDDIDAQAIAQMGLERKLKLWQPGSIQMRLLKHLCRERIMLQAEQTSVKNQSHAWKHTYKPEKNILKRLENRLSFIKEQIQEIEQEIKSIVENDQDLAKRVANVCTIKGVGFLSAIVIIAETNGFALFNNKAQLISYAGYDVVRKQSGNSEAKTRISKKGNKNIRKALFFPATTASRFNTKMKSTYEKISERTAIKMKGNVAVQRKMLILIYTIYKNNIPYDENYQYDKERNETQKNKAESIINCPA

SEQ ID NO: 99852 - protein, 337 aa, unidentified
MERQYVGIDLHRRTSTIYRMNAEGEMLGCVRIPSQPLELAEAMAEAGDNPEVVLESAYGWYWAADLLQELGANVHLAHPLGNNWGHRRVKNDERDAKDLAAMLRLGRLAEGWIAPPETRELRELVRYRFRLVGHRSSCKAQVHGVMAKNGILPALGDMWGQGGTAQLDALELPKAYATRLDSLRDLIAFLDNEIDIFDRYIHHQLKDDPGYNAIQKVDGIGKILGAIFVAEIGDVTRFPSPKQLCSWAGLTPKHRESDEKVRRGPITKQGSPLVRWAAIEAISKYRGGEKLRADYLRIAEHAGRFKARVAVARKLLTLVYYGLRDGEIRCLESHEAA

SEQ ID NO: 99853 - protein, 343 aa, unidentified
MFYAGIDLHKQSITVCVVNEARKIEKRKRLMCANEAAIVAFFKEVIKELGPFRAVVEATASYEWLIKLIEPLADKVLLAHPGKLRVIAESTRKSDRLDAQVLAEFLSRDMVPASYRPTPRQRDHRGLVRQRSSIQRRITSVKNRMRRIMSNYNADRPDLFRKAGQEYVSSYPLSAADRICMNQLTSEWLFFLQQLKSANQALVDFAGTAPIREQHQRELLQSIPGVGFVTTEVVLSEIADIDRFDSQKQVVAYAGLAPGQRESAGKMKELHIEKAGSRYLRWALVEAAWQLVYRVPRWKTIYERLKKRLKAKKAIVAIARRLLGMMVAIMKSGEPFTATHQPA

SEQ ID NO: 99854 - protein, 347 aa, unidentified
MRFFTDPHQNYCGIDLHARSMYLCIQNQEGKVVLHRNMEARPEQFLKAIKPFQEDVVVGVECIFTWYWLADLCAEHKIPFILGHALYMKAIHGGKAKNDRIDSRKIAALMRGGTFPMAYVYPAKMRATRDLLRRRNHLTRKRADLLAHIQNTNSQYNMEPFEANISYKQNRVGVLEQFTDPDVRMSMEADLELIVQLEKQRNKLELYITKNAKNHDPQSLYRLRSIPGIGPILSLVILYEIGDINRFPRVQDFASYARLVKCARESGGKRSGTSGKKIGNAHLKWAFSEAAVLFLKGNPEGMKYKKRLVKKHGKGKALSILAHKLGRAVYFILKRDQAFDQEKFLRS

SEQ ID NO: 99855 - protein, 398 aa, unidentified
MDLPVYYELETNNGNRDYRIQIGGHYMNYNTVYVGMDVHKESFTLCSCKYEDEKASHYQRTPASYKNVLRYLAFLRTIYGEDTRFVCGYEAGCLGYSLYHQLENFNVECVILAPTTMLEQRSKRRIKTDKRDAEIIAKSLAQHNYSPVHIPTKMDNQTKEFIRMRDDHKAELKKIKQQILSFCLRQGYQYDGSGNWTAKHVKWLRSLKTEGLYKEILDEYLLTYTILTDKLNRLDQRIEELASKEEYKESVSKLTCFLGIKIHTALSVIVEVGDFQRFVSARKFAGYLGLVPGQHSSGDDRNGLGITKAGNTHVRRLLVESAQSYTRGKIGYKSRVLRSRQAGNSPQIINYADRANERLRRRYYQMVLKDGKKYNIAKIAVARELACFIWGMMTDNIY

SEQ ID NO: 99856 - protein, 400 aa, unidentified
MDVFCGIDWAEDHHDIALADRDGKLLARRRISDDAAGLALLLGLLTEHGDSADDPVPVAIETPRGLLTACLRATGRKVYPINPMAVARYRDRHSAAGRKSDHGDAVVLANILRTDRYVHRPLPADTELAQAIAVLARAQQDAVWARTGAHNKLRSHLREYYPAFLAAFADARGGITRPEARAILAVAPAPAAGAALTLTQLRALLRKAGRRRSIDAEAARLRETLRAPQMRQLPLVEDAMGRQALALLRQLDAACAAADDLEQAVIESFNQHPDAGIITSFPGLGPLTGARVLAETGDDRSRFADAKGLKAYAGAAPITRASGKTTAVLHRRVKNQRLAATGYIWAFAALTASPGARAHYDRRRNDGDRHAAAQRNLFGRLLGCLHHCLRGSPQTVDTLI

SEQ ID NO: 99857 - protein, 329 aa, unidentified
MVFFGIDVSKGRLDCAVLAAEGGRPLGRRSFRNDAEGAERAATWATQVSGAAAADTHVILEATAAYHEPVAHRLAALGMRVSIVNPAQVRSFAKGIGVLGKTDRIDAQLLARYGQLARPRAWLPPARALLDLQGLLARLDDIEADLRREGNRLEQARTRGCPDVVEQSLLASLAALEASRETLRRAIVAHVAAHGELQADLERLLTIPAVGPKTAVRMLAMLRARGFDSARQAAAYLGLVPVERQSGKSVRGRPRLSRAGNPRLRAALYMAAVVGIRRNPDLKAQHERLLGRGKCKMAALSAAMRKLVHLCFGVLKGEGGYRAGAATPA

SEQ ID NO: 99858 - protein, 369 aa, unidentified
MSHTGLRQRQIVGSLSCASKLASERGSALPRQVMLLTKPERLAGSESRIADKEGSINMSELFIGIDVSKDWLDIAATPTELSLRVTNDAAGLAQLVATLGPLAPTLVVLEASGGYETTAAMTLAAGALPVAVVNAKHVRNFAKAMGILAKTDRIDASVLAIFGERVRPPVRILPSAEQRELTELLDRRAQLVAMRAQEQTRMATALLVAQPSLIEHIHWLTERIGRLDSELSHRLQQSDIWKAKMDLLKSVPGVGKVTIVTLLARLPELGALNRQTIAALTGLAPFADDSGRRKGQRIVWGGRAEVRSVLYMATLTARRCNPVIRAFFERLINAGKPYKVAMTACMRKLLTTLNAMLKTQQPWHSDQST

SEQ ID NO: 99859 - protein, 341 aa, unidentified
MSEVSTIGLDLAKNVFQVHGANASGAVVFRKRLRRDGVLKLLAAQPACTVAMEACASSHHWGREITKLGHEVRLIAPDYVKPFVKRQKNDAADAEAICEATQRPTMRFVAVKGEEQQAGAVVFRARDLFVRQRTQIINAIRGHLAEFGMVVANGPFHVAKLVAAIEDNHTGIPAMARPILRLLADQLRSLGERVVVLDRELARRAREDEEAKRLTTIPGIGPITATALVALAPAAQAFKRGRDFAAWLGLTPLQRSTGGKQKLGETSRMGERTLRRLLIIGASATVRWAMRKGSTTQPWLARMLSRKPPMLVIVALANKMARIAWALMARGGTYRAPAVAR

SEQ ID NO: 99860 - protein, 304 aa, unidentified
MQTVTTIGLDIAKSVFQVHGVDAAGQVIIRRQLKRRYVLAFFQKLPPCLVGIEACASSHHWSRELQALGHTVRLMPPAYVKPYVKRQKNDATDAEAICEAVTRANMRFVPTKTPEQQSGLVLHRTRHLFIRQQTSVINAIRAHLAEFGIVAPVGRRGVEELLTVVSDPNDKRVPEIARACLSAFGAQLRRIKEQILEFDRLITGWHRSNEMSMRLDEAPGVGPVLATAVVATVADPKVFRSGRNFSAWIGLVPKQHSSGGKDRLGGITKQGDRYLRGLFVAGALAVIRYAKIHGTKHGPGSPHC

SEQ ID NO: 99861 - protein, 416 aa, unidentified
MPFKIFRKNCCGLDVHKTWIYACIGITDTNGRTEYKQARFSSFSKGLRELADWLAKYSCKEVCMESSGKYWIPVFNILEKTCFVTLAHPKYTKPQKGNKTDRKDAKWICDLFMCDMIKPSFIPPPDIRQLRDLLRFRMKLTYQITGMKNRALNCLTVSNLKLDDVFSDVFGKSSRSIIQHILDHPGETFDVTPFIDRRCKHSVEEIQAAVDGAVSREQAAKLKICLDFIDEQQKRISELDKEIFRLAEPYASALELIRTVPGLSKDPLTAIRILSEIGADMSVFPTSKHLVSWAGCCPRNDQSAQKVKSTRISRAGSFLKPILVQIANALLKSKDHPEFRERYRRIKARRGHKKAIIAVCRMLLTAIWNILSKVEPYSDKGYLADKLTEHSVLITKAQGLELLRKRGYIFRDELVD

SEQ ID NO: 99862 - protein, 319 aa, unidentified
MNTIHIAGRRNTERNVGIDVGKDVLDIAILELGTHWQIANDDTAVRELVKQLRRYRLTRVVVEATGGYERRVAEACTAKGLPLLVVQPMKVRQFARAEGLMAKTDKIDAQLIARFGKVLELEPRALPDEKVRKVKDLLARKRQLNEQRTRELNRLHKAQKFLQASHQRSIKQIEKEISWVEKHVVALVATVEEWKADYSIITSVPGIGDGVAYTLLGELPELGQLTHKQISALTGLAPFNRDSGTMRGRRRIRGGRAPIRTMLYMAMLCCIQHNPVMKQFYTRLVAQGKHKKVALTACMRKMITILNAMVRDQKEWQMT

SEQ ID NO: 99863 - protein, 316 aa, unidentified
MNIKTQVEINVGIDTSQSQLDIYVRPTGDYFSVENTPQGAKQAAGKIRKYQPTRVLIEATGRLELNFVCAAQTAGLPVVVCNAGQVRQFARSTGRLAKTDKLDAQDIAYFGEALQPVLTIIKPDKLRDISDLITVRRQCLDMSTMQKNRLSRMPKSVQPPIQRILKAIQKEIERIDQKLDKLVDAIPQWREQRDLLMSAKGVGRVVAYTLMSELPELGKLNRKEIAALVGVAPMNRDSGGYRGKRRVSGGRSKVRTVLYISMWSTIQYDPKIKATYERLVAAGKPKKVALVACMRKQLTILNIMMKNGTHWSEKLA

SEQ ID NO: 99864 - protein, 338 aa, unidentified
MKVYVGMDLHATNTYVGMVDEENKVLNKQRFRNELPLILAGLDPFKKDIEGVVVESTFNWYWLVDGLMDQGYRVHLANVSAIKQYEGLKQIDDQRSAFWLANLLRLGILPTGYIYPKEERPTRDLLRKRLQLVRHRTSHILSVKNILARNLGLRMKSEEAKKLEASEVKWFFPDKEMQTAVLASLGLIRHLEDQISTIENMITKKLKVRKEFARLMTVPGIGKILTLTIMLEVGDIHRFPTVGDYSSYCRCVKSIRTSAGKIIGYGNRRNGNKYLSWAYVEAAQAARRFHETVRSYYEKKMAKTNRVVAIKALSHKLTRASYYVMRDRVDYDPARLFG

SEQ ID NO: 99865 - protein, 373 aa, unidentified
MSQNTASLVTLTSDTASPSAPMIQSVVGLDVGDRFSQLCVLDAAGDVSEESRMMTTHAALEKRFAGGPRRRIVLESGTHSPWISQALAGWGHEVIVANSRRVQLIAKGNTKCDRVDAELLARLGRADPRLLAPIQHRGPQAQADLAFLRSRDALVRARTLLINHARGSVKAQGARLPACSAESFAGQATAALAGELAARLKRLLTIITDLTRQIKQYDHDFTRLATKRYPETKALTQIAGVGPLTALCFVLTLEEPARFPRSRAVGSYLGLRPRKHATSTSDPECHITKAGDPMLRKLLVGSAQYILGPFGPDTDLRRWGLALAGRGKKAAKKRAVVAVARKLAVLLHHLWLTQEDYVPLRPRSASVRTAAAA

SEQ ID NO: 99866 - protein, 403 aa, unidentified
MNAVGIDVSKGKSMVTILRPFGEIVSSPFEIKHTSSDILSLIKLIHSIEGESRIVMEHTGHYYEVLAQQFSAAGLFVSAVNPKLVKNFNNDSLRKVKSDKADSIKIARYALDKWQNLKPYSIVDELRTQLKAMNRQFHFYVKQKTAMKNNLINLIDQTYPNANTYFNSPPRSDGSQKWVDFVYTYWHVDCVRKMSLNSFVKHYQNWCKQKKYIFNKSKAEEIYTQSTELVPVFPKNEITKRIIRQAIAQLNSTSATVETIRILMNETASKLPEYPIVMQFKGIGPSFGPQLMAESGDITRFTHKGALTAFAGVDPGVNESGSYAQKSVPTSKRGSSNLRKTLFQVMDVLIKTMPQDDPVYQFMDRKRAQGKPYYVYMTAGANKFLRIYYGRVKEYLCILSESS

SEQ ID NO: 99867 - protein, 330 aa, unidentified
MAQNGRIVGIDVSKRKVDACVRGPVAHLTVPCTPDGEAALITWLQEHQVEQAVLEASGGYERPWAAALRRAGIVVRIVDPKRVRYFARSAGRLAKNDVIDAEMIARFAETFADDPAPASAPDAAREEIDQLMTARALLLKQMGQTRQMGEHQQPAVVRKAQAAIEKAIQAQLAKLDAEIEAKIAAQEALAARKALIESVPGFGRIFAAGVIAWLPELGRISNKAAAALVGVAPYDDDSGARQGERHISGGRREIRDLLYMAVLGAATQHNPVIKAYYQRLRAKGKKTKVALVACMRKLLVILNVMLRRGEPWNPTTTGLLAAPSEPAPAP

SEQ ID NO: 99868 - protein, 416 aa, unidentified
MAMDVVHPRCAGIDVSKRDAKVCVRIASGGRAKAKSTVTTWGAVTNQVLALCDHLIAEQVTLVVMEATSDYWKPFFYLLEDGPFEVMLVNARHVKNLPGRKTDVSDAAWLAQLGAHGLVRGSFVPPQPVRQLRDLTRTRTIIVRERSREVQRLEKLLEDAGIKLSSVASDLTGVSGRAMLEALVEGVRDPIELADLAKRRMRIKIPQLVEALTGRYNEHHAFLVRLHLNQIDQHNQSIQDLTDRIEVMIEPFRGVRDLIVTIPGISTTVADVIIAETGGDMSRFPSAGHLASWAGTCPGSNESAGRIKSTHTRPGNPYLKGALGIAALSAARSKDTYFAAKFRRIASRRGPMKALVALEHAMLIAIWNMVNTGSYFTDPGGDFYSRLDPDKAKNRAISQLKRMGYAVTLDPLVDAG

SEQ ID NO: 99869 - protein, 321 aa, unidentified
MKRYTEIIGVDISKAVFDSFGPLSGHAQFTNSDNGFSAFAKALPKDSLIVLEATGYYHYRLAQFLDKKGFAVSVVNPLSVKRFLQMKLAKIKTDKSDAKAICEYAQINDVPKYDAVSHTRSECFQLFRLLESYQKKSTATKNKIHGEQVLGIPSAFVYRSLQRDLKHLEKEIKAIELRLLRLVKKEQQEQLSLLTGIPGIGPKTALFLIIATNGFSKFERASQLCSYVGITPTIRTSGSSVRGKSRISKIGNKRLRNLLFLCSFSACKHNQSCRALYERIVAKGKSKKLALIAVANKLLKQAFAIVKSGRSYDENFSSTLV

SEQ ID NO: 99870 - protein, 400 aa, unidentified
MSKRQARVWAGVDAGKGHHWAAVVDETGATVWSRKVDNDESAILAAIGEILGLADEVHWAVDITGTSSALLLALLAAHGQRAVYVPGRTVNRMSGAYRGEAKTDARDAYVIAETSRQRRDFATIDVPAQLAADLALLTAHRSDLVADRVRMVNRLRDVLTGVFPALERAFDYSAHKGALVLLTGCQTPAAIRRRGRARLTAWLANRGVRGADAVAATALEAAQAQRTVLPGEDVAAAIVADLAAQILALDDRLKKIDKQIRETFRSHPQAEIIESLPGMGPILGAEFVVAAGDLTAYTDAGHLASAAGLVPVPRDSGRRTGNLHRPKRYSRRLRRVFYMSAQTSVIREGPNRDFYLKKRAEGCKHVQAVIAVARRRASVLWALLHDNRVFTPAPPVAHAA

SEQ ID NO: 99871 - protein, 372 aa, unidentified
MGNDSTVYVGLDIHKESIIAAYAVGLGEIQDLGEVGVWQHDLDRLCTRMQSKASQVHFVYEAGPCGYSVYRYLTRKGHRCTVCAPSLIARKPGDRVKTDRRDAQKLVRGLRMNDLSAVHVPDVVDEAFRDLVRAWCGARSDLRQAKQRLKSFLLVHDVRYTGKANWGEAHRRWLSKFVFPHANSHLAFQEHLRTIEERLAQCERLAKNLRDAAREWRFYPAIQALQTMRGVQFTVAVGLIAEIGELSRFQSPPQLMAWLGLVPSEHSSGPRKRQGAITKCGNSYARRLLIEAAWAYRYTPKVSPTIQKRHEGIAKPIIDRAWDAQVRLCKRFRKLSARGKPHNIIVVAIARELTGFIWDIARLAMSTATATR

SEQ ID NO: 99872 - protein, 320 aa, unidentified
MMAQNCRVVVGIDVAKDKVDACIRALSQRQTLPSGVKGRRRLIAWLRKHRVDRAVMEASGGYEQDWAKVLCEAGFEVRVVDPKRVRNFARSAGRLAKNDVIDADTIAWFAETFEDAPSQTHDAAREQLAALVKARKAVIDLKTRLQNQNEHAVPGAVQKAYARVLKGLDAEIARLEDAIVVTVKATPAFAARAEIIESVPGLAETASAVLIAGLPELGTVREEIAAALLGAAPYDDDSGKRRGERHIKGGRRWVRNALYMPCLGAATQNNPVLKAFYRRLIARGKEPKVALIACMRKLIVILNTMIARGEKWDPSRYALR

SEQ ID NO: 99873 - protein, 386 aa, unidentified
MVELTIIGIDPHKESWTAVATDQRSNRLAAMRYPVSPAGYRKLRRFALKYSEPVWAIEGAYGLGAPLAALLIDDGVAVWDVPAKLAARVRLLSTGHGRKSDQDDALSVAVVAATSTRLRPVQADAASMELKVLTEYRDDLAGTRTQTVNRLHTIMNLLILAGAPRQLSADTAAKLLRRVHSADELSTTRRMIAVDLITEIRRLDKRITTVTERITTRTAATGTTLTVICGIGSLTAARFLARTATIHRFPTQNHFAAYAGAAPREVSSGDVIRHRLSRGGDRQLNYALHVIAITQIAMTTGPGRVFYDRKRREGKTKKEALRALKRRLATVVYRRMLADVETKAVSPAGQSGTTLISSVTGSNPITGSSEKSLTGPTSNKPNQTAA

SEQ ID NO: 99874 - protein, 404 aa, unidentified
MEGTSAGIDWAAEENALCVVDAAGGRLAEGMFAHDEAGIRRLVTRMRELGVERVAIERPDGLLVDRLLEAGLTVLPVHPNALKATRPRYEVSGGKSDGFDAFVLAELARTDSHRLRKLTPDSDETRALRALTRTREDLVGARVRLANELRAQLDAFWPGAARVFADVDSPIGLAFLGRYPAPADARGLGERRLEGFCARHGYSGRRTPAELLARLRSAPEGRAGALEAEARRGAVLGLVAALRPIVEQVRELTSQIAGAVRAHPDGQVFLPLFKDPKSVITAARLVAEIGDDRSRYPTRESLAADAGMAPVARESGKRKVATFRWACDKRLRDAVATLADATRHTHPWARKVYLEARARGLEHPHAIRVLGRAWLRVLWRCWQDGVPYDPALHGNLRRLQPAGG

SEQ ID NO: 99875 - protein, 320 aa, unidentified
MEQYIGIDVAKEELSVFDGTNERIFQNRQGLSTFRAYLRKAFPDLCKVVLIFEATGPYSQYLIELCASQGIKAWVVNPKKSSHFAKALGNRSKTDPIDAKTLYTFSKVVDPKDILVPQIDHVREELSLYLSSYDFVIKTQTAIANRIEALSHHPHTPKELLVLLRHDLARAEKTEARLLARMEELIKADGDLSRDYENLLTIPGIGKICAITLLAFFRTYGETKRSEITALVGLDPTRKESGTSVNGRRKISKGGNKRVRKVLYFPTLSAIQHNSNIRTFYERLVANHKPKKLAVIASMRKLVLIAHAVYKNKTPYQEAA

SEQ ID NO: 99876 - protein, 417 aa, unidentified
MEDLEFFVGIDWGSESHQVCLMDRQGSVLGERAFRHGGAGLAELANWILDATGAQPHAVGMAIEIPHGPVVETMMERGFMVHSLNPKQLDRFRDRFSPAGAKDDRRDARTLGDALRTDHHAFRHLDPAAPEIIELREWTRIANDLTGDRTRLVNRARQQLWRYYPQLLKIENDLTKTWIRELWSLAPTPDKARRIRVKTIAGLLKRHRVRRITAETVLERLREPAIAVAPGTTEAAVAHVEVVFAQLTVVGQQLARAYHEMDRLVTALSQTEASPEHQPETTAQRDVEILNSLPGVGRIVLATLLAEAHDPLLRRDYQALRCLSGVAPVTRRSGKSLIVVRRLAAHNRLQDAVHHWASVAVQHDAVSKTKYAALRSRSHGHARALRSVADRLLCVACAMLENQTMFNPDSSRHSRAA

SEQ ID NO: 99877 - protein, 376 aa, unidentified
MKAPSTRPAAVLGLDVGKSSHWACLIDRDGGVLASAPVRNREAELDALFASAPAGTLVVDQFRNIGSLAVRRARAAGLGVAHLPGLAASRAAGLFAGEAKTDERDAAVIARTALGVPDSLSGVPGRGEALEAARALSSQRDHVVACATRDKNRLRAVLLESCPALEAAVDLSDRRWLELLAGFGGAWGIARSGAEGPRAEAAGEAAAASTAPPPALVEAENRQVRFLAARISEALDEAGALEAETAALLEGDETYACLLTVPGIGPRTAAQLAVSVDIGRFPDHDHLASYCGIAPRVRSSGTSVRSVRASRRGDARLKSLLIFSCNSLVRSSGRYGEYYRACRARGMGHGRALKAVARKRLRAIYAVMRDRVPYRE

SEQ ID NO: 99878 - protein, 487 aa, unidentified
MKSIFKKRNKQVEALFESAGSSNKVMCVAFDYAKKMHKCVICDGMGRQLHKSFNVYNNRDGLGFLLGKISGACSKYHIKREHVFFGGEDCGSFAFNFIHALVSRGYLVIGMNARQTKIERENALASNDLIDTIGVASMMLKMKGRTIGEATKDVHRIKHLRRLRKALLKAHSSSAQRIYKVTDQLLLDFLKQDESGLVPFSRASLWLMDERFCIERIQTRQRPSLVKNLRNFNIKDPEGVADKLKSLADNALPPPDEMIPPLQRSLMEEKSLYTGLGKSLHDLDIDIAKQLARTKGAMLTTIPGIGLRWAPALFIELGDPLRRRNVHSMAALGGIVPGSKQTGGDDKDPVVGRRNRKCSSSLKLALMSGAFSIAQYGLKEMRESYRYDREAGRDAKARMAQKLLRISLHILDYGNFFVPPALMTDYTVQQMADYYEMMWPKVLVKWRDKGAILEATAPGAPLREWRNMAQDLYKIKLNLKSPQTGRK

SEQ ID NO: 99879 - protein, 383 aa, unidentified
MQPTRANDFTPEVEVFAVALELSSKSWKIALHDGKREKPAIQTVSGETAAGRLNETVQEIEKFKAKWGLAVEVRTVVLYEAGQDGFWIERALSKLGYEVVICDPASIPVERHKRRAKTDRLDAIKLVLTLRGWLRGEYDRMHVIRVPTVEAEAQRHVVRDRGELQKETQQHRDRIRKLLRTVGCWDGVGGDVGARLNKRELCCYDGDPLSAQLQQRLEQECKRLELAQQQLAALEKGMAEQLPPEVRQRIADLERLKAVGPVGATRLVLELFWRKFENRRQVGACVGLVPQPYDSGESRVDQGISKQGNRRVRALLIEMSWFWLRYQPDSVMTKWFARRTQGGQNKRGKRIAIVAVARKLVVALWRYLEHGIVPEGAQLKRAA

SEQ ID NO: 99880 - protein, 343 aa, unidentified
MQAVTTIGLDIAKSVFQVHGVDAAGQVLIRRQLKRRVVLGFFQKLPVCLVGIEACASSHYWSRELQALGHSVRLMPPAYVKPYVKRQKNDMADAEAICEAVARANMRFVPTKTPAQQSCLMLHRTRHLFIRQQTAVINSIRAHLAEFGIVAPVGRKGVTELLHIVADPSDKRVPEVARACLAALGNQLLSIKEQIVEFDRMIMVWHRSNETSKRLHYIPGVGPMLATALVASVAHPRTFRSGRNFSAWIGLVPKQHSSGGKDRLGSISKQGDRYLRSLFVAGALAVIRYAKIHGTKHRPWLTALLARRPTKVAAIALANKLARMAWAMMAKGERYKEPVALVA

SEQ ID NO: 99881 - protein, 350 aa, unidentified
MTRYIGLDVHSQSTALAIVGESGRKLGSKVLETSAPVLIEALRAIPGPRRLVLEEGTQSSWLAEVLGPHVEKLVVTVPRARTGEAKSDVADAFARAEELRRGALDKTVFKSAATPLRQALKLYQPLTTDMVRAKNRFRALLRSRGLQVNAEDPYDPTPKKLERMLKQLPTGMRFAAEATLEQIMLLEDLRNRAEDVLVGEASKHPAFGKLLTAPGFGPIRVATVLAIVVIPDRFRQSHQFWSYCGLGVLTVVSSEFRFRGGLPVRQRQPMTRGLKPGNPMLKNVFKGAALTVALRLLNHPMHAHYRQLLKRGMGESLARVTIARKLAAIVLAMWKNMEAYDPAKHHIHHP

SEQ ID NO: 99882 - protein, 386 aa, unidentified
MQKLNDLSRSLAVLEPDVTLIAVIEMSLSSWLVAGIVPGVERQPLKKLAVDESALLKLVHRWREEAEKAGRRIKRIVVAFEAGRDGFWLARWLKACGIEAYVIHASSIAVSREHRRAKTDRLDTELLKRAVLGWLRGERDHCKMVAIPTIKDEDAKRPNRERDSLVGERSRIVNRMKAALVRLGIRGFNPKLKRAAERLDGLRTPEGEPIPPNTMAELRRDMERRRLVNNQIRQIEEARLERLEQTPSDGPHAMVRLLARVIGVGIETADMLVHEVLTRNMRDRRAVARYGGLTGSPDESGRRRREKGLARSGNARVRRGMIQLAWRFLLHQKNSALAQWYRARTENARGTRKPMIVALARKLLIALWRLVRQGVVPDGVVLRLAQ

SEQ ID NO: 99883 - protein, 474 aa, unidentified
MKKHKQAEAKTKSEAIKPIGEQEPDSAGIDLGANEIWVAVPADRDQKPVRQFGAFTRDLMAIVQWLVQLGVRSVAMESTGVYWIPLYQLLEEAGLKVCLVNARHVKNVPGRKSDVRDCQWLQYLHSVGLLLGSFRPAQAICASRSIYRYRQNLLSMAAQHVQHMQAALDQMNIKLHHVIDDLSGVTGQAIIAAILSGQRDPVQLAQLRDKRIKAPEAAIAKALEGDWRKEHLFVLAKAWAQYQEVQKQIQDCDQELWNYTRELEACTQVIKPAKVMRLKSKLMGVEPLSNPPTQKRFRRKTSKNQPEGPWQQELERFFGVDLTAIPGISVLTGLTLMTELGNDLRAFKTEHHFASWLCLCPDNETSAGKVLRRRTRRSQNRVRQALRMAASSLHHDKSYFGDKYRRLRARLGAPKAITAMAHQLARILWTLITRQLPFDPSVFAYHEKAHQQRRLKRLATSARQMGYHLTPLAA

SEQ ID NO: 99884 - protein, 350 aa, unidentified
MRRHGENRKVKVVGIDLGKNSLQVHGVDADGRKVIGKKFSRQQLKEHLVTLPVCTIAMEACASAHYWARLLKSYGHEVRLIAPQFVKPYVKSNKSDAADAEAICEAAQRPNMRFVPVKAIGQQDIQAIHRMRSLAVGRRTAQINQIRGLLLEYGIEVPAGRFRLLKRLPEILEDAENGLTDLFREELSGLQGELRHLDERIAHYDEKIEQIARADERAKRLQTIPGIGPKIATALLAAMGDVHVFKNGRELAAWLGLVPRQRSTGGKPTLLGISKRGDVYLRQLIIHGARSILRWVDRKTDRNSRWATALQERRHKNIAIVAMANKMARIAFALLKNGETYRAELTPAAA

SEQ ID NO: 99885 - protein, 354 aa, unidentified
MGKSILRYGLGLDISKKDFQACIAKVLESNEEKIIASKKFSNTPAGFALFIEWIIKNKKQKELSLRILMEVTGVYHENLLHHLFESGFEVVLETGKRVKRFKEMLGYKSKNDKLDAKAITIMACRNYGKLWSPISKHIIQIRTALRHRKALIAKRVQCANQLEALLHSKYPFKEIEKSLKKMIKMLKSETQAIEKKAFEFAARDKEMLEKVKMIVDSVKGLGMLTVLTVVAETNGFHDFRNSKQLVSYAGYDIVENQSGSFMGKTKISKKGNAQIRTILHMGSVSVIRFKIEPFYDFYIRLLKRNGRIKKKAMVAVQRKLLILIYTLWNKNEAFDISYYKQIENKELEMELEKV

SEQ ID NO: 99886 - protein, 335 aa, unidentified
MTNSIKEKLDVAVITAVGLSETAQRECYEFKNSVSGFRQLVKWVERNSNGIATSSWLFCGENTGDYSKPLCNFLYGKGYDIWLENAKSIKDASGIRRLKSDRADALMIAEYAMRNYDKAFMYEPLSASLSQLRELFLYRQMVIRHRCSFQVRRGEKRLAMEKSPVKTIISQSGRHIVSELNKEIEKIDKRIAELIDSEEELKEIYHIVTSVPGIGCQNAVCLIVYTDNFRRFNYDARKIACYYGIAPFGKNSGASVHTDPHVHYLANRQIKAMLTQAALAAINHNPVLSQYYLRLVERGKKKQVAMNNVKNKLIHLVTAMVRNRQVFSPEYKISA

SEQ ID NO: 99887 - protein, 410 aa, unidentified
MRYYLGVDWADQTHAVWVVNESGMKVTAGAVAHTAEGLGAWGRELDEWRAQGIELWAAIERPDGRVVDLLLDHGVVVYPVNPKALDRARDRFRQSGAKSDPFDARVLADFLRTDHGHLRALQPSSEAAQELKLLTEDCQRHIRQQTRLVNQLTATLKAYYPRALEVAELTTTLAREFLQAYPTPEALTALTERQWQRWARTHRLTEARTGDLWKVLRQPQLPVPAHVVRAKTRLMRSLVEQLTPVVAAVAQYRKAIDDFFARLPAAQWARTLPIGKHGITAPTLWARLGDAPGRWESFRHLQAHAGTVPVTKRSGKQQRVVQFRFACDKALRYVIDQVAFLSLLSSAWARAYYDQQRARGHSHRQALRALGAKWLKIIFVMWERHVPYDEQYHLATMTRQQLRQRQEQIA

SEQ ID NO: 99888 - protein, 359 aa, unidentified
MRYVGIDYHKRYSVLCATDERGQELKRRRISGNSATGFAQFFSELGEESKVVMEACWNWGWLYDLLAKIEGIDEVVLAHPYKTRLIAEAQIKTDRLDAQMLAKLLRGDLIAQSHAPSAATRARKHLLRQRLFWVRLRTMLRNRMHAILDRQHGLERPQLKNFFSRRGQTWLEEVQLPCAEDQPLLKQDLEVAELLEGKIKQLDRSIGQSQSEEEKLLESIPGIGPLFSSVIATEIDGVGRFNSATKLAAYAGVVPTTHASGGRVFNGRLLWQCNKWLRWALIEASWSAIQFSGYFGSIYRCARARGKNKNIAITMVAHRMIKIIWLLLTEKRPYTETLPDRSEDGMTVVVRRKVLGLAS

SEQ ID NO: 99889 - protein, 445 aa, unidentified
MKHTRKRYVGLDVHKDSVEYCILDTAGKKIDGGRIICEQSVLKQFATKTLSAKDHVALESTANTWSVVDIIEPHVAKVVVGNSMKTKAIAEAKVKTDKIDAMILAQLLRCDFLPTVWIPDAKTRVLRRLSSFRKALVQDSTAAKNRIKGILNHLLIKHAVVWSKNGLEELKNLDIPAHERTIMDCEIAILEHLGTQIEKGESEIKKLAYEEDNVRILMTLPGVDYNTATAVVAAFGDITRFKDADHAASYLGLVPRTKQSANSCHHGSITKAGASLARSLLCEAAQHLSRNEGPLGVFVRRLLQKKTWNKAIVAGARKLATIAYHMLKNKEPYRYASVVRTQQKLSLLRYSVTGKRLEPPRYRYDEKLREHIKTNGDVAVTFTPPIADVYAKEGLPAARSFNELSVGEQRAIKEMGLTEIVRKSETVQVIVKPKKQKQVPCAKVE

SEQ ID NO: 99890 - protein, 367 aa, unidentified
MKQSSKIFVGMDVHKDSIDITVAEQGGEVRRFGEVSGERSALLKAVRKLTSRGGELVFVYEAGPCGFWIHREIAALGHACWVVPPSLIPQRPGNHVKTDRRDSENLARLARAGELACVHVPDVRDEAVRDLVRARDDAVIAQRRARQQLKALLLRNDIRYVGKTSWTSAHLRWLSELKLPQPAQQIAFQEYVDAITVATGRIGRFEQAIREEASTWRFAPAVVALQAMRGIQFVHAMTLIAELGDLTRFESPRQLMAYLGLVPSENSSGQRRRQGSITKAGNAYARRVLVEAAWAYRHPARLTRIIALRQEDLPKPVCDIAWKAQLRLCAKYRRLRARRVLETKIIVALARELSGFVWAIGQQVKPQ

SEQ ID NO: 99891 - protein, 352 aa, unidentified
MSKVFGCDAHKRYSVFDSMNERGQAGLAVRVENERGLFRRYLNGLPAGSQIAIESVGNWYWMIEEMEKAGHVPRLAHAAKAKLMMGQINKTDKLDARGLALLLHNGTLPSVWIPPGELRDQRELPRMRMGLVRVRTMLKNRIHATLAKYALDIPEVSDIFGRTGRMLMKKRLEELPPFTRRSVETQLELLDQVEDHILGCEKQIQEVVQASPEMKLLMTLPGVGQILAVVMALEIGQVSRFPGPDHLASYAGTVPRVKSSGGKTFLGKVRPDVNRYLKWALIEAANVVVLNQGRWPNRHVVQLYGRIRQRRGHAKAIGAVGRHLAEAAYWILKRNEPYKEPHGQKPISSSQE

SEQ ID NO: 99892 - protein, 338 aa, unidentified
MSLYAAIDLHSSNSVLAVMDGDGKPVLRCRRPNELPRLLADLAPYRDALVGVAVESTYNWYWLVDGLMDHGYAVHLVNTTAIPQYDGLKHGDDDSDALHLAQLMRLGLLPVGYIYPREQRATRDLLRRRFSLVRQAVKLTLSIQSSFSRTTGKQLSGNALRRLTPTQLNDLFPELSTRYGVLIQFKLWLTLQEQITALERWVRKDLARPDRLVRLQSVPGIGPILGMTILLESGAIERFASVGDYASYCRMVESVRLSNGKRKGHGNRKCGNRYLCWAFMEAANYAVRFDPLIRRWYERKRARKHRVVAIKAVAHKLARACYHMLHEGTTFDRARAFG

SEQ ID NO: 99893 - protein, 361 aa, unidentified
MVKRGPCYGLKHQKEKRSMDHFAGLDVSVKDTSVCIVDDTGRIVREVKVASEPDALLAVLTNPSYHFKRIGLEAGPLSQWLFSALAEASLPVICVETRHMRAVLKAQINKTDRNDARGIAQMMRVGLYRPVHVKTLRSQKLRVLLTHRKLLQSKAIAVDNDLRATLRNFGLKVGVVGTAKFEARIKELVENLPDLTILIEPLLIVRRAIREQIGVLHRRVLAVVRDDDVCRRLMTVPGVGPVVALTYRVTVDVPARFRKSKSVGAVFGLTCAKHQSGENDRPGAISRCGDEMMRMMLYEAAQILLVRSTKWSWLKAWAMKIARHRGMKKAIVALARRLAVIMHRIWVDGTEFRWTREAAAA

SEQ ID NO: 99894 - protein, 334 aa, unidentified
MGAYYVGLDVHSRETVFVIQDPTGAVIGRGALPTTPEAFARMCHQYQLPAGTPVALETGTSAFYVARALSALDLKPIVIDAHEVRLKAHRPGQKSDRRDAFELCDGLRRDLYRSIVHIPSPAISTLRTALSRRRHFIRIQTAEVNATKRLVRGAGWLGGKRGSLRNASGWERLIDALASEPTLQTHTRFHYAVWQQAGEQVRAIDHLLGDLGRGFRDDVRRLETVPGVGPIVALTAVAVFADVERFGSAKHVASYAGLVPSTYQSADRDCHGHITKRGSAELRTMLCEAAQHARRPSHPLHPYFLKALCPAWLQKRGRRRGPPALPSALRPVAG

SEQ ID NO: 99895 - protein, 323 aa, unidentified
MTDMLGIDVSKETLDADWAHGPRRRRRTFQNSPGGWQKMLAWLEDGGASDVHVCMEATGRHSLGLALALHDAGHVVSIVNPAQIRDFARTKLGRNKTDKVDAALIREYAELFKPMPWAPPSPAMRRLCELQTVRAGIVGGRTEWRNRIGSGLGDDTATKLAAATIEHFTRQLEAVDKAIAETIDQDAELRGRRDLLLSVIGVGETLAALLLAEMPEPGVLRRSSEVVAYAGLNPSHHRSGTSIDRPTRISKIGNAGLRSALYMPALAAMRFNPAIAALRARLTNAGRLRPKQIVVAAMRKLLVLCFGVLKTGKRFDPCIAMPA

SEQ ID NO: 99896 - protein, 320 aa, unidentified
MTTQAKPPSAVIGCDVAKHTIVVFDGRDNRTRTIPNQPEALAAFAKSLDPDCLVVCEATGGHELHLLAAVTAAGRAAHRADARKVKAFIRSYGTLGKTDRIDARGLYRYGTERHPSLARWQTRDTWRDERQQLVLTRQDLIDAKVAYDNRLAAPGVSAAKPYLQAVLTTLEQQISAIDAASQALIEAHEPLHQAVETLTAVTGIGRTVAVSLLALLPELGSLDRWQIAALAGLAPHPNQSGTTDAYRRTKGGRPAVRKLLFMAALSAARHHKTLRPFYERLLAKGKPKLVALVAVMRKLVVMCNAMLRPAAVVTAGVTAV

SEQ ID NO: 99897 - protein, 387 aa, unidentified
MEARTVDALPPVAADHAAVRCLVAIELSKKSWVVAINTPLADKISRHTVPGGDWKGLLELLQRVRARVARAVGRPVEVIACYEAGYDGFWLHRLLEDHGVHCLVIDPASVQVDRRARRAKTDRIDAERLLRSLMAYLRGEPKVWSVVRVPSVAEEDDRRLHRERGRLIVERIQHVNRIKGLCAIHGIYDYKPMRPDRTRRLDELRTGDGRALPPRLKAEIARELQRLELVLQMLKEIDAERNAIASARVSAHTNAKKIQDLVKLKAIGPEFATVLTGEVFYRPFNNRRELASYVGLTPSHLQSGSTCRDQGISKAGNPKARTTMIELAWLWLRHQPGSAFSVWFRERVGNLRGRIRRITIVAMARKLLIGLWRYLETGMIPTGAVLN

SEQ ID NO: 99898 - protein, 387 aa, unidentified
MAAVMIGVDPAKRSHAMVVLDERETQLGALQVGNDSAGYRDMLRLARRWPERTWAVEGAAGVGVQLAQRLVADGETVLDVPPKLSTRARIFDVGHGRKNDPGDARTVAVVAIRTKGLRRVVVDDEMVALRLMSERRRDLVRSRTQTVNHLHQLLMELIAAGAQRNLTATKAKALLATVRPRDVAGRTRRQLAADLVEDLVGLDRKLTELDKRLKAAVAATGTTLTDIKGVGTATAAMILGEVGDVRRFPSRHHFATYTGTAPIEVSSGEVQRHRLSRAGNRQLNHALHIVALSNKRYDPRGATYYAKKVAAGKGKKGALRCLIRRLCDGIYRHMVDDQQQRTQRSPGGQLGATLQSSAAGSHPNTGTSEQPHTGLRHDHTPGLPAAS

SEQ ID NO: 99899 - protein, 456 aa, unidentified
MTRTMARIKQRKRKSGVENLHVIQPNSAGIDIGASEIYVAVPGDRSNEPVRRFDTFTDDLHEAAKWLKECGIESIAMESTGVYWIPVFQILDIYGFDVILVNARHVKNVPGRKTDVQDCQWLQYLHAVGLLKGSFRPDQDICAVRSLLRHRDNLVKSTSSHVQLMQKSLTQMNLQIHNVISDITGVTGTKIIDSILAGERDPYKLADLKDPRIKADKKTIAKSLTGDYRREHLFTLKQTVASYRHCLELIRGCDAEIESHLKEFESRLDVDEPPTPPSTKSKRKPKGNAPDFDVKTHMHRLLGTDLTEVDGISDLTAHVVFTEVGPDLSKFKTVNHFCSWLGLCPNNKISGGKILSSRTRPGSNRLAQALRLSANSLWNSKSYLGNHFRRMRARHGAPKAITATAHKLARIIYHLIKNQKAFDDTVFAEQEQAHQKRLKNRLANQAKSLGLQLVSA

SEQ ID NO: 99900 - protein, 304 aa, unidentified
MLLQGKRTASKSVTNSQTGIDQLQAWLKNRKADHVHACLEATGGWSEEVAIALVEAGHVVSLVNPSRVKAFAQSEMLRTKTDRIDAGLIARFCLLHQPEPWTPPAPEIRVLQGLVRRQQSLIEMRVEEENRKGAPLVPAPVLASIEATLDHIERELQRVEHEIEKLFGDFPTLRRQRELLITIPGIAETTAARILGEMPNITGFRDVKAVAAYAGLSPRHYQSGSIEYRSRLVKTGNAQLRRALFFPAISAMRHNPRIRALAERLRSRGKAKMTIVAAAMRKLLTIAYGVLKSGEPFKSLPATP

SEQ ID NO: 99901 - protein, 406 aa, unidentified
MLFVGDDWAEDHHDVELQDEAGGRLARARLAEGVAGVTRLHELIGAHLSEDAGPGEVAIGIETDRGPWVQALIAAGYRVCAVNPRQVARYRERHGTSGAKSDAGDAHTLADMVRTDGHQLRQVAGDSEQAQAVKVVARAHQTLIWERHRHLLRLRTALREFFPAALEAFEDLTAPDALELLARAPDPASAARLSRPQITAALKRARRRQADDKAAAIAAALRTVHLAQPPAVAAAYAATVRSLVSMIAAFNAEITVMEDQVKACFGQARDAEIYLSQPGLGQVLAARALGEFGDDEHRYTTARNRKNYASTSPITRQSGKKKIVLARFIHNGRLADALHQQAFCALSASPGARAYYDELRGRGMGHHAALRQLANRLVGILHGCLKTGTSYNEHTAWAHHQDQRAA

SEQ ID NO: 99902 - protein, 346 aa, unidentified
MRYFAGIDVSLEASSVCVVDGEGRLVREVKVPSEPEALVALLGRLGLAFERIGLEAGPLSQWLHAGLEHAGLPVVLIETRHVKAALSAMTMKTDKHDARGIAQLMRLGWFKPVHVKTLLAQEVRALLTARKLLVEKLRDIDNSLRGILRGFGLKVGRVGKAGFAGRIRELVAGQAMLQAVIEPMLQVHDALRKQHAILHRQLLWLVRDDEVCRRLMTVPGVGPVVAMTYKTAIDDPTRFVRAKAVGAYFGLVPRKYQSGETDRNGRITKVGDAMARTALFEAANVMLSRAVGFSALKAWAMRIGARHGTKKAKVALARKLAVVMHRLWVDGATFRRDPMPAVASAA

SEQ ID NO: 99903 - protein, 341 aa, unidentified
MNKTLFCGIDLHSNNAMYVITDEEDRQLFKRRLPNELPVVLAALEPYRQRLQVVAVESTYNWYWLVDGLMDYDYPVCLANPAKMEQYDGIKEANDLTDAAFIAHLARLNVLPTGYIYPRADRPVRDLLRRRTLLVRYRTSLKQSLQNMVVRQTGRSLGWRKVRDLDNEARAELLGDDDCLPFVADQQVELIELLDERIKRFEQKVLEHAHLRSAYECLLTLPGVGVILGLTIMLETGEIGRFKRVGDYTSYCRCVRATRSSNGKKKGSNNSRNGNAYLSWAFVEAVHHAIRCCPAAKKFYDRKMAKRNGALATKALAAKWTKAAYYMLQRQESFDLKRVFG

SEQ ID NO: 99904 - protein, 363 aa, unidentified
MNSVYHTELSSLEETRGQFNGGKADIKLGIDVHQDFYVVVMQVGGSNPKPPQRFHKQAFLLWAAKLKSRSAEVHAVYEACGFGFSLQRQLSQLSIHCYVSCPQKLDEHNKRVKTDSLDAKTLCLRLDRFVRGNREALAMVRVPSEEEERSRAIHRQREQLVKVRKILEAQGRSLMLNHGIEPVKNWWKRNNFAALPLPAWIKELLQNSQPILIALQQKISALTLQLQVAAAFNQPRGLGAMTSVMIDREIGDWHRFNNRRQIASYTGLCPGEYSSGHTRLQSCVTKHGNPRLRAALVELAWRLVRFQPNYSAVRKWKERLAKGTPTTGAARKKAIVALARQLAIDLWRIRTGRLSAEALGLEI

SEQ ID NO: 99905 - protein, 469 aa, unidentified
MSQIKKQKRKKKEAQVLQLPVIREDAAGIDIGATLIHVAVGPGRDEEPVRTFETFTRDLKAIAVWLRTAGVKTVAMESTGVYWIPLYELLESEGFKVLLVNAHHVKHVPGRKTDVSDAQWLQYLHSVGLLQGSFRPTEDICAIRSLGRHRESLVQASSQCIQMMQKALTQMNLQLHNVISDITGASGMRILQAILDGERDTEHLESLCDKGIKAKPEVIMGSLEGNYRSELLFILGQNLKRYKDLQSLIGDCEKEVGRLIDAAPAKVNLADKPLPPATKRGSKRSASAPPCLPDLREKQYRMLGVDLTQVPGINTQTVQDFIGEVGPDLSRFRSASAFSSWITVCPHNKISGGKKLHSKTRKSKSRAAKAFRLAAQSLAHSDEALGEFYRRMRGKFGPPKAITATAHKLARIVFHMVTTAEPYDASVFTRAQEKHRLHQENRLRANARKLGFQLIPIQLPSDNQGVVVP

SEQ ID NO: 99906 - protein, 334 aa, unidentified
MKQEIIKQNVGVDVSKDDVKVALSHLTVDYRVVVRSTRTFPNTPKGFGQLQEWVNERKYPTQTAHFTMEATGVYYEGLAYFLYEQGYCLHVVLPNYAKKYGQSLGIKSKTDKLDARTLAQMGLERELRVWQPVSPSLYELKQLTRERDALVRNRTAASNLLHAYRHHGKPNQDSISRSIKQISFLDQQIKQIEKEITSFVNQDKTLKTRIKYLLSIPGVGLLTAATIVAETNGFATFENIKQVISYAGLDVRIVESGKWKGKSKISKRGNSHIRKALFMPSLSKIKHNQETKQFYERLKEKKAVGMIAVVAVERKLLGLMFSLWKKEEMYRKAS

SEQ ID NO: 99907 - protein, 441 aa, unidentified
MAMRKKDETVVFPNAAAIDVGAASHWVAVPHERDAEAVREFGAMTDDLHALADWLLACGIDTVALESTGVYWIPVYEVLERRGLTMWLVDARQMKYVPGRKSDVQDCQWLQKLMSLGLLRAAWRPGDEVCVLRAVVRQREVLLREQASWVQRMQKALLQMNIQLVEVLTDVMGLTGQAIIRDIVAGQRDPAVLARHRNYRVKASVAEVERALTGNWRDEHLFVLAQALSMYDSLAERLLECEAKMKALLGPLERHPIALEGASKPSGKNSPRFDLRAALARWAGVDLTRINGLAVTSVLTVLSEIGPDLSRFANVKHFCSWLGLCPATKISGGKVLSARTRRSTNRVRQTLKVAAMSLSRNNSALGAFYRRLCSRMDKPRANTALAHKLARMIYFMLTRGEAYVDQGQQQYEEQQRQRSIAALRRRAANLGFAITPAAATP

SEQ ID NO: 99908 - protein, 372 aa, unidentified
MEERIKFHVGLDVHKESITVAAAELGRAPGRLIGKVAHDVGKLLKLLAKIGPAEDLHIVYEAGATGFGLQRALAAKGYICEIIAPSQIPRRPGDRVKTDGRDSVQLAECSRAGQLSAVWIPDPEDEAIRDLSRAREDAVNSRVQARHQLKGFLLRHDIRYTGKTSWSLAYYRWLVTLNFGAGAAHTAFTEYCLAVKSADDRVERLTKALLASITGWRFEHVVGALQALRGVAAITAIGLVAEIGDLSRFSHPRRLMGYLGLVPSEHSSGERTSRGSITKTGNAHARRLLTEAAWNYRFKARIGREALSRQEALSESIRTTAWKAQLRLTRRFAALRERGVQVNKACVAVARELAGFIWAIGLQAQQEKPRTP

SEQ ID NO: 99909 - protein, 430 aa, unidentified
MLRNYSTQREKIERITDKTLIIGIDIASHRHYAQALTWRKTEVIKGLFFNNERQEFERFLDWMNRAKEKMEANNIIVAMEPTGHYYFALEEYLEALGIEVVIVNARDVNYMGKTYNNDNSKNDPRDAYLIGYLCSDGRYSVTTRPKEGEYAEIRELTNHRDHLVKRQTGSINELHCIFSQIFPEYKKVKESGISEGLLAVFLELKSLDNIIKAGWEGVYEALKKHKKHQIGRKKAKQIHELARKSIGVKRKVKTTQTVLISLIQEYQFYQNQINTIDEQINELIKGMDAAQRLMEIDGIGPVIAATFLAEVGDIANFKSAKQIQKLAGYAIRTNISGETEGSMRITKMGRKRLKKILYQASLSTIGTNKEIKQIYAYYTQEREKPLKKMKAVTAISCKLIRIFFSLLKYNHHYDGQKMLSDIKRPQGKAV

SEQ ID NO: 99910 - protein, 416 aa, unidentified
MKSVKTKKIKKFNPKSLIVTIDIGKGTHYGYFRAPDSTEVVFTSRKSFNKFYHKMRRFADSRGLEDITVGFEPTGPYGEPLFHYLKDKPVKLVQINPMHTKRVKELTGNSPNKTDRKDPRVIADVITLGHVLTVVIPKQAAAEMRRLSFARQRSIKKRTAAKNQLNDLVYILFPEFTQIFKDITCKSAMHLLGDHPLPEDIAALEPAALATMLKKISRGRISADKAAQLHSAAQHSIGIKEGRQAMCLEISQLIGEIGMHTQFIEHCEQQMRQGLKQIDYSSSLLSIKGLSVVTVAGLIGEVGDFRQFKTISEITKLAGLDLYEISSGKHQKGKRRISKRGRPLMRKLLFFAALNTVKSGGIMRDHYQQMLQRGMKKIKALVAISRKLLAIIFALVRDHSVYMENYRREHKLKLAA

SEQ ID NO: 99911 - protein, 391 aa, unidentified
MNAVGIDVSKGKSMVAALRPMGEVALLPQEFLHTEVGLEQMACAIIALGENTRVVMEATGRYHEPVAAALHEYGIYVCVLNPLFIKQSGGGSIRKVKTDKADAMKIAKYGLDNWVDLREYTPMDTVRQQLKLCSRQYNLYMKTVVSLQNNLISLTDKTFPGVNEMFSSPERTDGHQKWVDFVMTFWHCDCICRVSEKAFTERYRKWCKRKGYHFSAEKALDAYAGSCGHFTTLPKNDNTKLLITTAAQQLLASKTTLAALRAEMSRLAKQLPEYDTVHAMYGVGETTAAQLIAEIGDVRRFPRRSSIVGFSGVDPAVNQSGKHEAQSTPTTKRGSPHLRKTLYQIACTYLRKAPADEPVYLFLDKKRSEGKPYFVYITAAQNKFLRIYSAI

SEQ ID NO: 99912 - protein, 342 aa, unidentified
MERVTTIGLDIAKSVFQVHGVDGTGEVILRRRLTRARLLAFFTKLSPCLVGIEACATSHHWARELRKLGHDVRLMPPSYVKPYVKRQKNDTADAEAICEAVTRPTMRFVEVKTQQQQSVMVLHGTRTMLMRQRVQLSNVIRGHMAEFGVVAPVGREGLLSLTDTLHDEADDRVPAEARHCLQMLAAQLRLVNAQILENDRQIRVSARATDVGRRLMGIPGIGPVLASAFVASVPDPHAFRSGRNLAAWIGLVPRQNSSGGKERLGGITKQGNRYLRQMLFVGAMAVIRYAERHGTRRPWLVQLLARRTTKVAAAALANKTARMVWAIMTSGQKYREPELRTA

SEQ ID NO: 99913 - protein, 391 aa, unidentified
MDDTIRFVGLDVHKRRTVVAIADSGRDGEVRQYGAVETERSAIAKLAGKLARGGKTLRFCYEAGPCGYSMHRWLTGLGHECEVVAPSLIPRRPGERVRTDRRDAVKLARLHRAGELTAVWVPDPAHEAMRDVVRARAVAVSAVRRARQQLSGFLLRHDRIYSRKAWTGAHRRWLAELKFEHAAQRVVLEDYIDAVGAAERRRDGLTEQIRELLPRWSLAPIVEAVQALRGVAAIAAIIIVAELGDPRRFDNPRQLMAYLGLVPSEASSGEKVYRGGITKAGNRSARRALVEAAWTYRFPARRSRHLLARCQAASPAIQAIAWKAQLRLSSKYRKLVGRGKLATVAVTAVARELIGFIWAIARELPAIPPEPVPGCGATNKVTTRIAARREG

SEQ ID NO: 99914 - protein, 381 aa, unidentified
MNESSKTLYVGLDVHKDAIAVAYAPEDRGAEVMSLGAIGTRQCDIDKLIRKLQSKGAPLVFVYEAGPCGYWLYRYLTRQGLRCHVVAPSLIPRKPGDRVKTDRRDAVLLARLMRSGDLTSIYVPTVEDEAIRDVSRGREDALRDLKATKYRLKAFLLRQDIRYEGRANWNAAHLRWLSEVVCPTPAQQIVFQEYVRAVTEQSERVQRLETELHEHVKTWRLSPVVEPIQALRGVERTGAVILVAELGDLTRFDTPRQLMSYLGLTPSEYSSGERRRQGGITKAGNTTPGARSSKARGPIGTRPRSADIRNSGWRSCRWRSRPSAGAPVQTLPTADRPGQARQPGRRGHCPRDGGLRLGHRPHRPAGPLTGERIEENGAQTH

SEQ ID NO: 99915 - protein, 312 aa, unidentified
MIEQCFGGIDVSQDRLDVLLLPQATRFSVTNDKAGWNALTARLRGLTIAAIGLEPSGGYERGVIRALLAASLSVRRINPNRLRQFARARGALAKNDRLDARLIAEYVAIMPTRVVQRDAAAERVAEVVTMRRQLCDEHVAVENQATHLEDAMLRRLAKRRLARLKADLLLLDKRLAEMIAADPDLACRYERLTSMPGVGPVLAFTLLAMLPELGRISRKQIAALVGLAPYDFDSGKLRGHRSIYGGRMPVRNVLYMAALSACRYNPALKAFRDRLAAAGKKPKVIIVAVMRKMITTLNAMLRDSVLWQPQSN

SEQ ID NO: 99916 - protein, 337 aa, unidentified
MEYFAGLDISMKETHICVVDRDGKVVYQAKAFTSPAAIAGELAKAPAAQRIVFETGRMATTLYHGLRALELPVVCIESRHAYQALKSLATHKTDRNDARGLAHLARTGFYKPVHVKSLPAHAVRALIIARKKLVCQRVTLENQIRGLALVFGVRLPRGLSRAFTARVNSASGELPALSGALRGLLAARDALLGAIAAINHDIKQLARSFEDCQRLMTIPGVGHVTALAFVAAIDEPNRFRRSRDVGPYLGLVPRRWKSGEIDYTGSISKVGDRRVRTLLYEAANVMLTRYRGDLALKQWALRIGRRSTMRKARVALARRLAIIMHAMLRDGTEFHAA

SEQ ID NO: 99917 - protein, 350 aa, unidentified
MTVIKQVVGIDIAKDTFSVRFGTISDRQEERFLASAAFPNEKRGFRKLLEWTRKQIISPDAPLWFVMEATGAYYEHVAYFLHEHDQQLAVLLPNKVKHFAKTLEGKSKTDRLDARSICQFGLERPLHAWQAPSPQMKLLKELSREYNAVQEMATQVKNQLHAKDHTYQPSPETTQRLRAQLQLFQKQLRSIEQQLRSLVNDDDDLRRRIANITSVKGIGFMTAVTAVAETNGFALITSEKQITSYAGLDIVIRESGKQQGKPALSKKGNRHLRRAVFMPALAACRFNPALRAFYLRLVRTKASKKVALLAVARKLLCLIYILWKKNVPYDPDYRHQNIRSVPDNFALQTA

SEQ ID NO: 99918 - protein, 350 aa, unidentified
MKTIAKAVPVTIGLDIAKNFFQVHAVDGSGQVVLRRKLSRGDVLGFFEAQPKVLVGIEACGTGHYWAREIAALGHEVRLLPPTYVKAYVKRGKTDAADAEAICEAVTRPNMHVVPIKTPEQQAALMMHRSRELLVGQRTALVNALRGHLAELGIVTAKGIHRVADLLAELVGAENGKIPPLARASLRCLVAQIEVVETQIEALEALIIEWHKANEASKRLAKIPGVGPITASAVVATIGDASNFTSARHLSAALGLTPKQNSSGGKPRQGGISKAGNTYLRRLLFIGAIAVIRSKRAQEAGSWLARLLERRPAKVVAIALANKTARVIWALLRRGEAYRATTRAANAAPA

SEQ ID NO: 99919 - protein, 350 aa, unidentified
MSMVCGLDLHRGQITFDALEVETGEVWRGRIWSPDRARLRRWLVDELAPRAHGGPVAVAVEGCTGWRYVVEEVAAAGFEAHVAEPADTQAARGRKKRAKTDRSDARLQRELLQKGELPESWIPPEAVLEWRERTVLYKSLLDQRRVWIQRIHAELFQHGVALPEGEIRAEQTRAWLAGDGVQLSGAARQRISAGYRMLDATDAELVPLRKQLESFGRRQPACQALASAHFGIGPLTAVFVWAELGDCRRFSRSMQVVRHTGLDVAVDSSDRHRAGGYLCRQGPPTLRWALFEAGKAAARATSPDYDYYQAVKKAHDGKLAAIAMARKLARRCYHTLRAVDPEMVYAIPTA

SEQ ID NO: 99920 - protein, 415 aa, unidentified
MEILHPRCAGLDLSKRDAKVCLRVVPAGKARATQEITTWSSMTGDILALRDYLIDAAVTCVAMEATGDYWKPFYYVLEDGPFEVMLVNARDAKNLPGRKTDVSDAAWLAQLAAHGLVRASFVPPEPIRHLRDLTRTRTAITRERTREAQRLEKVLEDAGIKLSVVATDITGRSGRAILGAMVAGERDPGVLADLSVRQLRVKIPALTQALAGRFSDHHAFLVDLHLQLIDQHTAAIDTLTQRIEEAMSPFLAARELITTIPGIGIGIPTADVIIAEIGADMTRFPSPGNQASWAGVCPGHHESAGRTKSSKTRPGNRWLKGALGAAALSIARHPGTFLHVKYQRLARARGKSRAVVAIEHTLLATVWTMLTNSTLYDDPGPDYYARRNPERTKHHAIHQLEALGYHVTIEPRGAA

SEQ ID NO: 99921 - protein, 380 aa, unidentified
MHLRKEGVNMRIAVGMDLHAKTAVCYAVFAGGGDPTKKETEFLDSFNKNYRSVKSDPDGLISVAKALKNHESHILIENSTKTFEAYWILTNYGCHVTVAVAQDLYRITKSLKKTDKNDSAELAQYMRRRLYGENEFSECMMPSKDWMMNRELCRTIFYEKLHLADIKRRARMHLMLQGIYLSREYTDIFCRKAVEEMKLTKDPCLLIFINEAGSIKKRTDFEAKLIRDRFENNEDYQLLLSIPGIGSVSAAYLISLITDIERFGSRAAFCAYFGIVPKVKESADHSVNCCTTHRGDEDARRILCQCAMVHIRVCDSVVTEMYNRLRSNGKCHKEALVAAARKLATVIWSVLKNRTEFSTDADLLARAGEMEDSVMEELSE

SEQ ID NO: 99922 - protein, 485 aa, unidentified
MAARRRGKQKPAVVAGPVEIPDAEHELVIERVAAVDVAKAAGKVCVRLPGKTGRRFSRVWDVAARTGAITELGEQLVELSVEKVTVESTSDYWRIWYYLLEAAGLQVQLVNARDVKNVPGRPKTDKLDSVWLAKLTEKGLLRPSFVPPAPIRRLRDYTRLREDLTRERARYWQRLEKLLEDALIKVSAVASTLDTLSTRDMIEALIAGERDPRRLAELARGRMKAKRSELIAALDGRFDEHHAELAQMLLGQIDALSTQIDTLSARIEELIAELPDDAGAIDHTDRDGPDSSTGAGGDADPDRASTGGANPIRVDPAAVAECGLSTVERLDEIPGIGAHTAQAILAEIGVDMSRFPTPEHLVSWAKLCPRTIQSGPVTRAGKTGKGNPYLKGALGEAAAAAAKTNTFLGERYRRIVKRRGKLKALVAVARSILVIVWHLLANPITRFRDLGPDYHTTRIAIERRLRNHIAQLTAMGYRVTLEPAA

SEQ ID NO: 99923 - protein, 365 aa, unidentified
MNSTHVAVDLAKSVFQVAVSTTPGHIDQHHRLSRERFRRFFAERQGMDVLMEACGTAHHWGRELEALGHRVRLLPPSDVARYRDGNKTDRADAIAILEASRNTAIDPVPVKTIEQQALTSLHRLRSAYVADRTARINTVRGILREFGYALPQGSRTFVAHARVALDDEPLPQHLREELSRALDEIVTFRNTIAEITNRIEALGASMPDVSFLRSVPGIGVLTATALVAFVGDPHRFHSSRHFASFLGLTPRESSSGLRRRLGRISKRGDTYLRMLLVHGARSALLAARRAQQPGPLQLWALRVELRSGHNKATVALANRLARIAWRVWREQRSYEPSPAFGHPGQGGRHQRAATRSRGWLTVGPA

SEQ ID NO: 99924 - protein, 359 aa, unidentified
MEVYVGMDVHRKRSQVALLDHDGGQLLNRNLPNDPAELTPILGALAPGTPVAFEAAYGWGWLADLLEELGLEPHLVHPTRCKAIASARLKNDKVDARTLAHLLRADLLPEAWIAPPQVRDQRALLRHRAALVRTGTAVKNRIHAVLADRGVRVPQRLWSKAGRAWLAKLDLPPAPRVIIDDCLAVIDQLTPIITRMERDLLAHARPDPRVQALRELPGVGRITAMTLVAEIGDITRFPTARKLCAWAGLTPQVRNSDRTIRHGHITKQGSAAVRFVLEEAAERAKTRPPFAGFYVQCAARRGRHIATVAVARKLLARCFHVLTEVDNHQHNHAADHASEKVTSPGALEVPHVPATRPFN

SEQ ID NO: 99925 - protein, 398 aa, unidentified
MTESSDYESVQVFIGVDVGKDTHHAVAINRSGKRLFDKALPNDENKLRSLISDLKQHGQILLVVDQPATIGALPVAVARSEGVLVGYLPGLAMRRIADLHAGEAKTDARDAAIIAEAARTLPHALRTLKLADEQIAELSMLCGFDDDLAAQTTQASNRIRGLLTQIHPALERVLGPRLDHPAVLDLLQRYPSPEKLASLGEKKLAAQLCKLAPRLGKRLAADIAQALAEQTVVVPGTNAAAVVLPRLALQLITLRKQRDEVALEVEQRVLAHPLYPVLTSMPGVGVRTAARLLSEVACRAFASAAHLAAYAGLAPVTRRSGSSIRGEHPSRRGNKALKRALFLSAFAALRDPLSRAYYTRKMSQGKRHNQALIALARRRCDVLFAMMRDGTFYTPQAS

SEQ ID NO: 99926 - protein, 408 aa, unidentified
MLFVGDDWAEDFHDVELMDEAGRRLAKARLPEGVTGVARLHAMIAEQLGEDADEAGVRIGIETDRGPWVAALVAAGYTVYAVNPLQASRYRDRHSVSGAKSDPADAHILADMVRTDAHQLRPVAADSPEAEAIKVLARAHKTLIWERTRHVLRLRHALREYFPAALEAFDDLDAPDTLELLGKAPDPASAAKLNRSQIRAALKHARRRDVDTKTTRIQAALRGEQLGRDAVITGAYAATTRSIVAVLGALDEQVKTLQGQVEEHFGRHPDAEIILSQPGMGPILGARVLAEFGDASGRYADAKARKNYAGTSPITRASGKKKVALARFVHNDRLIDALISQAQSALQASAGARAYYDKQRARDLGHNAALRQLANRLVGILHGCLKTRTPYDEATAWSHHNQNQQAAA

SEQ ID NO: 99927 - protein, 320 aa, unidentified
MSRVNMGVDVSKDFLDVAVREGQQTPRRFANNPVGIDQLVAWVREINPVRVIFESTGAYQKKAVMALLAEGLPAVVVNARQVRDFAKATGKLAKTDAIDAAVLAHFGEVVDTVVRPLPTPEIQEFQQIYDRRSQLVRILAAEKNHRHVGGTPQVMANINHHISYLKEQIHDLEESMNLFVESTEAFRAKDDVLQSIPGIGPQVSRTLLAHLPELGHGSRQTISALVGVAPYNKDSGKESHLRHIQGGRKKVRIGLYQAAIVAIRYCPVMKAFYIGLKARGKPSKVALVAVARKLLVLANALIRTMKPFEDRTTSVCPNTA

SEQ ID NO: 99928 - protein, 315 aa, unidentified
MTSTQVFVGIDISKAQLDLALRPEGQFSAPNNEAGFAQVLERLNAVHPTLVVLEATGGLEIPLTGVLVAAGVPVVVVNPRQVRDFAKATGRLAKTDALDAQTLAHFAEVMRPEPRPLPDEQTQALAAILARRRQLVEMLTAEKNRLGTAGKPVRKSLRTHIAWLERELSHTDRGLAQAIRESPVWREKEALLRSTPGVGPVVTTTLLATLPELGTLTGKQIAGLVGVAPLNRDSGTWRGKRTVWGGRAQIRAVLYMAALVAARFNPVIRVFYQRLRAAGKAKKVVLTACMRKLLIVLNAMLKHRTPWRAELVQCA

SEQ ID NO: 99929 - protein, 322 aa, unidentified
MSGSILGVDIAKKKFEVALLINGKLKHKVFTNDEEGFEELELWLKKQGANHVHVCLEASSTYGDELAAYMHDAGHSVSIVNPARIKGFAQSELMRTKNDKVDAGLIARFCLAMHPEPWTPAPPEMRQLQSLVRRVDALINMRTQELHRLGTAHKAIEHSIREHVAYLDTQIDVLKRQIADLIKNDPDLKAKKDLLKSIPGIGEATIAAILAELHMFERYDSVGKVVAFIGLAPRQFISGSSIKGKPRLSKVGHARLRKALYMPALVSIQCNPIIQVFYHRLKENGKNGKVVVCAIMRKLVHLIFGILKSGRPFDPNYTTNQA

SEQ ID NO: 99930 - protein, 369 aa, unidentified
MHRQEKQLFLSIELSKREWKLCFGDGKQERQVTIDAGRVEWLLKEVARAKAKFGLPADAPVASCYEAGRDGFWLDRELRRNGIDNIIVDPASIEVPRRARRRKTDRLDAVRLLRLLLRARLWGETRVFSVVAVPSEEQEARMRIGRNRERLVKERTGHRARIRSLLALHGIVVKNQRLSRVEVDKLRGGNGRALPPEAAAELRREQERLKLVEKQVRELEAQQIEAIGRGGSAADRKAGDLCRLKGIGPQGGWVLGHEVFGWRQFRNRKQVGSFAGLTGTPYDSGETLREQGISKAGSRRVRAAMIEMAWNWVRFQPGSALAKWFMENYGSGASRSRRKGIVALARKLLVALWKYVEQGTTPEGALFKA

SEQ ID NO: 99931 - protein, 349 aa, unidentified
MLHVGLDLSRRRVDVCLISSEGELVEHFRAPADRDGLYGLTRRVAVYDEPVRGVVESMNGARFVHDELVRYGWEVLVADAQRVKGLAPLACKTDKVDARVLAELSFRDLVPAIWLPTPELRQERERSRWRLHLVKHRSILKNRVHASLIAFGHQVPMADLFGAGGRRLLAELDFPEPWLSHVRASVELIDDLDRRIGEIERWLKRSGADHRYIPLLMTVPGIGWVTGFTIAAEIGDISRFSSPVKLTGYTGLCPRVVQSGDMDRRGPISKHGPRYLRWGLMEAAIHASSHPLYKERYQRTKRRLGRQRGAKVAQIELARKLTEAIWYMLTRNQPFKPFAPAGAIFRLTA

SEQ ID NO: 99932 - protein, 346 aa, unidentified
MDQIIRIGMDTSKHIFQLHGVDAAERPVLRRRLRRHEMLAFFVKLPPTIIGMEACAASHYWARQLGELGHEVKLIAPQHVKAYVKRNKNDGRDAEALCEAMSRPTMQFVPVKTEEQQAALMLMGVREQLIKRNTQLGNAIRGYAAEFGLITAKGTDKIEPLLARIAQDGSLPELAREMFAIQGRDYARLQVELKAIEARLRVWHRANADSRRLAKIPGVGPICAVTLVLKAPDPHAFSSGRHFAAWMGLTPKDHSTAGKTRIGKITRAGDERLRSVLVSGATSVIQQAKKGRGHPAPWLVALLARKPPKLAAVALANKTARIAWKLLTTGESYDGGRMSGASAIAA

SEQ ID NO: 99933 - protein, 346 aa, unidentified
MKYIGLDVHSDNIYCAVIGEQGNLIHHDCFPTSLQNLIKLSEKLKHPLSLVFEEGELADWLYQGLQAHFEKITVADPMENRMIYASDYKSDTIDPLKLATFLRGGFIHPVHHTWDHHRSQFKQMVFAYHDMVKQVTRIKNKLKAYYRKQGMMIKTDSVYHPLHRQEFINQSRHPEIILKYYQLLDLFQEEKDRFEKSLKKESRKYPIIRRFMKIPGVGIVTATTFFTIVDDPHRFARRQQLWSYAHLGKAIHQTSTFEITKHQRKGNRLLKYVIKIAAGDAVRQKTNEFTQAYIRMVNIQQKEPKMAYRMIARKLATIMWTMWKNNQSYIPRNCDMIPKDKAYEIS

SEQ ID NO: 99934 - protein, 408 aa, unidentified
MKRYYIGVDWGDRLHQVYVGDEEGKKVREVKVQESPEGLAEIGRWLDEKRAEGIELWAAIEKPAGRIVDFLLDHGVMVYPVNPKAVDRVRDRYRMSGSKSDAFDAYVLAEFLRTDQAHLKVLRPSSEKAQELKMLSRDQRRVGRHKTRFLNQLTTTLKEYYARPLEVFEDLETEIALDFLKQYPTPAHLSALKRRQFNRFATKQHHLSKQRCEELWEKLNKPQLAVPEHVVRAKAQLLEVLIEQLRASIKAVKIYNHRVESFFASSPAAEFAKTLPGGKSGTLVAAIWAELGDAQGRWESSGHLQAEAGAVPVTKASGKSRLVHFRFACNKHLRHTMYWFSFVSLNQSEWANLYYRAQRDNGHSHHQALRALGAKWLKIIFVMWRDHKPYDENYHLANIARQKLRQAA

SEQ ID NO: 99935 - protein, 375 aa, unidentified
MTTIARLGIDTSKSLFQLHGVDEREEVVLRKQVRRGQFLGFVAKLAPTKIGVEACGASHYWARQLQALGHEVVLLPPQHVKPYVGRNKNDKIDAAAICEAMSRPRVRERFVAVKSAEQSAAQMLLGTRDGLLHRRTQLSNTIRGHAAEFGLVTPKGLAHIKPLLERIAADDTVPALAKELFAALGEEFAELAPRIARLDKKLKAFQRSDELCRRLVEVPAVGPVIASSMVVKIGNPAAFRSGRRCAAWLGLTPRDHSTAGKMRHGGITRAGDEGLRAALVSGATAYIQQVKRGRTRPSPWLAQLLKRKPEKLAAVALANKTARIAWKLMVSGERYDRARAEAREGLGATQHRGSTPSPSLHPHTADQGASTMTVA

SEQ ID NO: 99936 - protein, 343 aa, unidentified
MNVFIGLDVSLASTAICVLGPQGKIVEEVQAESEPEALVRAIGALPYSIDAIGLEAGPLSQWLSKGMEEAGFDVVMMETRLVKAALKAMPIKTDRRDAQGIARLLQLGWYRPVHRKSVSSQEIRALLTARKSVQQAIINLELSMRGVLRNFGLKLGHVTRIRYEARVRELVEQNEILSASTEALLRARAQLRAELAELDAKIASLAKHDDVCRLMMTMPGVGPIVALTVKSAIDDPTRFARSKDVGPWAGLTPRRTQSGEMDIVGQITRAGDRALRAALYQAAMILMHRGSPNWLQAWALRVAHRRGSKRALIALARRIGVVLHRMWRDGTPFRYAPSPTATV

SEQ ID NO: 99937 - protein, 349 aa, unidentified
MRTSHNSLATISTLGIDVGKNTFHLVGLDKRGVIVLQQKVTRHQLARRLSNIPHCLVGMEACSGTHFIARQLAALGHDVRLIPAQYVKPFLKGHKNDYSDAEAIAEAVQRPTMHFVSIKTPEQMDLLALHRVRSRLVRQRTGVANQIRGFLLERGITVRQGLVPLRKALPDILSAKSGMLSARMLNLISELSQDWRRLDERIASVSTEIEALAKQDESCQRLMSVPGVGVSSAVVAAIGNGAGFKQGRDFAAWLGLIPKQESTGDRTILGKISKRGNKYVRTLFVQAAHVVLERRPRTARQGLWPWIEQASKRLHRNMLAIALANKLARIAWAVLARAHAYQPMITANA

SEQ ID NO: 99938 - protein, 346 aa, unidentified
MKKIFIGIDFSKEKFDVVIIMAENLEEKAPRVHEQFANDKTGYRKFLKWVKVNSHGVDMSLWLFCGENTGDYSKGLANFLYGKGCDMWLENAKCIKDSCGIRRLKSDRADAAMIAEYAMRNHDRMTLYEPLSGPLAQLRELFLFRQMNVRKRSGYIVRKGEKGRTLDSSPAKSFMARKCKHMIAELDKTIKECDKMIEALIASDRDLQETYEIVTSVPGIGAQNAVCMMVYTDNFKRFDCNPRKIACYYGIAPFGHDSGTSVHCDPHVHYMANKTIKGILTQAALCAINHCPPVAHYYARLIERGKKTMVALNNVKNKLVRIVTALVRTKQKFIPEYEFAKRYAMD

SEQ ID NO: 99939 - protein, 322 aa, unidentified
MRYIGIDVSKATFVVAYSSDKGGEIRIFNNTTTGIKQFIGALPKDGSIHCVMEATGNYSALLLYMLNVAGITVSMENPLKVKNFAKAMLSTIKTDKSDARLITLYGEKMNPRPFKVQGEAILRLRQKRTVIRQLTKQITAMSNLRGSLACLPVPDKGATHTVDETIKFLEKKRDRLQSELTDLVEVEFSRQLALLTTIKGIGITLATALIITTGGFTYFQNAKQVSRYLGICPTYEQSGTSVNIRGHINRNGDAYTRGLLYVAAWTASRFNTKCGETYTRLRQNGKPGKLAMIAVANKLVRQAFAVVTHDKEYVDGFVSNRP

SEQ ID NO: 99940 - protein, 414 aa, unidentified
MESSYRIAGIDVHKKMLAVVVTDLTQGTEFHFERRKFGALDSDLCALAEWLNEQQVREIVMESTAQYWKPVWRHLEPEYKLYLAQAQSNRAPRGRKRDFTDAERLVRRYVAGELILSFVPDPEQRLWRIATRTKNQLTGDRVRLQNQLEALLEDSRIKLGSCVSDLLGLSSRRMLKALAGGERDAAKLAGMAEPELRASQEQLQDALRAAGTLNDLHGQILRLFLERLELIEQQMAQLDQSIAAALHTHQSAVQRLAAVPGYGVDSAQQVIAEIGPQAATFPSPAQLASWVGVCPGREESAEVSKSSRCPKGNRQMRRILAQVAQAAARTKGSIFQGLYRRLLPRLGHGKAIWALAHRLCRLTWKILHQGVEYKELGQQMNPKLVRQRTNKLTRQLRALGYDVQLTVLSSNAQA

SEQ ID NO: 99941 - protein, 496 aa, unidentified
MIKSVGIDLAVSGEHKVRCLDERAQACDGFSFQTTSEGLAKLEDRIFGDGSNPVIIFEPTGLAWLVMAVYLKARHPGCRLVRVQGRKVAALRKYLHRSSKSDRIDALTLAKMSFIDSDRLEEVYLPPEKIYTMHRLTRQRKRLESEIATRKTRVGSIVDGYFPGIRRAFSDPWSAHAKAFLRSCLNPMSVVQAGEKTLHNFLTKERCHGKADKTESHMVYLSCKDAANIYELSKPVGTVGDDFFADLQEEISRELRIMEMMEAESDTIAKRLEQLYLELHPSDNLRTIPGVGEHTAPIFLAIVGNPARFRSQSAFANYSGVVPAARQSSNSEAKGLRMTKAGPATMKWALYQAAQIGRRCDPQLASVYYREMVHRGKNHKQSMGAVMSHMGARVLSVLRKDQPYELQDTQGKPITREEARKLILSDFHVPEEIRRERRRRKTTDNSTKPSRKRREMVTNRAHEAVIAPQPVQLHHLPETSLIERNQEVNKEFNKYS

SEQ ID NO: 99942 - protein, 349 aa, unidentified
MPGVLEEPERPINQNKKSKGKQKMNSTDYVAIPLPVLGLDVAKASVQAELRTTGKRVRFGFANNAKGFAQLAGTLRQHNVPKVWAGLEATGPYSHALALWLHGQSHRVSLLNPRRVKQYARSAGNRNKTDLLDAALIADFVCAHQPAAWQPPTLEVAQLQALVRRREELSLMLQAEKNRLEGVAPNVRSSLERIITTLSAEKTRLEKLIIQQIRSQEQLSRDHQLLCTIKGIGSLTAAILLAEMARPGQVERARQAAAHAGLAPRREQSGTSVRRNRGLGKEGNRYLRKALYMPALVAIKYNAPLRHFASRLRAAGKPKMSIVCAVMRKLIHVAFGVLKHQKPFNPSLA

SEQ ID NO: 99943 - protein, 344 aa, unidentified
MSQVSTIGLDIAKNKFQVHGEDAHGKKIFNKQLRRGEVLSFFANLPVCLVGMEACGGSHYWARELIKSGHDVKLIPPRQVKPFVINNKTDAADARAICEVVRRPATRFVQVKTVEQQHLASLHRVRERLVGNRTALANQIRGFLQEAGIVIPQGIVNLRKALPSILLDNDERLCPASKILFAEMQDELTFLDKKIENIETQINKLAKTNDVCKRLMKIPGVGVLTATAVFAHMGEAKQFKNGRQFAACLGLTPKEYSSGGKQKLLGISKRGDTYIRKLLIQGARIICRWWNRKIAAENEWRILWLQQVTQRRGKFIAAVAQANKTARIIWNILARGVEYNPICK

SEQ ID NO: 99944 - protein, 413 aa, unidentified
MEIVIERCGALDVHKDSVVACVRVPGPDGGRQQVIETFSTTTSGLLTLRDWLAAYRVTVVGMEATGVYWKPVYYVLEEAFTCQLVNARHSRQLPGRKTDVADAAWLCQLVEHGMVRPSFVPPKPIRELRNLTRYRAAQIEERTREAQRLDKVLQDAGIKLSSVASDVLGVSGRAMLRALVAGTRDPAVLADLAKGALRKKLPQLREALLGRFSAHHALLVGTILAKLDFLDEALAALSAEIEVAIRPFAAEVDLLRTIPGVDRRVAEGMVAEIGVDMTRFGAAGRLASWTGMCPGNHESAGKRARGTTRKGSKWLRSYMRQAAKAAGGSKGTYLAAQYARLRGRCGPAKATVAVGHSIIVAMYYMLERRQPYQDLGPDYFLPRPAREHHARRLARQLQALGYKVTLEPVEAAA

SEQ ID NO: 99945 - protein, 351 aa, unidentified
MKYYTSTTEFNCGIDLHGRQMYACVMDRAGNKLVHRNIKGNDFTYFLQLVAPYRDDLTVVSECTFNWYWLADACFEEDIEFVLAHALYLKHIHGGKNKNDRIDSEKLAHLLRANLIPPAYVYPSEQRPVRALLRQRMSYVWERATLKTHLSMNQTAEGLVPAKKSGCNWDIWEERILEQYSNPLHKLAASCDLDMIRAYDSQIEKLEREILRQAKMGHSCNLQVLLSTPGIGKILAMTMLYEIDTITRFPTVKDFTSYCRLVKGSVASAGKVKGLTGGKMGNAYLRWAFGQAAVLGKGSHALLAPYAEKLIAKRGKFKGNAILANKMARAVYFMLQNGTAFDAERVIATSM

SEQ ID NO: 99946 - protein, 380 aa, unidentified
MIYVGIDVAKDKHDCFITNSNGEVLFKAFTISNNQDGFNFLYQRIESVMEDVTKVKVGLEATGHYNYNLLGYLIDKSLPTYVINPLHTTLYRKSLSLRLTKTDKVDARTIAYMLMSDVNLKSYSNTSYHNEELKSLTRYRFDKVKERAKLKTSVSRLVCILFPELEKLVPTLHMASVYALLSEFPGAKHVAGAHLTRLTNLLSDASKGRYGKDTAITFREAARASIGSNMPAKSLELKHTIKLILELGSEIDEIENEIKFIMDEINSPILSIPGINYRMGAMIIAEIGDFSRFDSPDKILAYSGFSPSTYQSGQLDSAYSHMEKRGSKYLRYALYNAAKYVCHWDSTFAGYLAKKRAEGKHYNIAISHAVKNWFELFIIL

SEQ ID NO: 99947 - protein, 343 aa, unidentified
MEFYVGLDVSLKQTSICVVDQTGSVVREGVVDSDPEAISVYVKSKAPDAVRIGLETGPTSTWLWTELKRLGLPVICIDARHAKAVLKMQINKSDRNDAIGIARIMQTGWFKEVHVKDIDSHTVRALLASRALLVKIKRDLENHVRGLLKNLGLVIGRAKFNVFAVRAEELIEGRPELIAAIRPLLEARTAVEQQVSELDRKVMKLARHDAQVRRFMTVPGVGPITALAFKATIDDPARFARSRSVGAYVGLTCRRHASGEVDWSGRISKCGDAMLRSYLFEAAGVLLTRVPKWSAVKAWGVKLVKRNGLRKAKVAVARKLAVILHRMWIDGTEFNWSKKEIAA

SEQ ID NO: 99948 - protein, 332 aa, unidentified
MSIIGCDLHSRYQVIAMLEAETGEITTRRLEHEGGEAEGFYRELEKPALVGIEATGYTQWFERLVADLGHELWVGDPAEIRARAVRRQKTDTRDAEHLLDLLINQRFPRVWVPTPEERDVRQLLKHRDKLVKMQTSVRNQLHFLAMSQGVCRKRALWSEGGRQELEGLELGPWASRRRQELLALLDGLGPRIEEMDRAVKAEAGRRAEAVRLMEQQGVGPVTALAFVLTIGPVERFATSRKLVSYLGLNPSEASSGGHQRFGHISKQGNEMLRWLLVEAGHTAARLDPELRRVYQRLKFRRGGKVAKVALARRLAVRLYWSLRQAAAASHVQ

SEQ ID NO: 99949 - protein, 344 aa, unidentified
MNNLSRVGVDLAKNIFQLHGVDRAETSTWCRRLKRDNWIKVLHNKVEPGCEIGMEACTGAHHWARLLQSKGFHVKLIAPQFVKPYVKSNKNDANDAEAICEAMSRPGMRFVTVKTIEQQEIQAVHRIRSELVGQRTAKGNQIRGLVAEYGLVSPQQMNHLRAALPEWLEDAENGLSDRFRRLLNGLWEDLKRLDQRVTEMDKEIALIAQHDPVAKRLQQLRGVGPMVATALLASVGDGKQFSNGRQMAASLGLTPKQHSSGGKDRLLGISKRGDSYLRSLLIHGARSAIYAARGKEDRLSQWVISIATRRHPNVAAVALANKTARIAWAMLRYDTDYNPELMAA

SEQ ID NO: 99950 - protein, 350 aa, unidentified
MKDNITIGMDLGDRRHVAVVLDSKGDEIETVTVTNTIKGLDRFFKGYRDATVAIEAGTHSPWISRQLEQIGCTVYVGNPRKLRLIWDSHEKSDLNDARILAMVCRVEPRLLWPVKHRSEQSYADLETIKARDALVRSRTRLINHVRSSVKTTGHRISGCSAASFAHKASATMPASLKETLKPIIETIGQLTAQVKVLDRQIDWLCKHRYPESQYLRQVPGVGPITALAYILMIEDPHRFDSSRQVGAYLGLVPRRDQSGASDKQLRISKAGNPYLRRLLISCARYILGPFGPDSDLRRHGIAIAARGGKNANKRAAVAVARKLSVILHRLWMDRESYQSFRRPTAVKQAA

SEQ ID NO: 99951 - protein, 433 aa, unidentified
MNSSHPYDLVIGLDRSDKKADLCLMDTHTGQRRSQTIDTAPEALWEWLAQLRQQYPQGRVGLCLEQPAVHLISFLEAYEWITLHPVNPITLQKFREAFVTSRAKDDTKDADYAAELLLTHYAKLPVWAPEDSPTRAVQQLVLHRRAVVDERTALTNRLIALLKQYFPQALTLCGDDLWRPLATRFLLKWPSLQAVQKAKPATLKQFYHLNGSRSAKLLAERLALVAKAVPVTNEAALINSFILRVPLICRQLQLVTRTITDYDRQIAQAYAAHPDREIFASLPGAGPVLGPRLLASLGSQRERFGAAADLQQYTGIAPVTKRSGGSCYIHRRYLCPKFHKQSFHEFAKESILWSRWAAAYYLQQRTKGCPHHTAVRALAYKWQRVIFRCWQNRTPYQEAIYEAALRKSGSPLVSLFDRVELGKSPFKNPVKKS

SEQ ID NO: 99952 - protein, 470 aa, unidentified
MKSTTKKNKEQLNTEFSSEEIIAIGKKAYEEAVAVTWRQAEVGRTFTQNDKIALVDDKTLVIGADIGSEKHDIRAFDNRGREFSKKAFEFGNNEAGFEEAKAWILEIRDRQHLEKVMVGMEPTGHYWFNFASWLMNGGIIVVLVNPHHVKKSKELDDNLNRKTDRKDPKVIAGLVHEGRYSMPYLPEGLYAELRNLNNLRLMNTEETTRCMNRVNRWLSIYFPEFRTVFKDISGVGSMLLLEQAGLPEDIIRLGADGVNRIWREAKLRGTGYAKALRIVSAARHSIGRKEGQEAARMEILWEIVQLKGYLKWEAEIQGRLEEMAGGLPYVENILQNRGLGIRTVTGILAETGDFTRFSNARSVQKLAGLALVEDSSGKHEGKTVISKRGRKRLRYHLYQAALVLIAQKDEFREVYDYYLTRDNNPLKKMQALMAVACKLLRVLYAMMTKGAEYDPGKLLGDIRREPRKAA

SEQ ID NO: 99953 - protein, 339 aa, unidentified
MFYVGLDVSVARTAVCIMDAAGQVVREQSVASTPEAIAAAIRASGKEVERVGLEAGINSAWIARGLLEAGLPVIVIDATHAAAALKTGFRNKTDKNDARGIADLMRVNKFRAVSVKSVAAQRDRALLTVREQLRQQSLDARNVIWSILQVEGLKPPKLTSPAFQALVAQSLDDEALAPLLRPLVAVVEHLDGQVTGLDKAIAARAKASAACKRLMTVPGVGPLVALTYAAGVDDPARFSDSRTVGAHFGLTPRRFQSGEMDWSGGISRAGDAGVRRALYQAANVLIHHSRGWCALKSWAVRVAKRRGLGKAKVALARKLAVVLHKMWTTGEDYRLKAAA

SEQ ID NO: 99954 - protein, 321 aa, unidentified
MVAIGIDMSKLTFHAAFDETTVRIFQNTEDGAGAFIGELASRGYAPDATTVGVEATGAYHLFLCARLVARGWRIVVLNPLEAHRAAEAASLRKVKTDRVDALLIRRMVAQGRGYAYADTDATIALKALVSEREGLVLMTTMAKTRMEAHAMKQRAVSVPLHDGFSPTLAALRKEIRAIEKQFAAYEPDTQRLLRSIPGVGIVTAATTVAFVGDIGRFSSPEKLVAYLGLDCRVYESGTSVKGKGRLVKRGNVYARHVLFNAAFIAKRLNPDFKAYFEKKVGEGRHYFSALCAVERKLVHLIYAVWKRGTPFTPEPPKRKQS

SEQ ID NO: 99955 - protein, 452 aa, unidentified
MAKRSKKRCEELPILHPHAAGIDVGASELFVAVSADRDPQPIRSFPTFTRDLNALADWLQQCGVRSVAMESTSVYWIPVYQILESRGLEVYLVNAQHVKNVPGRKTDVSDCQWLQYLHSVGLLRASFRPPGFICAIRCLWRHRSSLIQMAAEHVLHMQKALDQMNLQIHRVLNDITGMSGLRILDAILAGERDPVTLARLCHGGVKNSEDTIAKSLEGDYRPEHLFALRQSLAAFHYYQQLVVEVDQEIQGQLGSLETATTAEPTVPKRTKASAYQRRRYEPKTFDLRGELYRIFGVDLTNVPGISAITAQTVLCEIGTDVSRFRNASAFASWLGLCPENKISGGKVLYTKSRRVRSRVATALRTAANSLHHAKDYLGEFFRRITRKLGKPQAITATAHKLARIVYHLLSTKEAYNETVFHRCDEEAIKRAQYRLRKQAAQLGFQVIPLQNG

SEQ ID NO: 99956 - protein, 420 aa, unidentified
MRAHLAIAIGGSSLFGRLKSSAFRLSAIAMFAVTRGASLLFGALRLSHYVGVDGLRRHRLCQNEVVTDLIQRRPFVEQISRIGMDTSKHCFQLHGVNAAEKVVLRKKLRRKEMVAFFKALAPTVIGIEACGASHHWARILRSFGHEVKLIAAQLVKPYVKRGKNDMADAEALCEAMSRPTMRSVPMKTAEQQAALMLVGLRDRLIRNRTQLSNAIRGYATEFGFAAAKGMAHLDPLLDRIRADESVPNLARELFLALAEEYAQLQAQIGEVDAKLMAWHKANECSRRLAKVPGIGPIGATLLMMKTPAPEMFRSGRQFAAWIGLTPKDHSTAGKVRLGVITRAGDEALRSVLVVGATAVIQHVRRGGRGSPWIVDVLKRKPPKLAAVALANKMARVAWKLMVTGNSYTTKSVPAAIARAA

SEQ ID NO: 99957 - protein, 342 aa, unidentified
MDYFAGLDVSVKETSVCVVDDTGRIVREAKVASEPDALLSVLTNPAYHFKRIGLEAGPLSQWLFSVFAEAGLPAICVETRHMQAVLKAQINKTDRNDARGIAQMMRAGLYRPVHVKTLRSQKLRMLLTHRKLLQSKAIAIENDLRATLRNFGLKVGIAGRVKFEARIKELVENLPDLVVLVEPLLIVRRVLREQIVILHRRLLAIVRDDDVCRRLMTVPGVGPVVALTYRATVDVPARFRKSKAVGAVFGLTCSKYQSGEVDRNGRISRCGDEMMRVMLYEAAQSMLRSKKWSWLKAWAMQIARRRGMKKAIVALARRLAVIMHRIWVDGTEFRWTRETVAA

SEQ ID NO: 99958 - protein, 464 aa, unidentified
MEDKNARKNRKRQSRSLKTVQPDAAGIDLGSREHWVAGPPLPDGSPNVERFGTTTPELLRLSNWLKQHQITTVAMESTGVYWIPLFEILDSRGFEVHLVNARQISHVPGRKTDMLDCQWLQLLHACGLLRGSFRPGDDICRLRALIRERNGIVEQRSDWLRRMQKSLDQMNICVHHAVSDISGVTGMAILRAIVAGERNPEVLARLRDRRCLKSQDQIVEELTGNWRSEHLFNLGQALKVYDQLNAVIADYDTEILRFIDSLQSPVCDDSSAPPPLSKNKARKLFQQGREPLRQGLYRMSGFDLTTIDGIGVDTAAIILSELGPDLSSFANEGRFVSYLRLAPNISISAGKKVPAKFKAVTSTRVCNALRMAATTLRNSKTALGAYYRRISWRKGASVAVFATARKLAQLVYRLIRYGQAYLDEGAHAYEARCTQRRLRSYTRALKDMGYKVEPLTDQKVFAAS

SEQ ID NO: 99959 - protein, 382 aa, unidentified
MPAYADPTPTPISADTIFLAFELSGTSWLVALHAPDADKVERHRLSAGVAAEVLGLIARTKARVTRRLGTTPRVACCYEAGRDGFWLHRVLEAEGIASHVMDPTSLQVDRRARRAKTDRLDAQALLRALMAWSRGERQVCSMVRPPSPEHEDERRLSRERGTLLKERLRLSNRIKGLCAAQGIYDYEPLGADRRERLARLVTGDGRALPGRLAAEIGRQLDCFELVLRHLAEVEAVRDARAAQAREEGGSKLAALLRLKGIGPELATVLELEVFHRHFANRRDVAAYAGLAPSPYASGGTSREQGISKAGNRRARKALIELAWLWLRHQPESALARWYRDRVGTATGRVKRIAIVALARKLLVAIWRYVETGLVPAEATVRT

SEQ ID NO: 99960 - protein, 346 aa, unidentified
MNNNNSKGKVTVLGIDLAKNSFQLHGVDKQGNRVLKKKLSRKQLVAFIAQLPPCLIGLEACGGAHHWVRVFSELGHTVKMIAPQFVKPYVKSNKNDAVDAEAICEAVQRPSMRFVPSKSIEQQDIQSVHRVRSLLVGRRTAQANQIRGLLMEYGIVIPQGINQLRKAIPDILEDAENSLSSYFRELLRELYEEIVHFDERIETIELKLKVISEQNKDCKRLLTIPGVGLLTATALIAAIGDISVFKSGRELAAWIGLVPRQHSTGGKQTLLGISKRGDSYLRTLLIHGGRSVVRVAHKHEDKRNQWIGEIKQRRGENISNVAVANKNARIAWALLTKKQDYCAIGA

SEQ ID NO: 99961 - protein, 412 aa, unidentified
MRVVHAVCAGMDVHKDDVKVCLVWRDAGGERCEEVRTFSTMTRPLMSMREWLESYGCKVVAIESTANYWKPIFNLLDGDFEVMLVNPGHLKYVEGFKTDPKDARWLAGLLEHGLLRGSFIPPLEIRDLRDMTRYRRRLVEEHTAEVNRVQKILEDANIKLASVASDVMGVSGRAILAALLEGDMTPEQMAELSKGRLRNKREELAESLFGRFRPHHALLLSRMLEHIDFLDGAIEDCDRVIEGMLRPFGLKIENLDTIPGVDTRAAQDIIAEIGTDMSVFPSHKHLCSWAGVCPGNNQSGGKRKSGKTRKGNKWLKAILVQCAHAAGRSSKTYLSAQFRRFAARKGKQRAAVGVGHSILEAAFFIVRDDLTYQELGPEYFDKINKDHIIRSYKKRLEALGLVAQISEAPVAA

SEQ ID NO: 99962 - protein, 400 aa, unidentified
MDPHLCVGVDVGCKAHRVGIADPDGQILEEFDVPHCGEGFDHFFNRVERHRKALGLPVAVAMEGFNGYARPLDRLVQQKGYRLYNVNNLKLARFKEIFPGAAKTDRIDTHKILELFRLKDHLPMAKDALQEVMVVPPVNEKLKRLSRRRRHLVVEKTRVLNRMQADLQAVCPELLAITHNASNVWFLRFLTFRDDLRQLSRLRRATVLKIPSVGRKYARIIKDWQQHAKFSSEVEYVGPMIIEDAKRILELRHQIHVLDGAMEELAQGSEIARRLSTIPGFGKTSTAELAGEIGSLERFRSEASLALYVGMCPLTHQSGQMSRTRSPRQVNRHCKAAMMTAVARHIDCVPESKAYYDRKRAEGKKHNQAVRALGRHLVRVIWSMLKNGRDYELREVMPMR

SEQ ID NO: 99963 - protein, 327 aa, unidentified
MAIWVGIDVSKDTLDCGWCSRTHLRHIKVSNDKQGFRKFLRETPKHANFIMEATGAYHINCALFLRAKKRHVSVENPIRIKRHMQANLQRAKTDKSDSFAIARFGEEKQPQPWNGILPRIAEMQQLQALADKLQIQIQQFRNQRHAFTRSVLASKFVLQKIQNYNAYLENERKLIQFKLEEVAQLQFKRELALITTIPSIGLSSAIRLAIAVRDFSRFKTSKQLVSFLGLSPTPKQSGTSLNSRGSISHMGGAKVRAALYFCAMCAPKCNKPCKALFKRMKAKHKPGKVIIIAIIHKLVRQVHAVVKNRVPYDANYARKHLVTIVHR

SEQ ID NO: 99964 - protein, 371 aa, unidentified
MKQQSKSSNITVGLDLGDRRHRFCALDERGEVVEEGSICNERDSLRKLAGRYHGALGVMEAGAHSPWISRFLEALGWRVVVSNPRKVRAIYQHERKSDQRDALMLARIGRMDLALLYPVGHGTAEAQQDLLRIKLRDSLVRARVAVINSVRFTLKSLGYRVRNASSARFHKVVMEEVPESVREMITPSVQALAELTARIKMLELEINTLAQMKYPQSAQLQQIPGVGPITALYFVLKIEDPNRFAHVRDVGAYAGLCPRRDQSGESDPQLRISKRGDAYLRRLLVSAAHYILGPFGPQSALRAYGLMLAADGTARAKKRATVAVARKLAVLLLSLWKSQQPYQPFPKARLNGQQEDRRSGTIALHRMEVTD

SEQ ID NO: 99965 - protein, 509 aa, unidentified
MNCEKAIDLLHPRIEHAGSGRRIPCSNARRFNGDFRSETLRPVAKECSEPFACQFKAGSDELYKPFRPTGTACSTKPKHTDQTMNAITNFAATIGLDWADQKHDLWLCPADGSKAEHLSLLQTPETLHEWVAKLRERFGNRPVALGIETSRGPVISALMAYDFIVIFPVNPKALKDYRAAFSVSGAKDDRTDAMLLEEFIRLHRAKLKALVPDTELTRKLAGLVENRRRLIDERTRLVNQLHSLLKTYYPLAEILLEGQMTQPMAADFLTRWPDLPSVQKAELKTLRAFFHQHNSRSAQKMEARLSAVKEAKALTTDEAILAPARCLVTALAGMLKSLHQAVARMDKEIQKAMAEHPDAALFESFPAAGPALAPRLLTAFGTQRDRFESAAEVAQFFGLAPVVKQSGNTKTVHMRHRCPKFGRQTFHENAACAIRQEPWAKAYYDQHKQRHHDKHHQACRALAYKLIRIYFACWKHRKSYEPNTYTRALEKHGSPLHKKLQIPLQKSGE

SEQ ID NO: 99966 - protein, 347 aa, unidentified
MDYYAGIDVSLECSSVCVVDASGKIVREGKVASEPEALISWFGSLGFDLARIGLEAGPLSQWLYAAMQKVGLAVELLETRHVRKAFEAMPVKSDRNDARGIAQLMRLGWFRPVHCKSMAAQEMRALLTARKLVQSKLFDVEMSLRGILRGFGLKVGPTTPKRFAGRIRELAAGHATLEVVAAALLAAHEVLLREFGGFEKRVRAMARTDTRARLLMSAPGVGAIVALTYVSAIDDPARFKSSKTVGAHFGLTPKKYQSGETDYTGRISKIGDGSVRTALYEAAHIILTRPVKGSGLKSWAMRLAKRAGMKKAKVALARKLAVILHRMLVDGTSFAPATPRDVAAAAA

SEQ ID NO: 99967 - protein, 344 aa, unidentified
MQIAVIGLDLAKNVFQVHGIDDAGQVVLKRKLRRSEVLPFFAGLDAALVGIEACHTAHYWGREIAALGHDVRLMPPQFVKPYVKSQKNDAADAEAIAEAVQRPTMRFVPIKSADQQAVLMLHRTRDLLIRQRSSLISAIRAHFAEFGIVVGQGIRNVERLLALLETAGDQRLPALAAEMLGILAAQLRYVAEQVKEVEVKLLAWHRADETSRRLQSVPGLGPITASAIVATVGDPKQFKSGRQFAAWLDLVPQQRSSGGKERLGGISKRGDGYIRRLLVHGARAIVGWRKRSATHKTPWIERLLARRPTNVATVAYANKLARIAWAIMMHGNRYNPALAFATIP

SEQ ID NO: 99968 - protein, 390 aa, unidentified
MPQPKDDLSRSLVALDQHRTLIAVVELSLESWLVGGIVPGIEREPLKKLAPDAEALLRLLHRWRDEAVKAGRTIERMVVAFEAGRDGFWLARWLRSRGIEAYVIHPTSIAVSREQRRAKTDRLDIGLLKRSFLGWLRGEKKHCTMAAIPTLEEEDAKRPTREREQLVGKRTSIINRMKAALVRLGIRGFNPKLRKAPERLPGLRTPEGSVIPSNTLAELQRGMAHLRFINEQIKQIEHARLNHLKQAPQHGSNAKVLQLERISGLGIETSDMLANEVFSRDLRDQRAVARYVGLTGSPDESGQRQREKGLAKAGNARARRGMIQLAWRFLNHQKGSALAQWFQERVAAGKKRKTMVVALARKLLIALWRFVTTGEQPNGVVLRPVSQLAK

SEQ ID NO: 99969 - protein, 337 aa, unidentified
MYYTRIDLHRKPSFMTTIDSSGQIVKRANLSNDESKIFEYFFSLDQDTQVVIESSASWYWLYDLLTLHAIPVVVSNPVKTKAIASAKIKNDKIDSHMLAQLLRADLLATVHVSNQQSRRLKELLRHRHKLVRDAVRFKNRIHNIMAKNNLRPPASDLFGKKGLAYLSEVQLPLYQRHQVDTYLQLYYPLKEHIEALTQKIKRKASITPMARLLMTIPGVGAITAMMIIAEIGDIGRFKSYRHLASYAGLVPCLSASADKQRIGRITKQGSPYLRTSLVEAAQAATRTKSRLNVFFRKRIVRAGYQKAIVATAHKIIQYVYFIMRDQAPYRERIDASA

SEQ ID NO: 99970 - protein, 370 aa, unidentified
MRHSNQGFQFILTLKDIIESKSNETPLIIFEFTGIYHKSLEKFLISQNLKYHIVAPLRAAKARNSEIREQKTDARDCLTLSKLFYTHSLGIFYSENQTYSSLRKLNRYYDTCMKHLIKIKVNFRETLAVIYPNYNKLFTSVYSDESLTFLKLFPHPSLYTSKSEDEILTILNEKWNHLESWSSSKVKKITPLVDETVSGCSITEPETLILLSYITQIEYYLNQIKATIIKMNQLASKLPLYNLVHSLPGIQDILTCKFIAELGDISRFTNYKQIVAYAGIDPMIRQSGDKDGLHLKMSKKGNKRLRTILHLMVSSLIKANRQPNAIKTKYQKKTHQLNPLKPKVASMACANQLVRIIFYMHKTSSTYQYK

SEQ ID NO: 99971 - protein, 346 aa, unidentified
MKKLVKQIVGIDVAQKELVVCLGRMTDDWSPEIYAHKAFANNLKGFNALENWVKKLVDLEVSVRFVMEATGVYHEPLAYYLSDRGYTISVVLPNKISNYFRTLEVKTINDQTASHAITLFGLERKLEDWKRPNVVYKRLRQLVRERDQLIQERTIVKNQLHAEKSEAEPISSSMMRMKKRIVLLDKQELEIKTEIQAIVKKDKNTSDAVQIISTIPGIGILTAITVLAETNGFELIRNKRQLTSYAGLDVVQKQSGTSVQGKPRISKRGNKYLRKAMYLPALSAIRCDERFKGIFSRVVAKNGIKMKAGVAVQRKLLEMTYTIFKTNQPYDKGYFKRMEEMKLERS

SEQ ID NO: 99972 - protein, 346 aa, unidentified
MVAIGVDTHKANLAACAIDERGSLVAERSFANSRSGHRAFERWLRALSLPRHIGIEGSGSFGAGLAQRLAAAGEEVCEVPAILTYRERRRTGRPGKSDPADALAIARIVLREERLPAFRAPRAHRDLKLLVDYREQLIGEQTRLRNRLHADLRVLVPGYGGQLGRRGDLASVASVAAARSMLAPLNGVAAELAERRLARLEVIADEITTLRQRLAAALAGSHAALTAISGVGPLTAARLLGETGDARRFHSAAAFAMACGVAPIPASSGNTQRVRLSRRGNRQLNRALFTVAFTQARCYAPARAYMERKRGEGKSWNEAMRCLKRHLADVVYRAMLEDYRAEALTT

SEQ ID NO: 99973 - protein, 344 aa, unidentified
MEEYIGLDVSLKETAISIRRGGKRIWRGKCKSDPNCIVTLLHKHAPDARRVVFETGPPSIWFYHALTDAGVPAICIDARHAKAALDMAANKTDANDADGLAHLAEVGFYREVRVKGYDSMLARTLVAARTRLVTICTELSNQIRGLMKTFGLVMPGGKGATFGNNVRMLLDDHQSLSRIILPLLKAWYSMREQAAELSRQLIAVARASQSCRLLMSVPGVGVVTATSFVTAIEDPENFKKSRSVGAWLGLTTRRYQSGEVDYDGHISRRGDAHLRGLLFEAATVILTRSSADSGLRRWGLKLRERLGFKRAAVAVARRLSVTMHAMLKTGQLFDRAVGMDATDG

SEQ ID NO: 99974 - protein, 357 aa, unidentified
MSSENNILNFNNQRFYIGIDVHKKSWKVTIRSGAIALKTYSMNPSSQELSKYMHEKYPGGIYHSVYEAGFSGYWTHRQLEQLGFKNIIVSPNNVPTNAREKVYKTDSVDSRKLARELESGSIKGIYVPDQLHQELRSIVRLRYQIMKSNVRLKNQIKSYLNFYGHKFPENYETKHWSGIFIKYLRTLSFEYTMGKEQLEIYLSELTEKRELMVEIIKRIRHYCQGYGFDKEIQLLMKVPGIGFITAVTIYSELIDINRFPRLDNLASYVGLTPSVRSSADKEKNLGLKMQHNKYLRSMLVEAAWIAVRKDPALTACFNEYIKRMSKQEGIIRIAKKLLNRIRAVLMGNREYVCSVVK

SEQ ID NO: 99975 - protein, 311 aa, unidentified
MSNQYVAVDVSKAALDIALPGVNGVWHSTNTLAGIAALRRRLATLEHPHIVCEATGRYGRLLARQMGAAGIAMSIVNPRQVRDFARASGQLAKTDALDAGIILRFADAMQPARTPPTPENQARLAEQVRRRRQLVGMLATEKQRLSGLDDAETLASIREHIAFLQGQIGQCDARITAEIEADATLARKAMLLESIPGIGATTAAVLIAELPELGIADKKQIAALAGIAPMNRDSGQWRGQAHITGGRLSVRCALYMATLPAIRFNPTIRDFYQHLRAGGKAPKVAITAAMRKLLIIANAIVQQDKPWANLA

SEQ ID NO: 99976 - protein, 377 aa, unidentified
MATTRTVLRDQLTAKPGDLFMSFELGDKHWHISIGGERRSVSHYIVEAGHTEEVADCIAKAAARLHTARVHSCYEAGRDGWWLHRWLTELGVDNIVVDPASIEVNRRARRAKTDRLDADKLLAMLVRHHSGERVWSVLREPSPSDEDARRAHRELQRLTHERIAHTNRISSLLVLHNLRPRIVIGGRDWPAWWNANREQVPPTLRAELEREAARLKVVKEQVRAIEAARAKELAEGKQPLVAQLVRLRAIGAKGAWVLVKEVFGWRHFANRRELAGSLGLVPTPYASGDSEIEQGISKAGNRRVRALLVELAWSWSRLQPASALTQWFNRRFAGGGKRMRRVGIVALARRLAIALWRYLQTGEIPIGARLKPTGSGI

SEQ ID NO: 99977 - protein, 345 aa, unidentified
MEHYVGLDVSLKLTAICIVDRTGKIEREGVVSSDPEAIAIFIKSHAPHVVRVGLETGATATWLWTELNKLGLPVICIDARHAKAALKMQINKSDRNDAVGIARIMQCGWYKEVRVKDLDSHAIKALLVSRALLVKIKRDLENQIRGLLKNLGLVIGRAKMNVFAVRAAELTEHRPELAAAVVPLLSARAAIEQQIADLDRKVMRLARKNAQARRFMTAPGVGPITALCFLATIDDPTRFKRSRSVGAYLGLTTRRYASGEIDWTGRISKCGDKMLRSYLYEAANVMLTRVARWSALKAWGIRVAKRTGLRKAKVAVARKLAVVLHRMWIDGTEFKWSKEAANQPA

SEQ ID NO: 99978 - protein, 323 aa, unidentified
MPNVIGIDIAKHTFDLATLQPNGKYRTKAKLANDKAGFAVLRDWLNKHSEPGAWVVMEATGIYHEALAEWLLEHGYRVCVLNPAQIAHYARSQLQRVKTDKVDAKLIAEYGERHQDELRPWQPEPPAVKRLKALVRRLEDLREIQQMERNRLEVADTSVQASIQSVLEHVGQEIKETLKTIDDHIDNDPDLCGKRDLLTTIDGIADKTAALLLAELGDPLRFASSRAVTAFAGLNPRLQESGSYRGQTRISKTGSSRLRAGLFMPAISALTYNEAIRAMGERLRAKGKTGKQIVCAAMRKLLNIAYGVLKSGQPFDAKLALAH

SEQ ID NO: 99979 - protein, 419 aa, unidentified
MSKSMFCGCDVALENNTIWLMLDDGSQPVKLFNVDNNQLGAEVLVERISAIAKEHCVLDILIGTEATSMYDWHLLEYLAESKLAFEFNLKLYRFNAKWIKNFKKSLAPRGKTDPIDSFAIAERLRMGRLPKEYIPDIKYQPLRKLTRFRFHLQQQIAREKDFFLANLFLKCSAYSSVKPFGSTFSATSLAVINDFFSVDELAAMPIEELTEFILEKGKSHFSKPGEIVDNLKRVARESYRLKPELAPTVNLILASTYNNIRCYREQVKLIDNAIAENIKAFKHTLESIPGIGPVYAAGILAEIGDIHRFSNDSALAQFTGLTWPKHQSGKFQAEETRMSHTGNQYLRYYLVEAANSVKRCDATYKAFYEKKYAESSKHHHKRALVLTARKLVRLVWTLLTRQVLYQPGYCSFEDLSKNN

SEQ ID NO: 99980 - protein, 354 aa, unidentified
MLIIGCDFHTRYQQIAMAREGTAELLLERRLDHESGEAHAFYRSLQSSHEPVLVGIEATGPIHWFERLLAELGHELWIGDSAKIRASEVRKQKTDERDARLILDLLLAKRFPKIWVPTPAERDLRQLLWHRHKLVCLRTMLGNQLHFLAMSQGLCRKKKLFTKKGRADLAALALGPWARRRREELLKLLDQLDPPIAELDRAVLEEAKRRDDTVLLMTHPGIGPVTSLAFVLAIGPVTRFCCSRKLVSYLGLNPSEDSSGQRRRTGAISKQGNTMVRWLLIEAVYPAVRLDTALRQDYQRLKFRRGHAVAKVAIARKLAVRMYWMLRSGADYAQLVRRQGSPGGTLMNASSSLA

SEQ ID NO: 99981 - protein, 335 aa, unidentified
MNKNWFIGIDVSKKTLDASIFVAGEVINRFPHIQVRNEKQGFKELLRWAKTQGVNTKDTLFGLEFTGYYSDALEQFLTGKKLCYAMLPTTVVKHYQRGTRDKNDKTDSAKIADYLFRFNGTECIKQRVLPSKAMQELKALKSERKFYVQQRVACENRQNVAKSKQEQKHLQKAIDLFNEQIELIEQQMAEVVTSDEEIYLTYRRLLTIPGIGPVNAINTIANTQDFTAFETARQYAKYVGVAPSEHSSGTSVRWRGRPSPHADLQAKADLSMAAMRAVEFSCDMSIYYERKLGNRPNDKDVKRKALNAVKFQLIKMMFAVVRQDRVFEQRGLDKA

SEQ ID NO: 99982 - protein, 348 aa, unidentified
MIIIGVDFHPEFQQIASVDTATGEFQEKRLAHPGEAEKFYRALVGQKVRVGMEASGHARWFERLVAELEFELRIGDAAEIRTQRVRKQKTDRQDAQLILRLLLEDRFPQIWVPSWENRDLRQLLWHRHRMVQARTRIMNQLQAVALNEGLRCKKKLWRERGRQQLESFRLAPWASRRRRDLLELLDRLTPTIAELSRAIEQEVEKCPAAQRLRTHPGVGSLTALAFVLIIGEANRFRCGKQVASYLGLVPLEESSGNRRRLGHITKQGSSMMRFLLVEAAQVTVRSLPEWRNKYLHLVLRRGRKIAKVAMARRLAVHLFWMMRKEWNYQQLKKFGSHAGEPGNRHGVL

SEQ ID NO: 99983 - protein, 370 aa, unidentified
MEQVIKVYVGLDVHKDSIAIAVAEAGRSPGRLIGQIAHDVPRLLKALARLGAPDTVHVVYEAGPTGYGLQRALSAKGYRCEVIAPSLIPRRAGDRVKTDRRDCLRLAELSRAGELRAVWIPDRGDEAIRDLSRAREDAVNARTQARHQLKAFLLRHEIRYNGKTAWTKSFYRWLGELNFGDASSQVAFTEYHLAVQAADQRLQRLTKALSASVVGWRFESVVQALQALRGIDVVSAIGLVAEIGDIARFDHPRKLMAYLGLVPSEQSSGDRVRKGSITKTGNAHARRLLTEAAWNYRFTPRIGRAAQARQESLAEPIKSIAWKAQLRLSGRYARLNGRGVHHNKVCVAVARELAGFVWAIAQASVAAKPH

SEQ ID NO: 99984 - protein, 410 aa, unidentified
MLFIGDDWAEAHHDIEIEDEAGRLLVRKRLPEGLAGVTLLHELIAEHLDPSGEPDQVLVGIETDRGPWVQALLATGDLVYAINPLQVARYRERHSTSGAKSDPGDAHLLAEIVRLDRAHHRRIAGDSEIAEHVKVATRAHQTMIWSRVRQVNTLRSLLREYYPAALAVFGTDLASPDALAVLAAAPTPELGRRLSQARIETLLRKAGRQRNIAATAARIKTALGSDQLTARPGVVPAYAASASASVAVLTTMVTQTEVLAGQVEQGFGRHPDVEIYRSQPGLGVILGARVLAEFGDDSDRYADAKARKNYSGMSPITRASGTKRVVLARYARNRRLGDALFRQAYSALRASPGARACYDRQRARGASHYQALRTLANRLVGILHGCLSHHTLYDENQAWHTPDDKLTIAA

SEQ ID NO: 99985 - protein, 435 aa, unidentified
MNESVSEQPISQVIAAYVGIDWADQKHDVVLRSAGAPAKAEHQIIKSEVHALNNWIAQMHERFGAKGKVLVCLEQNRGALIYHLMAYELFELYPINPSQLANYRKAFFSSGAKDDKPDADLLSEFVMCHRDRLKAWKPDDQLTRELATLNEGRRNAVDRRTDLANEIKSELKLYFPLALQVLDNDITTALAADLLVQWPTLTELQKVSPGKLRKFFYGHNCRQEKKILERLALIDQAKPLTTDAAIIRPTALRVKMLAQQLKSLLPFIAQYEKQIAELFGSHPDSFLFDHLPGAGPALAPRLLTAFGTDRDRYEHASDISTLNGIAPVRVASGKRCSVLFRWACPKFQRQSFHEFATHSIRFCPWAQAYYQTQIARGKDHHVAVRALAFKWIRILFACWKNRVPYDPNRYLKALQSRGSEYAPNLPLEPTSEPCE

SEQ ID NO: 99986 - protein, 316 aa, unidentified
MTDNSMICAGIDVGKSHLDIALHPGNARLRVTYDTAGLTALDAFLREHDVSRIGFEASGGYEWRLLAHLRAGERPAARLQPAQLRFFAKSRLKRAKNDRLDAALIALFTASLEQLPALPDARFDKLAAELTYLEQIEQQIALVKTFAETALSEAIKRRHAREVARLETCRKAHLLRLEKTVRDDCDLAQRLDLLISIKGIGLRSALCLIIRLPELGHASRAEIAALAGVAPYDDDSGKHHGRRRIQGGRERLRKSLFMCALTATRHNPDLAAFYTRLRQSGKEHLCAVIAVARKLIVLANTVLFRKTEWTPQYSKN

SEQ ID NO: 99987 - protein, 352 aa, unidentified
MMIIGCDFHPRFQQISFLLEETGECGQRRLMHAAEAEQYYRSLCEGKVRIGMEATGSYGWFRRLMCELGHELLVGDATQIRATNPRRQKTDKRDAEHILGLLVADRFPAIWQPPAENEQLRQLLLHRSRLVRLRTRVTNQLDGMAKNEGLILPGGWSGKRRKAIEALPLPGWYGERRKDLLALLDRLEERIAPLDKAVSQAAANNAEACLLMTHPGVGPVVSLAYVLTIGNWQRFPRGKQVGSYLGLIPSEESSGDKRRLGHISKQGNTLLRWLLVEAASTAQRYDPSWHRQYLRLSMTKHHGVAKVAIAHKLAVRLYWMLRSGEDYQHVRERGSHARQSECPGGRSTRPIE

SEQ ID NO: 99988 - protein, 325 aa, unidentified
MQGKDRSEQETKTKSTVGIDVCKLWLDIHILPSEESFRVPNTKAGSKEISRRLQHYDVQLIAIEATGKWHRDLHRNLVEQGHAVRVVNPLRARLFAEAMGLLAKTDRLDARMLAIFAASLTEARPPAPEIIEALKELVQARSSAVEEQTSLTNQLKSATTAFLRRQLKLRLTQIAKHIKALETEALKRINADPGLARRYDILVSIPGFGDIVAMTLLAWLSELGSCNDKQIATLCGLAPWPDESSDRVGARHIRGGRELIRKILYLAALTAKSFNQPMKAFFRRLTANGKAKKLALVAVARKLVVLANTLVRADRLWQIEAPKCA

SEQ ID NO: 99989 - protein, 421 aa, unidentified
MGKLIERCAGIDIGKRFLVCCVMTGAAHEEPRSETRRFDTTVPGLKRLRNWLNEERVTDVVMESTGSYWIPVFNLLEGHVTVVLANPEEVKNRKGHKTDRKDAGHLADLLRHNHVKSSYIPAEPVRQLRDLTRRRVQLTQDATRERNRVQKLLEQVNVKIGSVLTDVFGVSGLHMLLALLDGRAAPEEIAGLARGSAKRKTPQLIEALEGNRMSDHVRFLIRGCLRHLACLEEEVEELDAEILRRMQLSTFQKAFTLLQTIPGVGQLSAATILAETGPDLDSFPTIEQMASWAGLCPGNRESAGIQKGPQTTHGNPYLCTALVQCAWAATRKRDSVFRSRFQRLAPRRGEKRAIIAVAHHMLIILYCMLKRGVPFLGAEHAPKQRRRERRAHHHLRCLRRLGFSVEIRLSSESTPPDTISR

SEQ ID NO: 99990 - protein, 405 aa, unidentified
MFCGIDWASERHAVCVLDDAGKTIGAFEVGHSAAGLEQLVTRLRRLGDPAELPVAIERPDGRLVDRLLEAGHPVVPVQANAIKTWRDAEVLSGAKSDPADAAVIAEYLRLRRHRLRVLQPFSPETRALRAVVRTRGDLVDQRVAATNQLSACLDAFWPGAKHVFADVESPIALDFLARYPTPESAERLGEARMRAFLTKHGYSGRRPAAQLLERLRAAPAGLLGTPEVEARRDAVLALVGVLRALNHAIKQLDRSVLAHLGEHPDAELFTSLPRSGRISAAQVLAEWGDCRPAYADAEAVACLAGATPVTKQSGKHTAVQFRWACNKRLRRAVCTFADNSRHGSPWAAKVYADALARGHDHPHAVRILARAWIRVLWRCWIDQVPYDPAKHGAARTLTETATSPA

SEQ ID NO: 99991 - protein, 405 aa, unidentified
MFYCGIDIAKYKHEASVIDATGVALLDSISFPNSKEGGEKLFALYRRQGISKDDLLIGMEATGHYWLSVYGYLLENGFEVKVINPIQSEAFRKMYIRQTKNDSKDSFIIAQIMRFGQFSATSLSDEVIIAMRQLSRYRLALVDNCGDCKRRVIALLDQVFPEYDSLFSDTFGVTSKEVLAKYPTPEDMLSVSTGKLTNLLGKASHGRFGKQKAEQLKSMAAGSFGVSFAKDAFAFQIRQLIEQLNFLETQIGELEEQIAVLLKQTGSYITTIPGIGDTLGAIILSEIGDIRRFDAPGKLVAFAGLDVRVSQSGEFTGTRQKISKRGSPYLRRAIWLAASRAAFCDPALSEYYQGLRARGKHHLTAIGAVCRKLCNIIFAILSQNRPYQMLPPNDKKTSVSSFSPT

SEQ ID NO: 99992 - protein, 408 aa, unidentified
MIKKQNHIYIGLDIHKETHTAVISNCFDETLGSITIENKVCSYIRLVNKVKKLQGDLTPIFGLEDVHSHGRDLAIYLQGKGYIVKEVNSALSHMKRMSYPTTKKSDDWDAKCVASVLITNVDELPEANPQDYFWTIKMIVNRRSSLIKTSKTLLNQLHGQLTYSYPSYKKFFCDISGKTALAFFERYPSPSYLEGVEEEELAAFLREESHNSCSTNKAKLIIDFIDEDGKVEKEYEKERDFVIQSLIREIRFNNEEKIKVEEQMKNMLKELDCKLETIPGVDTITAASLIAIIGDVHRFENVNRLAKFAGLAPVNFSSAGKGKDRKSKQGNRDLYSTLYFLAVQQIQVSKKGLPRNPTFLAYYERKVSEGKTKVQALLCVMRRLSNIIYGMMKNNTEYKMPLIEESNK

SEQ ID NO: 99993 - protein, 360 aa, unidentified
MLAELVDAVVGIDTHRDTHQVEIALPTGAPIATCSITNDTRGYAQLLAFIVDHTPGPRLAVSIEGTRSYGVGVTRALGAAGLPIIEAEQPARKTRRGRGKSDPIDAHLAVQFALRLDADRLPTPRADGDRDALRILLGARHDLTMASTAQTNRLRALLRDGDDTDRELARGALPEDTLTALARRRLPHDATRAQAVRHGEIRRLAIALRAAARALKANRAQLQAIVDELAPGLTDRHGIGPVSAAQAIVSFSHPGRCRNDAAFAALAGASPLEASSGRTVRHRLNRGGDRALNRALHTIALTRMASCPRTRAYVTRRTAEGKTPREIRRCLKRYIARELYRTLTATMINTTMIGTAEIGA

SEQ ID NO: 99994 - protein, 378 aa, unidentified
MNRIIKIGMDVHTTNYTLCIFEPSFEHDGTVHCITQVKPEVKNIIHVIETFKKKHENEELNIVCGYEAGCLGYSLYHELKEKGIECVILAPTTMKTEKGGRKLKNDYRDAKMIAECLAYGGYSAVHVPTELDNSVKEFIRMRDDIKENLKSIKQQIIAFLTRNGKQFEGKSYWTRKHIDWINTVSFSEPLLQDTLKEYMIEYNHLCNRVETLDRQIEEISLKEEYVEKVQQLQCLIGIKTHTALSLIVETSDFNRFKKGNMYSAYLGLIPGDDSSGGHENKLGITKAGNSHLRRLLVEAAQGYTRGRVGFKSKDLKSRQEKCSSEVVAYADKANERLRRKYYRMILRGKKYNVAKTAIARELACFIWGIMTDHIDLCS

SEQ ID NO: 99995 - protein, 414 aa, unidentified
MEPQISFNQVVSRGCGIDVHQKVVVATIGGEGLKKATREFGTFTRSLTELKDWLLENGVTHVAMESTGVYWKPVYHVLEPTTLKVWIVNARHIKYVPGHKTDKQDSAWICKLLLAGLLKPSYIPAKEQRELRDLTRFRTKMIQDVASEKNRIVRILEDCNIKLSSVLSNTQGVVATKLIDKLCEEGTITMSDIEEVYHKRLEASKEDLYEACQGLIDKHHIYLLGLIRQDIASTEAVIKNLNGRIKEVLSGYDNVLENLKAIPGLSTKTVEDLVAEIGLDMSVFPTEKHLASWAGMCPGNNESAGKKKSGRTTHGNKQVKAVITEAAWAATRTKNTFYSARYHRVAARRGKKRALIAVGHSILKSVYHVINGMEGYKELGADYVTQRVEKRRKLYLKKELEKLGYAVQLIQPVP

SEQ ID NO: 99996 - protein, 341 aa, unidentified
MSSFNPNSCMGLEPVPSKEGSWKMAQKTLIVGIDVSKDKLDVAIRSVEAASTFGNNAKGHRELLRWLAEHDVGKAVMEATAGYEMACRKFLMKAGLEVVVVDPKRVRHFAKSAGRLAKNDAIDAQMIAWFGEVFDDLTGKPQDDEREQLEHLVTARRALVRLQEKVDNWARHERPKLVHKVYQALVKVLTTQLDRLDDAIARQIESSPRFAERAEIIHSVPGFRDVSAAGLIAFLPELGRVDRQAVAALLGVAPFDDDSGQHRGRRVIVGGRRKLRNLLYMPLVGAATRHNRVLMAHYQQLLARGKKPKVALMACMRKLIGILNTMLARGEKWDPTKHAIA

SEQ ID NO: 99997 - protein, 317 aa, unidentified
MTEPCGVGLDVAKATVDLASSTNPAARWQTTNDEAGWAALVAHVRTLQPVVVVLEATGGYETGAASALSTAGLPVAIVNPRQVRDFAKALGLVEKTDAIDAAVLAAFAARIRPAPRPLPDDLQADLHALVTRRRQLVEMLTAERNRVPLARGAVRKNLLAHIAWLEKQLGKTDRELRMRIEASPIWRVRDQLLQSVPGIGPTTSACLLAALPELGSLTHREISKLVGVAPLPDDSGTRRGYRRIQGGRRAVRTALYMATVTAITHNPTIRAAYRRWRAAGKLPKVALVAAMHKLLIHLNAMLRHQTLWHPSPTAPTA

SEQ ID NO: 99998 - protein, 345 aa, unidentified
MKVSTVGIDLAKNVFQLHGVNELGKTVFKKQLRRDQMAEFFVNLPACLIGMEACGGAHYWARKLQGFGHTVKLMAPQFVKPYVKTNKNDAADAEAICEAVARPNMRFVPIKDVEQQSVLALHTVRQGFVKARTAQANQIRGLLTEYGLIIPQGIWHIAKRVPELIEDASNELPGAFRLLIQRLLDHLKELDTHVDELELQIVKWHRQSSASSKLAQVPGIGPITASALVASLGDAKNFVNGRQVSAWLGLVPRQHSSGGKQNLLGISKRGDSYLRSLLIHGARSAIYNGKEKTNPTCKWINEIVSRRNNNVAAVALANKNARIVWALLTHDREFRPDYTREPVGV

SEQ ID NO: 99999 - protein, 412 aa, unidentified
MQTMMERGCGLDVHQATVVACLLIVLQNGKVQKQVRTFGTTTRELLALREWLLSEGCTHVAMESTGVYWKPVYAILEGTLEIVVANAQHVKKVPGRKTDVKDAEWLADLLCHGLLRSSFVPPKPIRQLRDLTRYRRKLVESQTAERNRLLKLLETANIKLASVATDVFGVSGRLMLKALAKGEATPQQMAELAKRSLRSKIPQLELALEGKMEEHHRFLLQLQLDRLEAVENDLELLERRLQEHLKPYAKQLALLDEIPGVDRTLAAAIIAELGVDMSVFQSVSQLASWAGVCPGNNESAGKRKSSRIPKGNVYLKTALVEAANAAARAKGTYLRDKFYRLKARRGYKRAAVAIAHKILVSIYHMLSEQVSYNDLGDLYLDKLNKSHLTRNLVHRLERLGYAVTLTLEQKAA

SEQ ID NO: 100000 - protein, 413 aa, unidentified
MEVVHPRCAGIDISKKDAKVCVRIQGRGSRATSTTVSTWGSMTNQILALREHLLGEKVTCVVMEATSDYWKPFFYLLEDVLPVMLVNAHHAKNMPGRKSDVSDSAWLADLGAHGLLRGSLVPPPPIRRLRDLTRARTALTRDRGRQVQRIEKILEDSGIKLSSVVADIMGASGRAMLAALIDGQDDPAVIAELAQRRMRSKIPVLTEALKGRFTTHHAFLIKMHLGLIDQYSQSLADLDAKIGEAMEPFAAARELLVSIPGISTTVAEVFLAETGGDMRVFPTAGHLASWAGTAPGSNESAGRVKSTKTRPGNRYLKGALGTAALTATRSRDTYFSAKYRRIAARRGPMRALVAVQHSMLTAAWHMLTNGDFYQDPGADYFSARHPAKTKARAISQLEALGFRVSLQPLTETA

SEQ ID NO: 100001 - protein, 352 aa, unidentified
MEQFIGCDAHKKFSVFVAVNEKGQAGEALRVMHDRQLYREFLARLPPQSAIAVEATGHYSWIVDEMESAGHFPKLANALEAKRRMALTKKTDKLDARGLAILLRNGTLPEVWIPPRELRDQRELLRLRIFLVHLRTRVKNRIHGTLARHNVQVPGADLFGVAARLQLGARLPELPLHSREAIEQELATLDFLETQIESTELRLQAIMAVSVEADLLKTLPCVGKVLSMVLMLEIGRVDRFPTAAHLASYAGLVPRVHSSGGHTRMGQICKNVNRTLKWAFVETGNLVVINQRRLAGTHVVRLYDRIKRGKNHQKAVVAVARHLAEAAWWVLTKQEVYTEPRNTRQALSSTHG

SEQ ID NO: 100002 - protein, 748 aa, unidentified
MKKHRQTKTKSETSKPLHEPEPDAAGIDVGANEIWVAVAPDRTEEPVRRFGAFTRELKAIVQWLRNCGIVTVAMESTGVYWIPLYQLLADAGLKVCLVNARHVKNVPGRKSDVRDCQWLQYLHSVGLLRASYRPEQAICAARSIYRYRQNLLTQAAQHVQHMQASLDQMNIKLHHVIDDLTGITGLAIIEAILDGKRDPQQLAKLRDHRIKASEETIVKALEGDWRSEHLFVLRVAWENWKQTQHQIQKCDQQLLEYTRQFEACTTIAKPIKIVRLSPEVAGSQPVAGSSKPRRKKTSKNEPQGPWREELARFFGVDLTAIPSISVLTGITLMTELGNDLGAFKTAHHFSSWLCLCPDNETSSRIKKTEEVHSSELLRDWLQRALTDRSDDIAHYLANQRQRFFNAVVVGVYGGNPEWHAISLRKSKLFDPQDLNQRVAESLGFLALSGAENLFAIDGQHRVEGVKRFIQQLPEKQRSELQDEICTIFVAHKTSATGVQRTRRLFSTLNRTAKPVSLTEIIALDEDDIVAIVCRSLLEKHPLFQQGRVSIARQKSISPDDHRSITSLVALYQAMGIYLTQGSAKQWQRFRSTRPSEESVETYVQKAHKFWDRLAESLPELQAIIQLRQDEDIPATLRNQEDGGDVLFRPIFPPMMIRCLRTAGKKGMSESEFIKRLSRIPRRLSGPPWRGLLWDGNMITRSKNQKVAEALILWMIGVNQRSGPLRQKLAEILNRNLEDFHLPDPISSK

SEQ ID NO: 100003 - protein, 322 aa, unidentified
MVSFVGIDVSSTSLDVAVRPQGIKCSVSNDPAGFEELDSWLRGFSIKRILLEATGGYERDILHFLQDASYKVIRVNPKRARSFADSMGIKAKTDAIDAEALAHFAEVIPDKPTLQVSPDRALLREFLQQRDRFVQQRDDDRRRLKQAQSQVVVDLLKSHIQHLRLQIKLVEKEIKQQTTTLNDERIAQLIQVKGIGMVTAAKLVALLPELGRVESREIASLVGVAPFNHDSGKSVGKRYISGGRSQVRRALYMACWVAVRHNPGMKARYDALRGRGKLAKVAIVACMRVFIVQLNAMIRTGTPWREQPPTKPESTAQAQGAA

SEQ ID NO: 100004 - protein, 338 aa, unidentified
MEVYVGLDVSDKSTHLCVVDGSGATVWSGACATDPEVIARTLKARAAGLVRVILETGPLSTFLYHGLFERGVPVVCVCARHAKGVLSARVNKSDPHDAEGLAQMARTGWFKQVRIKAEATHMDRARLKIREQLVLSRQAIAGQLRGLLKLFGLRLGQVTTPGKRRERLRMLFARRPELEPILAPLIESLEALEAQIARTTKALAAQAAADPVTARLMTAPGVGPITALVFKSSIEDPERFSRGENAGAFAGLAPRRDQSGQRDHKGRISKAGDPMLRKALYEAANVLLGRLKRPCALRDWGLRLAETKGVKRARVAVARKLAVLLHRLWLSETDFRWA

SEQ ID NO: 100005 - protein, 408 aa, unidentified
MRVMNCAGAGLDVHQKTVVACTLVGEANIQPHLEKRTFGTTTTALLELSDWLKQQGVTHVAMESTGTFWKPIWAILEGDFDLTLCNAAHIKQVPGRKTDQKDAEWIADLLRHGLLPKSFVPALPQQDLRELTRYRAQVTADRSAVSNRIRKLLEGANIKLGSVASDVLGVSGRRMLEALIGGETDPEKLADLAVGSLRDKRPQLVEALRGRVRPHHREMLRLLLAQWRFLDTLIGDIEKDIEEAVGPFAAAVELCETIPGVSTTAARALVAEIGARMEQFPTSAHLASWAGVCPGNNESAGKQFSGRTRKGNRWLKRTLCQAAWAASHTRRTYLASQFRRLAAKRGNKRAILAVAHSILVVAHTLLTRNCAYQDLGADYFDKIQAEGLKRFCIRKLEALGHRVTLEAA

SEQ ID NO: 100006 - protein, 358 aa, unidentified
MESKSKELDFQGQNIYAGIDAHLKNWRVTIMLEHTTYKTFSMDPDEEILHNYLHRNFPGGTYLSAYEAGFCGFSIHRKLEKKGIKNIVVNPADIPTTDKERKQKEDKRDSRKIARSLRNDELEAIYVPSKATEELRGLVRYRKTLVKEISRNKTRIKSFLHYHGIKIPQELDTASRYWSSNFSKWLETIRLTTDFGHIILSSTLDTVNHLRSNLLKINNELKEIAKSKVYSDTLRYLTSIPGIGLIVAMTIISELENIKRFKSLDKLCSFIGLVPTTKSSSDSERIGGVTPRSNKPLRSVLVESAWIAIRNDPALALAYSNLCKRMKPSKAIIRISKKLLSRIRYVLINETEYKYEII

SEQ ID NO: 100007 - protein, 346 aa, unidentified
MSKHSVKAGDVAGLMKLFADLRRKAEARTSESYPIITLQEAGLDGFWLHRVLQQNGIESHVVDPASIATPRRHRRVKTDRLDGEMLLRALLAYRRGEPRVCAMVVAPSPEEEDRRRICRERRSLIAERITHVNRIKGLLFVQGISDYEPLRRDRRARLEALRTGDGRQLPAHLKAQIGRELDRTELLLEQIEAVETERDAMLAAARKPASEEAAPDVVTMLLALKGMGANFAAVLWSEAFYRQFSNRRQVAAYAGLAATPWQSGGIRHEQGVSKAGNPRLRTTMIQIAWLWIRHQPQSALTRWFKERSPQGRKRAIVALARKLLVALWKYVTQGVVIEGAVMKPAA

SEQ ID NO: 100008 - protein, 344 aa, unidentified
MSEVTTIGLDIAKNVFHAHGADERGAVIISRKLTRSKLLDFFAGQPACVVAIEACGGAYHWARQLQSMGHEVRLIPPAYVKPFVKRNKNDAIDAEAICEAAQRPGMRFVAVKSEEQQAAGLVFRTRDLVVRQRTQLINAIRGHLAEYGWVAPRGTAHMTMLADLLEDEEMASGLPDAARPMFKLMIDLLAELDKQISLLDREIARRAKEDEDARRLMTIPGIGPIAATAIIALASPIETFRKGRDFAAWLGFAPRQHSTGGKQRLGSISKMGERTIRRLLIIGGSSMVRQACRFGAPAGSWLERMLAPKPLMLVSVALANKMARMVWALLTKKEDYRAPAAVAA

SEQ ID NO: 100009 - protein, 340 aa, unidentified
MTQHKIIGIDLAKNIFFLFEINHKGKNLSRKKLQRSKLLSYIANKEPCTIAMEACSGAHYWAREFSQFGHKVILYAPQHVKTQRRKQKNDYNDAEAIAEVALYKRPHPVPHKSVEQQDIQSLIRMRRLLVTERTRIVNQVRGLISEYGIIMPKGAAAFRKAIPEILENDENQLSCILRELISHQYERYLYIDGQVKWFDDKLNQTIKQFENAKRLMSIPGFGPLTSQAVAVWLGSGQQFKTGRDASAAMGLVPKQDTSGDKVILLGITKRGNTYIRSLLVHGARAALRRAKFKSDNLSKWMLELQERRGPNRAAVALANKLMRIAWAVITKNEEYRPTQS

SEQ ID NO: 100010 - protein, 287 aa, unidentified
MRDFPNTHSGLERLSRFLIKNAVNLVVMEASGGYERLPASDLRARGLSVAVVNPTYVRRFAQGMGSLAKTDPIDARLIAHFASVKQPKPQQAKTVEEEELAALVERREQLVSLLSVEKNRLSKASDYSKASLQISIQFLTGQIASIETEIKALVAKSPERLARMRCMCGFIGVGDITAVTLLTEMPELGMESGKHIAALAGVAPINRESGKMKGKRRTYGGRARVRRTLYLAALSASRHNPIIRAFYERLLAAGKEKKVALVACMHKMLTILNAMFKKGELFNPEYS

SEQ ID NO: 100011 - protein, 450 aa, unidentified
MQFMKKKAGFPVLYPNAAGIDIASREHYVAVNPDAAEQSIRSFGSFTDDLHEIAAWLLQCKVDTVAMEATGIYWVSLYLILEEAGFEVVLVNAKHVKNVSGKKSDVKDAEWIRQLHSCGLLSKGFQPDHFTRTLRAYMRHRKNLTEMAATHIRMMQKALEQMNIKLQNVIADITGKSGQAIIKAIIDGEHDPQNLVKLLDGRIKATKESICKSLHGIWKTENLFELKQSFDLYHTYQEMIKECDLHIKRHIEEKASYCESDQIQSLYPVKKKYKTNKNNLNFDATDMLQKIVGTDLTEIFGITDTNATEIISEIGLDMSKWPTAKHFTAWLNLAPNNKVSGGKLLSSRVPRKRNKAGQIFKMAAFAVQRSKNWLAIFYNRIKMRSGTSRAVTATARKIAVIFYKLMKEKLRFCPLDRDQYLESFKVRQLKKLKQQATRLGLVLVPDNLVS

SEQ ID NO: 100012 - protein, 427 aa, unidentified
MNENKRSKIDEFRQFKKQIRGSTEVLVVGLDIGKRKHHAFLGSANGQTVLKGLIVENSAEGFAHLLTQVGFYMQRDGFKRVVFGLEPTSVYHKPLAEHLIAQGHLVVYATNEAIKKNRSLLDGRWDKNDTKDSANVADLVAQGKCQYYDLPDQRLRELRSLLLFRKRLKKQQHSCRVRIRNNLVAQYFPELDRFWNNAEAENLSIVRWFLDPARIRALSCEQFIAKVTNHNGGDRQQRRLRQIWETAGNSIGCRPGPGTQLEAQLMVESLQSIQDQLARVEQAIQELASSFAEYEYLKSIPGFGPYVSAVTLSAIGNPDRFENRSQLLRLAGFDLSASRSGEKSKSAVPVISKKGKADLRYALYQAALIASSLTRHFRAYYNRLLDGRQREQGIRTKMRVKIAAKMLVIAWTLMKRKESFDPAYIQS

SEQ ID NO: 100013 - protein, 427 aa, unidentified
MLGVGIDWAEDFHLVALGRPGQGVVEVARVGHTPSAVASLVTRIGGLEPDPERVRVVVETSHGMLVESLLDAGFEIVPVNPDLIARRRGPARKKDDAEDARIACLLALDEYAGLRPLIPHGDVASELRAIARDDERAARDQRRLLNRLRADLLATFPAALLIAGEDLGAPTMLRMLQRWPTAAALGQATRQELVAFARAGRHGWPERFADKVQTACGTEVFTAREPLVRAKADTITLAANQLLLLAAQRRTWEKRMGQLLLGAPRRGRAHQPRPDEAGPCFPGGEIYLSFPGLGDRLAARVAAEIGDHIEQFTTANALACYAGKAPVTRRSGKSQYVASTRLSCNHWLREAVQQWAFCSLRYSPWAREFYDTQIGRGKTHHAALRALGNRWLEVLWHCVSTNTPYDEAVHTANRAHAQPRLRAGAAA

SEQ ID NO: 100014 - protein, 415 aa, unidentified
MKTYILRPHNSVEPQKAQFLDTPEPSHTHTPTSLADISSQGSQPKALFIGLDVHTDSIAVSLASSVSTEVRRYGLIGGSQDDVLKLAKKLSAAHPKSTLKFCYEAGPHGYPLCRFLRSHGYECIIVSPSKVPRRPGDRVKTNRRDADQLARLYRAGELSGIAVPDPQDEAVRDLLRARYQISRQQHRGRQQLKMFLLRHNIRYGGKTSWSPAHLRYLAKIKMPFPEQQFVFQEMLGVITEATARLERYDAQLPSVVAGWRWEPVVRALMSLRGIALLNAATLVAELGDLNRFEHPSKLMGYLGLVPSEDSTGEERHQGGITKMGNGYARRALVEAAWHYREPARITPHLQKRQEGLPNAVTDTAWAAQCRLHARFKHLLGVGRKKPQVAAAAIARELSGFVWAIARQVQPHPSKP

SEQ ID NO: 100015 - protein, 386 aa, unidentified
MQAPTVSTPITGHISTIFVAIELSQKTWLVTLHSPDRDKISRHKVQGGDHASLLALINRVRDRAVQRLGSVPAVVSCYEAGYDGFWLHRLLIAAGITNYVFDPSSIAVDQRARSVKTDRIDGEKMLRTLMAYLRGEPRVVRIVRVPAPEQEDARRDTRERGRLTKEQTAHTNRIKALLRLHGFAVGQPRRRDWLTWLAGQRDWQGQGVPPRVLSEIENEHARLMLVRKQLDALERTPAAADPAPAVAEVVRRSELLQRLKSLGPAFAKTLTQEVFYKDFRNRREVASYFGLAPSPWQSGGTDRDQGISKAGNPRARCSAVELSWLWLRHQPDSELSRWFRQRTLNAGKRTKRIAIVALARKLVVALWRYLTTGLVPAGAVLKSAKA

SEQ ID NO: 100016 - protein, 403 aa, unidentified
MNMNAVGIDVSKGKSMVAILRSYGEIISKPFEVKHTVSGIRSLIEQIQSIDGESRIVMEHTGRYYEPLVRELSKADLFVSAINPKLIKDFGDNSLRKVKSDKADAVKIARYTLDSWTEVRQYSLMDEIRNQLKTMNRQFDFYMKHKTAMKNNLISILDQTYPGANTYFDSPAREDGSQKWVDFSATYWHVDCVRKLSLNAFIDHYQKWCKRRKYNFSRSKAVEIYEASKELVSILPKDDLTKLIIKQAVEQLNTASQTVEQLRTMMNEAASKLPEYPVVMAMKGVGKSLGPQLMAEIGDVSRFTHKGAITAFAGVDPGVNESGSYEQKSVPASKRGSSTLRKTLFQVMDVLIKTKPQDDPVYLFMDKKRAQGKPYYVYMTAGANKFLRIYYGRVKEYLSSLPE

SEQ ID NO: 100017 - protein, 357 aa, unidentified
MKILALDLGKYKTVACDYELATGEHEFETIATTPQRLHDLLVAREPDRVVIEICSIAGWVCDLTRALEIEIEVANSNDERWRWKRIKKKTDRTDALKLASLSALKQIEPVHVPVREVRQWRALINYRQYLLRRRNKMKNHIRDLLAREALLLPRGRSAWTQEGMLALEQLARPLAEVAGDALWRGELSIELGELRRAEEPLKQVEQKLDKLAKANQNVQLLQTIPGVGPRLAEALVALIDDPSRFAHGKEVGAYLGMVPKQLESGETSRLGHITHHGNRLVRALLVEVSWLGLRYNPWVREVYERTRAGKSARRKIAIVAVGRRLLIRSWAMLRDQQPWHGPVKQAPSKKEKLKRAA

SEQ ID NO: 100018 - protein, 355 aa, unidentified
MSQEKYIGMDVHQATISVAVMDVHGKLLMECLLETQASTVVEFIRGLQGTLSLTFEEGTSAAWLHDLLKPHVSRLVVCDPRKNALLQDGSKSDRVDARKLAELLRTNQVKPVYHGEHGIRTLKELGRSYLTLTKDVTRVMNRIKALYRSWAIPCSGSSVYAPRHRAEWLAKIVEPGVRLRAEHLYQQLDSLQPLRLEARHQLLRESHQHAAVKLLRQVPAIGPIRAALLVALLQTPHRFRTKRQLWAYSGFAVETHDSGEYRRVRGKLQRNRERITVRGLNDNHNQDLKNLFKGAAISASTRPGPLHDFYVARVEKGMRPTMARLTLARKIAAISLTLWKKGVKFDPKQLHRQAA

SEQ ID NO: 100019 - protein, 336 aa, unidentified
MLYVGLDYHLNRSTVVILNKDGKKIKTHTVRGGWWEVLKFLRSLGEAFMICYEASTGYGVLFEELSKIATAVKVAHPGQLRLIFRSKRKSDSIDAAKLAKLLYLDEVPVVYVPHSEIRNWRSAIKYRGGLVDERARTKNQIRALLRSLVIKAPRSLWSRAGVAWLQEIELDDPMAAMQRDELLQRLEQQTFMIKRVTKVLDERAKKHPGVQLLMTVPGVGARTAESVVAWVDNPARFASVRQVAAYFGIVTCLDSSAGKDRYGRITREGPGIVRKYLVEAAWQGIRRSPRMRAYYERVQRNDPKRRKVALVATAHYLVRVLAAMLRTGEVWRAEAA

SEQ ID NO: 100020 - protein, 311 aa, unidentified
MPRIAEQAGLVTGGVDTHADVHVAAVVDQVGRVLGTQAFPATAAGYRAALAWMRAHGELVKVGVEGTGSYGAGLARYLAACGIEVAEVIRPNRQARRQRGKSDAADAVAAAVAALSGEASGMPKSRDGAAESIRALKVARAGSVKARTQAGNQLRDLILTAPEPLRQQLAGLPSGRQAGVAARFRPGGPACPAEGAKAAMASVARRHQQLTAEITRLDAMLGELVRHAAPAQFLAKKGVATQVAAALLVTAGDNPGRVRKEASFAALCGASPVDASSGKQIRHRLNRGGDRQANSALWTIAMTRLAHDPRT

SEQ ID NO: 100021 - protein, 339 aa, unidentified
MELTVIAVDIAKNVFQLHWVEPDTGSIERLKLKRAQMLTWFASRQPALVMMEACGGAHEWARQLIQLGHQVRLLPPKMIRPFVQRNKTDAADAHAIWTAGQQPGVKFVAIKNDEQQVVLALHRLRAQLMKMRIMQTNEIRGLLYEFGIVLPEGHQALLKELLGALLQVRARLPSMLLDSLDEQVRRIRQLEADIGSIERRLREQLRHTPACTTLAQIPGVGLLTATAVVASMGSPTAFKSAREFAAWIGLVPRQTGTGGRVRQLGISKRGDAYLRTLLMHGARSIVRSDAARGWPWLSELLKRRPYSVAVAAVANKLARTIWAVLARGQDWRPSAWQAT

SEQ ID NO: 100022 - protein, 406 aa, unidentified
MKHVVAFDVSMGKSTMVIYDRYRQCEYEGEITHNRYSFEKLNETLITLTQKDAQAPDIVFEATGVYSKPLERFLGDQGYMYYRVNPLEANIQMASMRRQKTDKSDAHELAKTHFRVEREQTYQEEDYYKQMRAMTRYYDELSSEMTHLYSRLHAILQLSFPELEKLFSKRSALFLNVVQLYPHPDHVLVCSKTVIRNRLKANTRKNLSLARAEEKGIALIEAAKEAYPAISKDDIRCEQVRDYAKRIADLKEKRDQLVQKMVKLSKDKQEYQILISFPGIGETTAVRLIGELGDIRRFKNHKQLNAYVGIDIMRYQSGNTFYKDKINKRGNNKLRKILFYMIQTMIQLRKNTQNHIVDYYDKLKTQPQRKPHKVASIACVNKFLKSAYHLITHNLKYDYEKATMHQ

SEQ ID NO: 100023 - protein, 421 aa, unidentified
MRSIGLDIHRDFAEVAIAEGGEVRSAGRIEMTPEALELFAGSLGAGDRVAMEVSGNAWEVARIIRPHVARVLCVSPADTGIRSARAKTDRLDARALAKLLAAGQLESVWVPDEKTRAMRRRLARRARLVRLKTKAKNEVHAVLMRRLIPKPKPSDLFGVKGRRWLAELALPAEERETVDASLRQIEFCESEIAAIDRVVAAEALSSPEIRRLMTVPGMGVITAASFMAAIGEVRRFADRKKLVGYLGLDPKVRQSGQSQASRARISKQGSAAGRYALVEAAYSAVLSPGPMRAFYQRIRARRGHQVAIVATARKLACLLWCLLSRGEDYAYAQPSLTAKKLRRAELLAGAPRGKRHVERGLWSTNAAMRKAERELARQAEVAYERTVADWEAQQSKRKGAGATPGRASHAARQVQAPGPAL

SEQ ID NO: 100024 - protein, 372 aa, unidentified
MNYNTVYVGMDVHKESFSLCAYTIEAEKASHYQRTEADYKKILNYLEFLRTIYGDDANFICGYEAGCLGYTLYHQLTANNVKCIILAPTTMLEQRSKKRIKTDKRDAEIIAKCLAQHNYSPVHIPTAKDEETKEFLRMRDDHKLALKKVKQQILAFCLRHNYRYDGNSHWTAAHLKWLKALTPEALYKEILDEYLLTYQTLSDKLERLDKRIEELATQDEYKEAVKKLCCFIGVKTHTALSVLVEVGDFKRFASAQHFASYLGLVPGEDSSGDDQNRLGITKAGNRHVRLLLTEASQCYARGQVGFKSRELKARQSGNTPAVIAYADKANERLRRRYYKMVLNKCKKHNVAKTAIARELACFMWGMMTDNIA

SEQ ID NO: 100025 - protein, 406 aa, unidentified
MTKYLYAFDVSKGKATQVLYKNNRCIEESLLEFTRKGFEELLQNIQQIPGEVTLAFETTGIYSKPLERFCHKNHLTYHSLNPLEVYNRTNGLTLRRNKTDQADAHKLAQIMSNFNFQPSVRKELRYEEMKRMNAYYLELQEGIDRLYVKFLEGIYLCFPGIEKVFSKLKNEFALTIIEKYPHPDYVLETSRTVIKNILKKSTLKNISKQRAFQKADQIIECAASSYPSVHKDSFYCQVLSFYAAHLKNLINQKELIQDKMIALGRQFSEFIIYASVPGIGQLSACQLIAELGDLSRFENHKQLNAYVGIDIRRYQSGKFIGRDHINKRGNKKARKILYIIITNMIRAQRHAPNHIVDYYYTKKQPPFNKCHKVAVIACMNKLLKCLYALFNHHTKYDYELNASHRN

SEQ ID NO: 100026 - protein, 339 aa, unidentified
MNYVGIDWAYGRAAFCAMGEGGEIQAEGLISADEDGLAKLVLRLGSEARAAVEMMSGAVWVRDRLEASGRQVQVAHARKVRDVAPLACKTDKVDARVLAELRRRELVPALWLPSPSDRALRERLRRRAHLVKTRTSALNRISGLLTQFGLRVSRRRLRKPDGMKLLERRGVPAVWRASIRELLELVEEMDRRIDPIDRELRPLAHQDERVKLLRTIPGVGSLLGLTLAAEIGEISRFPGPAKLIGYAGLAPKVSQSGKRSQTGALSKAGSRTLRWAAVEAANQAWRPSNPWHLHYLRVSARHGKNPAKSAVARKLLIAAWHMLSRREPFRPAPASSCAF

SEQ ID NO: 100027 - protein, 345 aa, unidentified
MPIVGGLDIHRKQITFDYLDTVTGQVQRGQVSPAGREHLRAWLARFAGREDVAFAVEGCAGWRYVAGELAAAGATAHLAEPADTAARRGRKRHAKTDKTDARHLRMLLAEGRLPECWIPPGHILECRALLETYHDLRREHTAWVQRIHAVLFHQGAPALGVGTLRTGQGVAALRAAADDCLSPAGQLQVATALEVIEALEARMHVVRHQLTDAARHLTGARVLAARLYGVGPFAALALTCWLAGAGRFSSSRKAVRFAGLDVTVWSSDRKGPPGKLSRQGPPVLRWALYEAGKTHARASAPDHAYYAQVKDRKNSKRAALSEARKILRQAHHILAELGDDALAAA

SEQ ID NO: 100028 - protein, 313 aa, unidentified
MTLYKDFVGIDIGKFTFVVGRHSSGVTKEYKNDVSDIKRFIKENRVILSDSLIVLETTGGYEQALAVALIDAGYRVHRADTRKVKNFIRSYGSGAKTDVLDARALARYGYERGGDLALYQPRQEQAQALFQLVQRRSDLTAMLVAEKNRLHKAEDEVVRASLQEVIALFTAQIAALTGQIKALIKSDKKMQQKFNIIKTVPGVGDVVGCALLALLPELGHLSRREIASLAGLAPRANDSGRSFGYRRIGHGRAGIKPVLFIAAMAARNSKTRFKEFYEQLIAKGKKKMVALTALMRKLLIVANAKLKEINALQ

SEQ ID NO: 100029 - protein, 355 aa, unidentified
MTRLARIGIDTSKSVFQVHGVDETGQVVLRRQLRRRQFLAFFGKLDSLPIGIEACGASHHWARELVKLGHQVMVIPPQYVKGYAGPHKNDKIDAAAICEAVGSRKVQERLVPIKSVEQSAAQMLLSVRESLIRRRTQLSNMIRSHAAEFGLVAAKGLDKIEPLLARITEDEDLPVLAKQMFATLGQEFGEITARTAAIDKQMLAFHRGNELTRRLAEVPTIGPVGACLFVTKIVNPRGFRSARRCAGWIGLTPKDRSTGGKQKLGGITRAGDESLRAALVCGATAYLRHVRSGRTTPSPWLAGLLKRKPPKLVAVALANKTARIAWKLMVSGQRYDRARAWAQPDIAVDAVGIAA

SEQ ID NO: 100030 - protein, 338 aa, unidentified
MVLIGIDPHKASHTAVVIDRDEQELARVTVRASRGQVGELLAFAAPFTERRWAIESAGGLGFLLAQQLVRAGQDVVDVPATLAAKARLLGSGRGSKNDPNDALSTAVAALRDPRLRAVVVEDPVMVLRLLADRHQDLTSLRTQAVCRLHALLAALTPGGVQKRLSATAAAAFLARVHPDSVTTATRREMASDLVADIRRLDKAIADIKARTTVAVTASGTTVTDLYGVGPVVAALLIGHTGDVRRFPNPGTYASYNGTAPIEASSGPKVRHRLNPRGNRQLNHAMHMIAVTQIRGDNPGRDYYRKKITEGKTTREARRALKRKISDAVYRQLKADAVG

SEQ ID NO: 100031 - protein, 356 aa, unidentified
MEWEKGRACGQRQRMYYIGLDVHKKTISYCGKDGSGGIYAEGSIPATRLTLDLWMKTLPQPWTAAMEATIFTAWIYDHLKPHAAAAKVAHPLMLRAIAVAKKKNDCIDAKKIADCLRCDFLPECYMASTEIRERRRTLRYRNLLVRQAVQMKNKIAVLLMEAGVSYNKQKLHKVGYFRELLTTNQDIDEGLKPLLRLCRETVVRLGKTESALVRSLERDSLLVERVERLMTIPAVGPITALTWALEVGDVQRFSSIKKAISYCGLCGAEKSSANITMRTPLSKQRNKHLQTVLIEAAKRAPRNSPELAMVYDQEKQKGNANRATLAVARKMVAYLVAVDRRQKGFLVVENKNRTAA

SEQ ID NO: 100032 - protein, 314 aa, unidentified
MPAAVVVGIDVSKRTLEVALSNGGGFSVANNEDGISELLARLRPSGAALVVLEASGGYESPAYLALWEAGVPTALINPRDAYHFAQANRQLAKTDQLDARGLCEFGLRMQPEPFPPPEAADEELKALAVRRRQVVKMLAAERTRVQQAPGSVRSSIKRMVRALERELGALDHQIEQRLRDNPRLAQRCAQLEQVPGLGSVTCAILVSRLPELGLLGPKQVAALVGVAPYDHQSGEWRGRSPIFGGRAEVRSALYMATRSAIRCNPVLRSFYRRLRAAGKPAKVAIIAAMRKLLVILNAMLKTNSPWRPPCAVVA

SEQ ID NO: 100033 - protein, 373 aa, unidentified
MPRYSTAFGMDVHLRSTTVCALDAETGEAVTRRFRGNPWGEVAEWMSGFPGPSLAAYESGYLGFAPQRELSGLGVDCVVAAVSKVPRSAADLSSKNDRNDAARMAKAILSHDVTPVWVPSPEIEGLRDLAAAHDAATARLAAAKQRLLAFLARRGYAYGGTTPAGNPRRYWTYDFLRWLDKVRPADDGGIRALAALRNEVEAAAETRDDLLAEYRAAVAAGPLSAEVEALQSIKGCGFALAAAFASEVGDFSRFRSGRQVTSYFGLAPKQRSSADSVRLGGISGAGNALVRRLAVEGSWSYVQASHQPKLMPKGSGVPLEVRMHGRKGSERLLRRREEMLARGMPQAKANAATAAELVRWLWALGAMCREATE

SEQ ID NO: 100034 - protein, 427 aa, unidentified
MKYNQNSKILQITEKTLIVGVDIAKETHHARAFDFRGIEYGKRIEFSNDIDGMERFLKWAADIMNKSNKEHLMVGMEPTGHYWLCFAQFLKDKNHKVVLVNPFHVKRSKEFDDNSPTKNDRKDPKTIAMLVKDGRYVEPNIQEGIYSELRTAVDIREMLTKDLNKIKNRVARWLDIYFPEFNKVFADWEGKAALITLKEFPTPAKILCIGTKEILAAWKKEVNRAVGIKRALKLIEAARESVGKKDGIETAEMEIKIILEQYEMLVKQLKKIESKIEELFMQVPGANEMLSIKGVGVITAAIFIAEVGDITRYEHPKQIQKLAGYNLVENSSGQHKGQTTISKRGRRRLRSALYKMIMPILANNKEFQELHKYYTTRKENPLKKKQSMIVLCCKLIRVFFVILKKGVKYNGNKMLRDIKRPEIRNAA

SEQ ID NO: 100035 - protein, 398 aa, unidentified
MTESSDYESVQVFIGVDVGKDTHHAVAINRSGKRLFDKALPNDENKLRSLISDLKQHGQILLVVDQPATIGALPVAVARSEGVLVGYLPGLAMRRIADLHAGEAKTDARDAAIIAEAARTLPHALRTLKLADEQIAELSMLCGFDDDLAVQTTPASNRIRGLLTQIHPALERVLGPRLDHPAVLDLLQRYPSPEKLASLGEKKLAAQLCKLAPRLGKRLAADIAQALAEQTVVVPGTNAAAVVLPRLTLQLITLRKQRDEVALAVEQRVLAHPLYPVLTSMPGVGVRTAARLLTEVACRAFASAAHLAAYAGLAPVTRRSGSSIRGEHPSRRGNKALKRALFLSAFAALRDPISWAYYTRKMSQGKRHNQALIALARRRCDVLFAMMRDGTFYTPQAS

SEQ ID NO: 100036 - protein, 482 aa, unidentified
MVVPNEEPKKPTRPKKPTRPKKPTKPSKSRGRSFPVPVPASTDPLQLINPDAAGIDVHSNMHMVCVPADRDPNPVRQFGANTADLHEIVAWLKKCGIKTVALESTGVYWIPLYELLESEGFDVNLVEPGQLSRCGARPKTDVLDAQWIQRLHSYGLLRGSFRPPDSVLALRAYWRLREMQVRYAAHHVQHMQKAMEQMNVKLTEVVSDITGLTGMLIMGAILEGERDPNKLAQLRHPQCHHSEEQIALALDGTWRPEHLFELRQAHELYQFHHRKIDECDQQIEAELLKFPNRAGEKTHTAKPRKRGRKSNDVRFPAEGPLFKAFGVDLTLIDGIDVGTALVILGEIGVDVSRFPTEKHFASWLRLCPPQDESNKTNRHRRHRKTTSRVTIALRLAARSVGQSKTPLGAFYRRIRSRIGGLGAVKATAHKLACLIYRMLKYGQEYVTQSMEEYEAKVKGNQLRALKRKAAALGFQLSPLPAP

SEQ ID NO: 100037 - protein, 347 aa, unidentified
MASMARAALEVTVGVDTHRDTHVAAAVDSTGRALGTIEVSTDRNGYRRLELFAGSFGDIVAFGVEGTGAYGAGLARFLAERGHTVIEVDRPDRKARRHQGKSDPVDALAAALAVVSGRATTTPKSRDGAVEALRALSVVRRSATHSRTQATNQLRCLVTTAPDRLRERLRDLTLKELVATCAAFRIAGTETTADATRFALRALARRITSLTEEIAELEEHVASHVRTAAPDLLELKGVGTQVAASLLAAVGDNPDRLKTEASFAHLCGVAPIPASSGQRTRHRLNRGGDRQANNALWRIVMVRLSCDERTQAYMEKRTAEGHTKREIIRCLIKRYVAREVYHCIVPN

SEQ ID NO: 100038 - protein, 376 aa, unidentified
MLDYTRYVGLDVHKDSIAVCVVTADGEEWPTSIIANDPDVIAKTMRRIARQAGGLGAVRCCYEAGPCGYTLYRQLTGIGVSCNVVAPSLTPVRPGNRVKTDRRDAKKLGRLERAGELTAVWVPDEAHEALRDLVRAREDAKEDLLRAGHRLSKFLLRHGKRPSDPMKRWTQKYERWLDSVHFEDGMQEIVLAEYRQQVREAREAMLRLEGQIELAVQCTPFRATVMALQALRGVGLIVSATLVSEYGDITRFTHPRQMMSYAGLTPSEASSGQTVRRGWITKMGNCHIRRVLVEAAWCYRHTPRVGRELERRQQGQSPQIKSISWKAQVRLNQRYRWLVGHGKPTNQAVVAVARELVGFVWEIAWAVQGQSLAQVA

SEQ ID NO: 100039 - protein, 355 aa, unidentified
MIKVKTNFEGQTVFVGMDIHKSSWNLGIHLNDQFIRNVHQKPSPHIMVQFLRQQYPGANYKAAYEAGKFGFWIQRQLTASGVDCMVINPADIPKSQKDTLQKTDTRDARNIGLRLQSGVLRGIHIPDEQQEADRVFFRHRKRIWKDLTRCKNRIKGLLAFSGIDIPEQYDNANWSHNFINWLKALDCKQTSRRIALNYMISQMEFLRKELLTISNAIRKMMREQRYKKNYYLLRTIPGIGPLTAASILVEIGDIHRFGTFYHLNSFVGLLPMEHSSGQSDNKLSLTVRKHRQLRSDLVESAWTARRIDPAMALYYQEQIKRKDSKVVIIKIARKLLNRIRYVLLNQKPFEYGIVK

SEQ ID NO: 100040 - protein, 342 aa, unidentified
MKDMMIGVDLAKNVFQIHGALRTGEVQFRKKLTRQQFTAFMARQAPCLIIFEACGGAHYWAREMEALGHEVKLIAPQYVRPFVKRQKNDAADAEAIVIAARQAEMRFVGPKTVEQQSRAAVFRGRERLVHQRTADVNALRALLYEHGYVFPVGMRYLDRMTALVDDDTSDLPALIREECQDLLAQIAEKTARITERTAKLKALASQSDRARRLQTMPGVGPLTAIAVEAFGPDMAHFKTGRNFAAWLGLVPRQHSSGGKERLGRMTKAGQADIRRLLIMGAMSRLGWLGRRTLAQGNWLSRMSARKPTMLVAIALANKMARQIWAMLTKNEDYKDPALAVAA

SEQ ID NO: 100041 - protein, 341 aa, unidentified
MSIQTLGIDLGKTSMHVVGLDASGKPVHRKKLTRTALIRFLSNLAPCRVAMESCAGSHDIARKADAMGHDAVLLPAQFVRPYTKGQKNDNSDAEAIAEAATRPTMPTVSIKDATQQEIQFLHRTRQGWIKQRTETANRVRAMLLEFGITVPQRILNLRRALPGILEDAEKDLPDGVCQLVADHWQQLQDLDDRIADITQRIERLPVRDARAARLMSIPGIGPMIATAMVAAVGDGTQFTQGRGLSAWLGLVPQQFTTGGKPRLLGISKRGNRYLRTLLIHGARAVLQQAHRGDDALRRWIQQVNGRVHRNKAAVALANKLARVAWAVLTRGETFRASAAAA

SEQ ID NO: 100042 - protein, 347 aa, unidentified
MAIVEVTRPIVGGVDTHLDVHVAAAIDPIGGLLGVESFPTTPAGYHALASWLGAFGPIDRVGVEGTGTYGAGLARHLAASGITVIEVDRPNRQERRRNGKSDELDAIEAARAALSRRATGHAKGGTGNVEALRALLVAKRSARSIRIRSIGQLRHLVITAPDDLRVRLTGLTSKALVAQASVLRARPGSDPVRHATKTAIITLARRVQAINAEIAVLDHHIDRLVGATAPGLVAVYGVGADTAAILLVAAGDNATRIHSQAAWAHLCGVAPIPAGSGKTNGRHRLNPGGNRQANHALWRVVLTRLGQGEPRTVAYMQRRLAEGRTKPEIIRALKRYVAREIYQQLPG

SEQ ID NO: 100043 - protein, 342 aa, unidentified
MKDTMIGVDLAKNVFQLHGATMTGHLRFRKKLTRSRFRQFMACQPPAVVVMEACGSASYWAREMVKLGHEVKLIAPQYVRPFVKRQKNDAADAEAIVVAAQRPEMRFVQPKSEDQQACAVLFRGRERLLHQRTELVNALRSVLYEYGHIIPKGIAHIKRIETILEEPNSDLPALVREECFDLLEQIAEKTARIDVKTAKAKALSLATDTARRLQTMPGVGPQTALAISGFAPPMESFKRGRDFAAWLGLVPRQYTSGGKERLGRVSKAGQTDIRSLLIIGAMSRLTVLARKSIVEGSWLARMLRRKPLMLVAIALANKMARAIWAMTTKKEDYRNPARVVAA

SEQ ID NO: 100044 - protein, 549 aa, unidentified
MMLVLPSSNRIAWSVNSNGLNPERLAADISFGVIHDRAQRPRAARRSEVVNNSAVGENNAGGRPASARSRSYRSDPQRIKGRLPGEPEALAKTSNRTKPPEGHYISSMDGRAKGRQHQKKRITAMSNPSDQESGGWLESPGFGALDWASEKHSVVVVDPQGKVLEDFEIEHSALGWKKFRERMRPYGSIPFAIETSQGAAVEQLLEAGMQVYPLNPKSAQAYRERKAPSGVKDDQLDAWSFADALRVDGQNWKPLRPEGSLIKELRLLCRDEVGLIEQRTAFINQLRHALAEYYPTALEAFEDWGAMSAWMFLQRFPTPQLLEKAGKRQWEKFLHSRHLWRNESGPRRMELFANATEFCGSEPTANAKSMLALSLVKMLSALENQLSEYRRRIEELFESHPDHDLFGSLPGAGPKLAPRLLGEIGDDRERFDGDAQNLQCLAGTAPVTKRSGKHRECHKRWACNKYLRYAVHLFSDQTITRCAWAEIYYKAHRTKDHSHARALRCLGQRRLKIIHKMWMDRTPYNAELHHLNQVKHGSWVFQLKTVNCK

SEQ ID NO: 100045 - protein, 349 aa, unidentified
MKKCSTVSFEGQVIFVGIDVHKESWVVNLRHCHRELDKFSMNPCPEMLAKYLRKNYPGAEYRSVYEAGFCGFWAHRRLCELGIQNIVINPADVPTSGKERDRKNDAVDSRKLARELENRTLEGIYVPPEDNLELRNLVRRETKLTGNITRVKNRIKGHVNFMGLKFEGWSGRSLKIMYADAEKRHDYALQSMLRELRFLREEKLHVIRDERQCLKRLKRDKIQGHLQSIPGVGFHTAVMLQAELWDLQRFEDKDALSSYVGLAPRLVGSGEHEVLKSAGNRKKKQLHAILIQAAWRSVLHNLEMRARYGALLHKGANPQRAISIIAKKLLYALRAVWHQERDYVVSANE

SEQ ID NO: 100046 - protein, 332 aa, unidentified
MTGFAWLGIDIAKQKFDVALTWSTRRRAKVFRNDGEGWQALLRWLKDLGVGHVHACLEATGRYGDGLAIALHEAGHRVSVVNPAQIKHFGRVKLGRNKTDRADAALICDYCRLFEPAAWIPPSAALRQLRDLVRTREALSASRVEWANRRASGQETAVADAAMAKVIAQLEAEIAALDQAIDDALGQDDDLQAKHDRLVSIPGIGTHTAAVVLCELPGPDVLRTAREAAAYAGLNPSHRQSGSSLDAPARISRIGNATLRAALYLPALAALRWNPLVAALRQRLKDQGRLKPKQIIVAAMRKLLHLCFGVLKTGKPFDPEHTTSTEEAASTV

SEQ ID NO: 100047 - protein, 352 aa, unidentified
MEQIIRIGMDTSKHFFQLHGVNAAEEAVLRRKLTRKEMEKFFLKLSPCEIGIEACGASHYWARWLQSLGHTVRLMPPQLVKPFVMRNKNDAADAEALCEAMSRPKVRARFVAVKTAEQQADLMLMSARERLVHDRTRLSNAIRGHAAELGYAAAKGVAHLVPLLERLQADDRLPERALKLFAMMAEDYQRLTQRLSEIDTELKAWHQSNECSQRLDRIGGVGIICAALLVMKVPDPAAFESGRDFAAYLGLTPKDHSTGGKLRLGRITRAGDEALRCNLVVGATAVIQHVRRTGKGSPWLIELLKRKPPKLVAVALANKTARIAWKLMKTGEAYNPNHAKVDQVQAEAAAIA

SEQ ID NO: 100048 - protein, 416 aa, unidentified
MDVIVSRCAGLDVHKDTVMACVRTPSPDGGRRSTVRRFRTFTAALRELRDWLAAEGVTQVAMEATGVYWKPVWHVLAAVPQLELMLVNAYAVKNMPGRKTDVADSEWLAMLCECGLLRASFVPPPLIAELRDLTRYRKKLIEERSRETQRIQKLLEDAGIKLDSVVSDILGVSARQMLEALIAGVRDSEALAELAHTRMRAKIPQLRRALEGRFGAHHALMLRMHLDHVDQLSANIERLDLEVDRVIRPFSEQLRHLITIPGVGRRTAEVIVAEVGVDMRRFATAGHLASWAGMCPGNHESGGKRRSGKARKGNRALRAALCEAAWSATRCRTGYLPAQYRHLLRTFGKKGQTRAVFAVGHSILVIAWHLLANNCDYDDLGAEHFSRHTDPEPRKRYLVRQLEALGQKVTLEPAVA

SEQ ID NO: 100049 - protein, 404 aa, unidentified
MYNAVGIDVSKGKSTIAVLQPGGTVIRKPFDVSHTSQNLNELADYLGSLEGPSKIVMECTGRYHEPMLKVLYEAGLFVSVVNPHLIKNFGNNSLRKVKSDPADARKIARYTLDNWAELRQYSDMDDTRTQLKTLNSQFSFFMKQKVAAKANLIALLDNTYPGVNKLFDSPTREDGSEKWVDYAYSFWHVDCVRKIGLKTFTERYKAFCKKHHYIFQQDKPEKLFNASKELVAVFPKEKTYKLLIQQSIQQLNLASGHVERLRQEMNALASTLPEYNTVMGIYGVGKTYGPQLIAEIGNVSRFTHREALTAFAGVDPGVDESGQHKSKSNRASKVGSARLRKTLFQIMTTLLQNAPVDDPVYRFLDKKRAQGKPYYVYMTAGANKFLRIYYGKVKECLRNLEQAE

SEQ ID NO: 100050 - protein, 322 aa, unidentified
MKENMNTKVYIGIDIGKAQIDIAVHPSEKQWSFSNNEPGINEAVKNILEVSPALVVLEATGNLQVSLVAALAIAGITPAVVNPRQVRDFAKATGRLAKTDAIDARVIAHFAAAIHPEPRTLSDDQTQELKDIVARRRQVSDMLTAERNRLGSARKVVRPRIQAHITWLQKELEDIDGNLRRAIQESPIWREKDDLLQSVPGIGPVTSATILTQLPELGTLNRRQIAALVGVAPFNRDSGTMRGKRTIWGGRSHVRAVLYMATMVAARFNPVIRNFYERLCAVGKAKKVALTACMRKLLTILNAMLKHRASWNNNFSKVTVSC

SEQ ID NO: 100051 - protein, 353 aa, unidentified
MSIVILGVDLGKNACSVVGVDATGAVIVRRSMRRQTLIDYVNKLPACIIAMEACCGAHHLGRLFAEHGHQIRLMSPEYVRPYIKAQKNDDRDAEGIAEAASRPTMRFVELKSQGQLDIQTLHRVRSRLVAERTNLINQLRAILLERGVIFPAGRRKLELGIDCMLADEDTTLSQRLRQLAGELRAEWRELDAKIERLNGEFVAMARDDPAARRLTSIPGVGVLNATALIAAVGDAGSFAKARDLGAWLGLVPRQHTTGGKPRLLGISKRGNTYLRTLLIHGARAALPSLSQSDTPLGRWLRTMIERGVHRNAVVVALANKLARIAWAALRKGVIFERGHPVAANQTGLTLTNV

SEQ ID NO: 100052 - protein, 321 aa, unidentified
MAYFRDAVGIDVSKENLDLYVLSGQQRRTVANTAAGYGDLVSWLKSLGVRMAVMEASGGYEREVAKASRQAGFDVRIVDPKRVRHFAKAAGRLAKNDRIDAEMIAEFGAVFAAAQRCEIPLDAKREHLAGLVAARQALVDHQTSLQNQISACPKGPARQALAAALKPIPASIKQLDRLIAEAIAAHPQFAALAARLNTVPGVGPVTIAALIAWLPELGRLDRRALAALVGVAPFDDDSGKRTGQRYIKGGRGKLRNIVYMAVMGAATKHNPVLKAYYDSLLNRGKLKKVALIACLRKLLTILNTMVAKQQDWNPASMAIAA

SEQ ID NO: 100053 - protein, 425 aa, unidentified
MATKVREVAYVGLEAVLEYCCGLDVHKKRITACLLVGPVDQPPKELLSAFTTTTKGLTALRDWLASYDCTHVAMESTGIFWRPVFNILEGSVTILLANARHMKQLPGRKTDINDSQWIARLLRWGLLKPSLIPLKPIRELREMCRYRKKLTQEVGAEKNRVHKTLEDANIKIASVATEIFGVSGLAMMDALIAGNLSPQETAELARGRMRSKIPELAEALVGKIEEHHRLLLRKHLDHLSYLQQAIAEMNRLIEEKMQPYQSQVDLLRTIPGIDTLAAQQAFVEMGGDITVFPSEGHFASWIGICPGNNESGGKQRKAKALKGNRWLCSLLVQSAHSVGRTKGTYAGAFYHRIARRRGNKRAAVATGHYLAKCIYHILQDGKPYQDLGANHFNRRGNDALKKQLLSRLERLGYQVELTPQLATVN

SEQ ID NO: 100054 - protein, 393 aa, unidentified
MIGGIDSHKDTIHVAVITGLGVDVVDREFTTTQAGYHEAIDWLRTQDCLDVVGVEGTSSYGLGVTTALREAGARVIEVNRTRVAERRRKGKSDRLDAYRAARGVLSGEASTIAKSDTIEPLRAVHNARKSAVKAKRVAWQQISATLINAPAPLRDRYRGLAEDKAVQQLIAARPARGTEPAVAGIMVALKVLARRHRALSAEIDELGDHLAETTTAINPGLAALQGVGPVVAAQLLITAGDNSDRLRSEASFAALCGTAPVQVSSGRVTRHRLSRGGDRQANAALHHIVTNRLRHDPRTRDYRDARLAKGSTKAAAMRALKRAVAREVFRALRGRCPVPDYSDLRPARQARHLTLAAVAAELKVWPSALSQLELGQRVDNDLVARYRNWLTAA

SEQ ID NO: 100055 - protein, 316 aa, unidentified
MICGVDVSSKSLDARIGRDGATACFTNDPKGIAKLAEFCQCHKVHLVAMEATGGYEKKPFALLWAAGIQVAVVNPRAVRNFAQGMGLFEKTDRIDAGVIAWYADTKGCVAVSPASAQQQQLKAMVTRLRQLTELRAAQRNQRLLVTDKMVLKSFRKLLDLVQKQIRDLEVAIAGLIAADALWQKLDQSFRSIKGVADRTVARLMAEMPEIGTLSNKRISKLAGLAPLACDSGQWKGKRTVRGGRRTIREILFVVAAGVSRHNPDFRAFRERLAAAGKAKKVIRIALAHKLLVRLNAKARDVLQQLREAPPAAVLLS

SEQ ID NO: 100056 - protein, 426 aa, unidentified
MDVKYPICCGVDVHKSFLVAVIVKDAQPKPQYIKKRFSTFNNDLLEFKKWLIGNDCLFMCMESTGKYWVPVFNVLEDEINVTVANPKWVKAIKGEKDDNKDAKWIADLFRLGLVRGSYIPSKEIRVLREFTRYKYKLTCLRSGEMNRYHNCLTVGNLAVDHVFSDIFGKSSQAIIDYILNTDFADFNDDDCLSLLDKRGKRKSTNEEILNAVKNSSFTDAQKTRISIVKEHLDYITNSISRLESEIDSLVAPYEMYIDLLSTIPGMDRNSAIITLSEISCNMSHFDSSRRLCSWAGLVPANNQSAGKKKSVKISRAGVYLKPCLVQVAHAAVKDTTNPYYANKFNRISKRRGKKRAIIAIARMILTAIHHMISTGEYWKPSDLESAEMPAEVKIKLAKSDLQRSLKTLLSNGYTIEDITNGFLSIT

SEQ ID NO: 100057 - protein, 417 aa, unidentified
MNAEKEIVCGADIHRDFLVATMISRSGLKLQEQFGMDQDGLVAFRSWILDHRCLRVAVESTGNYWYPIFCILEGHVEFILANAFQIRNIECKKTDRLDSERIAIYCLNNLIKPSRIYPKDYRDLRSITRSREALVNARSKLKNQIHQSLAVCCIKLSSVISDSFGKSGRYIIEQLLEGKTIEQIISKIPSKRVKKKADELRKAIRNGLDPVQILLIKTNLDAIDYLSEKIKLLDAEIAIKVKPFEEDLNIILSMPGIGLTSAATILAEMGDYRDFQNADKLAMYFGIVPAVYQSAGKLRTGKITKRGSKHMRRILVQVAKAISKTKKSSRLKRFFLRVFTRSGKKNVAAIALARKVLCIIYHLLMKREDYQEPEVKKNKPKIPSCVSPLSMMDIDEMIKTISQAGYLVKKGLKEGCG

SEQ ID NO: 100058 - protein, 311 aa, unidentified
MTRYIGIDVAKRFFDVYDSAAAKDQRFANDDHGISACSASLCSPPPALIVLENTGGYEMNLAVVLQAAGFPVAIVNPKRIRDFARASGQLAKTDKIDARIIARYAATLQPPPQGVWDAQTRALKALVARRHQLVEMRTAEKNRLEHVGNRGIERSIAAVIRTIERELAKVDQSLHDHISRTPELQQKSDQLQSVPGIGETTAMMLVSEVPELGRLNRRQIAALIGVAPINRDSGSFRGKRMTGGGRRGVRARLYMPTLVAIRFNPAIREFYQRLVNAGKSKMTAVVAAMRKLLTIINTMIAKKQYWKPKNA

SEQ ID NO: 100059 - protein, 421 aa, unidentified
MRGLRTRRVKAVKEETLIVTVDIGMASNTGYCTSVDGRDIKPFKFDNTREGLERFWSMIVVSKNRFRCSDVMVGYESTGPYAEPLLHYLRQRPVTIVQVNPMHTKRIKELNDNSPLKTDDKDPRVIADVLRLGHALSVVIPEGDAAYLRRLNNARERHVGERTALLNQLQQLVFLIFPEFKRVFNDIKIKTAQHLLTRYTTPERIGRLNPGELGEEMRKQSMGKFGVQQAELLIRLAQDTIGIQEGIAGLVLDIRHILMQLEGVHGFVAEIEAEMAKALERIPYSTRILSMKGLGVVTVAGLIGEVGDFTKFRTQSEIMKLAGLDLYEISSGKRKGQRRISKRGRSLLRKILYNAAISTIRKNGIMALQYANLIGRGMVRTSALIVIAKKLFRIIYAMVRDSRDYICNYESPKRLEIREAA

SEQ ID NO: 100060 - protein, 429 aa, unidentified
MQNESTPGARGPVFCGVDTHADSHWLCVLDWRGRKVLSRRFPADAAGYEALAGAIAAAGEPACVAMEGTSSYGAGLTRHLASLGMPVREALSPARTQRRRPGQGKCDEADAERAARAAMSGSKLGTPKSQDGWVDGVRCMLAARSGAVKARTSAINTARSLLTTAPEGLRSRFRGMGGPRLMEELPSVRAEGALGAALGALADLWAAARDAALDMERAIEASLEENCPALLAMYGCGPVSAAKLAVAAGDNPGRLRSEASFAAICGACPIPASSGKTVRHRLNRGGDRQANSALHEIARQRVMRDPETAEYAERARARGKSDREVMRCLKRYVAREAYRALMRPHEVRRPEDASGLVAARRAARVSQVRAASILGTSEKYISMLERGQRELKPIRRAYEAWVEAGLPLDWDRQAFEAERKMDSKKHLAK

SEQ ID NO: 100061 - protein, 464 aa, unidentified
MANSAYIGIDASKGYADLIALHSNKEVAEEPFRLYDAADGHRQLGEMIEGWFNKGFEKIYCGVESTGGYENNWVNYLQEAGKTNSVHVARLNPKGVKSLGEAGLTRTITDSVSAQNIALYLINFNHKVHYLQPSQTSKAYTDGRKHSSFIRMLKKQKNQLGNQLEKIIYQELSPLMCYCRHGFPAWLLLLLEKYPGVELIKKAGEKKLCKIKGISHEKAIALIKKVSSLTNLTSSHISSIIKSTVEEILRLDAAINTQKIALFNRFKNEKDAQLLTSITGVGEQSAVEFLIELEDVNRFDLAKKLNAYFGTHPMYKQSGDGTWGNHMSKKGRSEIRGVLFMCCLTAIRYDEMFKGIYARARAKGKNHFSAMGVVMNKMLRVIYGVLKNKTKYNREVDYKNQENAKIKQNEKEEKQAEAKKEIQTKLERYNQAELDDMPVSKRYTKKKRQSPKLYKEECTGSSAS

SEQ ID NO: 100062 - protein, 350 aa, unidentified
MKKNSKSPTKKEQTSKRTRSQRAVQRETKEVLAELVERLRRKLELKAMPASPGQVGQQPELRPNLDRLTMGVDLGDQWSHYCILGLEGETLSEGQLRTTQADVAEFFQAITPARVVIEVGTHSAWVQEIIAGCGHEVLVANPRLMEGSKRRKRKNDRIDANKLARLGRVDPQSLHPMQHRSREVRQDLVLLRARDALVAARTELINTTRGLVKSLGTRLPKCSSRSFGHKAGEAIPEQVREALLPLVQLAEGLSACIEGYDRRIEELASEKYRHTKLLRQVKGVGPITALAYVLTLEKPERFAKSRDVGPYLGLVPKQEDSGESQPQLGISKAGDTMLRKLLVGSAQYIL

SEQ ID NO: 100063 - protein, 344 aa, unidentified
MKISTLSIDLAKNVFQVAGFNSNHKRECNKRLNRAKLNAFMANTPPCRVVMEACYSSHYWGRVFTSYGHTVDLIPAQHVTPFVRGNKNDSNDALAIYEASLRPHIKFVPIKTEAQQEILMLHKIRERLLQNRIAATNQLRGLLVDFGYVFPVGMKAFEQGIITLESDSELRPQLRIMVSDIYTEYKTLVKRIKAIEAMLTAHVERDTNAKILHSIPGVGVLNASAYAASIGNGQAFKNAKELGVWLGLTPKQYASGDKSKMSGITKRGNSYLRKQLIHGARALIARSHHKTDALSQWINQLREKKHFNCVVVATAHRLARLMWILLTKQTLYSPQFVQNTQKDA

SEQ ID NO: 100064 - protein, 424 aa, unidentified
MSGKKSVPAGLQALYARACGLDVHKKLVVACVRILDSKDGTVQSTLRKFGTMTADLLELRQWLVEQKVSHVAMESTGVYWQPVFNLLEGHFQVWVVNAQHIKKVPGRKTDMKDAEWIAQLLQCGLLRPSFVPERGQRELRDLTRHLTKLVQQRNAVDNRIQKVLETANIKLGSVASDVLGVSGRKMIEGLLCGEKDVTVLADLAHHKLRAKIPELQRALEGELTEHHRFLLQQLLGQYDFLQKEIASVSERLGAVAPPSFRAAVEQLDEIAGVGERGARALLAETGTDMSRFPTHKHFASWAGRCPGNHESAGKRRSGKTPAANRHLDAVLTEIAHAAVRRKNSYFKAQYHRLAGRRGKKRAIGAVKHSLLVTVYFMLRDNKPYKDLGADYFDKLNPQQRIRYHVRRLQELGQEVELSPMAAAA

SEQ ID NO: 100065 - protein, 418 aa, unidentified
MIDRSHRSRHDGHRQLSISFSKRSCVFAMSNNDSGTEVIIQNNQGVEVQVLKSYGVGLDVHSQFIAVCVHVRNNNRVYKYMSDFDTDWNSLLAAKEWVVDKIKTRSAPVPDLSLPLHYVLEATSTYHMPVLRAWGGIPSVINPMLAGATKKKTDNLDAERLSFHDLTGVWPESFVVSDDLQELRVLIAERNHYAKLATQCSNRINNIIVRFGITIGRGTSTWLAFVGTPRRFPNAKALAAYCGLDPSLKVSAGHVTSTKKRGGCRTLHAVLVTSADRIIRAHTEAFGRWGFLMAKSSGKWKKATNAVGRKLCTAMYHMMMSGQEFSYENYTIMKDAAIFNIPVDELPMLNPDFKRYIRILHDSEIHTTTDMITAYLSCSLGGVKGLGRKFFVTMRDYLSHQHKYQNEYKKLHSTETTK

SEQ ID NO: 100066 - protein, 353 aa, unidentified
MLIIGCDYHPSVQQIAFVDTDTGELSERRLGHREQAEQFYRELKQRNLVVRVGMESSGHSRWFERLLRELQFELWIGDAAEIRTKRVRKQKTDRQDAQLLLQLMLENRFPRIWVPDAENRDLRQLLWHRHRLVQMRTRVMNQLQVVALNEGMRRKKALWRPAGRAELESIALAPWATRRRRDLLDLLDQLTPKIEELTRALEKEVEKRPVTRRLMTHPGVGPLTALAYELVIGTPERFHCGKQIASYLGLVPEERSSGERRRLGHISKQGNVLLRFLLVEAAQVTVRTHQQWRNKFFHLAMRRGRKIAKVAMARKLAVHLYWMWRQGCDYGSWQKLGSWESPDIPMVCSPSPL

SEQ ID NO: 100067 - protein, 346 aa, unidentified
MELTPTSVDLSKSVFQLSIADSQHRVMQRKRLNRTQFHRWLATQKPVRLVMEACGTAHYWGRVAHSSGHEVTLLHANYVKPYVRRTKTDSADADALLQADRNPELHRIPVKSVDKQALQSLHCLREHAKSSRVASINEARALLSEFGVVIPKGDTGLLPLLREGIERVPPLLQSSLFVLIEEIERLADQQKTIDRILKNFAQSDDESQLLINVAGIGVTTATAMVARVGDIHQFKCGRSFASWLGITCREYSSGSKRRLGRITKKGDNYLRVMIIHGARSALRAAKHKDKHDKELTRVERWAVETEQRIGYNKAAVALANKMARIIWAVWTRQQKYNGNDANRFAA

SEQ ID NO: 100068 - protein, 370 aa, unidentified
MKTVRCLGMDVHAATIAAAVAEPDGTVRALGTVPNTPEALRKLVQKLGGPSGLQACYEAGPCGYAVYWQLTALGVACTVVAPTLIPQKAGDRVKTDRRDAEKLARGLRAGELTAVWVPDAAQEALRDLVRARLAAKRDQGRHRHRLAKFLLRHGRRPPSGMRAWTQRHLEWVQRQPFAELAQQAVLADHLHEVQRAGERIAHLERAIRDALAQARPAVREMVAALAALRGIALLSAVTIVAEVGPLSRFKTPRQLMAYAGIVSREHSSGSRVWRGAITKTGNAHLRRVVIEAAWAYRHRPAVTATIRRRQAGLSPEVTAIAWKAQQRLHARHRHLLGRGKSAPKVITAMGRELLGFIWAIGVAVEGQAAG

SEQ ID NO: 100069 - protein, 355 aa, unidentified
MASITLLGIDLAKDVFQLHGLDELGRPQLKRTLRRRALVQFVAKLPACTIAMEACSSSHHFSRKFQQFGHEVKIISPQFVKPFVQGNKNDAADAEAICEAASRRNMRFVATKSVVQQDIQCLHRVRKRLVHNRTALTNEIRSIVGEFGIVFAQKRSALVEGIKGLLNGSCPREELSSEGLTLLQDLYSELLELDQRIENCELKLKKISSQPQCQRLFKVGGLGLLSVTALAVALADPGQFKNGRNFAAWLGLVPRHQGTGGKNRILGISKRGDMDLRTLLIHGARAKLRGINAKCRAERKLDPLEDWAYRLCQRQGYNKATVALANKNARIAWSISAHKTEFESHQAVASLKKGA

SEQ ID NO: 100070 - protein, 349 aa, unidentified
MTMTIVEAARAVTGGVDTHLDVHVAAALDPLGALLGTERFGTDPAGYKALLAWLESFGPVTKVGVEGTGSYGAGLARFLRGADLEVIEVDRPNRAERRRSGKSDPLDAVEAARAALGGRAKSISKSKDGAVEAIRVLVVAKRSARQARVKALTQMRHLVITAPDQLRCRLKGLSVAALVAEAARLRPSRSGDAVMAAHKAALCSLARRIQGLEDEIAELDERIEKLLMRTAPELLSRFGVGPDTAAALLVSAGDNPERLHSEAAWAHLCGVAPIPASSGKSTGRYRLDRGGDRHANSALWRIVMVRIAHDPDTTAYFERKVKEGCSKRDVIRLLKRYVARELYRYLPRG

SEQ ID NO: 100071 - protein, 443 aa, unidentified
MLRIINPKAAAGDIGSEAIFVSIAGGPAERFGTVTRELHRLRDWLLGHGVDSFAMEFTGVYWMALFEVLEKTPIRVCLVNGAHVRTLPGRKTDVADCMWLSELHSHGLLRPGFVPPPEIRRLRDYMRLRENHVAQASTHLLQAQKALELMNIKVHDVISDLAGVSGQRMIRAILGGERKAEVLVALCDAQILEKKRQRLMDALEGTWAEQHLFALRQAWRGWEFSRELMAECDREIERLLPTLPKSPDLPGGPTDAQPSRAKPRSKNSPQIEGLHRKLLDLLPGRDPTLILGIGDQSLMQLISEVGTDLGAFANKYRFTSWLGLAPGKQNSGKRQRNRSRKGGRAGQIFRVLAQTVGRAKDSALTGFYRRIRAQRGGLVANKALARKLAELYYDAITKGMRYVEAGMAKGEQRYQEQATKRLMALSRKLGYSLVKNPEPIPAT

SEQ ID NO: 100072 - protein, 315 aa, unidentified
MSEMTVEKFVGIDVSKGTLDLCTEPAGETLHVDYDDKGISHIVKHLVALAPTLIVMEATGGLEMRLAGELAAKSLQVAIINPRQARDFAKATGQLAKTDLVDAAILAAFARAIRPVVRPLKNADTRDLDDLVTRRRQLVDMRVQEMLRMGTASKVQKKSLTSHITWLDKRIADLDDDLTKRLRASDVWRIKDDLLRGIPGVGAVTSLTMLAKCPELGQLNRREIAALTGVAPLAKDSGKHRGKRFVWGGRADVRAVLYMATVSAIRFNSHIKIFAERLKQAGKPGKVVIVACMRKLLTIMNAILKNNTPWNPKNA

SEQ ID NO: 100073 - protein, 317 aa, unidentified
MESTATADRFVGIDVSKSWVDVHVRPEGGAFRCTTDGEGLAELVRRVRPLAPRLIVLEASGGYESIVALSLAEAGLPVAIVNPRQTRKFAEALGQLAKTDAIDARVIAHFAEAVRPPPRAMPDDMMTQLQELLARRRQLVVMINAEKQRFAKAASKVTQRSHKTMLKSLEAERGRIDRAIDKLVRASPIWCAKLDLLTSVPGVGDIVARTLLAELPELGTIDRHQIAALAGVAPFSRDSGRKKGRRFVRAGRVQVRAPVYMAGLVAIRHNPPLKSFYRRLREAGKPPRLALVAVMRKLLTILNAILRDNKPWARAES

SEQ ID NO: 100074 - protein, 353 aa, unidentified
MVVVGADVHKRTHTFVAVDEVGRELGSRTFDATTAGHRSAARWARERFGEELRWAIEDCRHLSARLERDLLTAGQKVVRVPPKMMAEQRRVARTRGKSDPIDALAVARAALRQPDLPVASHDETSRELKLLIDRREDLVQQRTATTNRLLWRVHELDPSAAPPARSLRLAKQQNLLMARLDGFDGLVAELARDELSDIIELTVRVNALQRRITDLTAKAAPSLLALPGVAALTAAKLVGETAGVARFKSEAAYARHAGIAPIPVWSGNTAGRVRLTRSGNRQLNAAIHRIAVTQIRMDGLGKTYYEKKKSEGMSTPEALRCLKRRLARVVFNTLKTDLNAVQPTAGNLLPAAA

SEQ ID NO: 100075 - protein, 422 aa, unidentified
MEAFNVSGFAALIGIDWADRKHDICEINRDTNTQHLSVISSEPKSINAWALELKQRYNGRPVAVACELKKGPLIYALSKFKHIILFVINPSSVAKYRAAFSHSGAKDDPTDAIIQVEILQLHMDKLTVIRPDSEEVRCLAQLVEYRRKLVQDRVNLTNKIATTLKNYYPHVIDWFKEKDTQIFCDFLLRWPSLTHAKKARKQTLLDFFNQHNSRYPLVNEKRIKEIKDAEILTDDMAVITPNLLLIECLVPQLKHLMQAITRFDDEIKTLYKQHKDRAIFDSLPGAGPQLAPRLLAAMGSNRDRYKCAADIQKYAGIAPVTERSGKKEWIHWRYSCTKFLRQTFVEWAGLSVRYSFWAKAYYRQQEAKGKPHNTIIRSLAFKWIRILFRCWKTHTPYDESTYLIALKSKGSPLLKFAVESEL

SEQ ID NO: 100076 - protein, 434 aa, unidentified
MLLSIFKAVILMMKLKYSICCGLDVHKKVIVATIVTTNKEGISEYNQKSFSTINSDIQKFHDWLIGNNCYHVCMESTGKYWIPIFHYLEKDIDVCLTHPKYVKAIKGKKTDKKDSKWIADLYKFDLVRCSFIPPKDFRQLREIARYRFKLVCMKSSEKNRIQNCMTVSNIGIASVLKDPFCKTATEIMSYLLEHTSDTMDEKAVRKLVRKGTKASSSEIIEALKGYSIETDQAKKLELARRHLEYLEDMITQTEVELYVRIKPYYEFVEFISTMPGMTQLSATIVLAETGVNMDIFDDAGRLCSWCGLSPANNESAGKKKSVRIAKAGEYLKPVMVQCALSAVRSRKQPYFAVKYNAIKKRRGHKKAIIAIARMMMVCIYHMVSEKKPFTPTDYEELMEPQNHVERVVLNEDNVFAYLETLGYDTSQLVKCNDN

SEQ ID NO: 100077 - protein, 325 aa, unidentified
MNEKGAILFHRNMRTDFDQFKKKMTPFLSDMTVGVESTYMYYWLADVCREKKIPFFLGHAYYMKTIHGGKTKTDRLDCRKIADLMRTNYYPLAYDYPKEMRATRDLLRRRHRLSRLRAECYRHIQSLFHQQGLSVNPNDIKNVKTRHDLVLSLLDQDTCSNAQSDLDMIDFLNPKIKQLEQQIRAKAKSHDRASLNILLSVPGIGDIFSLIILYEICDINRFQSHQNFCSYARLVKCERSSAGKFSKGGNQKIGNPYLKWAIADIIIHAANKSKPIGEFYQKLQSRLGKRKAKSVISHKFGIAIYYMLKNKQVFDEKRFVQTNMK

SEQ ID NO: 100078 - protein, 352 aa, unidentified
MGSKKLFIGMDLHKSSSTFCVKDSEGNLLASKKVATNKSEILGFTNQFKERELILAVEPVSQWYFYADILQNSGIDVHLANPLKVKAIASARIKTDKIDAGVLCDLLRGNLLPEAYFSTAEMRMWKELVRFRLSLVNLRTQTKNKIHAILGKNGQICKYTNAFGKAGRVWLDSLELSRHFRNSLDEYLKTHDYLTRQIKEAEKNIEAVATGNESMQLLMTIPGVSYFSALTIMAEIGDIARFPSAKQLMGYAGVVPSTYASGDRVAHGRITKAGSRWLRWIMIELAHKQQRCKRKPGLGWYYLKVKKNKGSKTAAVATARKLLAVIWRMLVDRRPFISPLEVREAHRKNIVH

SEQ ID NO: 100079 - protein, 356 aa, unidentified
MSYDVKYIGMDVHKEAIVIAVLNESGKLVMESVIETKASSILQFLHGLRGELHVTWEEGTWAAWLYDLLQPQVQHIVVCNPRRNALLKEGSKSDKVDAQKLADLLRTGMLRSVYHGENGLRTLRELGRSYQTISKDLTRVMNRLKALYRGWGIACAGTQVYAARAREEWLSKLPQAGVRRRAELLYQQLDGLQALRREVRPEFLAESRKHKAAKLLRQIPCIGPIRAARLIALMQTPHRFRSKRQLWTYSGLGIETHDSAQYRFVSGQLQRSKKPQQLRGLNRNHNHEMKEIFKGAATRASCGRGPFREFYTGLLAKGMKPEMARLTLARKIAAITLTLWKKEERFDVEQLKTQAA

SEQ ID NO: 100080 - protein, 338 aa, unidentified
MRLYCGIDLHSNNSVVVILDEADKVVYQKTLDNNLTLILQQLSVYANKITAIAIESTFNWYWLVDGLMEAGHTVKLVNTAAVQVYSGLKHSDDEDDARWLAHLLRLGILPTGFIYPKEERAVRDLLRKRSQLVQQSTTNILSLQNILARNTAHSLSSYRIKKLDDKLAEQLIDDPNITLALKSNLNVIRCLQNTINEIELTILQQTRIRTEFKQLLTVSGIGEILGLTIMLESGDMSRFAKVGNFSSYCRCVKSGRFSNGKKKGEGNRKNGNKYLAWAFIEAANFAIRYNDKVKAFYQKKKSKTNGIVATKAVANKLARACYHILKDQVPFDVNKAFT

SEQ ID NO: 100081 - protein, 343 aa, unidentified
MKEISIIGVDLAKNVFQLHGAAADGTVLFRKKLSRPQFQRFMAEHPQCLVVMEACGGAHHWARELERTGHAVKLIAPRYVKPFIKRQKNDAADAEAIVEAALRPTMRYVEPKTGHQQARSILFRTREQFVKQRTEAVNALRSHLYEFGFIAPEGIGYLPRLGAVLEDQSSDLPPLAREICRELLDQIVQLTGRINAMKKRIDTIAREGETSRRLQTMPGVGPISALAVETFAPPMEQFKRGRDFAAWLGLVPRQASTGGKQKLGKTSKMGQRDIRRLLVTGAMAVIRWALRNGAPGNPWLARLLERKPPMVAAFALANKMARGIWAMMLRGESYRGPEIGSAA

SEQ ID NO: 100082 - protein, 344 aa, unidentified
MEKHTTIAMDIAKNVFEVAVSEEPGRVRERRRLTRRQMPRFFANREPARVVIEACGAAHALARELEGHGHEMVLLPPAQVRRYVLRNKTDRTDTKGLLEADRNEEIVPVPVKTVAQQSLVAVHRLRSGWMATRTARLNAIRGFLRELGVTVPVGATRVLPALTGAMEGGRVPGTLEALLKTTAEEVRDLELRIEEAEKTLKRMAREMDAAVRLQTVPGIGLLTATALIGSVGEPGRFPSGRHLASFLGLVPRESSSGDRRRLGAITKRGDGYVRMLFTHGARSVLRAASVRKQNDRLRTWALETQKRKGHNKATVALANKLTRIAWAVWLKDRPYEGRAPEETL

SEQ ID NO: 100083 - protein, 336 aa, unidentified
MSHYCGIDLHSNNHVVVVIDEQDKRVFEKRISNDLSLTLKVLSPYQASLQGIAVESTFNWYWLVDGLQEQGYDVSLVNTAAVKQYDGLKYSADHHDAFHLAHLLRLGILPTGYIYPKEQRAIRDLLRRRLLLVRAASTQLVCVQSQIWRSTGLRIKSDELRKADFVSPDIDNYTRQAVTAGLAVYQCIQQQIDGLENTAHQAVKLTDAFKILQTVTGIGKILGLTIMLETGPIERFAGPGNFASYCRCVDSTRMSNGKKKGAGNARAGNKYLSWAFSEAAHFAVRFEPLAQRFYERKKAKTNGIIAIRAVARKLARATWMMLKHQVPYDARLMFPG

SEQ ID NO: 100084 - protein, 341 aa, unidentified
MHFIGIDLHKRIFTACVLDDNEKVVDELVDIETDEKGLDLLMSRYPADDCRIVFENLTRAHFAFHYLYDHGYAVSVAHTGHGALREIADTNLKTDRVDAYKLALVCKDMWAGRRFIRRTHISSDENMRMKAVIRMCNELSCIRDEMKLRIMEYMNLHNIPEHPRYKDVAGMRYREYLLGLGDPALTRMVNMMSAAIEASAKEIEAYAKRCEDARLLMSMKGISALTAVTVVTAIDGIYRFETPETLVSYFGLAVRTSESAGKRRKGCITKEGDPLVRKYLANVVKNHAMRCPDSDLARFYRRKSDEMPHWKAVTAAMRKLVCQIWHMLTYKEQYRPNVAGH

SEQ ID NO: 100085 - protein, 338 aa, unidentified
MKKFSGIDLHSDNSMLVVSDEQDRIVYQRRLANDLAGIVQALEPHREELIGVVVEATFNWYWLVDGLMDAGYRVHLANTAAIKKYEGLKYSGDAADAAYLAHLLRLGLLPEGYIYPRETRAERDLARKRMQLVQYRTAQILAIENILARQTGGRLRSNEIKRLTTEQVEALGFSADVTLALQANVAVMHTLQSQIMVLEERLQERVRLHEDYALLTTVPGIGQTLATTIMLETGNIARFAKVGDFSSYCRCVDSLRESNGKKKGEGNAKNGNQYLAWAFVEAARFSLRYCPQAKRFYERKKRQRNAIVATKALAHKLARACYHMLREHKAFEVERCFA

SEQ ID NO: 100086 - protein, 452 aa, unidentified
MKKTKGYLKCLERKQWVSGKIIVGIDPAKEKHQAVVLDEHRMQQGKSFSFDCSYEGYNKKLWEKLDAIVGNYSSDSLVFAVETACDLWRTIVEYLFRQGYTVLLVNPLTTYHSRPLMNSDYSKTDPKDALLVATNAHNGHYTEYKKYAASINSLHSLSITYSKLKKDRQAVILRIMAFMGEVFPEYVKCLNVEIETSLYLLEQYFLPEHFQKMNIAEHEMRIRKISHGNHKAETLKKIKDHAKKSIGRNVKGEEETLRLILDGWIGELRGLIKSIKSVKKAMIELAGKTEYFEILVSVPGISEITAAWFIAECRDLDLFVHFKQIEKMAGSNVRLCDSGKYSGTRRINRIGNKRLLNLIYVMTCNAVKFEPETRIKYLKRQLKKRSYRKNIFAASSVLMRLIMCLIREKRTYEIREESVRDLEKLEAKYNPEKKDKKKRRKRNKKKPMKKAA

SEQ ID NO: 100087 - protein, 342 aa, unidentified
MNQYAGIDVSLECSSVCVVAANGKILREARVASEPEALIVWFRSCGFELERIGLEAGPLSQWLVAAMREAGLAVELLETRHVRKAFEAMPVKSDRNDARGIAQLMRLGWFRPVHCKSMSAQETRTLLTARKLVQSKLRDVENSLRGILRGFGLKVGKTTEREFAGRIEELVVGHRHLQVIANALLAVRAVLRKEFAAFEKQARKMARSDTRARLLMSTPAVGPIVSLTYASAIDDPGRFKSSKQAAAHFGLTPKKYQSGETDYTGRISKIGDSSVRTALYEAAHVMLTKPLKGCSQLKSWAMRIARRAGMSKAKVALARRLAVIMHRMLADGTPFNAAAAAA

SEQ ID NO: 100088 - protein, 316 aa, unidentified
MNVIGFDISKDTIDVTLLRNSGQVDYIKIANACEGFEKLNDWIRSKRIRKISISMEATGIYYEEAADYFSAIYQVFVINPLKIKEYSKSQFSHTKTDKADSRLIAEYTKRHLDKLTPFKPSENPTLYKLISLLQQLKQQQNESQNRLHAAKDTFIRTTHEAIILLLAKQIDQTAKRIDLMIQQKDSLNTHYKNLQTIPGIGKDTAAILLNHLREKQFKTANQFVSFAGLSPRIEQSGTSVNKKGRLSRYGHRRLKRALFMPALVAYRIKAFPKLVQNLSQKPKMIVIVALMRKLAKIAYYIHKTQKPFEKMRYQIA

SEQ ID NO: 100089 - protein, 372 aa, unidentified
MNNITVYVGMDVHKDSFTLCDYLIETEKASHTRRTPADYKEILKYLEFLRTIYGNDSNFICGYEAGCLGYTLYHQLTERNVKCVILAPTTMLEPRSGKRIKTDKRDAELIGKCLAQHNYSPVHIPTSTDEETKEFLRMRDDHKLALKKVKQQILSFCLRHNYRFEGKSHWTAAHLNWLKSLKPEALYKEILDEYLLTYTTLSDKLERLDKRIEEIASKDEYRESVKKLCCFIGVQTHTALSVLVEVGDFKRFASAKQFAAYLGLVPGEDSSGDDKARLGITKAGNRHVRQLLTESSQSYGKGRIGHKSKAIKARQSGNLPQVIAYADKANERLRRKYYKMILGKSKTHNVAKTAIARELACFIWGMMTDNIA

SEQ ID NO: 100090 - protein, 430 aa, unidentified
MGEWDWDRNRLKGFRQLKRQIRGSAEHLVVGIDVAKDRHHAFLGTAAGRTLFKRLVFGNNQEGFQELLNQVERLRREHDLREVVFGMEPTGNYHKPLGEYLKLRYGHVVLVSGVAVAENRKSVDGRWDKNDSKDGANIADLVSRGRFLFYESPDPVLQEVRDLLALKRRLKRLEHGYRVRIRNHLVAKYFPELDRYFDQSEKYSLAVVRWCLDPRSLSGREFEEFAGMVAPGKRGAQQSERLRTILQMARGSVGCPVGEAAEFEARMMVEGLREIRQQIGDTEWQIEERCHKFPEYSFLLSIPGFGPDISSKVLGAIGDPLRFENERQVLKMAGLDLNAERSGKRSDSARTVISKMGKADLRYALYQAAFIASTKNQSFIVYYTDKLRGREREPGIKTKMRVKLAAKLLVIAWVLMKKREAFNPVYLTQE

SEQ ID NO: 100091 - protein, 481 aa, unidentified
MSKAKKHSAKPGERTTTAGKGKRGRKRKGMCLEDRPILEANAAGIDIGAREIFVAVPPDRDEHPVRVFSTFTEDLEKMAKWLVGCGITTAAMESTGVYWIPPYDVLEQHGVKPCLVDARGMKNVPGRRTDWHECQWLQFLHAVGLLRATFRPDGEVCAVRSLMRHRSDLVQMTSQHIQHMHKALTQMNVQIHHAISDITGVTGLAIVDAIIAGQRDPMVLAKLRDPHIKASEETIRKSLVGNWRPEHLFTLKQSRQMYQHYQEQITACDQEIEKLLVAFQPRVDPNEKPLPPDRKKKQRGRKKKNANPKTGFDLRTESYKLFGVDLTQIPGLMAMVFTLFSEVGRDMSRWKTAGHFVSWLALCPDNDITGGRVAWRGMRRVHNRAGDLFRMAAYSLHHDPTPLGDYLRRMKSKLGPAGATTATAHKIAVIFYTMVKKQVEYDATLWAERDAEREKRFEAKLKRQAQQRGYKLVPIEEKPAA

SEQ ID NO: 100092 - protein, 493 aa, unidentified
MRALDAHRDFCEVAISERGRVRLAGRIATPPEALRLFGEGLQSTDQVVVEATGNAVGIARILELYVERVVLADAKSVRAVARARAKTDKIDARLLARLLAAGFLGEVWTPDERTRARRRLVSRRAQLVRQRTREKSQVHAVLMRRLVGKPPMSDVFGVRGRAWLTRLELPADERLTVEGCLRHIDMLDGEIGLVEQAIAAAALASPEMRRLLTIPGVNAVTACALIGAIGDIRRFPTPSHLVGYLGLDPRVIQSGNEPARHGRISKQGPGEARHVLVEAAWCLARTIGPMRAFHQRIRARRGANVATVAVARTLAVICWHMLTHEQDYAFARPSLTREKLRRPGLLTGAERHQGRRHPERVFAPRKQHELERELAAQAETAYKRLTDDWTARQPRATRSADAATGRASSSQLEGDKPTRQDRAPSPWPLGRRSPALTPKTPSSRGDVQHHLTFIRSRLAWGCTGRGGRAAPGRSAGTVAPRRSRGRSGRPQDR

SEQ ID NO: 100093 - protein, 317 aa, unidentified
MDVATTADRFVGIDVSKARVDVQVRPDGTAFGCATDPEGLGVLVARLQPLSPCLVVLEASGGYEGVVAAAMVEAGLPVAIANPRQVRKFAGATGRLAKTDAIDATVIARFAQAVRPRARPLPDDFAVRLAGLMARRRQLVVMINAEKQRLGKARDRIAQRSFQAMLKSLEAERTRIDKAIDKLIEASPLWCAQQDLLTSVPGIGEVVARTPIAELPELGRVDRHQIAALAGVAPMNRDSGRYRGKRKIQGGRVEVRAPLYMACLVTIQHNPALKSFYRRLRSAGKPARLALVAAMRKLLTILNAILRDHKPWALAHI

SEQ ID NO: 100094 - protein, 353 aa, unidentified
MEQFIGCDAHKNFSVFVAVNEKGHAGEALRVAHDRQLYRECLARLPPHSAIAVEASGHYSWMVDEMEQSGHCPKLCNPLEAKRRMGLTKKTDTLDARGLAILLRNGTLPEVWIPPSELRDQRELLRLRIFLVHLRTRVKNRIHGTLARHNLQVQGADLFGVAARLQLGARLPELPVHSREAVEQELATLDFLETQIESAEQRLKAIMKVSVEADLLKTLPCVGKILSMVLMLEIGRVDRFPTAAHLASYAGLVPRVHSSGGHTRMGQVCGNVNRNLKWAFVEAGNLIVINQRRLAGSHVVRMYQRIKRAKNHQKAVVAVARHLAEAAWCVLTKQEVYREPHGPRQQALSSTHG

SEQ ID NO: 100095 - protein, 366 aa, unidentified
MNEITRAPIARVGVDLAKQVIQVHAVDASGRRVVARAFKRDQFLAWCAQLPAGCLVAMEACSSAHYWSRKLRALGLDARLIEAHFVTPYRMEGKNDANDAAAICEAASRPCMRFVPVKTCEQQGVMSLHRVREGLKEERTACINQIRGVLTEFGLVFGKSPKVLRAVLADVIEDASNELSTMARLVMQRAFEHWRELDEHLRWCDRQVGQHVRASPQAKRAVKVFGIGELGASALTAGVGDFKQFKSGHQFGAWLGLAPKQDSSGGKTRLGRITKRGDDYLRTLLIQGAKAAVMSADKRDDPTSRWLAQLTARAGWQKACVAMANKNARILWAVMTREEGFDPNHVSVKPRNPVAVAPSDPAACAA

SEQ ID NO: 100096 - protein, 466 aa, unidentified
MTTGKLWRNRKERKDWARRLRSEDPGLEVVHPHAAGIDVGNSAHYVAVRPDRDPEPVRRFECFTADLYRLADWLESCGVKTVAMQSTGVYWIPLYEILEEHGLDVFLVNARHTKNLPGRKSDVQESQWLLKLHTYGLLNNSFQPTAAIRVLRTYWRQRAEHVSGAATCIQRMQKALTQMNLQLANVISDLSGVTGQAIVRAIIAGERDPQKLAELSNPRIEASREEVAKSLEGNWRPELVFVLRQEVEMYDTYQWRITECDQQLQKHLASFANTVSPQSPEAEPSGKKKAKPTKNAPRFNLGSELQRITGVDLTRIDGIDVMVAQTLLSEVGLDMSRWNTEAHFSSWLGLCPDNRISGDKLLSKGTRHVVNRAATALRLAARNLIRSRSYLGAQYRRLRTKLGAPKAITAMAHRLARLVYRMLKYGQRYVDKGTDYYENRYRQQQIHLLQKKAAKLGLQITIAVQA

SEQ ID NO: 100097 - protein, 410 aa, unidentified
MDLYCGIDWATAYHDVAVVDTDGRVVARGRVGNDAAGFAQLLTLLAEVGDGPEHPIPVAIETDRGLWVAALRATGRVIYPINPLAASRYRARYALSGAKSDATDAVLLANIIRTDPDAHRPLPADTELAQAIRVLARAQQDAVWARQQIGNQIRDLLKDFYPAALAAFAELPSGGLARADARTILAAAPTPAAAAKLTPVRLRRLLAKAGRRRNLDRDVERLRTVFTDTYLHQPPVIENAMGIQLSALLGQFEAACAAADELAEAAIAHFEQHPDAAIITSFPGLGKLTGARVLAEIGDDRTRFADARGLKAFAGSAPITRASGKKTIVLHRHIKNRRLAAVGPIWALASLRASTGARRHFDARRANGDWNRQAQRHLFNKFLGQLHHCLHTRQPYDEHRAFPPPHTLAA

SEQ ID NO: 100098 - protein, 391 aa, unidentified
MAMYFVGIDISKYKHDCCIISAVDQKIVSKLTVKNDKAGFEQLLTVFNSLSNPDNIKIGFESTAHYALNLELFLENAHHSFMEINPLLIKEYKKSTSLRRTKTDSVDCESIARWLMTVEYKPHSKGFYHSYSLKSLTRLRDRLIRQRSFYLVKITNVLDHTFPEFKPFFHERLSKTALYLLENYGSAEKMAKMNSASYEKLRSLSRGKFSPQQFIRLKELAANTVGVNNSIFDVELNSLLALYKSLIKEIDTLEKEINRLIEEVHPHYMSVPGIGPISAAVIYSEYGDISNFSTPAQMLAFAGIEPGINDSGTESHGGRMVKHGSSQLRYVLINCCLPLIRFDMTFAAYYAKKRGEGKPHRVAVTHVAKKLVRVIYALERQGVDFNALKLR

SEQ ID NO: 100099 - protein, 340 aa, unidentified
MFYVGLDIHTKRIAFCVLSDEGQLVQRGQVRRLDEVLRILQALPDRFEVCYEASCGYGHYHDVLRPLAARVVVAHPGQLRLIFRAKHKNDRNDAERLAKLLYLGETPTVHVPSLEVRTWRELINCRSQVIAKRTRAKNAVRALLRGAGITPPQHPSLWTKTGLAWLRQLDLPTPSQQLRRDLLVEEIETLLRQVRRLEQHLNHQAQHTPAIAQLRSIPGVGIRTAEAVAAFVDDPHRFRNAKAVGRYFGLVPCQDQSGDKNRLGHITREGAPVVRQLVAEAAWQASRRSPTVRAYFERVQRGDPQRKKIALVATAHHLVRVMWAMLKRGTLWEEKQAQGS

SEQ ID NO: 100100 - protein, 340 aa, unidentified
MDKFRQKKHFIGVDISNDKLDLALLEDAENSRFRDKVVTNDFKGFDSIQGWLENQEIQLKDCAFCMEHTGTYGLLFFAWLSQMEIDYCVEPALKIKKSLGITRGKDDKVDARRIADYAFIQRTKLQPYRLPSNLLLQIKQLLTYRDQMVRICSSLKNSLKSHQQYQRVSGLKSVSLEIEMQITDFQERIVQIEKQIIDLIKSDESLYKNYNLARSVIGVAFVIASYMLVTTNNFTSFDSGREYACYSGIAPFKNESGTAIRGKTKVSNLANKKVKTVLSNGANSAIHWDPEMKRYYNRKLAEGKDHKLIINSIRCKLVNRVFAVIKRQTPYVKTYQQNFG

SEQ ID NO: 100101 - protein, 334 aa, unidentified
MSLRLLAIDLGKRSFHIHGIDSDGVIISRKTSRFKLIETIGELAPETIAMEACASPHSWGRGFLAAGHRVLLINPRFVKPFVKGSKNDAADAEGIYEAALRPTMRFVPVKSTEQQDLQSLHRTRDRIVCARTALINHIRGLLGEYGVILPQGAWRFLAQANDAIADAELSDFARALFSDMLDELGSLDFRLEKLDRQLVAICRTNEACHRLSKLPGVGPVVATALVAAVDDGRHFRSGRELAAWIGLVPRQYTTGGKPRLGGIGRRANHYLRRQMIHGARSVMFRLAKHEDRRSQWLKGLAARRGFNRTIVALANKTARAAWALLTRKEDYVAA

SEQ ID NO: 100102 - protein, 368 aa, unidentified
MLCQITDRPPPGSQRPCAARSLSDFMCINPYSRLSPFLELESTREGNHHMSKSFIGIDVSKNNLDVHILPEALSFSYPYEPKTIKALIKKLKSFTPELIVMEATGGYEVGIGVALAGAGLNVAIVNPRQVRDYARALGKLAKTDKIDAYIIARFAQDVKPESRTQLTLKEFELKSLVARRQQLIDMRSAEKNRLSRASVAQVKNGIQKIIRVLDAQIKAIDDDLHNEIKNNPVWHKKLELITSFNGVGDNTAHMLLFSLPELGNLNRQQIAALVGLAPFNRDSGMMKGKRTIVGGRANIRRALHMPTLSAATRWNKTLGEFYCRLIAKGKKHSVALTACMRKLLITLNAMVKNNEPYNPKLCKITVDN

SEQ ID NO: 100103 - protein, 364 aa, unidentified
MQVRHIFVGIDLGDKNSVARIAVDREKSERFGFVNNRSGRARLFREVKRRGEQAGGALIVMAYEASSCGFVLRDEARTEGIECKVVAPTKMEKSVEQKKNKNDERDADDVLEKLRGHVLAGNRLPTVWVPDLQTRDDRELVRTRLELGEKQTQVKAQVQMLLKRHGLEKPSELKSNWTVGYRGWLEVLSQSGPLGEGARNSLSSLLRQLKGIEEEMGQLEKLLKELADVERHSPIIKALRKEYGVGLLTAMVYRTEIGQAARFRRGRQVGKFVGLTPTSHESGEQNDRKGHISRQGPPRLRKVLCQASWVHVGHDPQSREMYQRLVSKNPKKKKIALVAVMRRLAVRLWHRMREAELQLAQTKG

SEQ ID NO: 100104 - protein, 395 aa, unidentified
MFIVGIDIAKRSHEAIIIAEDGQVVRKAFSFRNNCTGYNLLLEQVRRLTLVKSQIVFAMESTAHYWLALYARLLKDGYAVMVLNPIQSHSLRELYIRKAKTDARDSLIIADLVRFGRCKASNVPQDKILALRELCRSRAYLVDMAADLKRKLIALLDRIFPEYESLFESVFSKASIAVLSKYSTPQKVKNAHLGKLTDILMESSNGHFGEWKAHQLKEAACSSFGIDDSGGVYSTLLGMFLEQILSLTAQADSLEKQISVFFQEFNNPLTSIPGVGTVLAATILSEIGDITRFSSADKLLAYAGLDPSVKQSGEFKSNQNRMSKRGSPYLRRAIWLASTVAVHRDPMFQTYYEKKISEGLHYMNVIGHVSRKMTAVIFAVLRDGQPYQPILQSAG

SEQ ID NO: 100105 - protein, 464 aa, unidentified
MNSRLYLGIDVSKGYADFSMLDAERKLVEETFQLYDVNEGHSALKAYLEYAVQTHRPEMIYAAVESTGGFENHWMEVLSILGEYLPIKVARLNPTGVAKHRQADRKHQVTDKTSSIAVARYLINHADRIAFNAKDEFKNHRLSLSSICLLEKQKTQQTNNLKQLLYQYFPEIMPYCRNGMPKKALELLKLYPTSYNMAHARQGKNNKIEYLTSENWLGLRERCKEGLMVEPDPLAEESIRIAVKIIQDLTLYIERLKDQLSKQLPQDKLDLLTSIPGIGKRSATVLLCIIGDACRFTNARQMVAFFGLYPEIKESGDMKKKPHLSKRGNSLLRKTLYMCAMVACQYDPYLRKLYLKAVEQGMPKKAAICKIMVKMLRMIYGMLVHNRKYDYAIDLENRKKFTPKAPSAEIHKPKPELEAMMTLIYQAPISKRNAHIRKEQMGAEAMTRSQSATSSVHSVFLPKT

SEQ ID NO: 100106 - protein, 422 aa, unidentified
MIDSKIWFVGVDWASENHHVRISDCHGKRIGERVFAHGGAGLAEMAAWLSSVTNGEPSAVHVAIEVPHGPVVETLLERGFKVYAINPKQLDRFRDRFSPAGAKDDSRDAEVLADALRTDMRAFRKLALAEPLLIELREWSRLTDDLTAERNRLANRMREQLWRYFPAMLDLEDDVAAEWFLDLWELVPTPDKAARTRESSIAKLLKSRRIRRLDVAQVLAALRKPAVFVAPGTIEAATAHIQSLIERIRLVNRQIKEAHSELDRLCAKLAEPMENQTGETSEQRDAAILASLPGNGRIVLATLLAECWEPLQRRDYHALRTLCGAAPVTKRSGKSRIVTRRLACNPRLSKALYHWARVAVQHDARSRAKYSALRQRGHSHGRALRSVGDRLLNVACAMLRNRTPFNPSLPSQSLLLSQKSAC

SEQ ID NO: 100107 - protein, 312 aa, unidentified
MTQQVFVGVDVAKDWLDIHHPSRGATRIDNSTAASRSFAARCAKEGAWVVFEASGGYDHQLRDVLEAADVRFSRINPRQARDFARAMGVIGKTDRVDARMLSELGTRMTPAQTAPLAPARRTLQAQATRRRQLVEMRKQEATRLQQTVDPDARDDIRSLIALFDRRIAKVETRMTGLVAADPELAAIARRLRTAPGVGPIVAATLIAELPELGQLDRRSIAALAGLAPVARDSGRRSGPRSIGGGRPVVRTILYLAALQASRRSATFSRFRDRLQAAGKSIKAAIIATARKLVITLNAMLASGTDFRPMPAD

SEQ ID NO: 100108 - protein, 316 aa, unidentified
MNAKPKIVVGIDVAKDTLEVATSAMERWECSNDPKGQRTLRDRLSGGEVQLIVVEATGGYELALVGRLAQAQLPVVVVNPRQVRQFARALGKLAKTDRIDAEVLVQFGQQAAPEIRPLPDEQTQLLDALLTRRQQLLEMIQAERNRLEHAVGPVRTDIRETIAFLVKRLKQTDRDLDDQLRHSPVWREREKLLKAVPGVGQQMLLSVCATLPELGRIPRKQLAALIGVAPYNCDSGTLRGHRHCWGGRAQTRRVLYMATLAATRCNPIIRPFYERLLAAGKPKKVALVACMHKLLLIMNAMVRDNTAWNPALAGVN

SEQ ID NO: 100109 - protein, 346 aa, unidentified
MTIVEEKPAVTGGVDTHSEVHVAAALDPVGGLLGTREFPATAAGYAGLLGWLGKFGDVALVGVEGTGSYGAGLARYLAAHGVRVVEAGRADRQDRHRNGKSDPLDAVSAARAAQSGRAAGAPKGRDGAVEAIRALMVAKRSARHERTQAINQARALILTGPDELRARFAGHRAAALAEAVAALRPRPGDAADFAVRIALRELGRRVEFPDAQIERLDDLIIPLVTARAPGLLSLYGVGPDTAALLLIAAGDHPERLRSEAAWAHMCAVAPIPASSGKTRRHRLNRGGNREANHALWRIVITRMSAHPATRAYVQRRTAEGLSKKEIIRCLKRYVAREAYPYLRPGA

SEQ ID NO: 100110 - protein, 330 aa, unidentified
MIVGVDVSKEWLDIAVKGIKPQRFYERRLENDAGGFQRLLSWVQERTGSTPKELTLVMEATGVYHEAAALALYEAGCRVIVANPKRVRDYASGVGLLNKTDRADARALWRYGSEQHGELIPWEPPPAEIRVLRALYTRLSAVQEDLRRELNRKAQAELSGQPVPVQESMQQSIGHLQADCERLKQAIEDHFDRHPPLRSQRELLQSIPGVGPVSADRMLCLLARHRFASARQAAAFAGLVPRLHESGSSVRKQPRMSKRGDRSLRATLYMAAVVACRHNRQLSEHYRALLTAGKCKMSALGVLMRRLLHIAFGMLKHNTTYDSTKVALTA

SEQ ID NO: 100111 - protein, 410 aa, unidentified
MVETIVERAAGLDVHKAQVTACVRVPGRGRERAQQVAEFPTTVRGLLSLRDWLHAHAVTQVAMEATGVYWKPVWAILEDEFDCLLVNARHVKQVPGRKTDVSDAAWLCQLLEAGLLQRSFVPPKPIRALRNLTRYRKAQIGERQREANRLHKILEDTGIKLDCVATDILGASGRAMLEALVAGTTDPDVLAELAKGKLRAKIPALREALVGRFDRQHALIVSAILAHLDFLDEQIQLLSDEIAEQLAPFAGAVELLCTIPGVQRRTAEVIVAEIGTDMSRFPSERHLASWAGQCPGNDRSAGKRRSGKTRHGSKWLDTALTEAALAATRSNDVYLAAQYQRLRPRRGHGRALGAVKHSILCACWHMLTTGELYREAGGDYFTRRDPEHTTRRLVAQLERLGHHVTLEAAA

SEQ ID NO: 100112 - protein, 482 aa, unidentified
MKSRSREKANKTTNDQTQCHWHEMNRKQRRDMMRQIQSEDVSLEVVHSDAAGIDIGNEFHYVAVPQSRDSQPVRRFGCTTGELRTMANWLKQCRIRTVAMQSTGVYWIAVYDILEQARLEVYLVNARDTKNLPGRKSDVQESQWLMKLHTYGLLRNSFRPAQEMRTMRTYWRQRNDLVQSASRHIQRMQKALTQMNLQLANVLSDVSGVTGQAIITAILAGERNPHKLAEFRDPRVKASEEQIARSLEGNWQPDLLFVLQQEQDGYKFCQKQIAECDRQLEKYLLQREDRSHGAPLPEEKRKQRLKKTKGKPQFDLRTGLFHLSGTDLTQIDGIDVMTASSILSEAGWDMSKWPDEDHFVSWLRLCPDNRISGEKIIGKGRLPTNNRANVALKMAASTLRQSDTYLGAQFRRLRTRLGAPIAIKAMAAKLARLVYRMLRYGIKYADKGATFYQVEHRQRQIKHLKWKAASLGYKVTPIPEAA

SEQ ID NO: 100113 - protein, 340 aa, unidentified
MGEVTTIGLDLAKHVFQVHGVDAEGATVLRKQLRRAQVLAFFSRLPPCLVGLEACATAHYWARELRALGHEVRLMPAQYVKAYIKRNKHDAADAEAICEAVGRPTMRFVPVKTADQQAAVLLHRGRERLVRQRTGLVNALRGHLAEFGVIAPQGLRNVGKLIAIVRDEGDARLPDLARQVLQVLAAQIEQLEAAVAAIEKQLMAWHKSNPVSQRLASVPGIGPIIATALAATVVEPSGFRSGREFAAWLGLVPRQNSTGGKHRLGGISKRGNQYLRRLLINGASANLLRSKATNADPWVIGLRQRRPSLVVAVALANKTARIAWAVMHRHENYQRVAAAA

SEQ ID NO: 100114 - protein, 383 aa, unidentified
MIVIGVDTHKGSHALSAVDEGTGRVRGSREIKADEPGHVAAVRWARGLDDERVWAIEDCRHVSRRLEQALLAAGERVVRVPPHRMGASRKGEREPGKSDEIDALAVARAVVNDGVEQFPVAYLDEQAMEIRLLLDHRNDLVADRTRTVNRLRWHLLELCPELERSLKRGALNQARVLDRVDRQLRKLPAGARVRIAREQVAQLRRLNPQVDQLAAQLAELVGAHRPKLLAEQGCGPVTAAILIGHTAGNERFRSDASFALQTGTAPIPCSSGKRTQHRLNRGGDRQLNHALHVIATTRAQRDPATQEYLARKQAEGKTKKGALRSLKRHLARHFHHLLAEEPLAPTDDHSTTDAIPPHPRQPDRDRVDKTIIGTAPMPMVCVS

SEQ ID NO: 100115 - protein, 475 aa, unidentified
MPHQPRRRAPKPRHSPAALERLHPHAAGIDCGAAEHFVAVPPDRDATPVQSFPTFTGDLHRLADWLTACRITHVAMEATGVYWIPIFEILDARGFQVILVNARHVKNLPGRKSDVSDCEWLRDLHILGLLRGSFRPADGSVALRGYLRHRTTLIESAGALVQRMQKALVQMNVQLPLVVSDITGVTGLRILRDIVAGQRDPQHLAQHRDVRCRASEAELIAALRGNYRPEHVFVLQQNLELFDTYQQQLAACDRTLEGHLAHLAVTASSASPLPAARRRPRKAKDNEPAFDLRTPLHQLTGVDLSQINGIGPYNALRLLSEIGTDMTRWPTVKHFTSWLTLAPQNRISGGRLLSSRTQPSANRAATILRMAAMALGRSQTALGAFYRRLAFRIGKAKAITATARKLAILVYRTLKDHLVYNDPGAEAYEAQDRSRVVRRLRQRAEHLGFGLVNLSTGEVTPGAVSWKPYLDSSVK

SEQ ID NO: 100116 - protein, 310 aa, unidentified
MQDTIGIDISKDTFDICRLSDRRHERFGNDKAGLAALRRWIGKAPVRIVYEATGRYHRDLEAVLGAAGHDLVKVNPTRARRFAQAISQGAKTDRVDAAMLARMGAVLELEAKPVRSETMHEIRELHIARRALNKDRTACRNRLDAARNKVVLAQLRARLRQVDSQLEQIDTELARLIAEDPALARRQEILCSIPGIGAVTAVAMIVEMPELGTMEPKEAASLSGLAPITRESGKWKGRSKIGGGRRGMRNALYMPALVAIRHNLHLAETYHKLVDAGKPAKLAIAAIMRKLVILANALIRDNRKWTQTAP

SEQ ID NO: 100117 - protein, 411 aa, unidentified
MEAAVITAVGIDVSKSKSTVAVRRPGGEIVLRPFDVRHTNSDLKKLTSTLKKLGGDIRIVMEHTSTYWRPIALTLKEAGFFVSVVNAMLIHDFSDNTIRKLKTDRADALKIANYALTFWDTLPPFNNEEETRLLLKMQSRANERITATATALRNGLIALADQIFPGVNIAFDPNTKNANGHEKWVDFFLRYWHKDCVCQYSMEAFTESYRGWCKRKNYKFRTDTAHQIYLLAQEGVATLPKCESTKMLITQACKSLNAVCEAKQSTQLEMQRLAAMLPEYEVVMQMEGAGPITGPALMAEIGDVRRFKNKKALVAFAGIDAPPFQSGAFESKSRHVSKRGSPHLRRTIFIVSNIILTRSNPENAVYCFMDKKRSEGKHYYVYTVAGSAKFLRVYYARVTEFLRSQPSPGAC

SEQ ID NO: 100118 - protein, 466 aa, unidentified
MKGKKKTDPNADRKKERLSKHLEQVNLYAAGIDIGSQMHYVAVPEGLDTEPVRSFPCFTGDLKKMAAWLVEIGIATVAMESTGIYWIPAYEILEEYGLEVLLVNARNVKNVSGRKSDVLDCQWLQRLHTYGLLQGAFRPPEHITSLRAYMRQRDTLIRYASSHIQHMQKALRQMNLLLDNVVSDITGKTGMTIIRAILEGERNPDKLAVHRDGRCKKSEKEISESLHGHYRDEYILSLRQSLHLYETYQEQIGECDLAIEKLLDTFESNGDSNSLPPSKDRKSASAPSFNAREELFRITGVDLTRIPGISEVTALKVISEIGTDMSRWKSAKHFASWLGLSPGTNVSGGKVLSKKTKRTANRASSALRMAAFAVTNSKSAIGAYHRRMRARHGSPKAITATAHKLARLIYSMLKNGAEFVEEGMDYYENQYKDRVLKNLKRRVAEMGFKMIPAQNQENASLDGATC

SEQ ID NO: 100119 - protein, 349 aa, unidentified
MVIIGTDSHKHTHTCVAADELGRRLAERTVAATGAGHLELLAWAARFTDRSWALEDCRHLSRRLERDLLGAGEPVVRVPPKLMAGARRSSREPGKSDPIDALAVARAALREPGLPVARLDGPEREVRLLVDHREDLVAQRTAHENRLRWHLHELAPGGEPAPRTLGRLPVLDALGARLGGIDGPVARIARDLVARIRELTTAVTALERELAALVRPLAPTLLALQGCGVLTAAKLVGEVAGIGRFRSAAAFARWDGTAPVPVWSGDTTHVRLSRGGNRQVNAALHRIAVTQLRLPGPGRDYVAKRRAAGDSWTEALRALRRRLSDEVHRRLRADEPVHMSRPAAHQAAA

SEQ ID NO: 100120 - protein, 376 aa, unidentified
MENDNTLYVGLDVHKDSITVAYALGTGEVEVLGKIGTTKTDIDRLCKRLQSKARHIRIVYEAGPCGYGLYRQLLQKGFDCIVCAPSLIPKKPGERVKTDRRDAVKLVRSLRAGDLSAVHVPTTEDEAFRDLTRTWVSAKDDLKAARQRLKAFLLSHGVRYEGRADWGPAHRRWLSTHAFDSAWQQLAFEEHRRTIEERLAQCERLEAALREAVVNWRFYPAVLGLQTMRGVQFATAVGMLSELGDLSRFAHPRQLMAWLGVTPCEHSSGEKRRQGSITKNGNSYARKLLVEAAWSYQHPARVSPDIQRRHEGIPKPIVDRAWDAQVRLCRRYRKLVARGKQKNIAVVAVARELSGFIWDISQLAMSLAIPHEALTA

SEQ ID NO: 100121 - protein, 416 aa, unidentified
MNAVGIDVSSRKSTVAVLRPLGEVVCLPFDVTHDIAGLASLAEKLKAIDGETRVVMEHTGRYYEAVAKALHEAGFFVCAVNPLLIKEYGANSLRRVKTDKADAIKIARYALDNWADLRDFTPMDAIRYDLKTLNRQFQLASKQRTASANNLIALLEQSFPGIRKCFDSPVRSDGTQKWVDFAHSFWHVDCVRKQPFPAFCERYRKWCKRHAYLFKQSNAEEVYALAKRAVVLTPKSKVVKVLVQEAANQLISISRSVEVYRAEMDRLAAMLPEYPVVMAMYGVGKSYGPQLMAEIGDVRRFERKQALVAFAGIDPMPNQSGDKNVRSNKSSKRGSPYLRKTLFNVIRTYLQCAPQDEPVFQFLNRKRAEGKPFYVYMLAAANKFLRRYYAKLRDYFASLDTLQPVAPIPTILKATL

SEQ ID NO: 100122 - protein, 337 aa, unidentified
MKRYLGVDLHRTQFTVCTRLENGRTYLRQWPMRELKLFAAQLRKEDELAVESTGNTRLFHDAVVEHVNRVAVVNPSQFKVISQSVKKTDKNDAELLALYLAKGLLPEVRMKERAQREMSHLAQTRDLLVKQRSALKAKVNNMLSAEGINLKRESLSSNKALQRVLALPLSPLMLAEARVLVGQIRSLTESIGELEKMIEEEGPQLAGHKNLMSIKGIGPVSAAVLLSVIGDVRDFADAGKLAAYVGLVPRVQNSNETEHSGRITKQGNKLARTCLVQCALVAKRYSSFLQNFYQRIQRRRGGGKANIALARKFLGVIYHALKNDWVFEDFPNFVLAS

SEQ ID NO: 100123 - protein, 453 aa, unidentified
MPKKRQNREVKLPVLRPDAAGIDIGAEEIFVAVPADRDSQPVRRFPTFTQDLNALADWLTKCEIRTVAMESTGVYWIPLHQILESRGFEVYLVNAQYVRNVPGRKSDVSDCQWIQYLHCVGLLRASFRPPAEICPIRSLWRHRESLIQMASQHTQHIQKALDQMNLQIHHVLSQITGWSGLRILDAILDGDRDPVALVELCNWRVRTSRDIVAKALERDYRPEHVFTLKQSLAGYRYYQNQIAEVDEELNKYLRDLPNAVEGQASPPPRTKTRVYQKQHNDPAFDLRGELYRIVGVDLTDIPGINELTAHTIVSEIGTDVSRFRNASAFASWLGLCPEKQVSGGKVLYTKTRPVKNRVANALRLGAHCLYHANNYLGEFFRRMRRKLGAAEAVTATAHKLARILYHVLRTKEAYNESVFLRHDQEAIKRAEDRLRKQAAKLGFQIVPQQPSEV

SEQ ID NO: 100124 - protein, 338 aa, unidentified
MIVIGLDVHKQSVTAVAVDETGRPLEEKVIPVGSSELLEWAAALDAERLWAVEDCRQLTGWLERQLLGVGEELVRVPPKLTVPERRAGRTRGKSDPIDALAIARAAVREPNLSRPRPDERIYREIKLLVDHREDLVDQRRRTQQRLRWHLHQLDPTYEVPLRMLSRASHLDRVGRWLARREQELQVRLARELVSGCRALNREIAELDRQLEQRTAEVAPALLELPGCAAVTAAKLLAEIGPVDRFRSDAQLARHSGVAPLEASSGRTQRHRLDRGGNRQLNAALYRIAITQARYHAPAREYLERKRSEGKSRREALRCLKRLLVRVVFQTLKTSPALT

SEQ ID NO: 100125 - protein, 376 aa, unidentified
MSKVYIGLDTHKEQIVIAVSLDHGEAIVYGSCSSDLLRFMTTLRGLLKKYGLEKEDVWICYEAGPCGFTLARHLLRIGYHVDVVAPSLIPVKSGDKVKTDKRDAKKLARLYRAGELTSVHIPDEADEVIRDLCRARTDAIDDQTRIKHRLTSFLLRNGHHYTGKSPWSEAHMRYLRELVLIDPIQKLILEENIQAVDRAAERVKAMEDHMRIRLEKWVRQPFVKALQAFRGFQMVASMVVTSELGDLTRFDHPRKLMAYLGLVPSEKSTGEKRYQGGITKCGNSHVRWILVEISRHYANAPKVSKELSGRQEGLDETVKQLSWRTQKRLYKRYVRLQMRRLHENKIKVAIARELTAFIWELAQIQKSKEPMTIPTV

SEQ ID NO: 100126 - protein, 348 aa, unidentified
MKPNFEPGKWFMQCVGIDIAKGTFTACLCMYEFDQGCSTVPVVFNNDKTGFNQFVKWSRKEALKGYPLRYVMEPTGVYYEQLAAHLNKLGLDICIVLPNKAREFAKYEGILTKTDNMDAYTLGMLGCIDKRLKSWTPPSPVYRELRQMTRFAADINKVKTELKNHLEALAHSETAEKSIVKHYNKLIDEIDKQLVSNQKAIREKIKQEPGLSERIDRITTINGVGFMTVVTVVAETNGFALITNRKQLTRYAGLDVPAHQSGPVDPKRHISKQGNVHIRTALYFPAIVSTQYNPQMKDFPVRLCARNTQSKMIGVTATMRKLLLLIYSLWKSGDEYDPTRDKPVCDRQ

SEQ ID NO: 100127 - protein, 385 aa, unidentified
MVYIGIDIAKFKHFASVVSSDGKVIVKPFPFENSRQGFMKLVEEIENFHDCLIGLESTGHYAENLIYFLYERGYQIGVINPIQTDALRDSNIRKTKTDKIDTKLIVECLMLKKYSLVNSQDINIIKLRRLSRFKLETIQQQTRIKTQLTACLDIVFPELSSFFKGNLHLKVSYALLEKYSSAKSIAHCRIDSLTNLLYDNSKGHYNQDKALQLKNLAKQSVGLDNPAIELQIQCLIKQLRLYQKQIKDIDLAIMTLMELLNSPILTIPGVGYTLGAMIISEIGDIKRFSNPSKLLAFAGLDPVVKQSGNFQANQMKISKRGSTYLRYAIYRVAFLIIYNNETFHNYYISKRAQGKTHRVALGHVCNKLVRIIFKILTDETPFNLS

SEQ ID NO: 100128 - protein, 349 aa, unidentified
MLADEVDYVVGVDTHLDEHVLVIVAAPSGALVARRSVRASARGYAAALRFAAELAAGARVWAIEGAGHYGAGLARYLAARGETVLEISRTPRAERRLRGKDDSLDAARTARAALAGETLALPRSGQRREALRLLLVARRSAVDVRREALGQLRGVIVTAPDRLREELRQLPTGRLLERCRRLRRSSSASADELATRLVLRSLARRIEAATIEAAELERELLGHVRALAPQLLDEPGVGPIVAAQLIVAWSHRDRLRSEAAFARLAGVAPVPASSGQTIRHRLSRGGDRQLNRALHTIVLHRRQHDPTTQAYIERRIAEGKSRREATRLLKRYLARHLYRVLQHAEPLMT

SEQ ID NO: 100129 - protein, 356 aa, unidentified
MDNSNKVDFRGQCVYVGLDVHRKSWSVSIYSKHGEYKTFSQPPEVDTLVSYLQRHFPGAEYRSVYEAGYSGYWIHDQLRAQGVNCSVVNPADVPTKDKERRTRRDAIDCRKLARNLKNGEVKAIYVPCRSTLEDRTLIRTRLRMVSKQTRCKNQIKGMLYFYGVQIPEPTEMGHWSRRFIQWIEGIRMERDSGDIALKALLEELGYLRQILARVNRAILALARTEPYRSSVLRLRSIAGISTLTAMILLTELGDMARFSSLDHLCSYVGLIPDVESSGDKEHTGGITQRRHRQLRWILIEAAWVAIRKDLVLQAAYDQYCQRMRGSKAIVKIARKLLSRVRYVLKNEAPCMSSNLN

SEQ ID NO: 100130 - protein, 419 aa, unidentified
MTRKDDSKIIEIVNPICCGLDVHKKKISACIIFPNSSVTDHCKVKEFGTFTDDLQGLRSWLLEHECPVVAMESTGIYWRPVHNVLEGVVHVILVNARDIKNVPGRKTDIGDSKWLAGLLQHGLLRGSFIPPKSVRQWRDLTRLRRKYVQTLADYKKRTQKLFESSNIKIDSVVSDLFGVTGRNLMNLLLSDAQQLSLLDIEGCVRGKLKGKERELFRSIQGFFSGHQRFILKRLLNTVVMLEEEIAGFNHQIQQVMEDQKELLERMKKAAGISDISARDILAEIGPDMGSFPTGASIVSWSGLCPGNNESAGKRKSGRSRVRKHYLKTIMVEVAWAAIKKKDSYFKDKYYRLKARRGAKRAIVAVAHRIMLGIYHVIKDRVEFRDLGADYLTERNKRQKINYLRNQARLMGFNLVAQTT

SEQ ID NO: 100131 - protein, 363 aa, unidentified
MNSAYHTELSSLEGTRRQFNGGRCAIKLGIDVHQDFYVVVMQQGSTNPKPPQRFAKQAFLHWAARLKSHATEVYAVYEACGFGFCLQRQLSAVGIHCYVVCPQKLDEQNRRVKTDGIDARALVLKLDRFVQGNRSALALVRVPTEEEEQARALHRQREQLVKVRKVLEAQGRSLLVNHGIEPVQQWWKRRAFAALSVPHWIRVLLQNTQPIVLLLQSQIDQLTLQLQNAATAEPPRGLGKMTSVIIDREIGNWHRFDNRRQIASYTGLCPGEYSSGRKRLQSCVTKHGNPRLRAALVELAWRMVRFQPRYRAVRKWTERLRKEQLTTGPKRKKAIVALARQLAIDLWRLRTGRLTAEQLGLEI

SEQ ID NO: 100132 - protein, 340 aa, unidentified
MSEITTIGLDLAKNVFQVHGIDEAGNVLVRKRLRRSQVLGFFSGLSRCLIGMEACATAHYWARELVGLGHEVRLMPPHYVKAYVKRNKNDAADAEAICEGVKRPTMRFVAIKTVEQQSALMMHRARDLLVRQRTMLVNALRGHMAEFGLVSAQGLHNVTGLIAIIRNGADERIPDLARQILTVIADQIDEIGGNVSVLEVQILAWHKNNPVSQRLATIPGIGPIIATAIAATVPDPSVFRNGREFAAWLGLVPRQNSTGGKARLGGITKRGDSYLRRILVNGAHAVLFWSKTAKTDPWLASLRSRKHRLVVAVALANKTARIVWAVMSREEIYRRTSAAA

SEQ ID NO: 100133 - protein, 318 aa, unidentified
MLIRYIDIAKRNFVIAVSSLSKTKTETNNPKGIAHTIEYLKKHKVALVVTESTGGLEIPAAKAIRRAGIAVIIANPRQTHQFAQSQPLTKTDAKDAKMPAFFAQMTAQKEDSQTMPYQPPTEAEEVLEALVNRRNQSADMRTAEKNRLHQVHETQVGSVKQLIAHFDRLIDELDKQIDDHTHTHFDGKAQVAEQIKGIGSITTATLMAMLPELGRLSHKRIASLAGIAPHPRESGETKFKSRCFGGRSTVRKALYMATVAATRFEPLIRDFHQRPLSEGKPYKVAVTACMRKLLTISNARMRDYFAENDTAENGIRTA

SEQ ID NO: 100134 - protein, 343 aa, unidentified
MQAVTTIGLDIAKSVFQVHGVDAEGKLLIRRQLKRRYVLAFFQKLSPCLVGIEACATSHHWSRELKALGHTVRLMPPAYVKPYVKRQKNDAADAEAICEAVTRANMRFVETKTPEQQSCLMLHRTRHLFIRQQTSVINAIRAHLAEFGIVAPVGRKGVEQLLEVVADVSDNRVPEVARACLAALGAQLRRLKEQILEFDRRIMAWHRSNETSRRLDAIPGIGPALATALVASVPNPKAFRSGRNFSAWIGLVPKQHSSGGKDRLGSISKQGDRYLRSLFTAGALAVIRYAKLHGTEHRPWLTALLARRPTKVAAIALANKIARMAWAMMAKGERYKEPVALAA

SEQ ID NO: 100135 - protein, 394 aa, unidentified
MYYIGIDVAKFKHSLAVVGLGGEEIITHFDFANSTEGFSQMLDRLGQAGITYENSRVCIESTGHYGRCLHTHLEGYGFEVCLANALQTARFRKARSIRKVKNDAVDALALAQWLLVENPVATKLSPSEVSELKEIARFRTFHSHIIGDCKRKIICILDQVFPEYASTFSDVFGKASLAVLMRYPNADSLSMSRIDTLTKILHTNSKGKLGKAKAQALKEIAQNSFGTADACQAHSFKLRQLIEQIRFTQNQIESLDKEIAKLLEKAATPITTIPGIGPVCGAIILGEIGNIERFPKSSSLVAYSGLDPSVYESGEFKGNRNKISKRGSKYLRWALWIGADRARMYDPHLREYYEKKRAEGKPHKVAVSAVARKLCRIIFAVLTSDMPYVCPANR

SEQ ID NO: 100136 - protein, 503 aa, unidentified
MKTKRRKAKNQAADKSQAARKEVAEELTILRPDAGGVDCGATEHYASVPPDRVPAGQAAVRCFSAFTEGLDALVDWFKECRISTVAMESTGVYWIALYQKLEAAGIEVYLVNARHVRCVPGRKSDVQDPQWLRQLHRFGLLNASFRPEDLVCRIRSLHRDKENRVGSAAAEIQHMQQALQQMNLHLHHVVSDITGETGLRILDAILAGQRKPEELVKLRDKRCSKSTPNEMQAALVGDYRPEHLWVLKRSLQAYRFYQSQIEECDRQIEPLLQELAQRVETASAQLQLPSPEPKAGEPEQKLAEKQPQQQCDATLANALRSKKKRKAKANEPKIELAGLLERICGVDLTRVAGLNVASVLLIVSEIGVDMSKWRSARAFCSWLGLCPANKISGGKVLNSRTRKVVNRVATALRLAAQSAGRTDTCLGIFYRRKKAQLGAPKATTATARKLACVLYHLLKNKEPYQDPDPVLYQQRLQIFAFTKLQRQAAALGYTLLPTAPAPI

SEQ ID NO: 100137 - protein, 427 aa, unidentified
METVFEVMNACCAFLDIHKETVEATVRILQGQRVRQETRRWSTTTGQIQAMADWLATHGVTHAGMESTGVFWKPIFNILETRFTVILTNPAHMKQVPGRKSDLRDSQWGAQLLQAGLLRGSFIPPRWQRELRDYTRYRSQLQAEQTRVANRLHKVLEDANIKLGSVATDILGLSGRAMIHALMEGEQDAATLAEMAQGKLRTRRPELKLALEGRVTPHHRRMLRMLWKELAAVEECIADVDREIQEVTQPYTSQIEQMDPVPGIDRRTAEVVLAEVGANVDPFPSDQDLASWAGMCPGNEESAGKRRTGRTTKGNRWLRAALVQAAWAASHTKRSYLGAQYRRLAGRRGKKRALVAVGHSILVILYHLLKDDRPYSDLGRDFFDRMNHDRLIRYYSRRLAELGQKVTVEPLPEVTPGEGMVNVPSPC

SEQ ID NO: 100138 - protein, 348 aa, unidentified
MTIVDAARPVTGGVDTHLDLNVAAALDPVGGLLEVAEFPATSGGHRRLLGWLAGFGPVTRVGVEGTGSYGAGLARYLRAAGIEVVEVDRPNRQARRRAGKSDPLDAIEAARAALSGRASGAAKTRDGNVEAIRALVVAKRSARATKIKTLNQIRHLSYTAPEQLRERLKGVSRQQLAARAAALRPSQREGADPVMTATKTALRILGRRVLALDEEKARIDALLSELVTRTAPDLLTLHGVGIDTAATLLVTAGDNPGRLRSEAAWAHLCGTAPIPASSGKVTRWRLNRGGDRQANCALWGIVITRLSNDPRTRAYMTRRLAEGRSKPEVIRILKRYVAREVYHHLPRP

SEQ ID NO: 100139 - protein, 347 aa, unidentified
MHRYIGIDVHTESCTFAIMGPTGKRLREARVETNAKVLTEFVRSIAGQKHVCIEEGTLAEWMYELLEPLVDELVVTIPERARGSKSDSSDAWRRADELRRGSISRPVFKAPDRFTALRAAAKTYTATQRDMVRTKTRLKNLFRSRGIHNMRSAIYDPEQRASWLACLPAAHRCRAELLAMQLDGLVQTHERAHDWLLEESTKVPIVQLVQTAPGIGEIRAALIVAIVISPHRFRTRRQFWSYCGLAIVTHSSDDWAKDRNDKWVRQRVAQTRGLNRNRQPLLKNVFKGAAETVIAKLPQHPLKQAYDRTTTAGTKPNLAALTLARRIAGTVLAMWKNKENYDPTKQR

SEQ ID NO: 100140 - protein, 323 aa, unidentified
MLPVLGIDIAKATCDVALQCADGKVRHKSVANTARGHAELLAWVARYVSGPVHACLEATGTYGEAVALALADAGHTVSIVNPLAIKAYAQSELRRAKTDRADSEVILHFCEAQRPPAWVAPTPETRTLQALARRIVAVDQMRQQELNRLEAYPAQDAVRQSIVDVLAELTAELEHLKKVVQDHINRHPDLRARRDLLTTIPGIGDTTATALLAELFGPMPCLSVKQAVAAAALAPGIHESGTSVRRRGALSSLGSRRLRKALYFPAIVAMTHNPVIAAMAKRLEARGKCKMVIVVAAMRRLVHLAFGVLKSNRPFDPSIALSH

SEQ ID NO: 100141 - protein, 438 aa, unidentified
MDIVHPRVAGIDVHKKIVWAAVRLPGDATGDRKVVTRSFKTFWRSLQKMAAWLAELGVTDVAMESTGVYWWPVCHALAGAGIEVCVCNAAHMRNVPGRKTDLRDCQWIAELHEHGLLRPSFIPAAEVAALRARTRYRKRLVEQRTAEGQRLAKVLEDAGIKIDSVASRLLGKSGREMIEALIAGERDPGRLADLARGVLRRKIDDLQMACDGRFTDGHGQMCRLHLDAYDHLTATVAELDALVAEAAAPFAAVIARLMTIPGIGQRTAEVIVAETGGDMSRFATSARLAAWAGLAPGDNESAGKRKHAAIRQGSRHLRAAMTESAWATARTRTRPGARFRRLARRFGKGHEKKAATAVAHTLICIAWAVMARGQDYTDAGEDYYDQRDQRNREHLIRHHQQALTRLGCQVTLAPPNDDSPPPGTASPHPPAPPPGQAA

SEQ ID NO: 100142 - protein, 355 aa, unidentified
MKLYKDIKSFVKGKKVFCGIDIHKKNWSVCFVCDGEVVQTGSIPSAYGKLKALLKPYSMSRDLEIVYEAGFSGTWLYRQLTREGYSCKITPPGLVPVNTDRVKTDKRDARKLASYLAAGLLKSVYVLPDWAESNRRILRRRSQLVKKTSRAKNEIRSFLHLHGLKRPAAIKCNWSGLYMKWLDSLQFEFESDQFVLAQLVKNYRRLREDVAEVTRHLRILSKSGAYAVNFRRITTVRGVGLITGMSLLLEIHDFSRFENSDHFSSFLGLTPSQYSSGEKTRYGHITRQGNAELRRVLIESAWTVIRYDPHLREKYERIRSRGTNGKKAIVAVARSLAVRIRYCLLNEEDYMAGVC

SEQ ID NO: 100143 - protein, 350 aa, unidentified
MTTMTPEPGSVTGGVDTHLDTHVAAAVDHLGGVLGTQSFPTTAAGYRQLLGWLGSFGPIHAVGVEGTGSYGSALAGHLAAHEVRVVEVSRPNRQVRRRHGKSDVIDAIAAARAVLSGQACATPKAHNGPVEALRLLKIVQRSANKSRTQAVNQLRTIVATAPDELRANLRELGRSQLVATCAGFRVRTQDDSLAAVTRLALRELAQRIQLLDEQLARTKARLNRITTAIAPELMARKGVGPDTASAILISAGDNPQRLRDERSFAALAGSNPIPASSGKTTRHRLNRGGDRQLNAALWRIAMVRLATDSDTRAYLDRRTGEGKSKPETIRCIKRYIAREIFTALPHPAIA

SEQ ID NO: 100144 - protein, 341 aa, unidentified
MYALYCALDIARNDSRAAWSDRDGNIVREKKIMMTRDALIETFGGEAGRTLLGCEATGKAFWIHDVLSPLGVELLIAPPNRLKVIYETCYKTDKIDARKMAPLLAKDLFPTVWIPPAHLRDLREMTRLRAQMVRARSQWVCRHHALLSRWGVNSPNHGGEVVEDQGLVDSLGAGARIAGTEILRFVGDLNERIRLLDRRARTEIRKFPDFERQIHLLMTIPGVGILTATVLVLEIGRIDRFPSHKHFAHYSRLTPGVDSTAGRRKDLHLAKDSRADLGCLMVEAAWTARRVDPYFAGQYQRRVALGIKPRRAIVPVARSLSHAIYRVWKSQTPYQELFQLN

SEQ ID NO: 100145 - protein, 327 aa, unidentified
MAKRTTICAGIDTGKRKLDIALDGSSEQLQVDNTPEGYKALLDWLRRHRVKRIGIEASGGYEQAVVAELRRQRFVVVVFQPAQVRAYAKFHLLRAKNDKIDAALIAACTAAVKTIHAPPDARLLPFAEHLTMIDQIGEDIARLKNRLETCRNPRFRQTWKEDIARLAKREKIELKALVAAIRQHRDLAERLDLIESVDGIGLPTAVAILVRLPEIGRITREQAAALAGLAPYDDDSGDQVGIRHIDGGRERLRRALYTAALPASFRWNPQLIALYGRLIAAGKEHKRALIACARKLLIFANTVVARGTPWDRERPPIASITAVPQAG

SEQ ID NO: 100146 - protein, 353 aa, unidentified
MTKITRAGVDIAKSVFHIHAVDRHDQPKWQGKLKRGEWLDVLCGRLAPGAEVGMEACASSHHWGRELEKRGFRVKLIAAQFVKPYVKSNKNDRVDAEAICEAMGRPGMRFVSLKSVWQQDRQAAHRIREELVGQRTAKANQIRGLAGEYGLIAPVGILHLRRALPEWLEDAENGLTDEFRILLNDLAEDLRQLDDRVVGLGEWISECVRKDPVAQRLMKLRGIGPLTASALSGALGDGRGFARGREFAASIGLTPRQHSTGGKDRLLGISKRGDAYLRKLLVHGARAVIRHAKNRDDELSQWINELMRRKHANIVAVALANKTARVAWAIVCGETDYDPMQIARRQAVSAITA

SEQ ID NO: 100147 - protein, 344 aa, unidentified
MEITTIGLDLAKNIFQVHGVDASGQVVVRRSLRRAQMLPFFARLPSCLVGMEACGTSHHWARELIKLGHDVRLMPPAYVKPYVKRGKTDAADAEAVCQAVRRPTMRFVPVKSPEQQAALSMHRTRDLLVKQRTQLVNMTRGLLAEFGIDIPKGLERALLMARRIVDGEAPDIPIEAAKIVGTLSQQALDIHVRLRQIDRDLLVWQRGNDVARRLMTIPGIGPVGATALAASVTDPHQFRSGRQFAAWLGLTPLQKSSGGKERLGRITKMGDKYLRKLLIVGMTSLVGRAKYHPEAIDPRLANLLARKPMRLATVAMANKTARIIWAIMVRGETYRAGHQPALAA

SEQ ID NO: 100148 - protein, 339 aa, unidentified
MTEQDAVPKRFIGLDIHKRYLVAVGVDADLNPVLGPQRVEYTRLGQWMTKTLRSEDALVIEMTTNTWQMYEDLLPHVQSVTVVHPPHVALITRSQVMNDKIAASILARLLAKGLLVGIWVPPQPVRDARALIAQRSKMTRLATQSKNRLHAVLHRRQTLPPEGSPFLAERRAWWLALPLNATERARVECDLDTLEFAQKQVARLDETIHSLAALDERTPLLTQLPGVGILTATTILAAIGEIGRFPSDKKLVGYAGLGGRLHESGMSSRKGSITKAGRRDLRAAMVEAAQTAANTHPHWKAELARLEPRLGRNKAIVAIARKLLVAGWFAHNVRANGDI

SEQ ID NO: 100149 - protein, 410 aa, unidentified
MRIIALDVHRSFAQTAILENGKLRDAGKIDLEYSRLLRFARKLKPDDEIVIEATGNTSAIVRVLLPFVGRVVIANPILVRAIAWAKVKTDKIDAAVLAKLHASGFLPEVWMPDEETEARRRVVAERTQLVSQMTRLKNRIQSVLHANLIPPYKGVLFSQRGRAWLEAQPLAEDQRRVIVRHAGELDRLGAELAEVDKSLAQAALEEPRVKRLMTITGVNSTVAMSVLAAIGDIHRFSSPEKLVSYFGLNPRVRQSGDKPAYHGRITKQGRAHARSMLVEAAWVISGAPGPLRAFFIRIRDKRGKHVAAVATARKLAVIIWHILSKDEDYTWNRPALLQWKLRKLELKAGHPSRRGGRQKGSAAAYSNKSVRDSERETIANAEDEYRRFVATWKQQSPKGRSGATNEVRRS

SEQ ID NO: 100150 - protein, 385 aa, unidentified
MVQSIPHPMATTAQANDTTLCVALELSRSTWLVGINLPGSDKLSKHAVPGGDGAALLELLSKTQAKAEQQLGRPLRIVVIQEAGRDGFWIHRLLEAAGIQSQVVDPASIAVSRRHRRAKTDALDLNLLMRTLLAWLRGERRVCAMVRAPSVEDEDARRGSRERERLVKERTQHINRIQALLATQGILDIQPTRKEARERLGQARTGDGRELPARLKAELERELDRLDLVARQIADLERERDAAVQASIVAGGKAGLLVRLKGIGPEGATVLLQEAFHRPFSNRREVAAYAGLVPSPWQSGGTDHEQGISKSGNARLRKTMTELAWLWVRHQPGSALSLWFRERVGDAKGRRRRIAIVAVARKLLVALWRYVEHGVMPEGAELKAA

SEQ ID NO: 100151 - protein, 339 aa, unidentified
MKYVGIDLHKKTIMVCVVNEKLTVFARRTLYCCEPETITEFFKELGPFQAAVEATASYQWLVDLIEPLAERVVLANPNKLRVIAESIKKTDRLDAQVLAEFLARDQIPQAYQPTPRVRQHRAFVRHRKYLREQMTAVRNKIRRILSDYNADRKDLFSANCGLEYIKQVPLSEADRFVLNQLWAEYQHYDQQVEELGDRLKKFAKKAPSREAEARAVLKTIPGVGPVTTEVVISELGEIGRFKNAKRVCSYAGLVPIVRQSGGKKSKDLGISKQGSALLRWALVEASWRLVRTNRKWERIFERISKRSGGKRAIVAVARKLLCVMYAMLKTVTPYNVLAK

SEQ ID NO: 100152 - protein, 422 aa, unidentified
MLEETQDTEEIIERVAALDIGKAELVACVRVPNPDKPGLRAQEITTYSTMTRSLLGMCDRLRELEVTRVVMEATSDYWKPAFYLLEAQGLDPWLVNARDVKHLPGRPKTDKLDAVWLCKVAERQMIRPSFVPPAEIRLLRDLTRYRSDLVVARTAEKNRVEKLLEDAQIKLSVVASDIFGVSGREMMAALLAGQRDPKVLAQLARARMRAKIPLLEEAFVGHFTNHHAFLLRTMLARIDQASADIAAVEARIEELVTPFVQAVEQLDEIPGIGATAAHVILAEIGLDMSRFATAAHLCSWARFAPGVKESAGKKKGRGTTGHGNPYLARVLGEAAVAAGKTDTFLGERYRRIARRRGKKRAIVAVGRSILVIIFHLLSDPDARFHDLGSDFYDNRIGPDRKKRNHVRQLEALGYTVTLQPAA

SEQ ID NO: 100153 - protein, 458 aa, unidentified
MQRNRSKPKTQRTMPMVHANAAAIDIGATMHMAAVRADRTSEPVRSFGTFTTDLHRLVDWFTECGVETVVMESTSVYWIPIFELLDARGFTVFLVNARDAKHVPGRKTDVSDAQWLQRLHSYGLLRASFRPKGQIAELRAYMRQRERLLEYGASHIQHMQKALTEMNLQLHHVVADITGATGLRIIRAILAGERDPKVLARLRHYQCHASADTIEKALTGSYRSEHLFALEQALALYGVYQEKASACDIRIEAVLKELSIGRGPRSDPLPSPRRHRATQANGLAFDVRAALFALLGKDLTQINGLGPYLSLKLIAECGDDLSAWPSAKHFTSWLGLAPSNKISGGKVLSSRTRRCGNRASALLRLAAVTVGRTDTALGAFYRRLSARIGKTKAITATARKIAALFYNALRHGMEYVDPGASFYETRYRARVVDNLHRRAKAFGFVLQPIEPTPSSVVS

SEQ ID NO: 100154 - protein, 423 aa, unidentified
MVKVREVSYAVLEAVLERCCGLDVHKKKVTACLLIGPLDEPPQELVARFTTTTKGLLELRDWLESHGCTHLAMESTGIYWRPVYHILEGAVTILLVNARHMKQLPGRKTDLTDAQWIARLLRWGLLKPSLIPPRPIRELRDLCRYQKKLMQEATAEKNRVHKVLEDANIKLASVAADIFGVSGRAMLETIITGDFAPEETAALTRGKMRQKLPQLIEALEGRVAEHHRFLLRMHLDHLAYLQQAVVELHNRIEDKIRPYRQEVELLRTLPGVDAVTAQHAYVEMGGDIRLFPSDGHYTSWIGICPGNHESGGKRKSGRTPKGNRWLYGLLVQAGHTAGRSKGTYAGAFYHRVARRRGKERAAVATGHHLGRAMYHLLQEGRPYQDLGADYFDRRNHNTLKTHLIRRLQGLGYRVDLNPEAAVT

SEQ ID NO: 100155 - protein, 404 aa, unidentified
MEVLYKRCCGIDIHKNMMVACVFTSVRKKEIRQFSTMTEDILQLVSWLKETDCEMAAMESTGSYWKPVYNIFEEEQIPTMIVNAQHIKGVPGRKTDVKDAEWIADLVRHGLVKASYIPNREQRELREITRYRQKIIEERARELNRIQDVLEGCNIKLSSVITDISGKSGMAILKAIISGETDPIVLSELAEGRARNKIPEMQKSLQGRISEHQQKMLKHQLGHIESLTFLIMDLDADIKKTESINWAIEALDSMPGVGRQSAERILAETGVEMEHFQNESRFSSWAGLVPECKESAGKKMSTRIRKGNKYLKATLVECARAAIRNKQSYLYSRYQRIAARRGGKRALIAVAHTMLIAIYHILKEKVPCHDLGDDYYSVINQEKLIKRNLHALEKLGMDVIIQPK

SEQ ID NO: 100156 - protein, 404 aa, unidentified
MFIEHKEGHHPVTGASTSDRVVIAVDPHKASWTAAVVDSSLQPLDVIRVPVSPQGYRQLRGFAQRWSDPGWAIEGAAGLGAPVTQRLTADGIDVVDVPAKLAARVRVLSTGHGRKTDEADAVSVGVAALTATRLNTVTIDAAITVLRALVEHRDDLVKIRTQTVNRLHVLLTHLMPAGAPRGLTAERAADMLRQIRPRDPAVKTLRGLAVDLVTEIRQLDRRIAKAARDIQTAVDTSGSTLAELCGIGTLNAAKILARVGSVHRFRSADAFASYTGTAPIAASSGDVTRHRLSRAGDRQLNCCLHTMAITQIARDTPGRTYYRKKRATGKSHREALRCLKRRLSDAVYRQLLRDATTEAGAGPAGHVGATLASSAAGSHPFTSTSDKSLTGPANRNHTTGGHDV

SEQ ID NO: 100157 - protein, 342 aa, unidentified
MNIVYVGVDLGSSNFHQVAVNEAGVSKVNREFATSEANLIKAFADQRGEIHVHLEAGELAPWAISIIRPLVSRVVCSHPQSNAWIAKDADKSDRIDAFKLADLLRLNRFKEVHYPQQQSRRDFKTLVQHYDELTQQQARLKTKIKARLRMQGVIVRGEELFSSKGRKVVLAAVKSVAVRTAIKQLYAVLDQSIESQTEARLLMRRAAQAFPEIRILQTAPGVGPIGACRFSAYIHTPSRFSSTRKLWKYCRLSVSHRSSNGKPLRRPRLDRNGCGRLKDVTRKAFEAALRTQRDNGFQRAYLRALETTHDRTHARLTVQRKIASTLRAMWLNQTPYRDELMR

SEQ ID NO: 100158 - protein, 402 aa, unidentified
MNSVGIDISKGRSTIAVMRPFGEVAISPFEVRHTDSELSELARRLKSLNGETRVVMEATGNYHAPVAKQLHDAGLYVSVVNAKLVHGYGNNDLRRVKTDRKDAIKLANYGLDRWLTLPRYVPEENTRLLLKNCYRQYRQYSKVQTVLKNNLISLLDMTFPNANRLFVSPARADGSEKWVDFVAEFWHCECVSERSLKSFVNKYWRWCRKHGYNFSEEKAHAIYDEASGHIGVMPKSETTKLLVEQAVSQLSATSAALAALKQEMQSLSSQLPEYPVVMGMFGVGPILGPQLIAEIGDVRRFYSKKALVAYAGIDAPPNDSGDVIGRHKSMSKVGASSLRRTLFLIMSAYLQNSPPNEPVYQFMDRKRSEGKPYRVYMMASANKFLRIYYATVKAYLETLEQF

SEQ ID NO: 100159 - protein, 402 aa, unidentified
MQTSSIDVFIGIDVGKSDHWATALDRDGNRLFDKALPNDETRLRDLYERLARHGRVLVVVDQPATIGALAVAVAQDMGIPVGYLPGLSMRRIADLTPGNAKTDARDASVIAQAGRTMPHTLRAINGSDQDAAALSMLTGFDLDLARQVNQTSNRIRGLYTQIHPALEKVLGPRLEHDAVLEVIASWPVPTALRKAGRVRVAAKLKAHGARRHEAWAGEIISALEAQNVVVIGTDAAGIVLPHLARQLIALHAQRRDVAAKVEALVEAHPLYQVLTSMPGIGVRTAAVFIAETLGRSFDTGAHLASYAGLTPVTRRSGSSIRSEYTSHAGNKRLKRAMFLSAFASLRSDPASRAYYDRKIAQGKRHNQAVIALAHRRILTLHAMIRNATLYNPQPTHQLPTVA

SEQ ID NO: 100160 - protein, 343 aa, unidentified
MYYIGIDVHSKWSTFVALDPTTGETITFDRVPNTPADIAERLGSLKSPLKGMLESGTNAWAMYRTLAPLFEEIVVVSPAELWDRRRDDAKTDKRDCLGMATRLYRGDYTPLYIPDETTQDLRNLVRAKIQASRHVTKLVNEIGSLVRSWGHILPGSLLGKQGQAWLATVQLPAHSARALELWRAELGRFLAVEAELERSIVEEAARDEVCRQLMTIPNVGAFTALAIRAEVGDIRRFRSVDALIRYCGLAPRVFQSGEKRAYGRLGKQHNHWLRYVVMLFAQRCGRSRTETPFRRTYWRVSLRQHRNSAKVAVARQFVRVFSTMWRRGTVWDAARGQRTPRAA

SEQ ID NO: 100161 - protein, 363 aa, unidentified
MKTTNQNTNAQADGASVVSKQHQCIKLGLDVHADSIRVVRMIDGATPQPAQKMSPDEFPAWAVKQLALADKVCSCYEAGPLGYGLHRKLTATDIENIVIRPLVLDEYRKRVKTDKTDALALAKRLDAYVRGNRKAFAVVRVPTEQEERERTLSRQREQLVREVRRVRGQGRSLMLFHGVRVKGVWWRWHWNRVTEKLPAWLVERLEVFRAVLQVLDQQIRKLTLVLEAQAPAARPRGLGPLGFEVIRREIGDWNRFANRRQIGSYTGLCSGVSSSGRSRKMLSINKCGNPRLRSSLVTLAWRLVQYQPRCLLIQKWKHILLNAQSASSARKRAIVAVARQLAVDLWRWQTGRIQPAQLGRQMG

SEQ ID NO: 100162 - protein, 353 aa, unidentified
MKPKMESNTALLTVIGVDIGKEVFHIVGLGVDGKIAFRRKIRRLGLEAAFEKLPPSIVGMEACLSAHFVSRVLRGLGHEPRIIPAIYVKPFVKGQKNDYNDAEAIAEAALRPNLRVVQEKSQDQLDLQACHRVRSRLVSRRTATINQIRAFLIEQGIAVRAGARALRNSLFAILENRRDEISPRMASLILGLYEDWCWLDKRIETVTSEIEELSQVEPKCRRLMSVPGIGPVIATAIVAAISMGEAFERGRDFAAWLGLVPRQHSTGGRSVLGRISKRGSKYLRTLLIQAAKVLLMRPHNWARYSFGAWLKTASERLHRNKLAVALANKLARIAWSVLRNDKTFDTHLEAVAI

SEQ ID NO: 100163 - protein, 317 aa, unidentified
MKTVPFEQVILRGCGIDVHKDMVVATISGEGLKTETRSYKTFSSSLTELKEWLLSSGITHVAMESTGVYWKPVYKNLECPDMKVWIVNARHIKYVPGHKTDKKDSAWICKLLLAGLLKPSYIPEREQRELRDLTRYRNKLIQHVSSEKNRIVRILEDCNIKLSSVVCSLDGVVANKLIDMLIDKGHVTMDDITCIYHKKLEASPELLYQACEGFIEPHHIYMLQTIRKDMEQTKAIIADLTCRIKEVLSPYENVMELLQKIPGLSRKTVEDLIAEIGVDMEAFPTEKHLASWAGVCPGNNESAGKKKVVEPPMATNS

SEQ ID NO: 100164 - protein, 338 aa, unidentified
MIHVGVDLHQRFCYMTALEARGKILQAGTVTNETLALRRYFRQFRGKEVQVAVEACGFWPAFREVVEPEVKRLVLVHPQRVKAIASAKLKNDRVDSATLAHLLRCDLLPESWKADRGTQARRQQVRLRATLVRHRTRVKNQVHAVLHQQGLRSPVTDLFGKRGRLWLAEVKLPVQARESVNVCLRLLDGYSEEIQKQNLQLSEKAKQDKRAEWLMTIPGIGECSAMMLLAEIGDIGRFQDKEALCSYAGLVPRVRESAGKAARGGITRQGSPWMRWILVEAAQVATRCSPAAKRYYERLARKKHKHVARVALARKLLIAVYALLRDGVVFDEQKFATV

SEQ ID NO: 100165 - protein, 354 aa, unidentified
MIIIGVDYHPSFQQIAFLTEETGEYDERQLNHSEGEAERFYRDLHQRGMSVRVGMEASGYSRWFERLLAELGFELWIGDPAEIKTRRVKKQKTDRNDARLLLRLMREGTFPKIWIPSPENRDVRQLLWHRHRLVQMRTRIGNQLQALAMNEGRRRKWKLWSAQGRAELEKLVLGPWASRRRQELLELLDRLDPTIEELTAAVEQEAHKRAEALRLMTHPGVGPITALAFVLIIGTPERFARGKQIGSYMGMIPSEDSSAGKQRLGHISKQGSSLLRFLLVEAAHAAARINPEWRRRYIHLAMRRHKSIAKVAMGRRLGIRLYWMWRNHCEYSPSLEFGSYAGQLGTVHGVTTAP

SEQ ID NO: 100166 - protein, 518 aa, unidentified
MKVLYERVAGIDVHKDMVKVAIRSPGEKPWTRKTEILEFRTFYGVLQEMARELRRRGVTHVVMEASGVYTEPVYYALCEQDFEQVAVINPAHAKALRGHKTDAKDCARLAELFECGLLRGSYIPPAELKEVRDLTRYRMKTVQARTSEIQRLGKALESAGIKLGSVASSITGVASTAMIEALIDGERRGGVLADLAIGRMRAAGKLTDLSMALAGRFTEHHALLCRLHLDRIAVFDDAVDGLDKRITGKAARWQREAGLLTSVPGFGDVVAQAWLGEIGPAPHRHFATHEKLASWVTLCPGNNISARKRKHGRTGDAGTYIKPMLVQAAWAAIRVRGRLQARYNRLVRRFGGDKNPGAKKKAITAIAHTLLKIAYQVLKSGTPYQEPGADFYTRRESPEHKQAWLERQLQKLHPGCTITVTISPPEAALPAGTKTTSPIPTAPEPPPTQAPRPSRRTSQRHCPALATAQARVHCRAPTGDPVIVSGADDGTSTRSGGAGPRSERTGGPGPQLGRHRLA

SEQ ID NO: 100167 - protein, 405 aa, unidentified
MSNKVIFNLDELFISVGIDVGADFSWMSIALPNQQFVGKPYKILHNSIDSLTTAVSKIKEAEELYSLESRIFLESTGIYHYPLFCYLRDKGFNCSVINPIITKNSTNINIRKVHNDRFDSKKAALVGLKPDLKVSLMPSDLALNCRNLCREYYDLMDNRSAYVNKLQGELRIAFPQYLGIFSKVTINTSLTLLETYTSPSAFLKADKQEIIDIIKSTARFGLTYAQNKYNAIIQAATDANQFGYIIDSNIKRIRLYISFIRKYDEEINSILESLHELVDANEDSDFVKQIHLIETFKGAGFLSAVSIMGEIGDFSAFSKPKQLFAYFGLDPAVKQSGKFEGTKVQMSKRGSAIARRVIHTLTLQSISISRNGEAKNPVIREYYIKKCDSKPKLVAMGLFHIKYAT

SEQ ID NO: 100168 - protein, 316 aa, unidentified
MKGTPIYAGFDVAKDRLDVALRPSGEYVEATNDERGIRSVVGRLRKEGVALAVLEATGGLEQPIAAALALAGVPVAIVNPRQLRDFAKATGKLAKTDRIDAAVLAHFAEAVRPEPRPLADEHARELSAVVLRRRQILAMTTAEGNRARTAPKALRKRIEAHLRWLRKELARVDGELGRAVKESLVWKERAALLMSVPGVGPTLSATLLAELPELEHLDRRRLAALVGVAPLNRDSGTMRGIRTVWGGRSGVRTTLYMATLCATRHNPAIREFYGRLVASGKPKKVALTACMRKLLTILGAVLRNRTPWQQRLLAAS

SEQ ID NO: 100169 - protein, 343 aa, unidentified
MEHYAGIDVSLELSSVCVVDATGRIVREAKVPSEPEALVGFLGQLGLPLTRVGLEAGPLSQWLHAGLTGAGFEAVLLETRQVKAALSAMIVKTDRKDARGIAQLLRMGWYRPVHRKSPPAQEVRALLVGRKLLQGKLVDVELSIRGLLRGFGLKLGEVSKGRFAARVRELVAGQPMLERVVEPMLRARDVLRAEYQVLHRAVLAIVREDAVCRRLMTVPGVGALVAVTFASAVDDPARFRRSRAVGAHFGLTPKRYQSGETDVTGGISKAGDGMVRAALYEAAHAMLTRTGRFSTLKRWALEVAKRRGMKRAKVALARKLSALLHRLWVDGSEFRFGREAAEA

SEQ ID NO: 100170 - protein, 355 aa, unidentified
MTSTKYIGMDVHKESISIAVRNAAGKIVMECVIETKASTILQFFDGLRGDVQVTFEEGTWAAWLYDLLKPHVTKVVVCDPRRNALLQEGNQNDRVDARKLAEPLHNNQLRSVYHGDHGLRTLKELVRSYLTITRDLSRVMTRVKAIYRSWAILCTGKQVYASRHRAEWLAKISEPGVRRRAEFYYQQLDALRCLRQEVRRDLLAESKKHKAWKLLCQIPSIGPIRAAALLGILQTPHRFRTKRQLWTYGGVGIETSSSADHHLVKGQLERNKKQVEIRGLNRNYNHDLKNLFKGAAVVAATKPGPFAEFYAELLARGMRPEMARLTLARKIATIVLIVWKRGVCFDAQHLKPQTA

SEQ ID NO: 100171 - protein, 400 aa, unidentified
MLSIGIDVSKGKSTVCGMKPGGEIVYTPFEVQHTREGMSELVSLLRSSGEEVRAVLESTGSYHCPVVAALLENGIFVSVVNSLRMKRFCSQSIRKVKTDRIDAMQIALYGLAYWQELQPTRLPEDTYRELQLLARQYYQMTSLLIKAKVDFNAICDQVLPGMQELMSDHAGRHKLSDFVLRYCHTTHILEMGETRFRKDYCKWAEKKGYRNCERMAALIFATAQNGIPVLPNAPSTQIVITEAIRVLHTVEASRDAILTQMQALAKTLPEYSLVREMPCIGDTLAPRLIAEIGDVRRFHSKRALIAYAGIDAPPYQSGKFCANNRHISKRGNRYLRKTGYEVMQSYVMHKPANDPIFTFIEKKRGEGKSGKLAMVAGLNKFLRVYYGKVTELYRSLPAIE

SEQ ID NO: 100172 - protein, 392 aa, unidentified
MVIVGIDVASQKHDYFMMKPETGEVSSKSSVSITNSDKGYKKLHEDISAFCGDVDDYDVRIGLESTGIYHTNIIMFLLSQKYQVMMINPILTNMARKSDKVHCPKNDNLDAQTICKYLIEHPDDFSPYTTSSYHNEALKSLSRKRFLIVDDLRKAKLTVNNLVQIIFPEFKSLFSNIYGSTAIAILKQYQTPQKIAKARKSSLERLINKKCSCTAEKLIESAKSSVGMSNGYLAFQLIDAIEEMEHIQQRVNKFDEQIKSYVDELCPELLSIPGVGYVTAGLIMGEIKDIERFNTVDGLIAYSGIDIETYESGKYKAKKLRPTKKGSKYLRYALFQVARIAWQCDPIFSVYYHKKIAEGKHYYVALAHLQKKILRVVYSILKNRTPYEVKIA

SEQ ID NO: 100173 - protein, 449 aa, unidentified
MTKSKRRLKGMPIIHQGAAGIDIGSRFHVAAIPPDLSEQSVRTFQAFTADLHAMADWLIQTGVTTVAMESTGVYWVPVYEILEDRGLEVILANARDARGVPGRKTDVNDAQWLQKLHACGLLKASFRPDRQISALRSYLRQRERHLDYCAAHIQHMQKALTFMNLQLHHVISDVTGVTGMKIIRSIVRGQRDPKQLATLRDARCKATEETICAALAGNYQPEHLFALEQAVLLYDFYQLRVHDCDEKIAAALDTLNQATTVPDIPLPKPRHKTRQPNALNFDVRVPLYQLTGTDLTQIHGIGPYLALRLISECGTDLSRWPSAKHFTSWLTLSPGSKISGGKVLSSYSRKTNNRITAHLRLAATTVGRTDTALGAFYRRLSARIGKAKAVTATARKIAVLFYNAMRYGMDYKDPGAGHYEQQYRKRVVKGLHRRAAEFGFTLHEIECVS

SEQ ID NO: 100174 - protein, 338 aa, unidentified
MNTVTLLGIDIGKNTFHLHGQDARGNQLLRKKLNRSQLLPYLAQLPNCKIAMESCGGSQWLARQIEGLGHRVQLIAAQHVKAYVTGNKNDFIDAEAICEAASRPRTRSVPVKTLEQQILSTEHKLRMSWVDNRTGIINQVHGFLLEFGIIFPVGYAALEQVPALMENHELPIRLRNAVERMLLDIQRLTRDIKAIDVEIKQQLSEDAAGMRLLSIPGIGPLTASALLADVGDASTYKSSRDFAASLGLVPRQYSTGGKTSLLGISKRGDKYLRCLLVQGAHALMIRIDKRNDALGAWVRKLLASKPPNKVACALANKMARIVWAVLARGGSYNVQQMV

SEQ ID NO: 100175 - protein, 398 aa, unidentified
MRFVVGIDISKASFDVAIVDETGTVHARGRQTMERRGFDAFLETLEPYLSEELHIVMESTGIYHLPLLHYLVEQGLMCHLVNPMQIRHHIQSSTLRKSKTDAKDAEAIAQFGRLHASTLPVVDTAQLVSLRPLLREREALTKEIASLKTDIKGLVDRLFPELSKNTNIFTRSILYLLLQAPSRKRIRNLKEKKIARILQKASGNKATLEAKEILSWAKGSIGINDSGLETVLQSKIRRLLHTMQECEAIEEAIEKALGDSDIHEDIDTLTSVPGIGKTTATHFMGEIGDIHRFASVKQLCAYIGFDPAIRQSGSSILSRGHITKRGNRSLRRTLWQMALGVIRHTDKFRAYYDKKRGEGKSFKQAVVAVANKLLRTLFTLLKNKTPFQPDLASGGVTP

SEQ ID NO: 100176 - protein, 337 aa, unidentified
MHHKQRHIYVGIDLHRHHHTAVIINCWHERLGENKPAAFTDFFIKVRQLVPENMTLVFSLEDVGGYGRALATFLVDRGQMVKEVNPALSYAERNSYPTMQKSDSWDAECVARVLVNKLDFLPDAEPKDVYWSIKQLVTRRNALVKAQGALKNQLHVQLSHHYPSYKKFFAEVDGKTALAFGERYPSPSCLEEVRIDELTAFLQAVSHNTCSRKKAKEILELVKTDGTTTKQYQETRDFLVQSMVRDLRFKKQEMALVEGELRKLMKLLDYQPETMPGIDVVTASALVAEIGDIQRFPNANKLARYAGIAPVHFGSGGKGKDHKSKQGNRTLLRYFIN

SEQ ID NO: 100177 - protein, 314 aa, unidentified
MKNTLDVSISSYTKVRTKSFTNSPDGWRHLLDWLIAQKIQRVHACLESTGRYSLGIACALYEADHVVSIINPAQIRDFVRTKLGRNKTDGVDASHIREYCELFKPSPWAPPSEAHRRLGELQTIRSGIIAGLTEWKNRKNSGIVDAEAQALADATISHFTSQLGAVDKAIALTIDNDCDLQSKRDLLLSISGVGETLAGVVLAELPGPDVLRSSAEVVAYAGLNPRQHQSGTSIDRATRISKIGNAVLRAALYMPALSAMRYNSAIVALVSRLKSRGRLKPKQIVVAAMRKLLVLCFGVLKTGRPFDAAIAMGG

SEQ ID NO: 100178 - protein, 392 aa, unidentified
MVYVGIDVAKDKHDCFIANSDGEILYDVFTIQNNMDGFEDLLFKIKTVSKNPDKVKVGLEATGRYNCNLLGFLKSKGLPTIVINPLHTNAYRKSLSLRKTKTDKVDARAIASMIMSDVSLKPYSDTLYHNEDLKSLSRYRFDKVSDRAKLKQSVSRLVNIMFPELEKLVSTVHAKAVYELLSEFPGAHQVASANLKHLTLLLETASKGHFGRDKANEIREAARRSISTYLPAKSLELKHTINLIRELSAEIDEIEAEIKKIMDAIDSPILSVPGISYGLGSMIVSEIGDFSRFDNPDKILAFAGCSPTTYQSGQIYSSHAVMEKRGSKYLRWALINAARYVCIWEPTFAVYLEKKRSEGKHYYVALSHAAKKLVRLLYHLETTGEKYKPVSV

SEQ ID NO: 100179 - protein, 345 aa, unidentified
MEITTIGIDLAKNVFQVHGVNEHGKAVMKKQLKREQIAVFFANMPTCLIGMEACGGAHHWARKLQGCGHTVKLMAPQFVKPYVKTNKNDVADAEAICEAVARPNMRFVPIKNIEQQAVLSLHRVRQSFVKARTAQANQIRGLLTEFGLIIPQGIAHIAKRVPELIEDASNELPGSFRLLVQRLLEHMKELDRQADEIENQIVAWHRENADSRKLAKLPGIGPITASAMVATVGDAKSFENGRQMAAWLGLVPRQNSSGGRSVLLGISKRGDVYLRTLLIHGARSVLYAAQRKKQEVEGWLGALIKRRNANVAAVALANKNARIVWALLVHDREFRPDYTAANTPV

SEQ ID NO: 100180 - protein, 315 aa, unidentified
MFVGIDVAKAEVVVAVSPSGETWTSATTAAGLRALAKRLRRLAPELIVLEPSGGYELPVLEALLDAELRVSLVLPERVRDYAKSQGQRAKTDALDARVLAQYAAQLSAPRLAVLVPAQRALVRLVLRRQQIDGMLAAERQRLDQDSLYRDSPIRRDIEETIAYLEAKLRDLDRDLTATIAAEPTWAATATLLRSVPGVGPVTAATLLACVPELGTLSRHKIAALIGVAPMARESGRWKGQRRITGGRGMVRKVLYMAALVASRFNPPLRAFYERLRARGKNAKQALTACMRKLLVLLNALLKTQQPWQAPASTTA

SEQ ID NO: 100181 - protein, 407 aa, unidentified
MYYLGIDISKRSFTVSVLDEEGEAISKVLAFPCTGKGFEKLVDKISSLKLKKSEVVIGIEATGNLWENLYSFLKGYKVIILNPYQTRKYHQVLSKKAKTDKVDALVIAGLLRSKEALASYVPEEEVQVLRELVRLRHHLQKDKKNYLRKAYSLLNLVFPEYTNLVKDPFKKVSSMILKKYPTAVDMARARRTDLVKMARKIQGNNYSSELAEKLIQIAKESIYSGKASEVRGMVLRIIIDEIQFLKDKIKEIEDKIEEILSSDEPSSPQKRLLKISGVGPKTVAAFLGEVGGDVTRFSSANKLIGFIGWHPRISESGEKKNLHPKMSKKGPSALRASLYMAAVASLKHNPYLRSLYHRKISEGKESKQALICVGKKIISIMYSMLKYEADYDPQRIFFQLEKERILT

SEQ ID NO: 100182 - protein, 394 aa, unidentified
MRFAGVDIASETHVVALVDEDGKVLVKATAFTEDAAGYEKLFVQLGASAELLVAMEATGHYWKNLFAALAARGFSVALLNPLRTHRFAEEDLQRTKTDAIDALGIARFAAQKRPPATRLPDPATEELRELVRLRQRLLQDFGDRVRQLHRLVDLGFPEFTRYVKGLDSELASAILHDYPTAAAFQGVSAKRLAGLRYDGRHQVGAELAGLLIAAAKHSVGHHHGEAYRVQVRYACEDLDILRRRLRQLDRDIAGTLGAHQVGTLLTSIQGIGPNTAARLIAELGDPAHFRSPGALAAYVGVVPALSQSGKRKNTRAPSTAIGNAGLRAALWMPTLTAVRKNPWLRAHYQRLLARGKLPKVALVACMHKLLFAVYSVAKHRRPFVAHLTTAQAIP

SEQ ID NO: 100183 - protein, 449 aa, unidentified
MSRPQVIDDEQHEQVHERVAAIDVAKDSGMVCTRTPHPSRPGARRSTVWTVKARMNAVRALGRQLHKDGIEIVTLESTSDYWRIWFFILEACGLAVQLVNAAQARNLPGRPKTDKLDAQWLARLTEMGLLRASFVPPKAIRDLRDYTRARTRLIQERTRCWQRLEKLLEGALVKVSSVASKLTTVSAQDMIKAMIAGERDPHVLAGLARTRMRAKHDDLVQALDGMFDDHHGELAGLLLDQIAFLDGRIAQLGARAAELTAAMPEAWGINADGTTGPDAGGTPGAPVLPAVPRLAEIPGISEDLARAIIAETGLDMTRFPTAGHLVSWAGLCPSARQSGPRTRAGKKGQGNGYLRGSLGQAATGAARTATFLGERYHRIARRRGKAKAQVAVARSILVIIWHLLADPAARYTDLGASYYQTRTDTDRKLRNHIRQIQALGFEVTLTKTP

SEQ ID NO: 100184 - protein, 351 aa, unidentified
MAMVTEVVDAVIGGDTHKDTHTLEMLSPVGATIACLVIDNDEAGFETALAWIAEHAPGPRLVVGLEGTRSYGIGLARALTHAGFTVVEVEQPKRQQRRGRGKSDPIDAHLAALQVLRMDVERLPMPRADGDREALRILLVGRRELSDTQTRNKNQLKALLHAGDDVERTLASGHLSDARLSVIIRRRASATETRVQAIRRGEARRLAQAIRDAERELAVNNKQLRQIVESLAPGLLARYGIGPVTAAQAIISWSHVGRCRTEAAFAALAGASPVPASSGKVVRLRLSRGGDRHLNSALHTIAMTRWRGCPRTADYIARRRADGKGDGEIRRLLKRYIARELFRALNAAAAT

SEQ ID NO: 100185 - protein, 412 aa, unidentified
MQVVYERCAGLDVHLKTVVACVVVSGPDGTVQETVRTFSTMTADLERLAAWLAEQQVACVALESTGVYWLPIFTLLEEVGHQVVLVNPQHMKAVPGHKTDIADSKWLADLLRHGLLKASFIPPAAIRELRELQRYRTTLVRERSEETNRLQKVLESANLKLAVVASDILGVSGRQMLEAIVAGEEDPAVLAEFAKRRLRAKLDQLRLALEGRVKPHHRTMIRALLEHISFLEASIEQLDEEVGRRLAPFQQAMVALQSIPGISRVAAAAIIAEIGVDMGRFHSGKHFASWAGVCPGNKQSGGKRLSGATTNGNVWLRGVLGQVAWAAVRTKGTSFGARFRRIARRQGKQKALVAVMHNLLLVIHAVLRDGVLYQELGPEYYQPQDPVHRARAHVRHLEQLGFSVTIAPKEAA

SEQ ID NO: 100186 - protein, 287 aa, unidentified
MQTKNAVVYAGVDVAKATLQLHLQGRQSEFCNTAKGLRQLRTQLQKVAGAHIVCEATGGYERALVRVLHQEQIPVSVTNPAQVRAAARAQGQRAKTDRIDAQMLTDYGQRYEPKATPPPSATQDQLVALTQWLKQLIHGQALAKTQAEHHEHPFVRRQHAKLMAHLRSQIGAVEKQIEALVQQDAALQQRVKCLDEIKGVGPRTAWMVLAHLPELGQLNRQQVGALAGLAPWTRESGTMKGMSRIGGGRPVVRLALYMAALSAVRSNPVCGLSTSACEPRENCPRLR

SEQ ID NO: 100187 - protein, 412 aa, unidentified
MDVIHPRCCGLDVHQKTVAACVLVCQEEGKKSKEVRTFGTWTQDLQRLADWLGERGVTHVAMEATGIYWKPVWAVLAGQFQLLLVNAQHIKAVPGRKTDVKDSEWIADLLQHGLLRGSFVPPQGVQDLRDLTRYRARLTQERSAVANRIQKLLEEANIKLSSVASDVMGASGQQMLRAIIAGESDPERLAKMARKRMRTKIPELRLALEGKVREHHRDMLRRLMKHWSFLGDEIASRDDEIKSRMGPFERAVALWQTIPGINEITAWNLVAEVGVNMDQFPSPQHLASWAGLCPGNNESAGKRKSGRTRYGAPWLKRALCLAAWAASHTRNTYFSAQYRRLAARRGKKRAIIAVAHSLLIVIYCMLKQDRTYEELGGDHFDRLHAQRHKRYLVKRLEALGFQVNLAPAERAA

SEQ ID NO: 100188 - protein, 466 aa, unidentified
MENNYILYVGMDVSKGKADAAILKVSDRRSVKPKFLRKKLSFKFVKSEVASFLETVRSYSDVNCTSICFALEVTGIYSTNVYDYIKANLYENESIKFLNTDFVNQWRIAHNIAKSDPLDAQTISTIIGTDLDVQYVNDNVFENKNGYQDLKALVHRHYQIKKIYSQEINRLIAQCDCLFPELQYVFEPKSAAFIAVLSSYPTTHDIINASRVEVFDVVYEATKHRCSMDKVDKLFELCQNTLVPDDISSYGKSIILDLVENIKNIKGQLKSIERYIKDIASLNPAYKLLLTITGCGPITAATVIAETGNIRRFKNADCFVSYSGTSPRNKRSGTSVETMGKISKKGSRYLRHAIYMIAEFARRHNPVLKHQFERIKNGNKKRHKLANIAIANKIARYIYSIMKNKSSFVILHDHIMRLPEETRDTFFNSISLDFPKNTRKQIYQYSDINGELHRFVYIKTDEMIPA

SEQ ID NO: 100189 - protein, 428 aa, unidentified
MADHLNNKPYGAWIAIDIAKDFNAVLSETKEGKRQHFRMANSASDHDRFIAYLRTLPAPCIVGFEATGNYHRALGHRLVTAGFEVCFISLVASARYREVMFNSWDKNDPKDAAVLLELLKQGITQRYVDPLIAGHHDLQELSKTYYQVTLSRTRLQHSILTHYLPLYFPEMGKWWNSTRSAWWINYLLHFPIPGAVIKYSQEEFCQIASPVVGRKVNKAAKLIELYETALHSIGLPVEENSLACQTFRIQLRRYQEINDCRTQLELTAQAVLADNLDSAILQSVPGIGPINALTILAEGGDLRRFSHHRQFLKYCGFDLAKNQSGNYRGQEQISKRGNARLRLALWMSVNRAIQQPENSFQQKYLRYIKSAPQDKDLQRKARTAVAAKMARVVYGLVKSKQMYQGYYEKALPSGSIPLCRAVEAARTS

SEQ ID NO: 100190 - protein, 386 aa, unidentified
MKKDNIAKLQVTKSQIRRMAAKQRLTVGLDLGDRSSRYCILNEAGGKESEDQLATTKAGLEWLFGKMAACRIALEVGTHSPWVSRHLAGMGHEVIVANPRKVQLITQSVKKNDRIDAEQLARLARVDPQLLAPIRHREVEAQGDLAVIQARAELVDCRTALINTARGLAKPMGERLKSCDADYVKESLAEGLSEATQNAIRPLLKSVEEISKQIGVYDKKIQEIEKRYAETKVLKQVNGVGTLIALTYILTLEDAERFVHSRDVGPYLGLTRKLRDSGESQPEMGISKAGDVLLRRLLVQAAHCILRDGAPDSDLKVWGLTKVQAGAKTGSGKKGSKRRKKKAVVAVARKLAVLLHKLWVTGEVYDPQYNRKAVEAAQGKEKAAAA

SEQ ID NO: 100191 - protein, 352 aa, unidentified
MMVVGVDPHKQTHTAVAVDQLGRRQGCKTVRARREGHLQLLAWARSLAGAGLVFAVEDVRHVAGNLVRDLIAAGQVVVFVPPRLMAGERRGGRERGKSDPIDALAIARLAVREGPASLPAARLDERTRPVRLLTGHRDTLVRDRTRMVNRLRWHLHDLDPALAPAARALSRPAARARLAAALAAAPPGTVRQVAQAQLDRITSLSQEIDALQAEIGVLVTALAPALLAIPGVGVLTAAKIVGETGGITRFRSPAAFARHNGTAPIPVWSGNSDVQRLNRAGNRQLNAALHRIAVTQARCHQPARQLLARRAETTRDTTRASLRVLKRHLSDVVYHAMTADARHLDQPEPTAA

SEQ ID NO: 100192 - protein, 390 aa, unidentified
MIYVGIDVAKDKHDCFITNSDGEALFKSFTIPNNRKGFETLFQKVQSVSDDLTKVKVGLEATGHYSYNLLGFLLDKGLPTYVINPLHTNLFRKSQTLRKTKTDKVDAHTIAKMLLSDENLKPYSDTLYHNEELKSLTRYRFDKVRERAALKNSIARLVNILFPEIEKLVPTLHMKSIYALLLEFPSARHIAKAHLTRLTNLLNEASKGHYNRDTAIRFRDTARNSIGSFMPAKAMELKHTIELIQIISSEIDEIEFEIKRIMNDINSPILSIPGISYHMGAMIIAEIGDFSNFSSPDKILAYSGMSPSTYQSGHLTNCYAHMEKRGSRYLRYALYNATQHVCRWDKTFADYLAKKRSEGKHYNVAISHATKKLLRVLYHLEKTGELYQIA

SEQ ID NO: 100193 - protein, 346 aa, unidentified
MEQIIRIGMDTSKHIFQLHGVDAAERPVLCKRLGRQQMVAFFAKLPPTVIGIEACGAAHYWARVLGEFGHEVKLMAPQHVKPYVKRNKNDRRDAEGLCEATGRPTMRFVPVKTTEQQAALMLAGLREQMVARRTQLSNAIRGYAAEFGVTAAKGLDKIEPLLAQIARDESVPALARELFAMQGGEYAQLQVELKAIEVKLRAWHRGNADSRRLARIPGVGPIGATALVMKTPDPRAFSSGRHFAAWLGLTPKDHSTAGKTRLGKITRAGDERLRSLLVAGATAVIQQAKHGRGHPSPWLIALLKRKPPKLAAVALANKIARIAWKLMATGESYDGARLPGAPASAA

SEQ ID NO: 100194 - protein, 410 aa, unidentified
MEVLYQRCCGLDVHKETVVACLRVVSGGEVVREVRTFETTTASLMALSEWLAENGCTHVAMEATGVYWKPVWHILDDGDFQLILANAAHVKNVPGRKTDVNDATWLADLLAHGLIRASFVPDTQTQELRTLLRTRKQLVREKSSHILRVQKTLEDANIKLDSVITDIIGMSGRAMIEALIAGESNPAKLARLANYRLRASQEKLREALRGRVTKHHRFLLRLHLNQIDALDASIATIDQQVEAGIAPFRVAVELVTSIPGVSDLGALVIVSEIGTDMSRFPSEGQLISWAGMCPRNDESAGKRRSNRVRKGAPWLKTTLVQCAWAAVRKKDSYLKAQFLRIKARRGPKKAIMAVAASILTAIYHMLKDGTLYQDLGSNHFQSRSKGQQTKRLVKRLADLGYDVALTPLAS

SEQ ID NO: 100195 - protein, 413 aa, unidentified
MILGIDVGSETHYARAFDYRGIEYLKKPFKFSNTEAGFVTFKEWIIDLKERHEKDKVVLGMEPTEHYWFNLGKFLQDNEMKPVLVNPHHVKKSKELDDNNPTKNDRKDPKVIAGLVKEGRYMIPYLPEGVYADLRTASNMRFQIQSELTRIQNRISRWVNIYFPEYKTVYGKPDAVNGMMILKQAPLPEDILTLGVEGVNQIWRDAKMRAVGKARAKTLIEAARHSVGAKEGTMAARMEIRMLLEDYESRNNHLQEVMTLIEELVKQIPMAEKLMDIKGVGIKTVSGFLAEVGDVSRFSNPKELQKLAGLALVENSSGKHKGQTTISRRGRKRLRYLLFEVAMSLVAKNPEFRELHNYYTTRRLNPLKKMQSLMAIAAKLIRVFYAMLTKGVDYDPKKMVSDIKRPAAYLQAA

SEQ ID NO: 100196 - protein, 342 aa, unidentified
MDEYDGRQFVGIDLHRRRSVIVRQSESGEQLSAVRILNDPVSLQLELERAGVDPEVVLEATYGWYWAVDVLQACGARVHLAHPLGVKGFRYRRVKNDVRDAGDLADLLRMGRLPEAWIAPPATRELRELVRYRAKLVAIRSGLKAQVHAVLAKAGVLIAVSDVFGVGGRQRLAKVPLGSAYAERVRSLLELIDILDDHEARLAGLIAERLNTHRGYHAIQQVPGIGPTLAAVFAAEIGDVHRFAGPSYLCSWAGLTPRHRESDTVVHRGHITKQGSKLVRWAAIEAVQRQQTTAKISADKDRIEARRGKNIAKVAAARKLLTLVYYGLRDGHIRALDRTRAA

SEQ ID NO: 100197 - protein, 422 aa, unidentified
MSYCPVAGIDVSKRFSDMCILSPDNKIFAQEKIYHDETSINRANALLQKAERLFFSKPVIVMESTSHYHLILFQFFSEHGYDVIVVNPLQSNSMKDFSIRKRKTDRVDAFKLAMMYRTKTLRPSQIPQTATRALRQLCRHRAELLNDVSSYKNRLTALLDQTFPGYDKVFSDVGGVTSCAVLVRFPTPTILLVEEESELVEVIASASKAGYSFAKKKAGLLISAAQKAQAWGIHSCADETLIVCTIQMLRTLSESVLQIETAIDNLLAQIKEMRNNVSLLQSIPGIGSHSAALLLGEIGDISLFKKPKQLAAYFGLDPTERQSGSFRGTKNKLSKRGSPYARAALHMGVVNSICKRRKDSAANPVLLSYYEKKCKNKPAKVAQAASMHKLVFIIFAVLRDQKPFELKTPEQHAVEQGFVKAA

SEQ ID NO: 100198 - protein, 390 aa, unidentified
MIFVGIDVAKDKHDCFICNSDGEVLFNAFTIQNTIEGFNFLYQRIESVSKDFNKVKVGLEATGHYSYNLLGYLLDKGLTTFVINPLNTNLFRKSLSLRKTKTDKIDAHTIAMMLMSNVDLKSYSDILYHNEELKSLTRYRFYKVSERAKLKTTVSRLVNILFPELEKLVPSLHIKSVYTMLSEFPSAHHIAEAHLTKLTNLLHTASRGRYGKDTAIGFREAAKNSIGSDMPAKSLELKHTIKLIQELTAEIEEIEAEIKHIMDNINTPILSIPGISYTMGAMIVAEIGDFSKFSSPDKILAYSGMSPSTYQSGQITNSYSHMEKRGSRYLRYALYNAAKYVCHWDETFKNYLAKKRTEGKHYNVAISHAVKKLVRVIYHLQKTGQSYQAV

SEQ ID NO: 100199 - protein, 304 aa, unidentified
MDHFAGLDVLVKDTSVCIVDGNGRIVREVKVASEPEALLVVLSNTSYRFRGIGLEAGPLSQWLFSALGEAGLPVICVETRHMRAALKAQINKTDRNDARGMAQMMRVGLYRPVHVKTLRSQKLRMLLTHRKLLQSKAIAIENDLRGTLRNFGLKVGVVGAVRFEARIKELVENLPDLTALIEPLLVVRRVLREQLGILHHRLLVIVRDDHVCRRLMTVPGVGPVVALTYRATVDVPARFRKSKSVGAVFGLTCAKYQSGEVDRSGKISRCGDEMMRVMLYEAAQSMLRAKKWSPHVTGLNADYQ

SEQ ID NO: 100200 - protein, 356 aa, unidentified
MSMVAHTHPFVIGVDAHARNHALAILACPTGEVLDEGQFPATGAGLQRAVDWVARRTGGDLDTLWVVEGVGTYGARLARAAADAGYSVAEAARMNPRANRGVGKSDPLDACRIAQAVLPLDVAQLRRPRTDDGVRAAVRVLIASRDHITVERTAAINALTALLRVAELGVDARRALTGGQIALVAAWRTREEALASRVARAEAVRLAKRVLAADQEIASNAKQMTALLNSSPARKLLDQPGIGPVTAAVTLAAWSHPGRVRSEAAFASLAGVNPIPASSGNTVRHRINRGCDRRLNRALHMAVVTRMRVDPATRAYVEKRTAEGRTLREIRRCLKRYLARQIYRHLNAASDTLLAA

SEQ ID NO: 100201 - protein, 365 aa, unidentified
MIVIGTDPHKSQHTAAATQAATGELLDDLTVAAKPKGHAELLRWSRSLGRERLWAIEDCRHLTGNLERYLVAHGERVVRVAPKHMAGARRSVRERGKSDPIDALAVARAALREGPDQLPSAFLDDEAMQIKLLLDHREDLEQEATRIVGRLRWHLLDIWSELELPVRAFERMVWLDRIGRRLARAEQSTRVSICREQIRTLKALLRRSRELERELTVLVKVKNAALLELPGCGPLTAAKLIARPPGAERFPSEAHFARLAGVAPIPVSSGRNDRHRLDRGGDRQLNCALHRIAVTQKRMHAPAQDYLARKQAEGKTKREALRCLKRQLVRSVLGQLRPVSSDRTDPLAMNKLTKIKEPLQVAALT

SEQ ID NO: 100202 - protein, 326 aa, unidentified
MRGAVHMQITTIGLDIAKNVFQVHGIDAAEKVVVRKRLGRSQMLAFFKALPPCLVGMEACATAHYWARELTKLGHRVRLMPAKDVKAYVKRNKNDAADAEAICEAVRRPTMRFVAAKSAEQQGQLMQHRTRDLLMRQRTQVINALRAHLAELGIVAAQGDKGVKELLTIVTDKKDERLPIDARASVIVLAAQLEAVQTLIGSIERRIKTQHRANEASKRLETIPGIGVIGATAIAATVADPTIFRSGRDFAAWIGLVPRQDSTGGKQKLGPISKQTPEKYLWLTRLLARRPFKVVAVALANKMARMAWALLAHGGTYRAPEPAAAA

SEQ ID NO: 100203 - protein, 431 aa, unidentified
MSKYLNSLVVGIDVASEFSFVSVLAPNGSQFRKPFKVFHTADGFNYLIEQIKKAEEEFSTRPVFFMESTGVYHLTLFHFLKDMKFETFVINPLVTNCNKNKNIRKVKNDRNDALSIAQLGKFEDIKVSSDSDIKIFTLKLLVRDYYKLIDTRSGFKKKLSSSLCISFSGYQKVFSNTCGLVSIKILKQYPTPQAVISAPKQDIIDILLNARKGLKWAEKKYFNLVEASKNAQFVSLSSQWLSVSITTSIAIYQAIDAEIATLLKKIKCFIDSDEMSLAFRKNILLLMSIPGIGYNTAITILAEIGGIDKFITPNQLVAFFGVDPAVNESGKFKGDKVKMSKRGTRFGRRALYAVALASIRMKRNGEATNPVLLNYYQENLKGKKAKVALVAVMHKLIKYLFAVLRNQQEYQIRDPKLHQRMFLENNNIQAA

SEQ ID NO: 100204 - protein, 405 aa, unidentified
MAAPEQVDVWIGLDVGKEEHFAEVLDDHGERIFVRSVVNDEAALAGLLDRAAEHGTPGLVIDQPGSIAQLALAVARAREVPVAYVPGLVMRRAADLYPGEAKTDRRDAFVIADTGRTRRKQVHWLDAGSDELLERLRILNGFDIDLAADQTRLSNRLRDALTSVSPALERALGARLHQAGVRDLLAKYPTLTAMKAAGRGHITRVIKARSPRLATKLTDTVTSALEAQSVTVPAEVTIGRVVSELASELDRVYARREALASEIEEAFLAHPFGELLSSMPGIGPRTGSRILAEIGDGSRFANGDKLASYAGLAPVTRQSGKSINGESKSRRGNHRLKNAMFLAAFASLRSPDSKAFYDRKRAEGKRHNAAVMCLARRRCNVILAMLATQTPYQTRHKPTKLAEAA

SEQ ID NO: 100205 - protein, 401 aa, unidentified
MAEPDRVWVGIDVGKSTHHACAIDDTGKVVWSKKIPNEQAAIEDLIAQCGRIANHVVWAIDLTSPPAALLIAVLLSAKAEVVYVPGRTVNTMSHAFRGEGKTDAKDARVIAETARHRRDLSPVVPGEDLVAELRSLTAYRSDLMADWVRGVNRLRSMLTAIFPALEAAFDYSTRAPLILVSAMCTPGEIRSAKRAGVIKHLRKNRAWPNNIDTIADKALAAAAGQIITLPGEAGTAALIKQLAARLLDLDRQIKDIDKQITNKFREHPSAAIIESMPGMGPHLGAEFLVITGGNMAAFTNPGRLASFAGLVPVPRDSGRITGNLHRPKRYNRRLRRVFYLAALSSLKIEGPSRAFYDRKRSENHIHTQALLALARRHVDVLWALLRDNRTWQPQQPTVAAA

SEQ ID NO: 100206 - protein, 310 aa, unidentified
MDKFVGIDISKDSLDLCIEPDGEVLHLAYDDKGIAQVVKRLAQGAPTLIVMEATGGLEMRLASELAAKGLPVAVINPRQARDFAKATGQLAKTDLVDAAVLAAFARAIRPAVRPIKDVDTRELDDLVTRRRQLIDMRVQETLRLGTASTLQRKSVTAHIAWLDKRIVKLDDDLSKRLRASDTWRTKDDLLQGIPGVGAITSLTMLAKCPELGQMNRREIAALVGVAPRANDSGKHRGKRFVWGGRADVRAVLYMATVSAIRCNNDIKAFAARLKQAGKPAKVILVACMRKLLTIMNAMVKNNAQWAPKTA

SEQ ID NO: 100207 - protein, 328 aa, unidentified
MREFTGIDVSKEKFDAGWLRDVKTGKKKTKVFKNTAAGHQQVADWLLKNLKVPAEDIVITLEPTGVYHEALMYFLYDYGFQILLVNPGKAKKYAESINQLHKTDKLDAVTLAWYGHAQYHQLRLWQPEAPEIRELKVMIRRLDALEKDLQREQNRQEAAQVSLSSDRVAQSLNDMIATLKAEIQRLQQDIDDHIDRFPELKRNRELLESVKGIGPVMSRELVYLFASKRFKSAKQVAAYLGLIPRLHDSGKLKGRTTLSKIGSARIRAKLYMAAVCASTHNPDIKAQKARLLKAGKMKMQALGAAMRKLIQICFGVIKHQSEYQPQLV

SEQ ID NO: 100208 - protein, 351 aa, unidentified
MQIVGALDVHRRQITYKTLALASGESSRGRISPAAREPLRQWLERFAGLEGEFVLEGTTGWRFVVEEIERAGHVARLADPAETAARRGRKRRAKTDDADCDLQLRLLLAGELPEAWIPPAGILELRTRVRLRKTLIDQRTAWLQRLQAQLFHQGVPAGLKPGTAAGRDALARVELSPAGREAVELCLRMLDQLDRELVPIDRALRAFARRQPGCRALTGQLYGVGAVTATAILAELGDARRFRSSDDAVRHCGLDVTVWQSDRKRAAGHLSHQGPSLLRWALFEAAQCAARRSSPDHAYYLDVAKRIDHNRACLSVARKLCRRAHHILRELGDDALAPSDPPRAELVDAAA

SEQ ID NO: 100209 - protein, 379 aa, unidentified
MTKTMTRSPEFTVAEPCLLLAFELSARSWKLGFTTGHEQRPRLRDVPAGAVDRVLEEVRRAKARFGLPADARVISCYEAGRESFWIHRWAVAQGWTNYVVDSSSIEVNRRARRAKTDRLDLAGLLRSLTRYLHGEDHVWHVVRVPSETEEDARHLHRWRETLQQERTRMINRLRGLLTTQGVDLPVRADFLERVATVQRWDGTPLPPGLTQRLLAVWAQLTSLTRQLAEVDAARAALPADPATTTGRWVIRLATLRGIGSIGAWSLTTEIFGWRQIRNGRELGALVGLVPAPYQSGETSHDQGITRAGNRHVRRLVVQLAWSWLRYQPTSALSRWYRTRFDRGKRLRRIGIVALARKLVIAWWRYGDTGIVPEGAVLKA

SEQ ID NO: 100210 - protein, 522 aa, unidentified
MAFKRSRHSSKSGAAEFLQQPNGVVHARVQKVGPEHFGIISVDCAKARSKWMLADFYGNILIPPTEVAHNRVELAAAVKQVRKGLAKHDLRDCLVAVERTGRYHHPVKNAFRKADFETRVVHPFTTKQFRQPADPDNKTDDTDLKAIHRAAVNGFALLEAAPVESWRQLQLFIRHRRDLVRKSSALACQIREHLDAALPGYAACFDKLWESNVAFRLVQQFGSAQGMLEAGETALGEFLYQQKVRFQQRTLVTVLTWAKRAADPDVAADLHRQIALAYHDDHARKSLEIIKLEREIAHRLAQTPYILLLSCPGINVVSAADFAGEMGPIENYANSRSITGRAGLFPARHQSDRVDYTGHLARRSNRALRAAILGIADNLILCNAHFHNLANLWKLAGKDPRMTHVKVAARFCRIAFQMVAGRQVFCHPCLRQRGYILDKLLAFHVEQQTPMQETMRDLHYAITHIPKSEHAAEAKPLHERMQTTRERGKKGPQPIRELIAIVLARLGVGVINSNPSGEEDLT

SEQ ID NO: 100211 - protein, 409 aa, unidentified
MSNNVAAIDVHKKLLVVVVADTAQPDVILQARRFGTGAAELHHLACWLEELGATEAVMESTAQYWKPVWMELETRMRLHLAQAQSNRAPKGRKTDFGDTKRLLKRFVAGELMLSFVPGTEQRAWRMVTRGRLQLVRERVHLQNQIESLLEEGRIKLSSVISDLLGASGWRILRAMAKGETNAETLAELGDPHLRCGREVLVDALTGSMSDIHRQLLKQHLDRIELVDRQIEELNKLAAAQMQEHQAAVVRLIEVPGIGAEAAQEILAEIGPAAATFPSAAQLASWIGVCPGSSQSADQNHSGRSAKGNRFMRRLLCQAAHAAARTKGSYLEALFKRLIVRLGYVKAIWAIAHRLCLIAWNILHKGVRYVEHCEAVNPKAVKRCINHHLKALRRLGYKIPATAPTITLTR

SEQ ID NO: 100212 - protein, 344 aa, unidentified
MAQVTTARVTTVGIDIAKNGVCIHGVDAHGHVVVKKRLARQKVLPFLTQLPPCLIGMEASGGAHYWAREFTQLGHTVKLMSPQFVKPYVQSQKNDPNDAAGICEAVERPRMRGVPVKSITQQDVQALHRIRERQIKARTALINQIRGLLMEYGIVIPQRASQVRHKLPIVLEDAENGLTATAREWLHALAEELQALDQRIAATDQQIERVCEADEACQRLAQLPGIGPLTATALVAAVGDATEFKNGRQFAAWLGLVPRQHSTGGKTTLLGMTKRGNCYLRTLLIHGARAVLRVVDRKTDARSRWLQGVKARRGMNCASVAQANKTARVAWALLAKGDRYRHAA

SEQ ID NO: 100213 - protein, 322 aa, unidentified
MKMAKPNIISAGIDTSKDKLDVAIHGIVGGFIVSNDAAGWAVLAERLQAAGVGRIGIEATGGYERGALRALQQAGFEVVLLQPLQVKAFARLRLRRAKTDKLDAELIAHCTHVMDAHNKMPPDARFDALADLLTYIEQIGEDIVRFKTRLEQTRDERVRQLVQDQIRVFEKQKIAELKRLRNQVLAYDDLAERYRLVMSIPAIGIVAALSLVVRMPELGQVSREEAASLAGVAPFVHQSGTHKGETHIGGGRARLRRALYMPAFVGALHWNPALMALYQRLIARGKSHKCAVVACMRKLVIFANTVVARGTPWETNGPITIA

SEQ ID NO: 100214 - protein, 400 aa, unidentified
MLSIGIDVSKGKSTVCGMKPGGEIVYAPFEVQHTREGMSELVSLLHNSGEEVRVVLESTGSYHCPVVAALLENGIFVSVVNSLRMKRFCSQSIRKVKTDRIDAMQIALYGLAYWQELQPTKLPEDTYRELQLLARQYYQMTSMLIKAKVDFNAICDQVLPGMQELMSDHAGRHKLSDFVLQYCHTTHILEMGETRFRKDYCKWAEKKGYRNCERMAALIFATAQNGIPVLPNAPSTQIVITEAIRVLHTVEASRDAILTQMQALAKTLPEYSLVREMPCIGDTLAPRLIAEIGDVRRFHSKRALIAYAGIDAPPYQSGKFCANNRHISKRGNRYLRKTGYEVMQSYVMHKPANDPIFTFIEKKRGEGKSGKLAMVAGLNKFLRVYYGKVTELYRSLPAIE

SEQ ID NO: 100215 - protein, 310 aa, unidentified
MKQSIVYIGIDVAKAHLDVAWAEQSRRFNNDKVVRATLVKWIKQKQSGPVQVICEASGGYEQELLDALAEAALAVSLVQATRVRQYARAAGILAKTDKVDARVLARFGAAMRPEPTSPRSAAQKLLRELESQRRHLSDLLVAEQNRIEQLHDEKLRGLARTLLGTIKKQIARIDARIATVITQDQGLCQKAQKLTGVKGVGERTAALLLAQMPELGTLNRREAAALAGLAPFNRDSGTMRGKRTIFAGRRAVRRGLYMAALVASRRNPILADFYRRLRTKDKPHKVALTAVMRKLLLALNQALASTQSFA

SEQ ID NO: 100216 - protein, 352 aa, unidentified
MIVKQVAGIDVSQNELVVCLGSMSDTWVPDLYANKTFPNTNAGFKAFTGWVSKSTIDAVPVRYVMEATGVYHQKLAYFLNEAELEVTIVLPNKISNYARSLDTKTVTDKTASQAIAQFGLERKLDLWEKPQEVYNKIKHLTRERDQLVSERTMLKNQLHAELAQAYPYKKSLDRVRKRIALLDKQEKEIMAELRGIIASDPEVQKIVMILCSIPGIGMLTAATVLAETNGFELIRNKRQLTSYAGLDVKEKQSGTSIKGKPRISKKGNKYLRKALYLPALSAIRHEETFKNIFVRLVSRHGIKMKAAVAIQRKLLELMFTLFKTKTKFDRKILGKGILKEMVVLEELGGEHE

SEQ ID NO: 100217 - protein, 404 aa, unidentified
MKTYILRDSQTVERQKSVRRPRPQPTAPTPAKGPVLFNGLDVHNDSIAVSIAPSDSTEVRRYGIIGGEHDDVLKLVKKLQASHPGTTLKFCYEAGPRGFALCRCLRSHGLECILVCPSKVPRKPGERVKTDRRDADQLARLYRAGELTGIYVPEPEDEAMRDLIRARFQVGKAQHRARQQLKMYLLRHNLRYGGQTPWTPAHLRYLAEIKMPFPVQQIVFQEMLEVISEATARLERYDQEIERAVPGWRWEPVVRALMALRGMALLHAATLVAELGDFHRFEHPGQLMGYLGLVPSEHTTGTDRQQGGITKMGNGPARRALIEAAWQYCVPARISPHLKKRQEGLPKAITDIAWKAQLRLHHRYQHLTRVSKKKSQVAVTAVARELSGFVWAIGCRVQPRPAKP

SEQ ID NO: 100218 - protein, 410 aa, unidentified
MQTLVERGCGLDVHQATVVACLLIVLQNGRVQKQVRTFGTTTRELMGLREWLLSESCTHVAMESTGVYWKPIYAILEGAFEIVVANAQHVKKVPGRKTDVKDAEWIADLLCHGLLRPSFVPPSPIRELRDLTRYRRKLVESRTAERNRLLKLLETANIKLASVATDVFGVSGLLMLHALVEGKATAQEMAELAKKQLRKKIPELEMALEGKVEEHHRFLLRVQLRRLRTVEEDLGILEQRIQEKLKPYAAQFTLLQEIPGIDETLAAAIIAELGVDMGVFENVSQLSSWAGVCPGNNESAGKRRSSRIPKGNVYLKTALVEAANSAAKAKGTYLRDKFYRLKARRGYKRAAVAVGHKILVAIYHMLSHQVCYNELGDVYLDNLNKHHVTRNLVNRLERLGYAVTLQQKAA

SEQ ID NO: 100219 - protein, 349 aa, unidentified
MATVYCGVDFHARKQTVSYLTTEDGEIKQTELAHEIEKVRSFYAELRQVGQVIVGFESSGYAAWFEEMLEELGCEIWVGHAGQIRKCATRRQKNDRRDADLILELMLRGDFPRLHRYSRASREVLQQLRYRQRLVKMRTMTINSLRFMTVSRGVTLRGKLQSRRGQARLLALALPSPLDRQRDELCRLLLELQQKIEAVEKCLAETAALDQRVQLLRTHPGIGPLTSLCLAATLEQIERFPNSRKVTAYVGLDPVEDSSGERRRIGSISKQGSRLLRLLLNEAGQVAARHDQELGRVYRRLLVRRGHATAKVAVARHLLVRAFIMLRDEIDYAEFCRRGVAARSSRASG

SEQ ID NO: 100220 - protein, 411 aa, unidentified
MKKHTYRSKNVNKINFTQVKERLANESAVFAIDIAKEKQYGLLSNASGTVSELIWWTHPEQTVELLNALKGLECQIDIVIESTGTYGDALRFQFRTCGFEIYQMNAKRVKDASEIYDGVPSMHDAKSAMIITRLHRDGLSKPWIELNNDERTMNALRREYDMHQSQYQRNQNRLEAYLSRHWPEVGYLLSLNSVTLEKLLIEYGSPAGIATDAENAAKSMRLWGRNLLSDAKIEAVISCACNTLGQPCIESELRYLQALAKEMQHSRLQQKQAKQALEESIKSNDDLKELGALIGMVTTAVLFSCHLDPRKYDCARSYQKALGLNLKEKSSGRHVGQLRITKRGSSVARNYLYFATLRLIKNNAVVKAWYLNKVDPRAKNKTVIAVMRKLSKALWYVGRGDRFDATKLFTV

SEQ ID NO: 100221 - protein, 393 aa, unidentified
MICVGIDVAKDKHDCFILSSEGEVLADVFTIQNNAEGFDMLLQTIRRCTRPEDKIKVGLEATGHYSYNILGFLLDKGLSTYVINPLHTNLYRKSLSLRKTKTDRVDARTIAAMLMSDVDLKSYTDTAYHNEELKSLTRYRFDKVRERAKLKQSVSRLVTILFPELEKLVPTLHMESVYALLSEFPGAKQVAEAHLTHLKAVLYGASKGRYGRDMATTLRDAARCSVGSVMPAKSLELQHTIRLIRELDAEIEDIETAIQSMMDEIQSPITTIPGIGVRMGAMILAEIGDFSRFGSPDKILAYAGMSPSTYQSGQLSLSGAYSHMEKRGSRYLRYALYNATKYVCLWDPTFAAYLAKKRGEGKHYNVAISHAAKKLVRLIYAMEKSKQSYRNAA

SEQ ID NO: 100222 - protein, 403 aa, unidentified
MNAVGIDISKGKCMVAILRPFGEVVASPFEIQHTAHELRRLVERLKSLEGETRIVMEHTGNYYLPVAMHLHEAGLYVSVVNAILVHDYGQNSLRRVKTDKKDAVKIASYALSHWLDLPQYAPEEDVRHMLKTCARQCNQYVKQSVMLKNSLIALLDQTFPSVNMLFSSPPRKGDGHEKWIDFVGKFWHCECVNSLSKNVFTQRYQKWCKRTGYNFLSTKAAAIYNSACIQVSTLPRSTFAKQLITQAVSQLNSLSETLALIRQQMLSLASGLPEFPVVMAMQGIGNVLGPQLMAEIGDVRRFNRKQSLVAFAGIDAPPFQSGAFEAQSTGISKRGSSSLRKTLFQVMDCLLKHAPSHDAVFQYLDKKRGEGKHYYVYMMAGANKFRRIYYARVKEHLGSLAVQ

SEQ ID NO: 100223 - protein, 444 aa, unidentified
MAVRKREDEVFPNAAGIDVGASSHWVAVPRHLAEQAGCEPVREVGAMTDDLKDLADWLIRCGVDTVALESTGVYWIPVYEVLEQRGLKVWLVDARQMKYVPGRKSDVQDCQWLQKLMSLGLLRAAWRPASDVCIVRAIARQREILVTEQASWVQRMQKALVQMNIQLTEVITDVMGQTGQAIIRDIVAGQRDPRVLARHRHRRVKASEDDIVKALTGNWRDEHLFVLGQALAMYDDIARHLQTCNAKLDELLAERGAANVDIGKAPKAGSKARMEFDVRQALANWAGVDLTRINGLGVTTVMKLITEVGPDVSRFATVKHFCSWLGLCPGTKISGGKVLSSGTKRSANRARQALKMAAMNLSHSDSALGAFYRRLCTRMDKPRANTATAHKLARMVYFMLTRGEAYVDQGQQHYDELQRQRSIAALQRRAAALGFQINPVMAAA

SEQ ID NO: 100224 - protein, 360 aa, unidentified
MKLIGIDIGKNKHFFCVMDQQTGEIISQPVSFSNDKEGFDFLVQEIKSYPKDSILIGMEDTGHYHFALLKYLLDLQYTVALINPKTTDFNRKMQGGITKNDKLDTINICDVLDTPERKKQYRITKVNSFDLYEQKQLTRHHHNLKEEENVYKNRLQKCIDIVFPEFNKLFNSKYGIVYMNILKMFGSAENIANTDIRTIRKCFEIEGRGNRISLTPERLKECARSSIGISSSAEVIQIKHLTAQIELIEEQLTEIDKKIEEFSIQNNSPILSIPGISHFSGTSILAELGDISNYSKPSQIIKFAGVAPLHYESSQFNAQHTAITKKGSKYLRKTLYQIILPVIRHNPVSVSYTHLRAHET

SEQ ID NO: 100225 - protein, 393 aa, unidentified
MICVGIDVAKDKHDCFILGSEGEVLAEVFTVPNNAEGFDKLLQTIRRCARPEDKIKVGLEATGHYSYNILGFLLDKGLPTYVINPLHTNLYRKSLSLRKTKTDRVDARTIAAMLMSDVDLKSYTDTAYHNEELKSLTRYRFDKVRERAKLKQSVSRLVTILFPELEKLVPTLHMASVYALLSEFPGAKQVAGAHLTHLKAVLYDASKGRYGRDMAAMLRETARCSVGSVMPAKSLELQHTIRLIRELDTEIEDIEAAIQSIMDEIQSPITTIPGIGVRMGAMILAEIGNFSRFDSPDKILAYAGMSPSTYQSGQLSLSGAYSHMEKRGSRYLRYALYNAAKYVCLWDPNFAAYLAKKRAEGKHYNVALSHAAKKLVRLIYALEKSRQPYNTVA

SEQ ID NO: 100226 - protein, 391 aa, unidentified
MIFIGIDAAKDKHDCFIVSSEGEVLCDVFTISNTLDGFNDLLSKIKSFSKDLSKTKVGLEATGHYSYNLLGFLLDNSLPTYVLNPLHTNLYRKSLSLRKTKTDKVDARTIASMLMSCQSLKPYTRALYHNEELKSLTRYRFDKVSERAKLKSSVSRLTTILFPELEKLVSQVHCVSVYALLSEFPSAKHIANANLTRLTNLLYSASKGHYNRDTAIRLREAARNSIGSVMPAKSLELKHTIKLIGELDDEISEIEAAIKQIVDSLGTTVLTIPGIGYATAASILAEVGDFSNFETPDKILAFAGMSPSTYQSGQLTNCYAHMEKRGSKYLRFALYNATKYVCIYDSNFAAYLTKKRSEGKHYNVAISHAAKKLVRLIFALEKSHLPYMPVA

SEQ ID NO: 100227 - protein, 344 aa, unidentified
MSTIQIGVDLAKSVFEVAVSGEPGVVQSRHRLTRTAFPRFLAGHPPAEVLLEACGSAHHWGREAQRLGHRVRLLHPADVARYRDGNKTDRADAKALLEAARNQGLTPVPVKSVEQQAIVALHRVRAGYLRTRTARINALRGHLRELGYAIPIGARRVTVDARTALADETVPGFLRQVLLDLIKEIRSLEAKAESVRTSLSSLIPQMPDAQRLLTVPGVGVLTATALVAFVGDIHRFKSGRHFASWLGLTPREHSSGASRRLGSITRKGNSYLRMLLIHGARSALRAGAVTDQPDDLRIWAREVSARHCHNVAAVALANKLARICWRVWHDGRDFQRREGQITNC

SEQ ID NO: 100228 - protein, 398 aa, unidentified
MTESSDYESVQVFIGVDVGKDTHHAVAINRSGKRLFDKALPNDENKLRSLISDLKQHGQILLVVDQPATIGALPVAVARSEGVLVGYLPGLVMRRIADLHAGEAKTDARDAAIIAEAARTLPHALRTLKLADEQIAELSMLCGFDDDLAAQTTQASNRIRGLLTQIHPALERVLGPRLDHPAVLDLLQRYPSPEKLASLGEKKLAAQLCKLAPRLGKRLAADIAQALAEQTVVVPGTNAAAVVLPRLALQLITLRKQRDEVALAVEQRVLAHPLYPVLTSMPGVGVRTAARLLTEVACRAFASVAHLAAYAGLAPVTRRSGSSIRGEHPSRRGNKALKRALFLSAFAALRDPLSRAYYTRKMSQGKRHNQALIALARRRCDVLFAMMRDGTFYTPQAS

SEQ ID NO: 100229 - protein, 406 aa, unidentified
MQVVHERCCGLDVHKRVIVACVLSGRERTIRSFGTMTEDLEGVAAWLEECDVTHVAMESTGVFWKPIHNVLEGHAFELLVVNAQHMKAIPGKKTDVKDAEWIADLLRHGLLKPSFVPSRAQRELRELVRYRKALVRERAAESNRVQKVLEGANVKLASVATRVLGLSGRAMVEALSSGVTDPTELADLARGRLRANHADLQRALRGMVGPHQQMLLAAQLRHLHYLDGEIESLSQEIASREQPDEAALAQLQTIPGVGRRTAEVILAEVGADLSRFPSAGHLASWAGLCPGQNESAGKRRSGRTRKGSAALREALTEAARAAARTRQCYLAAQYRRIAARRGANRVAVAVAHSILVIAYHLLTKGSVYEDLGSNYFDDRDKVATVNRAVARIKRLGYEVTVTPHAA

SEQ ID NO: 100230 - protein, 354 aa, unidentified
MITLGVDAHKKMHVAVAVDEAGHELGEWSGTNSKKGWRSVLVWSDSFGPERQWGIEGAWNYGRGLAQQLVTSGETVYEINTRWTALGRRRAKKLDKTDRLDARAVARFVRGEAPALPVVYADDDTAVLDLLCVEREALLVEAGRLRNQLHALLMQVDPEYGVRLPKLDSVAGIKATTNYPLPKADGLQRRRASGVRRLAVRLSLTLLHARDLAGQIEELAALRFAPLTRLCGISLLTAGTLAGILGPGRRFGTDAQLAAYAGVAPLEASSAGRVRHRLNRGGNRRLNAVLYRIALTQAHHSQEARAYLDRRTAEGKTRREAVRALKRYIVRAVWRLWQQCEPAMELPSAIVAAA

SEQ ID NO: 100231 - protein, 368 aa, unidentified
MGRKSSKLFVGMDVHKESIDIALAEEGGEVRHYGGIGGEQSALIRTVRKLESLGKSLVFVYEAGPCGYWIYRLLQERGHPCWVVAPSNTPRRVRDRIKTDRRDSLKLAGLARAGELTPIYVPDAADEAMRDLVRAREDAVATQRQARHRLAALLLRNDIRYGGKTAWTEAHRRWIARLHLPGAAQRIAFEEYVLTVDEATASVQRLTRSMEQELGHWRWQPVVHALQACRGIQLIHAVRIVAEVGDLSRFTHPRQLMAYLGLIPSEDSSGERRRQGPITKAGNRSARRALVEAAWAYRHHAAVSPLIVRRQTGLAKPVLDIAWKAQLRLCARFRRLSARGINRNKIVVAVARELAGFVWAIGQRVKLN

SEQ ID NO: 100232 - protein, 465 aa, unidentified
MARKTKNVKSKDRQRLPRSLKTIYANAAGIDLGSREHWVCGPPREDGTPNVQRFGTTTPELFRLADWLKEQGVKTVAMESTGVYWIPLFEILDNRGLEVLLVNARHISNVPGRKTDMLDCQWIQLLHSCGLLRGSFRPSDDICRLRALIRERNTMVEQRSDWVRRMQKALDQMNVCVHHAVSDITGVTGMAILRAIVEGERDPFALARLRDARCRKSEKQIAEELTGNWRPEHLFNLRQALKMYDQLCAVIEDYDTEILTYITKHQPEQAASPLAPAHSSKSKARTLAKRGQEPLRQALYAFSGFDLTTIDGIGVDTASVILSELGLDFSMFPDETHFVSYLRLAPNLSISAGKKVPSKFKPTTCTRVSNALRMAALTLRNSKSALGGLYRRIAWRKGASVAIFATARKLAQLIYRLVRYGQAYVDTGTEAYDARFNQRRLRFYTKALKEMGYTLQPLTENNLAA

SEQ ID NO: 100233 - protein, 333 aa, unidentified
MNFTHFIGIDVSKDTLDFAVVATNKILFHQQVSNDKKGITQFLKELRKQTKAKLVDCLFCLEFTGIYNNPLLNTLHSQTSIWVERAAHIKDSLGLCRGKTDKLDSKRIALFAYKNREDARLWSPPRQVISQLDRLTAQRARLTKAIKLLKTPLSNTEGFLSKDDRKSNQQACCQSLIALKADLKATDKSIAEVVENDPELKHLFERMTSIKGISQTTAVEVIITTNEFKSITDPKKYAFYAGVVPFEHSSGQRKGKPKVSQMANKKVKSLLHLAALSAIQHCSELKAYYERKVAEGKNKMLVINNVRNKLVLRIFACVRDDRNYDEKYKHALA

SEQ ID NO: 100234 - protein, 355 aa, unidentified
MDSKKYMGMDVHKEAISIAVLNASGKLVMESIIATKAITIVEFMQGLRGELHVTFEEGTWSAWLYDLLKPHVQKTVVCDPRRNALLKDGSKSDRIDARKLAQLLYTNMLRPVYHGESGVRTLKELARSYLTISKDQVRVMTRLKALYRSWAIPCSGKQVYAVRHRAEWLDKIREVGVRRRAEFYYQQLDALRCLRREVRRDLLTESAKHRASKRLRQIPSIGPIRAALLIAILQTPHRFRTKRQLWTYSGFGIETHDSGEHRYVDGELRRSKKKVSVRGLNRNYNHDLKNLFKSAATNAAAKPGPLQEFYTALLVKGIRPDMARLTLARKIAAITLTIWKKGKSFDAQHLKHRTA

SEQ ID NO: 100235 - protein, 373 aa, unidentified
MKYSTVYVGMDVHKESFSLCCYTNEKEQAEYPQKVDGHYSKVINYIEAMRFHYGDDALFICGYEAGCLGFTLYRQLTDHNVKCVILAPTTMLQQKGKKKVKTDKRDAALIARCLAHHDYSPVHIPTEQDEQTKEYIRMRDDHKLALKKVKQQILSFCLRHNYRFDGTANHWTQAHLRWLKSLKPKGLYAEILQEYLLTYDNLTDKLERFDNRIEELASNETYQENVHKLSCFIGVRTVTALAVLTEIGDFKRFASAQHFASYIGLTPGEDSSGNDQHRLGITKAGNRHVRSLLVEAAQSYSRGQIGFKSKALKTRQNGNPPEAIAYADKANERLRRKYYRMVLKNNKKTNVAKTAVARELACFMWGMITGNVA

SEQ ID NO: 100236 - protein, 463 aa, unidentified
MRKRGQSKCKRADKPKVDWKALEVVHPHAAGIDIGGSEHWVAISPERDEEPVRRFDCFTADVEQMADWLVERGVRSVAMQSTGVYWMPVFEILQQHGLEVFLVNARHTKNLPGRKSDIAECQWLLKLHTFGLLNNSFQPSDEIRTARTLWRHRGGLVAQASSAIQRMQKALIEMNIQLSSALTDLSGVSGMAILQAILDGEREPRKLAALADPHVKASKAVIAKSLQGNWRPELVFVLRQEVETYRSCQDRIAACDRQLQPHLQGMASKVDLKMQPLGPRPKGKRPARGNAPKFDLRTELYRITGVDWSQVDGIDVQVAQSVIAEVGVDLNAFPSEKHFANWLGLCPANDTSGGRVLKRRTPKVVNRAKVAFRQAASTLIRSQSYLGAQYRRLRTRLGAPKAITAMARKLSCLFYRLLKYGQHYVDKGVEFYEAKHREQQVRSVIRRAHQLGLQVAQPAGKSA

SEQ ID NO: 100237 - protein, 406 aa, unidentified
MLFVGDDWAEDHHDVELMDVSGRTLAKARLPEGVVGMARLHAMIAGALGEDVEEAEVLIGIETERGPWVAALITAGYTVYAVNPLQVSRYRERHGVSGAKSDAADAHTLADMVRTDSHQLRPVAGDTPAAEAVKVVSRAHKTLIWERTRHTQRLRHALREYFPAALEAFEDLDAADALELLARAPDPGAAARLTIDQISAALKSARRRGIPEKAARIQAVLRGEHLAQPEVVTAAYAVTTRAAVAVLKTLNEQVSALQGQVGAHFGRHPDAEIISSQPGLGPVLGARVLAEFGDDPHRYADARARKNYAGTSPITRASGKKKVVLARFVHNDRLIDALMTQAFSALNASPGARAYYDQLKARGADHNAALRQLANRLVGILHGCLKTRTCYDEATAWPQHAENAAA

SEQ ID NO: 100238 - protein, 311 aa, unidentified
MEQIYIGVDISQDTLDISAYPSKQIWQYKNTPKGIAKTVAKLKLLNPKLVVMEATGGLEKPLSEALHESGLPVAVINPRRIRDFGRAMGLLAKTDKLDAQAIAYFAAKIEPAPRPGADEISQKLERLVTRREQLSGMVTAEKNRLKQSKDELIRCQIKEHIAWLKFEIKGLERGLKEHLQQNPAALAKFNLYRSMPGVGHILSYSLVAELGELGCLNQREIAALVGLAPFNRDSGHYRGKRTIWGGRARVRKALYMPVLAAIRCNAVIRSVYQRLIARGKLHKVACMHKMLTILNSMAKNNNPWRCAETMT

SEQ ID NO: 100239 - protein, 354 aa, unidentified
MQQVTQLDFSGQKIFAGIDVHKKSWKVSIRSEQMELRTFSQNPSAGELSTYLKRNYPSADYHVVYEAGFCGFSHQREFSNAGINCIVVNPADVPTTGKEKQRKSDTVDCRKLSQSLSKGDLTGIFIPCIEQQDDRDIIRTYNQTVKDQTRYKNRIRGWLHFQGITFGESEGRYWSNNFTNWLKNLSLSPSARTALDLKLQGYLQARSMVLAATRQVRILSRQARYKERIALIRTIPGVGEITALLFVTEVGDVNRFKSFDALCDYVGLVPNTHSTGDKEKVSGLTRRANHQLREKLIEVSWTAVRTDPALTMPYNNYCKRMKKNNAIIRIAKKMLNRIRYVMKNECPYVIAVVK

SEQ ID NO: 100240 - protein, 354 aa, unidentified
MDKGISNVGSWTIGIDLGDRRSEVCVLDETARVRARFSVATTSRGLEKALSRYPGARVVMEVGTHSPWVSRLVEARGHAVIVANPRRVRLIGESDEKADRVDAELLARLGRMDPQLLRPIRHRGEAAQRDRALLAVRDGLVRVRTALINQARGQAKALGLRLPRCTAEGFARRLGREGKTELYPGLSALVATVGELTQRIGALESEIETLCTTRYPETELLRQVSGVGPITSLGYVLTLEDPRRFHRSRSVGAYLGLRTRRRQSGASDPALRITKAGDPFLRRLLVQSAHYILGPFGPDTELRRFGQRLIARGGRAARKKALVAVARKLAVLLHRLWITGAVYEPRREPTAQAA

SEQ ID NO: 100241 - protein, 346 aa, unidentified
MEVYIGLDVSLASTAVCVLGEKGKMVTEARGASAPEALVSFLRELPYGIVAIGLEAGPLSQWLHKGLTEAGFEAVLMETRRVKAALKAMPIKTDRRDAEGIARLLQMGWFRPVHCKTVSSQEMRALLSSRKSVKDVLIKIELSLRGVLRNFGLKLGPVSKGRWEARVRELIAGNAVLEAAAEPILRARAGLRRELAGLERLVRHLAIDDPVCRLLMTMPGVGPVIALTFKSAIDRPGRFRRSKDVGPWVGLTPGRDQSGERDIVGAITKAGDAGLRMALYQAATVMLNRAGPNWLKAWGLRLAKHRGKKRATVALARRIGVVLHRMWRDGTAFRFTREAAMALRTA

SEQ ID NO: 100242 - protein, 367 aa, unidentified
MKKVSTAAAQTTKNFSQPKLTIGLDLGDRSSWYCVLDERGEVVLEQKLGTTPKAMREVFGSMPRCRIALETGMHSPWVSRVLSELGHEVIVAHARNVRLIGESRKKDDRLDARTLARLARIDPQLLCPVKHRSAKAQADLTVIRARAGLVRARTALVNTARGLAKSYGERLRGCNVRNMNPEKAEGLSPELQAALEPLLRGLESLSQQIREYNERIEKLAQESYPQVALLKQVKGVGTLIALTYMLTLEDPHRFRKSRDVGCYLGLQPGRRNSGQSQPQMHISKEGDPYLRTLLVQGAQHILGPFGADSDLRRWGLKLAERGGRNGKKRAIIATARKLAILLHRLWVSGEVYEPLRNNNQRAMPAAA

SEQ ID NO: 100243 - protein, 349 aa, unidentified
MANLTIGVDLGDRYSELYVVDAAGACVETGRIRTTVAGLEQWFGGRPPARVVVEAGTHSPWASRVLQRLGHEVLVANPRKLRGLYENDSKDDRVDAEYLARVGRLDPALLKPITHRGEAAQADLAVLSSRDVLVRARTLLINHTRGVVKALGGRLPRCSAEAFARRVGPHVPPAVRPALAPVLEQLQQLTTTIRAFDRAVEHRCAQSYPETARLRQVTGVGPVTALAYVVVLDDPTRFRRSRAVGAYLGLRPRRSQSGEQDPQLRITKAGNPFLRRLVVQAAHYILGPHGPDCDLRRHGERIAARGGKNAKKRAVIAVARKLAVLLHHLWISGAGYEPLRHRPALAQAS

SEQ ID NO: 100244 - protein, 343 aa, unidentified
MKLHVLGIDLGKTVFHLVGLDSTGKVVIRKKCSRTQLLAFTANLQVQLIGMESCSGSHFLGRALREQGHEVRLMPAQYVKPYVQTNKSDFLDAEAIAEAVQRPRMRFVPIKTEEQLDLQALHRVRERWVMRRTAVVNQIRSLLLERGLTLPKGRSYVDRQLPRILEDGELRLSGSFRVLLAQLKLELEQLTARIEEMDRVIQKTAKENEDCQRLTEIPGIGPVTATALIAAVGNASAFQKGRNLAAWMGIVPGEYSTGGKQKLLGISQRGNKYLRTLFIQGARSVLQQRHKQAPGLSHWLAQLLGRTHQNVVIVALANKLVRMAWAVLCKNERYRAPVLAVTT

SEQ ID NO: 100245 - protein, 373 aa, unidentified
MCIRDRAKIIFKAYSFANTLDAAEALLVKLEPYKDSLEIGMEATGHYWLSLYSFLAEHKFIVHVLNPIQTDGWRKGIEIRKRKTDVIDSVLIADLIRYGNFLETSLADEDILSLRNLSRFRVYLVNSVSDLKRKAIAVLDQIFPEYASVFSNVFGQTSKELLKSLSLPSDYENLSATKIEEVLSNITQKKKASKTISTLSDKASRSFGISFCKDSFAFQLKLIIEQICFIEEQIASVELEIDQLMSKLGTNIKTIPGVGSVIGAVILGEIGDIERFDNPSKLVAYAGLDASVSQSGEYEASSSKLSKRASPYLRKALYMAAQRAEFCDPVFHAYYEKKRNEGKHHLVATNAVARKLCHTIYAILKKDIPYEVQ

SEQ ID NO: 100246 - protein, 344 aa, unidentified
MQITTIGLDLAKHVFQVHAVDAAGVVVLRKALRRAQVLPFFAKLAPCLIGIEACGTSHYWARELIRLGHEVRLMPPAYVKPYVKRGKTDAADAEAICEAVTRPTMRFVPVKSRDQQAALSMHRARNLLVKQRTQLVNMMRGLLAEFGIDIPQGLGRALLMAQRVVEGATPDVPEAAAKIVGMLSQQALDTDVQLREIDRALLALQRTDDVARRLATIPGIGPVGATALAAAVTDPGQFRSGRQFAAWLGLTPLRNSSGGKERLGRISKMGDKYLRKLLVIGATSLVRRARHKPETVDPRLTDLLARKPVRVATVAMANKMARIVWAIMTRGEVYQTSHMPVLAA

SEQ ID NO: 100247 - protein, 418 aa, unidentified
MDVIVERCAGLDVHRDNVVATVRVPGTGRRQWDKQTQTFKATLAGLAELALWLAEAGVTLVGMEATGVYWKTVFQALEDRFECWLLNAHHLRNVPGRKTDVKDSDWICQLVQHGLVRPSFVPPPEIRRLRDLTRLRRAQTNERARTIQRLEKVLQDAGIKLSSVASTTYSKSARAMLEALLSGVTDPEQLAELSKGKMRAKIPQLREALQSRFQIEHHGIMVAQLLAHIDTLDLALANLSERIEFVLTPHAHIIELLSTIPGVQAHAAQVLIAECGLDMSLFPTVGHFASWAGACPGHHQSARRRGSGRTRPGPRWLTDQLTECAKAAVRTKETYLAAHYAQLRGRRGEAKAIGAIRHDLLVAYFHIVRDQVPYRDLGPDWQRKRYSVEHRARRLQRQLEALGYAVTLDQIPQPEQAA

SEQ ID NO: 100248 - protein, 358 aa, unidentified
MKEPSKGQGMTVGLDLGDRFSHLVVIDEQGQVVEEGRIATSEVALRRRFSGCPPMRIALETGTHSPWVSRVLKGCSHEVVVANSRKLRLIYENPSKDDRVDALYLARLGRVDPALLSPVQHRGVTAQKDLALLRSRDALVSARTQLINHVRGLVKSVGSRLPGCSSRAFPQRASEKAPESLRLGLVPVLEEIASLNDRIKALDGQIERLAQESYPETKLLRQVPGVGPITSLAFVLTLEAPQRFPKSRTVGAFLGLVPGRKQSGDSDPERRITKHGDSSVRRLLVNAAHYILGPFGPDSNLRRFGAKIASRGGKNAKKRAIVAVARKLAVLLHHLWRSCEVYEPLYQTQRADRGGKVA

SEQ ID NO: 100249 - protein, 409 aa, unidentified
MSYFVGLDWAASEHAVCVVDERGAVVTRFTAKHGVAGLDDLVGRLTKLAPAVELRVAIERPSGVLVDTLVEKGFAVVPIHPNVVKASRARYSMAQGKTDLGDAYLLADMLRTDGHRFRTLVPLSDETKALRGLTRLRDDLVGQRVAFANQLRSLLDEFWPGAAVIFADVDSPIALDFLERYPTPQSASSLGEKRMAAFMVRHSYCGRRSAAELVERLRAAPKSVAGELEAEAKGECVRALAAVLRPLVARIALLSAAVEHAVEAHADGALVTPLFREGRICAGQILAELGDDRGRFVSADHLAAEGGMAPVTRESGKHRGVTFRWACNKRLRAALVTLADSTRHTSPWARAIYQRARDRGCDHAHALRILGRAWCRVLWHCWQKRVAYDPTKHRAARQFTLRAIDQEAA

SEQ ID NO: 100250 - protein, 382 aa, unidentified
MGLTREVNSVRLPCFHTNANPFHFLIGSTLFDMGILLKCYKNHNTSILYAGIDISKSNFTCSLWLDQAAIDLGEFDNGQDGFKALATAIAPYHTANKYETVHIIMEATGGYELYLLSFISKQGWLFTLPNPKRVRDWAKGMGYRAKNDRIDGRLLAHFGYQTHPAPQQPVPQVIEQLDSLLQRQEDIQKLLRQERNRQHALAYHPDAADAAVASVARTITFLEEEKQQIEGEIKALLKANPKLRTQARQLSTVCGIGKKTTLPLLVMCHRYYARTCGQGTSKGITAYLGLDAQEYSSGSSVKKRATISKMGNSQMRARLYLSALGGVRGKDSPLQTFYQRLVNRVKSKKLALVASSRKIAVWAWAVFQQGVDFDPSRFATAN

SEQ ID NO: 100251 - protein, 355 aa, unidentified
MRESISETMGIDLGDRWSHVYARCGATGEILAERRVRTRQEDFEALFAGASGMRVVLETGTHANWVARLAKRHGHEVIVGQARRLRMIYENPTKSDAVDARMLADLGSTHPQLLHPVTVRDERTQADLAVLRARENLVQARTQLVNAARGLAKSQGHRLPDGSTECLPRRAWDVCPGELRPALRPLLLAIASLTRQIRAADRAVHKLCRGRYAKDVAHLLQIPGIGELAALGFVLVVGSPQRFRRNRDVGAFLGLVPRRDQSGASDPQLPITKCGDPMLRKLLGQSAHWILGPFGGDCDLRRWAARRAERGGKCAKRRAVVAVTRRLAVLLLALWKSGADYEPLRNARLAEVAGA

SEQ ID NO: 100252 - protein, 371 aa, unidentified
MKRILYVGMDVHKENYTLCCYNIEDDELRCKQTIKPDYRMILKYLGEVKEYYANEVEFVCGYEAGCLGYTLYHQLTQHGVKCIILAPTTMGIMNTNRIKTDKRDAGNIARCLAFRTYSEVYVPTEEDESIKEYIRMRDDQKKALKVIKQQILAFVLRHGYRYDGGRSYWTQRHVKWLKSLSLGGILLESLDEYLVTYEYLMDKVERLDKRIEEFAEGERYLESVKKLSCLIGVKTHTALSVLVEIGDFIRFAKPEQLAAYLGLVPSEDSSGTKRIRGSITKAGNCHVRRLLVEAAQGYTRGTVGHKSKDLKRRQSGNTPQVIAYADKANERLRRKFYRMTLRNGANRNVAATAIARELACFMWGLMTDNVV

SEQ ID NO: 100253 - protein, 425 aa, unidentified
MPYTIAGIDVHKKMLAVVVADVEGEGDFQFEHHKVGTSPAELCALAGWLVERQVDEVVMESTAQYWRPVWEALELHWRPQRRTRDGASPLAGTLHLAQAQSNRGAVGRKKDFPDAERLVKRLVAQELTLSFVPDAEQRLWRTVMRRKYQITRSRVQLHNRLESLLEEAHIKVSSVVSDLLGTSARRMLQALADGERDPTALSALADSRLRATPDQLRNAFGACADLHPVYRRLVKLTLDELRVIEDHLVQLDQQMAELLGHPHDAVHRLAEIPGLGVDSAQQIIAEVGASAATFPSPKHLASWMGACPGTEESAGKNYSHRCPKGNRQMRRVLNQAANAAVKAKGTIFAIVYRRLVPRLGHAQAIGAITHRLCRLIWKILHQSVRYEERGPAVSVEAKKVRTRKMIRELRTLGYRIEPISPAPVA

SEQ ID NO: 100254 - protein, 343 aa, unidentified
MDHFAGLDVSVKETSVCIVDETGKIVREVKVASEPEALLSVLKNPAYRFKRIGLEAGPLSQWLFSALAEAELPVVCVETRHMQAVLKAQINKTDRNDARGIAQMMRVGLYRPVHVKTLRSQKLRMLLTHRKLLQSKAIAIENDLRGTLRNFGLKVGMVGTVKFEARIKELVENLPDLAVLVEPLLVVRRVLREQFVILHRRLLAIVQDDAVCRRLMTTPGVGPVVALTYRATVDVPARFRKSKAVGAVFGLTCSKYQSGEIDRSGRISRCGDEMMRVMLYEAAQSMLHSKKWSWLKAWAMQIARRRGKKKAIVALARRLAVIMHRIWVDGTEFRWTREQAVTA

SEQ ID NO: 100255 - protein, 397 aa, unidentified
MLAQSNPRSYCAAEFDLFLGMDVDKKSIDFTCADSKRIIRSVHIPNDAEHLIRYVRKHFPDQKVLFAYEAGPTGYGLYDGLTAGGFGCLVSPPSMIPRAPGQRVKTNRLDSKKITEALRAGQLKGIHVPSPTYRHLRHLTKVRDLVARQIAGNKCRIKALLLFEGIPFPEAPQKSHHWSRSVIAQLQKLPGSGGVRFRLDRLLEAFEFQRQQYLKITRELRIFCRQDPELKRCLFYLTSIPGIGQIVAPHLLARIGSWQNLQEHRVDELAGLLGLVPTEHSTGDRVHRGSITHGGDGRLRSKLIQSAWTAIRQDPELREFYRSVCRRNPQHLAARKAIVAVARKLTTRIFAVLKEQRPYTFRSQVHSRPLLPGEIGPRERLDATQKEEENNLPSFVS

SEQ ID NO: 100256 - protein, 323 aa, unidentified
MQGQKPSENSAEIEVYVGLDVCKDWLDVHLHPLGRALRLPNAAQGLKTLRRRLAGLRVASIVIEATGKFHRLAHRTLHQQGFRVAVVNPLRSRLFAQAIGQLAKTDRIDAKMLALMGQLLEPRASAPVPETLEALQELLGARAAALKERTALGNRRGASKVAFLRAEIGRRLKALAGSIERLDDEIERRLAADPGLKRRHDILVTIPGVGRAAAMALVIGLPELGACSGKAAALLAGLAPLACDSGDKAGQRQIQGGRACVRTGLYMAALTASRHNPQLSEDYRRLVNAGKKAKVALTAIMRKIVVLANALVKENRPWSPISP

SEQ ID NO: 100257 - protein, 400 aa, unidentified
MRAVFGIDVSKTSSEVAILVNGEKVHGYTILNDAIGFNRLLGDLKTVHNPEIIFEATGVYSRRLQAFLEEYSYAYTRLNPLEAKKQLDSLRVRKTDKIDAEKLAKSQLVHNRKPTYVQEEVYQHLRDLSRFYQNMTEDLVRTKNRLHKVLQVTFPELETLLSTPTGEQYWNLVMAFPCKEFVLSLSQSNLCEIVRQSTSKRISEKRITYLTDKLIKLAKQSFCAVKNTSPMLEEVRYYAQELLRLSERRQVVLNNMVALVQPLPEYDILRSIPGIAETTATSIIGELGDIRRFQSSNQINAFIGIDLRHYESGNFLAKEHITKRGNPYARKILFKCIHNIASASHTNPCHIADFYEKRKRQSTIASTKPHTIASIHRLIRTMYYLITHNKLYDYSLTQNR

SEQ ID NO: 100258 - protein, 435 aa, unidentified
MSTLGVDLAVRAAHVATLSDERGEVIWSRRRFTSHPDDLAALSAAVGPASELTVVFEPTRSAWVVVAAHFRATGAKVVMIAPEQSADLRKYYKKHTKNDRLDSLVLSRVPLLHPEGLTEVSGLGPAEPLKRAVRRRVDLVHQRRACYQRIDAMLDLLGPAYHEALGSRGTKTAAVVLERYGNPKTLRRLGLSRLTDLVGKTSGGHLGAEYAARLLQAATEATTLWKGGGLDFDELAWDLAREVRLIGQLDIEVERLDTRIAELYQLADPKGIVRSAPGIGPVLSAGIAGRLGDATRFANLAAIRSFSGIVPGVNQSGFTETRPGITKQGDPGLRRDLYLAAERACHQDPQLAAKYYRLIMERRLHHYSATCHLATTLVTRIAACMRSGQLYVVRDVDGTPVNSEEARAIIAKRYMIPLAARRRSRIPDAVSEPAR

SEQ ID NO: 100259 - protein, 342 aa, unidentified
MEQSIRCGIDIAKLVFQIHGVNAKSGETVMVKKLARHDMLRFFANKPSMLIGIEACGGAHYWARELTKLGHTVKLMSPQYVAPYRRGGKNDANDAEAICEAVARPNMRFVAVKSESQQAVLVMHRMRDQLVHERTALMNQIRSYLHEFGIVIAQGRAPLAKIFPLIDEDMQLPLLLRQSIAELADRLADLERRIQTLDQRISAWSKQDNAAKALLTLCGVGPVTASAAVATAGNVSVFKNGREFAAWLGLVPKQNSSGGKSKLGAITKRGDRYLRTLLVQGARVVMIAAQKAKLTQKDNPMFDWIYKLLERRPSNVVAVAIAAKQARMLWAIMKKQQNMVMA

SEQ ID NO: 100260 - protein, 534 aa, unidentified
MARASKSKKRSFPASQTIHRPRGVISPRVQTVGPEHFGIVCVDCAKARSKWMLADFYGRVLVPPTVVEHTRTCLISMIRELRANLDQARIRDQIVVIERTGRYHRPIQRAFAQAGFEVRIIHPLTTKQHRQPANPGNKTDDTDLAAMHRGAVNGFGLLEPPADSLSIRLQLLARHRRDLVEKTVALRSQIHEHLHAVMPGYSKCFDDVYDAQIPLSIAREFGSARAILQAGVPGLIVHLRGAGIRVHAPTLEKILAWARSAPAAEDESDIHLRILAQLDDDRLSKVRGVRAIEAELAGLLVQTPYVLLMGIPGINVVSAAEFAGEMGPIERYATARAITERAGLFPSRYQSDRVDYPDGRLVRCANRTLRRALMTIADNLVKCNDHFRVLAAGWRLHGKDARAVRVQVAGRFSRIAFQMVAGRKAYRHPCCQQRDYVLNKLLVFHTENGIGYEQLTMNLEAAVAQLPRSEYREEAVPLADELDRVLKKRGKGPRPLAEILPVVLAKLGVKPVRSPESGEAILTQPFVRRDRTTS

SEQ ID NO: 100261 - protein, 453 aa, unidentified
MKKKVSSKDKLDDASLPVVHRKAAGIDIGSRFHVVAVPPDLASESIRTFDSFTGDLQEMARWLKDLGIKTVAMESTGVYWIPAFSILQEKGIEVYLVNASLAKNVPGRKTDINDAQWLQRLHSFGLLRNSFQPAENIASLRAHLRHRDNLIEYKAAHIQHIQKALMLMNLQVHHVVSDITGVTGMRIVRAIVAGERDARILASFRDVRCKSSLETIEKSLVGNYKLEHLLQLRHAVELCDHYQQKIDECDQQIESILQLLQLNKSAPEEPLPKHRHRTKQPNDPNFDARSYLYRITGVDVTKVHGMGPHTVLKLIGECGLDMSKWPTAKHFTSWLTLSPGNKISGGKVLSSKTRRSTSKSATMFRLAAVNVGKMDSALGAFYRRLAARVGKAKAVTATARKLAVIFYNTLRYGTKFVDPGAEYYEEKYRERVITHMAKKAKKLGFELRELAPA

SEQ ID NO: 100262 - protein, 420 aa, unidentified
MEQGTANPDKSYAAWVGFDWGDREHAWVIQWADTGQREQGRLEQSPEALDAWVCQWMSRLNGRRMAVAIEQKHGAVVWMLLKYDCVEIYPVHPQAAGQFRQALYPSGCKSDPTDANLLLELLVHHRDRLRPVEHEDETTRRLVMLVEQRRHWVEERKRHGNRLSARLKVYFPQVLDWFDDIGAAPVLDLLSRWPSLEQLQRAQRKKLEAFLRQHRRSPEEAVAWVQQVRTAVPAVRDAALMESYVLEVTALVGLLNQMKTSIKKFDDVIQELSQQHPHWTIAQSLPGAGPVMAPRLLAAMGSGRRYETAFQMQCATGIAPVQMASGRTKVVQFRRACPKFLRQTFHEWAQHSMKSCRWARAYYDYLRAGGKQHHAAIRALAFKWQRILFRCWKDQVPYNDSTYLAALKKRNSPLLAWMPA

SEQ ID NO: 100263 - protein, 364 aa, unidentified
MKIVKDITRQSVRYIGMDVHRDSTTAAVLDAQGSLLMQVTLRTEASILVDFLSGLSGTLYLTFEEGTYSAWLYTLLSPHVEKLIVCNPRQNALLKHGNKSDPIDARKLAELLRLGSLTAVYHGSPGLRTLKELAASYSTLVRDGTRVMNRLKSLYRGRGIRCGGTQVYSPRHRDRWLQQLTEEGARQRAELLYQELDLLLKLRLPARRALLKESHKQAGEKSLRTIPGLGPVRVALLLAWLQTPHRFRNKRKLWGYGGLALITRGSAQYQLQQGELVVSPKGVRVRGLNPAHNHALKDIFKGASLVACQRPGPLRDAYLRCLREGTAEHLARLTIARKIATLVLTLWKRGGRFDAKRLRREQAA

SEQ ID NO: 100264 - protein, 343 aa, unidentified
MQITTIGLDLAKHWFQVHGVDANGHVVVRRRLRRSGVIAYFRSLEPCLVGMEACATAHYWARELSALGHTVKLMPPAYVKAYVKRNKNDATDAEAICEAVARPSMRFVPVKGAEQQSVLMLHRARSLLVRQRTMLVNALRAHMAEFGIIAPQGRRHVEILRQTIAHQQERLPELARSILQTIADQLNDTMERVREIEVRLVRLHRQNPISQLLATVPGVGIMSASAIAATTSNPTLFRSGREFAAWLGMTPRQNSSGGKDRLGRTSKRGDKYIRSLLIAGAVAVLRHARNRPARDGEWVRALLARKPTKVAAVALANKTARIVWAVMMRGDGYQAKAVLGQPA

SEQ ID NO: 100265 - protein, 344 aa, unidentified
MKFTRCGLDIAKQVFQVHGVNEHGVVKGHRTLARTRVLEYFAQMPPCLIGIEACGSAHYWARELTKLGHVVKLMASQYVMAYRKRAKNDANDAEAICEAVGRPNMRFVAIKSEEQQSVLMVHRARSLTVANRTAQVNQIRGLLGEFGLVVPRGVGRLRRELPGILEDAENGLPGLGREVLSGLLQELREADLRISAYDRQIRALAEASEPARRLMRVESIGAQTATALVATLGDPHVFRNGRGFAAWLGITPRQHSSGGKEHLGPITRQGDSYLRTLLVHGARSYLRVVDRKKDAKSEWARRLKQRRHVNVAAVALAAKHARIAWAILAHGTEYRPAGPQTAVA

SEQ ID NO: 100266 - protein, 390 aa, unidentified
MDVLYQSCAGIDIHQANIVVCILHGPLTSTRPNREMATFDTTTKGLRACHDFLSQFHVEAVGMESTGVYWRPVWHALCDDFELILAQPAHMKAIPGQKTDKKDAHWIAKLTRIGLLPRSFVPNETIQELRELTRQRKHYVESRNRETNRIHKILQSGGIKLTTYIEDIMGLSGRNLLQLLVDGTPITPRIVHQSVYTSLKKKVPQLLEALDGYFSDHHRFMLKQFLEIYDFYQKQIELLEERMNVYLSQYENHVEILDSIPGIDVITASVIISEVGVDMSQFPTAGHLASWAGLCPGNNESAGKKRSTKIRHGNSYLKKCLCQAAFAVKKQKGSPLADRFYQIQSRRGSQKATIALAHQLLKIAYILLKEQITYPEFLAQKKTTRDELVA

SEQ ID NO: 100267 - protein, 372 aa, unidentified
MNATSIFVDNYQNQSPMTKLLQFADFTNKHIFVGIDVHKKDWNVSLFYEQDYVKTFTQPPCSDALEKLLRRDFPGGNYLCGYESGYSGFWIQRQLQSKGINCFVIHAADIPQTHKHKTAKTDAVDSRSIAQALSAGTVTSVYIPNPEIESHRSLLRYRDRLQRDIQRCKNRIRSLLFQYGYEIPSHFDKCWSDKFVQWLKSFDIDQIITRMTLNHMIEQLELLRGNFLKVNKNIRLLQKSDKYKPLMTLLTSIPGIGPLTALYLILEIADMKRFESFRDLNSFVGLYPMEYSSGEHEYKGNITIRHNKYLRKLLIEAAWIAIRHDPALLLVYEEWKNRMTGKRAIIKVARKLLSRVRYIWLNETLYVKGVVK

SEQ ID NO: 100268 - protein, 427 aa, unidentified
MAYRIAAVDVHKKMLAVVVADVEGKGEYQFERRKFGASPDQLHVLAQWLVQQEVEEVVMESTAQYWKPVWGALERYWKPARQKRDGATKMSGQLHLCQAKSNRGPRGRKNDFADGERMIKRLVAQELILSFVPDPEQRLWRTVTRRKHQLTRDKIRFQNQLESLLEQAHIKLSSFVSDLLGLSARRMLQAIAEGETDPAVVAALADCRLRATPEQLRDALGACTELNGVYRRLLLMALEELKLMEEQMEQLDREAWNLLQDHQDAVQRVAEVPGFGVDSATQMIAEVGAEAAAFESAKDLSSWVGVCPGDEQTAGKSKSTRSPKGNSTMRRLLNQAAQSAVKVKGSIFEITFRKLEPRLGYQQAIWAIAHRLCRLLWMILHKGIHYEERGPAVSAKSQRARTARMIKALQKLGYRVEGGPLPAGSPV

SEQ ID NO: 100269 - protein, 323 aa, unidentified
MTKDRHYFGIDISKDVFDVCDNNKAHYQFKNSISGFKKLIKLLDINTVCVMEATGYYHVRLAYFLLESGIGVSVVNPLKIKRYIQMNLSKIKTDKSDSKMIQQYGADCKPKLWEGQSKAQQECLQLTRLLSVYSKQSTQLKNKLHGEEVLGTPSKAVVRSLKRSLKNLEKEIEVLETALLDNVKKEYQESLTLLTSIPAIGTKTALMLLVFTDGFQRFESGKELCSYAGLTPIIRQSGTSVKGRPRISKMGNAKLRNVLFMCSFNACNYNRACKALYDRIVAKGKSKKLALIAVCNKLLKQAFAIIKNGLPYDEHYKSTLVAN

SEQ ID NO: 100270 - protein, 410 aa, unidentified
MEVLHAHCAGLDVHKDTVVACVRHMVGGTVKREVKSFQTTTKEPMALSEWLSVEGCTRVAMEATGIYWKPVWHILADGEFELVLANAAHVKNVPGRKTDVNDATWLADLMAHGLIRGSFVPDEPTQDMRDFLRTRKQFVRQRSSSIQRIQKTLEDANIKLDSVISDIIGLSGRAMIEALIAGQSEPDKLAALAHRRIKASPAELEAALRGRVTDHHRFMLRLHLQQIDALNAAIAEIDRQVEANLEPFRTATTLLITIPGVSELMARTIGAEIGTDMSRFPTHGHLISWAGLCPRNDQSAGKRRSNRMRKGAPWLKTALVQAAWAAVRTKGSYLQAQFQRLRARRGAKKAIGAVAASILTAAYHMLKQGTFYNELGADFFDRSAKNSHAKRLLARLQNLGYDVQLTPINA

SEQ ID NO: 100271 - protein, 454 aa, unidentified
MAKRNAKVSLKAGKSRAALTITHPNAAGIDIGSASHFVAVPPDRDDEPVREFPSFTVDLNALADWLKGCGVDTVAMESTGVYWIPLFELLESRGFTVLLVNARHVKNVSGRKSDVLDCQWLQQLMTYGLLSGAFRPAEQVCVLRSLWRQRAMLLRSQARHVQHMQKALTQMNVQLANVISDVVGETGQKILRAIVAGERDGQVLGAMKNARIHASIDEIAKSLQGNWRAEHLFALKQALGAFDFVGGQLTECDHEIEGQLQCLHAHDGKPAKGKQRGRARNAPKFDLRTQLFKMCGVDLTRIDGIDVTTALAVISETGTDMSRFPTVGHFASWLGLCPGTKITGGKVMSGKTKRCANHAAQALKLAAAALRPSQSALGAYFRRMCSRMDKSKAVAAAAHKLARLIYTMLTKGEEYTDKGQDYYEERYRERVLWHLNQRAKKMGMKLVATEPQPR

SEQ ID NO: 100272 - protein, 342 aa, unidentified
MDHFAGLDVSVKETSVCIVDDTGKIVREVKVASEPEDLLRVLANPIYHFKRIGLEAGPLSQWLYSALAEAGLPVICVETRHMRAVLKAQINKTDRNDARGMAQMMRVGLYRPVHVKTLRSQKLRMLLTHRKLLQSKAIAVDNDLRGTLRNFGLKVGVVRTVKFEARIRELVENLPDLAELVEPLLVVRRVLREQFVIQHRRLLAIVRDDEVCRRLMTVPGVGPVVSLTYRATVDVPARFHKSKSVGAVFGLTCAKYQSGEVEWSGRISRCGDEMMRVMLYEAAQSMLRSKKWSWLKAWAMQIARRRGMKKAIVALARRLAVIMHRIWVDGTEFRWTREVATA

SEQ ID NO: 100273 - protein, 344 aa, unidentified
MKATTIGIDLAKNVFQIHGVNEFGKPAIKKQLKRDQMAAFFANTPPALIGMEACASAHHWARKLQSLGHTVKLMAPQFVKPYVKSNKNDANDAEAICEAVARPNMRFVPIKNVEQQAVLSLHRVRQGFVAARTAQANQIRGLLGEFGLVIPQGIAHIARRVPELIEDASNELPGSFRLLIERLMEHLKGLHRQVLDLEALIEAWHRKSEASRKLEAIPGIGPITASALVASIGDANNFADGRQLAAWLGLVPRQHSSGGKQTLLGISKRGDSYLRTLLIHGARACIQAFSRKGNSSGWLHELLQRRNHNVAAVALANKNARIVWALLAQKRQYVAGYSRPVTMA

SEQ ID NO: 100274 - protein, 336 aa, unidentified
MKYSGIDLHSNNSVVTVTDEEDRVMSEKRLPNDLATILGFLLPWRDELVGVVVESTYNWYWLVDGLQEAGYRVHLAHCSAIKKYEGLKHSGDEADARHLAHLLRLGILPTGTILPREQRALRDLGRKRMQLVRSRTQHILAVENITARERGARISSEQVKRLSVETIDQMPVPEDVALAVKANVAVIHTLSVQIDLLEKRLQKAVPRTEYDLVTTIPGIGRILATTILLETGPIDRFASPGNFASYARCVDSQHTSNGKKKGEGNTKNGNKYLSWAFIEAAHFAMRYCVEAKRFYERKKSRTNNVVAIKALAHKLARACFHMLKERKPFDVTRCFA

SEQ ID NO: 100275 - protein, 320 aa, unidentified
MTPSAIFVGIDVSKDQLDIAQTPAAPPWSVANSGDGIAGLVDRLQALEPALVVLEATGGYESAVVGALMAASLPVVVVNPRQARDFARAKNRLAKTDKIDAQVLADFGEAVRPELRPLPDAAAKELGALVRRRQQLIEMLTAERNRSSLATAAVRKNIENHVQWLQKCLEDINRDLDEGVRRTPGWQERADLLRGQKGVGPVLSLVLIADLPELGQLNRKKISTLVGVAPLNRDSGKFRGRRMIWGGRPTVRAALYMGTLVATRHNPAIRAFYQRLIASGKPKKLALTACMHKFLIILNGIVRDTEVLSLTRSLASQDSC

SEQ ID NO: 100276 - protein, 315 aa, unidentified
MTTKSTEIYVGIDVSKAKLDVAIWDSEVSWNFRNEAEGWQELVKRLKTCKPTLIVMEASGGLEQSIVAELYLEKLPVAVVNPTRVRDFAGSTGQWAKTDKLDARIIAHFAQAVHPKVRPLRTAEEERLNALVTRRRQVIQILVAEKNRKATTHSSLQEGVQQHIDWLEDELLDLDREIEHFIQESPEWQEKAALLRSVPGVGPVTASTMLAELPELGTRNRQQIAALVGVAPVNKDSGKKRGKRRVFGGRAPVRRALYMATLVATRANPVIRRFYERLLAKGKEKKLALTACMRKLLIILNSIIRNRQPWRLNWA

SEQ ID NO: 100277 - protein, 444 aa, unidentified
MLPILYRRVVGLDVHKKTVVATRMRVTEDDRAEWQTKTFGTTTPDLLQLHDWLLEWESSHVAMESTGDYWKPVYNVLEDTFELLVVNAKHVKHVPGRKTDVKDSEWLAELMMHGLLKASFIPSKPQRALRDMTRYRTTLVQERTRLINRVQKLLEGANIKLSSVATDIMGVSARAMLVEIAAGQANASFLANLARGRLRAKIPQLEKALTGIVLPHHRILLAKQLVHIDFLDEQVQEMSAEIGRQLEAMSRPPNRPGPDTGQGTEEGTICDEGEPPLTWVEAVALLDTIPGVNPRTAEKMLAEMGLDMSRFPTAGHLATWAGLAPGNHQSGGKRYSGRTPKGNRALTTTMVVAAWTAVRTKDTFLKARYHRLAGRRGKKRAIVAVAHSMLVSAYHMLTHRQPYHELGGDYFDQRKKEAKVSYLIRRLEKLTGGSVNIEIQSAAA

SEQ ID NO: 100278 - protein, 428 aa, unidentified
MTQSPNPTPPTFAAFVGIDWADQEHAVCLSPADTLKPEQFTIHHTPEAIAEFVAMLRCRFGGQPVAIALEQARGALLYALMGHEFVRLYPIHPATSKRYRDAFAPSGAKDDPVDARLIWELLVKHRDQLRPWQPQDATSRKLALLCEHRRDLINQRTRLVQQLQAALKTYFPQALDWTGEDLASVMATDWLVRWPTLEQLQRVPPKTVRAFYYAHHCRRPDLVQQRLHQIKTAQPLTTDAAVIAAHSLRVQSLAHQLRPLLASLAAYDQQIQALFATHPDAAIFTSFPGAGECLAPRLAAAFGTDRDRFPDADSMLRWSGIAPVTRRSGKFQTVHRRYACAKFLRQTFHEFARCSIKFCEWARLYYETQRAKGKGHHAAVRALAFKWIRILWRCWRDRRPYDDSRYTAALRRSGSPLAKLLPLPSQQP

SEQ ID NO: 100279 - protein, 343 aa, unidentified
MQTVSTIGLDIAKSVFQVHGVDASGLVVIRRQLKRRYVLSFFEKLPPCLVGIEACASSHHWSRELQALGHTVRLMPPAYVKPYVKRQKNDMADAEAICEAVTRANMRFVPTKTPEQQSGLVLHRTRHLLIRQQTSVINAIRAHLAEFGVIAPGGRKGVEELLRVIADPSDKRVSDVVRACLAALGSQLLGLKRQILDFDRMILAWHRSNPTSKRLNCIPGVGPLLATALVANVADPKVFRSGRNFSAWIGLVPKQHSSGGRAKLGSISKQGDRYLRSLFVAGAFAVIRYAKLHGTKYRPWVAALLARRPTKVAAIALANKLARMAWAMMARGERYNYPAGLRV

SEQ ID NO: 100280 - protein, 330 aa, unidentified
MRRPTPHTQYPLGLQMFDGLYRPREEDRPTMNASKEHPPMTAGLDLGDKYSYLCLIDQESGEVVEEGRLRTTPEVLRQRFASEQQLRIAIEAGTHSPWASRVLEECGHEVLVANARKLRLIYANKRKTDETDAENLARLARLDPKLLYPLKHRSEASQAHLALIRSREALVGCRTQLVNHVRGAVKSFGARLPKCPAVSFHKKAPEHIPEALWPALGPILEQISSLTERIRQYERKLEAISKEHYPETELLRQVEGVGGLTALAFVLTLEDPHRFEKSRSVAAYLGLVPATDRSGERDPQKRISKEGDEMLRRLLVSGAHYVLGPARTRI

SEQ ID NO: 100281 - protein, 345 aa, unidentified
MDKIITIGLDIAKQVFQVHGVDAAGGLVLSRQLRRGEVLKFFAKLPGCVVGLEACASAHYWAREIVALGHEVRLMPPTRVKAYGRRGRKNDRADAAACCEAVTRPSMCLVPIKTPDQQAALMLHRARQMLIEQRTRLGNAIRAHLGELGIVARKGAGGLAALLQMLETAQDERVPAAIRPILQPLVEQWRCAAAQIAGLDRQIAAWHASNEASRRLATIPQIGPIIASALLATAGDATRFKNGRQFAAWIGLVPSQNSTGGKERLGAITKAGDRYLRQLLVVAASGMIRRVRANPLLSPWLAQLLARKPAKQAAVALANKLARIAWALLATGQTYRTPTPAAAKP

SEQ ID NO: 100282 - protein, 411 aa, unidentified
MERIVERPGALDVHQASVMACVRVWDERELEEHVAEFATTVHGLLALRDWLEALGVTQVAMEATGVYWRPVWAVLEDRFELMLVNARHVKQVPGRKTDVKDSQWLCQLLEAGLLRASLVPPKPIRTLRNLTRYRKTQINDRTREVARLHKTLEDTGIKLAIVATNIMGKSGRDMLDALVAGTKDPEVLADLARGRLRAKIPALREALVGRFEPEHALIIGQILAHIDFLDEAISRLGAEIEQCLEPYTRERDLLITIPGVKQRVAEVLIAEIGVDMTAFPTPKHLASWAGVCPGNEQSAGKRRSGKTRKGSKWLRATLTEAAITAARTKNSYLAAQYQRLRGRRGHAKALTAVGHSILTAVWHMLQTGELYRDPGGDYYVRQDTDRITRRLVRKLEALGHNVSLQAPEAPA

SEQ ID NO: 100283 - protein, 419 aa, unidentified
MESAENARHAKNENVRYVALDIHKHYSMIGAVNRDSEVLLDPHRVEHAQLEAWFHKHLKPTDQVVIEATTNAWHIYDLIEPLVAEVVVANPMKVKQIASARIKTDKLDVLILARLLAANLIPTVWVPPWHVRELRSLVSQRRRLVQMHTQVINRLHSISHRHHLGHPKGKRFLPKDCAWQKDQRLSRAEKLQLELDMASRVHLKSQIDRLTQAMATLSLEEPWEAEALYLMQIPGFGIITTMTVLAAIGDISRFSHPKKLVSYAGLVPGLHQSGVKLRGKGITKEGRKELRWALVEVAWRCLKGNAYRKERFETFKKRMHPNQAITAVARHLLVIVWHVLSKQEPYRQVTEERIAYKFLTWSGQLNASQRNGMSHAQFVRFNLLRLGIGSDLERIALNPKYPYRIAPIEDIPAELRPPG

SEQ ID NO: 100284 - protein, 342 aa, unidentified
MVMFAGLDVGGKRTAMCIVDEKGKIVWQGMVDTHPEMIAAALKRFQGQLAKVGLESGPFTPHLHRALAAMGYPMVCMDARRAADAIKSRRVKSDKADAFALAEMLRTGWFTSVHVKSLDSHRIKALLGAREQLVKIKRSLGNQIRGLLRPFGTKLPSRAGTKTFAEAAYQATREDGLIRAAIGALLEAFASIDAQLAKLDDELKELAGRSEIAWRLMSVPSIGPVTALAYIAAIEDPHRFKRTRDIGAYLGLTERRYQSGETNIGMGISKQGDAMARHDLYEAANVLLTTVKKRFALRGWGLKLLKTLGPKKARVAVARKLAVLLGRMWKDGTHFEAAAGAA

SEQ ID NO: 100285 - protein, 370 aa, unidentified
MKSIIYVGMDVHKASFTLSCFSVTTQETFATVKISPDAKAIKKYLDGVSLSRSEECEFVCGYEAGCLGYTLYHQLTAMNIRCVIMAPTTILRNSKRVKTDRIDAENLARCLAYGGYKSVYIPTAQDEAVRDYLRMRDDHKLMLKKIKQQINAFCLKHNKIYPGNKSKWTQAHVKWLNALEFDGYLQDAFNEYMITYRELADKVERLESQIEQLAELEEYRDKVKKLICIKGIKTHTALSLIVETGDFSRFQSAERYASYIGLVPGEHSSSEDQNRLGITKAGNRHMRMLLIEAAQCYSRGVPAKKSKDLKSRQKGASPEVIAYADKASIRLRRKYIRMELVNKKKANVAKTAVARELACFIWGMMTDNIA

SEQ ID NO: 100286 - protein, 493 aa, unidentified
MALPELKGKDDMSRQKKHPRGTPAGRRSQADQGKPSLKAKGMGLGDRPILEPNAAGIDIGAREIYVAVPPDRDENPVRVFSTLTEDLQKMAQWLVSCGITTVAMESTGVYWIPPYEMLEQHGVKPCLVDARGMKNVPGRRTDWHECQWLQFLHSVGLLRAAFRPEGGVCAVRSLMRHRSDQVLIANQHIQHMHKALTQMNVQIQHVISDITGLTGLAIVDAIIQGQRDPAVLAKLRDPHIQASEETIRKSLEGNWRPEHLFTLQQSRQSYQHYQEQIRACDEQIEKMLLAFEPRVDPEKRPLPPDRKGKRSGRKKKNANPKTGFDLRTESYKLFGVDLTQIPGLMAMVLVLFSEVGRDMSRWPTAAHFVSWLALCPDNDISGGRVLWRGMRKVHNRAGDLFRLAAYSLHHDQTALGDYLRRMKTKLGPAGATTATAHKIAIIFYTMVKNQVEYDPTIWAQRDADREKRFEAKLKRQAQQLGYKLVPIAENPAA

SEQ ID NO: 100287 - protein, 444 aa, unidentified
MIGPQVSKVKLSTQPFGDRPTMTKRSSNPTDAVLVAIDMSKHRQEVLIERPEGGPRRRMTVMATKADYDRLATDLSDIGRPIIVGFEATGNYHRTLAHRLLSAGFELRLISSVALARTREALHNGWDKNDSKDAQVILHMLRIGATQRYVDPLAAEINDLQEMSKTHEAISKAKTQTWHRILTHYLPLYFPEIERFAGNSRSDWFLALLERFPTPASMTVLGQETFSREAWDLVGRKVSKARLINDIYETACASVALPVDEDSVSIAMFRMVIAQARNLIRQRDEIERTAHAMLAENRDYQLLRMIPGIGPINALTILAEAGDLRRFSHHRQFLKFCGLDLATRQSGTFRGRTMLSKYGNARLRRTFWMAAQVAARQRNNSFRDKLGRYTAGHADDADRRRKAMTALTAKMARVAHAVIKTGTEYRPFLERSDARWKDPSLQVP

SEQ ID NO: 100288 - protein, 350 aa, unidentified
MLIIGCDYHPGFQQIAFVDTETGECGERRLTHREEAEQFYRKLQERSLRVRVGMEASGHARWFERFLRELQFELWIGDAAEIRTRRVRKQKTDRQDAQLLLRLMVEDRFPRIWVADAENRDLRQLLWHRHRLVQMRTRVMNQLHVVALNEGLRRKKALWRSAGRNQLESLKLAPWASRRRQDLLDLLDQLTPKIQELTRALEEEVEKRPVTRRLMTHPGVGPLTALAFELVIGTAERFHCGKQIASYVGLVPSEESSGDRRRLGHISKQGNTLLRFLLVEAAQVTVRSQAQWRSKFLHLALRRGRKIAKVAMARKLAVHLYWMWRWGWDYGQLEKLGSHAGEPGNPHGVQ

SEQ ID NO: 100289 - protein, 414 aa, unidentified
MDIVYPHCAGLEVHKKTVVAAVSVPNPSGGWHQETRTFATMTGDLLALSDWLTQYSVTQVAMESTGEYWKPVFNILETNFEVVLVNAQHIKAVPGRKTDVNDAEWLADLLKQGLVKASFVPPEGQRDLRELTRYRTTFVRERATLVNRVHKVLESANIKLTSVATDITGASGRAILAEVIQGTASPATMADLAKGRLRAKRDQLIKALEGRVKAHHRFVLTELLCQIDNLDEAIDRFDQQIQVYCRPFEEAVQHLDTIPGVARATAEIIVAEIGIDMSRFPSAAHLAAWAGVAPGSNESAGKRRSRKTRKGDRPLGVALNQAAHGAAHTKNTYLAAQYHRLAARRGKKKAIVAVAHSILVIAYHLILRKEDYRELGGEYFDKRRPEATANHLVKRLEALGYTVNIQAQTASVAA

SEQ ID NO: 100290 - protein, 347 aa, unidentified
MKFYTKQHQHYCGIDLHTKKMYVCVLNSIGEIVAHRNLNTDPEAFLELIAPFREDIVVAAECMFTWYWVADLCAREGIPFVLGHALYMKAIHGGKSKNDKIDSHKIAVLLRGGTLAQAYVYPAKMRATRDLLRRRNHLVRKRAELFGHVQNTRSQYNLPDPLGRIAKPKNREGVAQRFDDPSVQKSMEVDLEMIEAYDRILTPLEREIIKTANGHNALSYNLLKTIPGVGRILALVMLYEIETVERFKTVQDFASYARLVKCAKESNGKKFGAGGKKIGNAHLKWAFSEASVLFIKGNEPAKKYLDRLTQKHSKGKALSILAHKLGRAAYYMLKNKVAFDQDKFLSH

SEQ ID NO: 100291 - protein, 439 aa, unidentified
MAKTDEQEQTEFAAFIGIDWADRKHAWALQTESGQSIEQGELDHTPEAVEAWAAELARRFGGRRVAVALEQSRGSLVFMLSKYAHLVLFPINPAMSVNYRRGFRPSGAKSDPSDAGLLLDLLVRHREKLRRLDPDTEETRTLQFLVEARRTFVNDKTRYGNRLTAHLKMYFPQVLVWFSEVSSQIVGDFLDLWPTLAQLQRAKPQTVRKFLVQHHSCKSDKVDCRLEEIRQAVSATDDAAVITANVAAATAMVRMIRELREVIDSYDKQIETLVKQHPDFAIFDSLPGAGKALVPRLIAALGTQRDRYNSAAELQCYSGIAPVLVSSGKQAWVHWRWACPKFVRQTFHEWAAHSVAYSPWAKAYYEQQRANGKLRNAVIRSLAFKWIRILFRCWQARTPYQEQLYQQVLATRTAARTDKTVNVQWKTSGGFSKIAGFTA

SEQ ID NO: 100292 - protein, 356 aa, unidentified
MEKLTTVGIDLAKDVIAVCVLDVHGAAIERRVFRRDAFERWAEQLPASNVAMEACGSAHHWGRWFAARGHTARLIAAEFVVPFRKGGKNDTADAEAVAIAARQPTMRFVPIKTIDQQAILAWHSAREGWKEERTALLNRMRGLLAEYGVVIARSADRFLAALPKLSEDSRLPDPVRVLVLEAREQFAALHARLARCDAQIAAHARNSPAARRAGEVLGVGPVTSSALAAMVPDARVFKSGRQFGAWLGLTPRQHSSGGKTRLGRISLRGNVYLRTLLIQGARSTLQAAINTQPSRASRLQRWIIELYARKGYYKTLIAIANKHARILWAMLAKDERYDAAAWQRHPMHQPPLAGNA

SEQ ID NO: 100293 - protein, 339 aa, unidentified
MNITTVGLDLAKNVFHVVCLNEHNKEVKKRMLRCNHVRQFFAQLPACTVAMEACATSHYWGRELIALGHNVKLIPPQHVKPMVLGNKNDYNDACAIAETVNRPKITFVAVKTTEEHDMQAIHRMRAQCIRDRTALSNSTRGLLGEYGISFSKGLAVLRRKIPELLEDADNGLSLRFRNLLARRYGQLVEIDEHIAFYTKELELLSKQDDACERLQTIPGFGPIVASAFRSAIGDGRAYVRGRHAAASLGLVPRQYSSGGKNVLLGISKRGDRYLRKLLVHGARTVVLHAANRDDPLSRWINRIRERRGYNRAAVAMANKMARMGWAILRHNTSYEPTLA

SEQ ID NO: 100294 - protein, 428 aa, unidentified
MNQEDRTRLEEFRQFRKEVRGSTEYLLVGIDVAKDKHYAFFGTATGKTFLRRLVFENSREGFRKLLVQAEALKVQGGLKKVVFGMEPTANYHKPLGEHLIRCGHRVVLVSGVAAHENRKTLDGRWDTNDTRDAANVADLVSQGKCLFYEFPTGALQDLRNLLSLKRRFKRQEHGYRVRIRNHLLAKYFPELDQYYKQSESTSLAIVHWCLDPSVIAGLAYERFVEMVAPGKGRISRESRLQAIWKLAVDSIGCEAGPTVEFEAQVMVEGLKQIREALRSIEGKIQEICCQFPEYEYLLSIPGFGPDVSSKVLGAVGDPFRFQNGQQVLKLGGLDLNAERSGKSSDLARPVISKKGKADLRYALYQAALIASIRDRHFIVYFTNQLRGREKEPGIKTKMRVKLAAKLLIIAWTLMKKKEPFNPDYLRRE

SEQ ID NO: 100295 - protein, 338 aa, unidentified
MTKFKYFVGVDIVSATFVACIGTSPWEVLVRPEEFDNHEDGFTSFLSWLKKHNVPVRETVVCMEATGVYGEGLAYFLSATDYAVAVEPPLNIQKKFPSTGNKNDWQDSQNIAEYACRYVDKLSFWQPRNEILEQIKLLLATRQQLTVQSTAQKNALHAVNRKKVSSPLAKKVHQDMIQQITKHIKAIDAEIRNLIDSDPTFKQTVLLLMSIPGIGLTLAAHLLIMTQHSLDPRELAAYLGICPYEHKSGTSVCKKSTSRHYGPAAARKLLYLAACSVRTHRKEFRQYFYRKTAEGKPGKLVLNNIQNKLIKIACAVLRTQKPFIPNYVSVSPMLLTKA

SEQ ID NO: 100296 - protein, 429 aa, unidentified
MNYTQNEKIMQVKNSTLVVGVDIAKNKHAARAFNFRGIEYDKAIFFENDEAGFKKLLHWIKKVSEKENKTNVIVGMEPTGHYWLPLEEYLRRKTDFLRVVVNPAHVKKSKSLDDNSPTKTDRKDAKVIAKLVIDGRYSVPHMPEKEYADLRVAMTHRERLVKDIVNLSNKIQQLIDKYFPEYSTVFKKWDGKASAAVLKELFLPELILEKTEEEIVEIFRKGANRAVGIKRARKLKKAALSSIGIKEGGEFARLELNNLIEQYELLTKQKELLEEKVEKLLENMEEAKYMESVMGVGLITVAGFIAEIGDINDYDHPKQIQKLAGLNLKEHSSGKHLGQTRITKRGRPKLRALLYRVMLPILANNQEFKQLHEYYTTRRDNPLKPKQSMIALTCKLIRIFFALGQKHVMYDGEKLMNDIERNLNLQEAA

SEQ ID NO: 100297 - protein, 401 aa, unidentified
MPTMQDNVQRVKRFREVKATLRTAHHRLLVGIDVAQAEHVVQVRHAHTRIVGPTFTIPNTSRGFTQLWARIQQAQRATGCREVVCGLEPTGTYHQAVATFLDAQGATVVLISSSVAYWNRRTQDGTWDKHDRKDAANCADLLEQGKILFYSQPDGPLAELRPLVKCLRRARAELASCKARWRTTLRPALGPMGEPLPNRLRAELPAVLQAWEAVAPGRSAQPKGRLPLGLATACADLGAQVTAVQARIRAIEAACTPLAERLPAYTLLRTIPGVGPTVGAILVAEIGDVAWFTQFSQLRKLAGLDIVRVQSGQFAGQARISKCGRGLLRWALYQAALGQARTAAGRARLAALKAKRQGDRYAGFKATVELAAKVLRVVWGVWRSGTPYDPRRMGGLQRQPR

SEQ ID NO: 100298 - protein, 435 aa, unidentified
MALKIVRLNCCGMDVHKDIIVATVGITDPSTMVTEYFQDTFSSFNSDLYRLCDWLASHQCSEVCMESTGKYWIPVYNVLEERLFSVCLAHPKYTKAIKGKKTDKKDSKWICDLYKHDLVRSSFIPPKAIRELREISRYYYKLIGMESSESNRYQNCLTVSNIGIGSIFTDVNGVSAKRVMEAVLNSDNPNDLSDEDILKLVHKSCKKKDLLLDAIHGCRIESDQRFKMIEVQKHKEELDKHITACFTEMFKRASHFFDQFLHIVEIPGVSTLSAILIISEIGVDMSVWEDARQLCCWAGLTPGNNESANKKKSTRVTKAGQYLKPLLVQCALAAVKNPDGYFGIKYRRIRKRRGHKKAVIAIARMMLISIYHMILTGESFEPSDYKELMNPKPRKPRNLTIESAVDFLKQSGEDLDKIISILKEPTIQVSPAVQS

SEQ ID NO: 100299 - protein, 423 aa, unidentified
MTPTQVADFHATYQHFAGFDWAKDEHDVVLVDHRGQVLEQFQFEDSAAGWSTLRQRIAPYANLAVAIETSCGPAVERLLEIGVAVFPLQPKAAARYRQRKAPSGVKDNVVDAWALADALRLDGHTWRRLKPEDPLIQELRLLCRDEVALIEQRTALVNQLQQAIYEYFPAAREAFDDWTMPATWDFVIEFPTPEQLLRAGRSRWQKFLRQHGLKRPETYEKRLEIFARADQFHGTAPVTAAKSRLAVAIARQLITLQEQLEQYRRRIRELFEQHPDHELFGSLPGVADKLAPRLLAECGDDRERFATPQELQCVGGTAPVSFSSGQMHCVRLRRACNKHLRAAVHLWANLSRATCAWAEAYYQQKRDQKMSHARALRCLGQRWLKILWKMWQTHTPYNEALHTLNQTQHGSWVVALLPETANA

SEQ ID NO: 100300 - protein, 309 aa, unidentified
MLSSVGIDTAKATLEICIKPQKIRFEVANNSAGFEALLERLKDFNISRVLIEATGGYEKDVLIALASAGLETICINPARARKFADAMGKKAKTDKIDAEVLADFAAHLSAPQGQPVSPEREELRELVKQRAQFVQSRDDDKRRRQQCRSATVMAHFDEHIEQLKVLIKRLDEEIDQAMVQLDDTRARQLLAVTGIGRVTAANLLASLPELGQLDRRQIAALVGVAPYNNDSGSHRGHRQIWGGRAHVRRVLYMSSWIIIRHNTEFKARYEALRARGKCAKVALVACMRVLIVRLNAMLRDNTPWRVQTA

SEQ ID NO: 100301 - protein, 290 aa, unidentified
MKQAIYVGVDVSKKRLDVAIRPLGQVFGVSNDRKGISQLAKRLKKLQPVCIAIDATGGLEKELAYALAAANLPVAVVNPRQVSNFAKSTGQRAKTDAIDAGVLAHFAEVMKPEVRQLPDAASRELSALVTRHRQLVEMMTAESNRRDLASKSVRKLINSLLRSLKDQLALVDREIRKAISASETWRHKAELLESVPGVGKVTTATLLAGLPELGELDRRQIAALVGVAPFNRESGTWKGKRMIAGRGWIRSVLYMSTVVAVRRNPVLKEFYERLRVRGKPAKQALTAWHA

SEQ ID NO: 100302 - protein, 365 aa, unidentified
MKIMHWIGIDDHADKWTIAQFKGNDDKPAKEFELVPDESGYRKLIKFAKELDGEMRIVYEAGPCGYELYRRLTKAGLKCFVAAPSLTPRKPGDRIKTNRRDARKLARMLRAGELTLITVPDARQESIRDLVRARETTNKDVLRARHQLSKLLLRHGYRYRDGKPWTQRFWVWVNQIELPEVYSREVMQQHVRVIEQRVQIVAEYNQMIESIARDSEYTPLVEGLSVLRGIDWLTAMTILVELGDLRRFASAPQLMAAVGVVPGEHSTGDKTTRLPITKTGNTHVRHIVVEAAWHYQRRIANGPTITRRRKGQAQALLDIAHKCDLRLNRKFFRMTSRGKRSTVAAVAVGRELIGFIWAIGQLVHP

SEQ ID NO: 100303 - protein, 348 aa, unidentified
MILIGCDFHPSWQQVCWVDTETGETAEHKLVHAPGEAEKFYRRFATPALIGMESTGNCQWFVEMANGLGHAVWIGDAAKVRASDVRQQKHDRRDAALLLQLLVEGRFPRIWTPSSEQRDLRQLLIHRHKLVRLRAQVKNELQHLALNQGLQKKRHLWSAAGQKLLAALPLKPWAGRRREDLLKLREGLDQQIAPLDQAVAAAAQENRNARLLLTQPGVGPITSLAFVLTMGDVNRFPRGKQVASYLGLIPREYSSGGHQRFGSISKQGNRFMRMLLVEAAQVAVRCDPQFRNEYLHRCHSKPKGVAKVAAARKLAIRLYWMLRTQKPYPEIVRIESRSRVPLVVRHGG

SEQ ID NO: 100304 - protein, 296 aa, unidentified
MLIIGCDFHPRFQEIAMMDAETGELVERRLEHENGEARVFYASLPKPVLVGMEAPGYAQWFERMLAEFGHELWIGHASEIRAGVVRKQKTDARDAQHLLRLLLEKRFPRIWIPSPAERDARQLLRHRYKLVCFRVSVKNQLHGLAMSQGVCRKKKLFTAQGREELEKLSLGPWGSCRRQELLGMLDQLNPVIDELDRAVRQEAESRADAARLMIHPGVGPVTALAFVLTLGPVARFRRSKQVVSYLGLNPKERSSGDKQHTYAISKQGRRNAVELARGRAVNFSESRREPHKFGQR

SEQ ID NO: 100305 - protein, 377 aa, unidentified
MKKAKTHTGSAFATVEQNGQRATLIKLGVDAHADSYRVVRQIDNGSLQPPQNMKPEKFYAWAEKQKSLAERVVVCYEAGTFGFDPARQLEKRGVECLVMVPVDLDEGNTRVNTDRLDARRIAVRLDRHLSGDKEALNLVRIPSLQEEEQRDLGRQRQTIVREIKRNADRGRAYMRKYGYRVKGRWWESPGWEKLKQKLSASMVQHLERWRRILITLQEVLVEVHSGLIAQGEAHLQGRLLPVGMGLLSYELLRLEVCDWGRFKNRRQVGSMTGLCASESSSGPSRHQGSVTKHGNRLMRWALVEMAWRLVRYQPNCWAVAGWREELESARKNKAKRKKIIVAIARQLAVDLWRVATGQSSFEKLNFTMPSKKTTATK

SEQ ID NO: 100306 - protein, 379 aa, unidentified
MKKLYIGIDAHKNTNSIALAFNDMKTPEFYGKISADLDRTLTALRKILKKYDLEKDEVKICYEAGPTGFVLARRLISLTFDCEVIAPSLIPKKPGERKKTDRRDARKLAGLLRAGELTAVHIPDVEDEVVRDVCRGRSDAVQALARTKKQLKAFLLRNGYHYSGKANWSEAHMRYLRELVMPAPAQKMILEEYIQRIDTLNGQIKRIEGQMRQLLETWTRKPLVGALMGMRGFQMVAAMVIVSEIGHFGRFQHPKQLMAYLGLVPSEESSGDTRRLGSITKSGNAHARWMLIESAGHYGMPPKISKALSKRQEGLPQEVKAVSWHAQNRLNKRWCKLAFRGVHRNKICTAIARELSSYIWDIAMLVEQQPPAHSRATTA

SEQ ID NO: 100307 - protein, 419 aa, unidentified
MAFKIFRKNCCGLDVHKTWIYACIGITDPNGRTEYKQARFSSFTKGLQELADWLAKYDCTDVCMESSGKFWIPVFNILEKTCWVTLAHPKYTKPQKGNKTDRKDAKWICDLYMCDMVKPSFIPPPDIRQLRDLMRYRMKLTNMVTSEKNRALNCLTVSNLKLDDVFSDVFGKSSRSIIHYILEHPGESFNVTPFIDRRCKHPIEEVQAAVDGAISHEQAVKLRECLQHLDELETHKANVEKEILRLAQQYPYQLELLQTVPGFSGNVMTAIALISEIGADMSVFPSAKHLVSWAGCCPRNDQSSKKVKSTRISRAGVYLKPLLVQVANAVIKSDKYPECKERYRRIKARRGHKKAIVAICRMLLTAIWNILSKLEPYSAAGYLEDKLTEHSVVITKSQGLELLRKRGYIFKDEGVPAPA

SEQ ID NO: 100308 - protein, 363 aa, unidentified
MVVLIGADVHKNSHTFVAVDAAGKQIGQITVRATHAGHEKAYRWARKTFIDQDRRWGLEDCRHLTILLERDLLAHGEPVVRVPAKLMARQRAAARTRGKSDPIDALAVARAMAREDDLPAAFTDEQAREVKLVLARREDLVAERTRVINRLRWHLHELDPEVDPAPRAMTNRPAQELVRGVIEASGGIVAEIAGMVLADLERLCSMIDELDARLRAMVRDLEPELLEIPGCAELSAAKIIAETAGIERFATESKFAMFAGCAPIPVWSGKTEGRVRLNRGGNRQLNCAIHRIAITQIRLEGPGKEYYERLRADGKTVMEALRCLKNQIARRLWRTLTRAHAEALTNTPTPLNPTSTTCFPQAA

SEQ ID NO: 100309 - protein, 340 aa, unidentified
MKLYSAIDLHSTNNVTVVIDEQDRVVYQKRLPNDLAVILKELSVYQSELQGMVVESTYNWYWLVDGLMAKGYQVHLANTAAIQQYEGLKYTDDHSDARWLAHLLRLGVLPEGYIYPRAERPVRDLLRKRSQLVRQRTTNLLSIQNLLTRNTASSLSAKRVKALDVQQVDELLPNRDLALAVKANLSVMSSAEEQVELLERTVTQRVKLRPQFSFLKTVPGIGEILALTIMLETGDIGRFPSVGNFASYCRCVGSQKISNGKKKGQGNTKNGNKYLAWAFVEAAHFAIRFNSKIKSFDQRKKAKTKGVVAIKAVAHKLCRACYYIMRDRVPFDVTKAFGPK

SEQ ID NO: 100310 - protein, 400 aa, unidentified
MISVGIDVSKDKSTVCMLRPFGEVVEAPYNIDHTEQALNTLIERIKSFDEDVKVVLEATGGYHQVVVAKLLTSNIFTVVVNPYIMKKYCAATLRKAKTDKIDSIRIANYGIDHWFSMSAYCSPDEIYKELKLLGRQYEQYVRLKVGCKIQLANLLDGVMPGIKSILQGTVPAYSTKDKLCDFVEKYWHYDNIKKMSEKQFLSDYEKWTKRKGYRYNESQAIAIYQLSKNNIPTLKSSTPSTKMLVLQAVKSVREAELTLSLIISQMQEIASTLPEYSVVREMKGVGDVLSVRLIGEIGDVRRFRNGSSLVAFAGIDAPPYESGKFVGTNRNISKRGSSTLRKIGYEIMHSLKVSKPTEDSAVYDFIIKKENEGKPKRVAKIAGLNKFLRIYYARVMAQYC

SEQ ID NO: 100311 - protein, 468 aa, unidentified
MKENYRRCCGIDVHKNSVMVCVLPPLGQPHLEVKKRKFRTFTRDLKQLRAWLKNCGVTEVAMESTGQYWRPLWNLLEGEFGKLLLVNPQHIKGLNGYKTDPKDARWIADLLEGGKLRGSWVPPRPIRELRDLTRQRVHVLEDLNRAKNGIEQLCQSGNIKVSSVATDLFGVSGRKMLRAIVEAKHDAGWMADYAQGTLRGKRRELTLALEGSFTSEQRWLLEKELRQVEWLEQQIEAMEQEIERRVAGFEQPIQRLITIPGVDRRTAWTIVAEIGVDMSVFADARHLASWAGLCPGNRESGGKRMSGRARKANRYVKRAMCQAAWAASHTKQTFLSAFYRRMCVRKGAPKAVMALAHHLIVVVYQLLSRGEQYVEFGGDYYDQRNKPKVVARLVNRLTKLGYWVSLEAAELPEPTASDAPASPELPQRTVSPKRKRGRPCKCAERGITCKHGTSAEVNSLIQKAATPA

SEQ ID NO: 100312 - protein, 334 aa, unidentified
MENIALIGIDLGKNSFHIHCQDRRGKAVYRKKFTRSKLIEFLATCPATTIAMEACGGSHFMARKLEELGHFPKLISPQFVRPFVKSNKNDFVDAEAICEAASRPSMRFVQPRTESQQAMRALHRVRESLVQDKVKTTNQMHAFLLEFGISVPRGSAVISRLSTILEDNNLPLYLSQLLLKLQQHYHYLVEQIKELESQLKRKLDEDEVGQRLLSIPCVGTLTASTISTEIGDGKQYASSRDFAAATGLVPRQYSTGGRTTLLGISKRGNKKIRTLLVQCARVFIQKLEHQSGRLADWVRELLCRKSNFVVTCALANKLARIAWALTTRQQTYEA

SEQ ID NO: 100313 - protein, 343 aa, unidentified
MKVIRIGVDLAKNVFQVHGVDRFEKPVWRRKLSRANWIDAVREVAEPGCEIGMEACGGAHDWARRLQAMGYKVRLIAPQFVKPYVKSNKNDANDAEAICEAMSRPNMRFVAVKTVAQQNIQAVHRVRAELSSHRKAKANQIRGLVTEYGLVAPKELVHLRIAIPLWLEDAENGLTDPFRRLLNGLWQDLLALDTRMNELDREVAQMAAADPVARRLQEMRGIGPLIATALVATIGDANNFKNGRQMAAAIGLTPRQSSSGGKERLLGISKRGDSYLRMLIIHGARSALRTAANKDDRLSRWALKLTERRHHNVASVALANKMTRVAWAMMKNETTYNANRAAA

SEQ ID NO: 100314 - protein, 314 aa, unidentified
MNITEEINVGVDTGKAQLDFYVRPLGQAFCTPNTAAGIHDALQHLKQLQPSRIVIEATGRLELAFVIAAQKAKLPVCIVNPLHVRKFASAAGKLAKTDQLDAQIIARFAEALQPEPTRIKPQNARLISDLLARRSQLLDMSTMEKNRLSILPKALHASLNRHLKQLQAEIKKIEALLDKHIDRTPEWQDKRDLLMSVNGVGKVLAYTLLSDLPELGQLNRKAIAALVGVAPMNRESGDYKGKRHIRGGRTRVRKVLFMAVMSAMQSNPKLKRQYTALKAAGKPPKVAMVACMRKLITILNEMVKTGQHWKPELA

SEQ ID NO: 100315 - protein, 371 aa, unidentified
MYIVGIDIGKNHHEASIVSPEGKQIGRSLRFATTHKGADSLMSFIFKNIGNSPCVFGMEATGHYWYPIYSFLKAKGYTIYVINPIQSDSLRKMYIRQTKNDSIDSFLIAKVIRFGQFGTTSMADENILAMRQLCRYRDSVISSRTEIKLRIGTIMEQIFPEYEKQFSSLWVSTSMGILEKYLTPENIENAPIDELFEIIKDKSHNRLTRAKAISIKEAAADTFGIKIAQDAFSFQLKQLIDRMNFLDKQIEALDCQILEYYEKFDCYLHTIPGIGIIGAATILAEIGDISRFKNSSSLIAFAGIDPTVRQSGEFNSTHNHMSKRGSPYLRHAIFLAATTCSFHNSPLNAYYKKKRDQGKHHLTATGAVARL

SEQ ID NO: 100316 - protein, 285 aa, unidentified
MTLYIGVDFHPHQQTVSYCNNEEGEVHQTSLIHNVEQVRRFYRQLPKAVVGIEASCTAAWFEQMLFDLGHELRVGNPTAIRARARSRHKSDKRDADLILDLLLKDEFPTLWRRSVQGQSVLEQLRFRHQLVKHRTQICNRLQALAHAAGLPKKGIQTKRARVALMEARLSETQSFQRDQLFELLDDLTERIKQVEQWLEEKAAGDTKVQLLLTHKGIGLLSALATVHTLGDVSRFPSSKEAVAYTGLDPLEQSSAGKVRYGSRRTSWQLSAAASARTGDARGESL

SEQ ID NO: 100317 - protein, 350 aa, unidentified
METAYDGRQVVGMDLHRRRSVLVRMTEDGRRLGTARIINSAAELRREIARAGKSPRVVLEATYGWYWAADTLAAAGAEVHLAHPLGVKAFTYRRVKNDEKDAADLADLLRMGRLPQAWIAPAEIRELRELTRYRIKLVRARSSCKEQVHAVLAKLGIPVTCSDIFGVWGNTWLDGLSLGQPYAGKVASLRKLTSELSTEIAVLDAVIADLLAHHDGYHAIQALPGIGPVLAAVIVAEIGDIRRFSRPARLSSWAGLTPRHRESDLKVTRGHITKQGSPLLRWAVVEAIQHQPAGSPVRDVKDRIIARRGGQAKNIAKTAAARYLLTCVFYAMRDGHARSLAARTAAQDAA

SEQ ID NO: 100318 - protein, 386 aa, unidentified
MQKLNDLSRSLTALEPNGTLIAVIEMSLSSWLVAGIVPGVERQPLKKLAVDESALLKLLHRWREEAEKAGRRIERIAVAFEAGRDGFWLARWLKARGIEAYVIHASSVAVSREHRRAKTDRLDTELLKRSFLGWLRGERDHCKMVEVPTMQDEDAKRPNREHDSLIGERSRIVNRMKAALVRLGIRGFNPKLKRATTRLDGLHTPEGEPIPPNALAELRRDMERRRLVNNQIRQIEEERLERIEQAPCDGAHVMVRLLARVMGVGIETADMLVHEVLSRNMRDRRAVARYAGLTGSPDESGRKRREKGLARSGNARVRRGMIQLAWRFLLHQKNSALTKWFRSRTENARGTRKPMIVALARKLLIALWRLMREGIVPDGVVLRPAQ

SEQ ID NO: 100319 - protein, 349 aa, unidentified
MAMLAESVDAVIGVDTHTDTHTACLIEPTGRQVATVTIEASSHGYAALLAWAVDHAPGPRLMWAVEGSRSHGAGLARVLLAAGQQVVEAGRPERATRRPGGKSDPVDAYLAAREALSAVHHASPRADGDREALRILLVAREHANNTRTAAVNVFKALLLTAPDQLRESLRHQSTPRQTAACAVLRAYGRHSTSERILRQTLRTLAQQIRLLDKEIRANERQLQQLVSALMPALLAEPGVGPISAAHLIVAWSHPGRCRSEAAFAALAGVSPIQASSGRITRHRLNRFGDRRLNRALHTIVNWRMIHGHEPTQHYLIRRRAEQKSDPEIRRCLKRYTARHLFRLMETMAM

SEQ ID NO: 100320 - protein, 405 aa, unidentified
MKNNSSSNKQKMAVQVEVREQTPLEKSNSSAKRLKTVKAVKEFGEQKLFAMAAVGGSPRLTIGLDTGDRSSCWCALGADAEVIARGEVITERQPLELFFGRIPASLVALEVGSHSPWISRLLKKRGHEVVVANARRVKLISESSRKNDQVDAELLARLARADRLLLSPVKHRGEEAQADLMGIRVRAQLVELRTQTANAARGLVKPFGQRLRACDCDSLKRADAGDLDVAIRGHAERLLGVVEELTKQIDACDKELERMAKDRYAKETAQLRQVPGVGPITGLTFVLTLDDPARFEKSRDVGPFLGLRPKSSQSGNSEPEMRISKEGDGYLRTLLVQCAQYILSRRGPDTDLKRWGLEIAAKGKKKAKKRAVVAVARKLAVLLHRLWVNGEVYEPLRQGRLSVAA

SEQ ID NO: 100321 - protein, 366 aa, unidentified
MSAISKTTDRVVIAIDPHKASWTAAVVDASSQPVATIRVPVSRDGYRALRRFADRWPDPTWAIEGASGLGAPLTARLRTDGIDVVDVPAKLAARVRMLSTGHGRKNDDADAVSVGIAARSAPRLNSAAVDDTVTALRAIVDHRDDLVKTRTQTVNRLHVVLTNLIPAGAQRDLTAERAAELLRGIRPRDTAGKTLRGLATDLTSEIRQLDRRIAKAAADIQTAVTASGTALTELCGIGALTAGKILGRVGTIDRFRSAAAFASYTGTAPIDVSSGDVVRHRLSRAGDRQLNLCLHVMALTQIRQDTPGRAYYLRKRTEGKSHKEAMRCLKRRLSDIVYRQLRRDANRLEAGPGGHSGAALSSSAAS

SEQ ID NO: 100322 - protein, 407 aa, unidentified
MLFVGDDWAQDHHDVYLMDEAGTRLGGGRLAEGLTGIGQLHEMIAAHADEPGEVIVGIEKDHGLWVGALVASGYQVYAINPMAVARYRDRHRMSGAKSDAADAKLLADLVRTDRHNHHPLDGDSGQVEAIKVLARTHQNLIWLRTRQINTLRAGLLEYYPAALEAFPNLGDRDRDRDALTVLHRAPTPEQGARLSLSKIAAALKAGGRSRYIEERSRQIQAALRGEHLRAPDAVTTAYGAATSATIAMITELNHQISALETQLAQSFRTHPDADIYLSQPGIGVILGARVLGEFGDDPNRFTNAKCRKNYAGTSPVTVASGRKRAVMARHVRNQRLYDALDRWAFATLKTSPGARTFYDHHRAAGDTHHQALRALANRLVGILHGCLRHHTAYNEDTAWGHRTLTAA

SEQ ID NO: 100323 - protein, 397 aa, unidentified
MYIVGIDIAKRKHEAAVIDGEGTVIIKPFSFTNNCSGYNRLLAMLTKAKLPLDEVSFAMEATGHYWLALFTRLQKEGFRVQVINPVQTNSIRSFYIRQAKTDPRDALLIAEVIRFGHFSESTLHPENIYELRELCRGRHAIVSMQADVKRKVVALLDQVFPEYETAFTNLFGDTSMAILQTCPTPKELSEMPLEELCHLIEVSSHKRFRMAKAQELQALARNSFGFAMAGDVFSTMIRLYAKHLDFLKQQVREMDRKIAEIMDTLDTPITTITGIGPTLGAYILSEIGDISRFSSAAKLAAYAGIDPTMRQSGEYNGVRNRMSKRGSPYLRHAIWLAASSAVLHDPALKLYFQKKRDEGKPYMASVGHACRKMVSIIYAVMRDNKAYTPCIPNEIST

SEQ ID NO: 100324 - protein, 394 aa, unidentified
MRKKILFVGMDVHKCSIDMAIAGSEANSPVRSYGQIDNRLGILDRVIGKLQSKESELRFVYEAGPCGYQIYRHLTAKGYHCSVVAPSLIPKRSGNRIKTDRRDAINLVRLFRAGELTSIYIPSEEDEAIRDLLRCRDDMKRLQRKARQRLLAFLLRDGHRYSATRHWTKAHMKWLGDIKFGHAAQQIVFEEYLDSINECTERVERITGQIRSQVPLWSRAPFVKAYQALRGVSLIVATTVVAEIGDMRRFKNPRELMAYLGLVPSEHSSGKTIRRGPITKTGNGHARRVLVEASWSYRMWPRKSQTILKRQEQLPKSICDISWKAQMRLHNRYWRLRMRGKSKQATITAVARELSAFIWAIDREVQQASLMKNARLFEEARPRKGESSISAMGI

SEQ ID NO: 100325 - protein, 368 aa, unidentified
MKKVSTAAAKASRNISRQTLTVGLDLGDRNSWYCVLDEAGQIQLEQRVGTNAKALREVFGAMPRSRIALETGTHSPWISRLLSELGHEGIVANARKLRLIGESRKKDDRLDAQTLARLARIDPQLLYPVKHRSAQGQADLAVIRARAGLVRARTAMLNTARGLAKSYGERFRGCNLRNLNPEKAEALSPELQAALQPLLAALESVSQQIREYNQQIETLAQERYPQTALLKQVKGVGTLIALTFLLTLEDPQRFGKSRDVGCYLGLQPGRRNSGKSQPQMHISKEGDPYLRTLLVQGAQHILGPFGVDCDLRCWGLKLAERGGRSGKKRAIVATARKLAVLLHHLWVSGEVYEPLHNSRRRTTVAAAA

SEQ ID NO: 100326 - protein, 344 aa, unidentified
MDHFAGLDVSVKETSVCIVDDTGKIVREVKVASEPGTLLAVLKNPAYRFKRIGLEAGPLSQWLFSALAEVDLPVICVETRHMQAVLKAQINKTDRNDARGIAQMMRVGLYRPVHVKTLRSQKLRMLLTHRKLLQSKAIAIENDLRGTLRNFGLKVGMVGKVKFEARIKELVENLPDLAALIEPLLIVRRVLREQTVILYRRLLAIVRDDEVCRRLMTTPGVGPVVALSYRATIDVPARFRKSKAVGAVFGLTCSKYQSGEIDRSGRISRCGDEMMRTMLYEAAQAMLRSKKWSWLKAWAMQIARRRGMKKAIVALARRLAVVMHRIWVDGTEFRWTREQAAVAA

SEQ ID NO: 100327 - protein, 320 aa, unidentified
MASLFVGIDVSRNTLDVRHLPADRAFRIPNTPRGHRQLIDTLLPLAATPADIRAVLESTGGLELPAALALEEAGIEVVVIKPERARYFAKAHGQLAKTDAIDAAILARFVRDVPLTIVPLPPEELRHFRDLLDRRYQLVEMRTMETNRLATTTLEPARKSIEKHVDWIDREISRVEADLNRRIAANPRWAELDRILQSIPGLGPQTARLLIGHLPELGHVDRKVVGQLVGLAPIANDSGTTEGPRHIVGGRWQVRNGLYMAALVASRWNPIGRALYQRLRERGKSAKAALIAVAHKLLTIANAMVAQKTLWRHSDVAIPC

SEQ ID NO: 100328 - protein, 351 aa, unidentified
MSHKLNSEIAVIGIDIGKNSFHVVGCDDRGTIMLRQKWSRGQVEARLANLPPSLIGMEACVGAHHLSRKLRTLGHDARLMPAKYVRPYSKGQKNDFRDAEAVAEAVQRPTMKFVPTKTAEQLDLQALHRVRERLVSQRTGIINQIRAFLLERGVAVRQGVRFLRAELPRILATPCDALSPRILRVIEDLAGDWRRLDERIEGLSSEIEVLARQDKGCERLMTMPGIGPIIASAIVAAIGTGDAFSKGRDFGAWLGLVPKQISTGDRTILGSISKRGNRYLRTLFVQAAWVVLVRVGPKHWERYGLKSWLEAAKKRLHHNVLAIALANKLARIAWSVLAHGRTFEATKVQAA

SEQ ID NO: 100329 - protein, 349 aa, unidentified
MGVDSASGADPGKEGQAMWYIGIDLHRRTVVIAMVSDDGRTVRPRHFKCSDTGGIIKYLSGHRPFRAVIEASASYRWLYDLLGEHGEVVLAHPLRLRAIWSGRAKTDDLDSMELAKLLRGDLIPTSYVPPADYQALRDLTRARSRLVNERTDAVCQVRALLARANIEAPYKRLFGPRGRRWLSLVELDAASSAVKAELVLRLDHFERAIDLMDEELSAAAEGFPQTEALTVIHGIGLYTALLVVAELGEPGRFGRAAQVGAYAGLTSRVRQSGATEHRGAISKEGSRWLRWILTEAAMKVIRKDEALRRFYDRIRKRSGWRRARVAVARKLAEICWKRLMRWHEERDAA

SEQ ID NO: 100330 - protein, 351 aa, unidentified
MKKVLKQVLGIDVAQKELVVTLGRTLEDFTIELYAHKVFKNSDSGIRSLLEWVKKHTNNAINIRYVMEATGVYHQKIAYHLAENDYEVSIVLPNKISNYMRTLETKTITDKTCSEAIAQFGLERKLDNWQRPKAVYRNLQQLTRERDQIVAERSIVKNQLHAESSEAYPYQKSIERLQDRIFFLNKQEKEIKQDIKEIVRENKDLEHEVRIMSSIPGVGELTAIIVLAETNGFELIRSKKQLTSYAGLDVKEKQSGTSVKGKPKISKKGNRSLRKAMYLPALSAVKWDERFKAIYARIVHRNGIKMKGLVAVQRKLLEMMYILFKNKNTYDAHYLEKENSVQIQDQHAITG

SEQ ID NO: 100331 - protein, 385 aa, unidentified
MHANSTKAPAAIRVDLAAIFVSLELSRSKWLVTSLSPGGGERMSRHTVLGGDIPGLLDHVAELQRKAEVRTGRSFRVISIQEAGLDGFWIHRVLEREGIESYVVDPASIATSRRRRRAKTDRIDGEALVRALLAYNRGEPRVCAMLRVPTPEEEDRRRLVRERKALTNERIRHVNRIKGLLFSQGVSGYEPLKGDRRKCLDALVTGDGRPLPPALKAQISRELDRLELLIQQIKDVEEARDAMLVAADVPTPALLLNLKGIGPEFAAVLWSEGLSRKFDNRRQVAAYAGLVPTPWQSGQVNCEQGVSKSGNPRLRSTLVQVAWLWVRHQPNSALSQWFRARVTQNGGRYKKTAIVALARKLLVALWKYVNAGVVIEGAALTTPSA

SEQ ID NO: 100332 - protein, 347 aa, unidentified
MNFYTQQHKHYCGIDLHARAMYVCILDEQGTKLVHKNLPTTPEAFLRLIAPYREDLVVGVECMFTWYWLADLCSQEGIAFVLGHALYMKAIHGGKAKNDKIEAHKIAVLLRGGMFPQAYVYPSEMRATRDLLRRRCHLARKRAELLAHIHNPNSQYNLPEIGKRLANKSNREDVAEHFPDPSVRKAIEVDVALIDQYDQLLGEVELYLTRSAKAHDVQPFARLQSVPGIGQILALVILYEIQDIARFPRVQDFVSYCRLVKCAKESNGKRFGTSGKKIGNVHLRWAFAEAAVLFIRQSQPGKEYFAKLEHKHGKAKALTVLAHKLGRAVYYMLSREHAFDLKRFVTA

SEQ ID NO: 100333 - protein, 441 aa, unidentified
MDKSTAKPLRAAQAQVSAPEITVHALYRSAIGIDVHLNLLVCCHQTQLDDHQELSEIVEFNTDRSSLDKFAAWCRERDPSIILMESTGVLWISPYEALENVGFGSDRLALINARDAKAAVGRKTDRKDASRLAELARSGHFRRSFVPPKDFRIQRFISREYQKIKSELSVAKNRHQKLLNSTGCRASIVFSDVHGKAASAILEAKINNDPQLSKIISANCGRLRATPEMIEDALNFEIEPLVAEQLRRSSEHLKELHQYAENTFNRLRKLQQPYEAQIKLLRTIPGVQEISARLIFAELCGNLKDYFVDSEHFTSWLGICPGDNTSAGKQKSGSCPKGNKWLRRTLVECVRGYSLSGRCPSKEKFQALKLRRGYKRAVVAMAHLLARIVYSVLLNNKAFEPQETNAHRDAVVVRILSALKEAKRFPKSGIGIVDGRYLRNC

SEQ ID NO: 100334 - protein, 402 aa, unidentified
MNAVGIDVSKGKSMVAIMRPFGEIVSAPFEIKHTASDINSLVELINSVEGESRIVMEHTGRYYEVLAHQLSAANLFVSAINPKLIKDFDNDSLRKVKSDKADAVKIARYALDKWQNLKQYSVMDELRNQLKTMNRQFGFYMKHKTAMKNNLIGILDQTYPGVNTYFDSPARSDGSQKWVDFASTYWHVDCVRKMSLNAFIDHYQNWCKRKKYNFSQSKAEEIYGKAKELVPVLPKDALTKLIIKQAVDQLNSASTTVESLRTLMNETASKLPEYPVIMAMKGVGTSLGPQLMAEIGDVSRFTHKSAITAFAGVDPGVNESGTYEQKSVPTSKRGSADLRKTLFQVMDVLIKTHPEDDPVYQFLDKKRAQGKPYYVYMTAGANKFLRIYYGRVKEYLSSLPES

SEQ ID NO: 100335 - protein, 348 aa, unidentified
MLADELDFVIGVDTHRDSHSLALVSSPAGARLTETQVQADEEGYAAALAFACEHAQGNRAWAIEGTGSYGKGLTRHLERSGELVIEVERPRRRSKREQGKSDSIDALKAARFLLAKEKPVVPRSAGPREALRVLLQVRTSALAARKVALAQLRALLVTCPEPLRGELRSLTRARLLNRLRSLRMKPGREHELASTLLALKLLARRIEALSLEIELCDREILPLAREMAPRLLAERGVGPICAAQALVSWSHPGRFRSEAAFARLAGVPPIPASSGQTVRWRLDRGGDRKLNCALHMIVLSRRQHDPETISYIERRVREGKSEREAVRCLKRYLARRLFRLLEESALTA

SEQ ID NO: 100336 - protein, 350 aa, unidentified
MSETRMYWVGIDVSEAVFDAAVASPGQRVNAATLKQLPTATFDRTPEGVQQLMGWLRKHVPAESPLPVRAVMEATGVYSIELTALLCKVCPEMLPAIANPERTSAYRKSLGLRNKTDRIDARALALFGLERQPDAYEPLSPIQAELRSLARCRDSLIETQKAHENQLDQRPPSPLVRQTLKRVIATTGAAVEKIEQDMKRVIRSDENLQHNYDLLTTIPGVGFVTASVVLAEFGDLRRFGCARQIGAHAGVTTSYEESGEKRRPGHMSKKGNAYVRKTLYMSAISASIWNPHMRKTYHRMTAAGKKPMVALGALMRKLLVLMRALIVSGKPFDRRRKPCGKIPQHAQKTT

SEQ ID NO: 100337 - protein, 430 aa, unidentified
MGLIVPTTIRPEREDQPLPYEWFVGIDWGSQQHQVCVLDRDRRRVGERAVDHDGASLARLADWLWGMAVGQPQRVAVAIEVPRGAIVEGLLERGFHLFALNPKQLDRFRDRHSVAGAKDDRRDAFVLADSLRTDQPSFRRLQLDAPQLLLLRELSRAEETLLEEFRRSANRLRDQLHRFYPQMLQLCSAADAPWLWDLLDLAPTPAHAALLSAEQVQRVLKAHRLRRITAPEALACLQAPALPVAPGATEAAQAHCGFLLPCLRVLAEQLRACGQQVDALLRTMADEPGAGERPSDVAIVLSLPGVGRKITAWLLAEAAQPLAARDYQVLRTHSGVAPVTKQSGKRRLVVMRRGCNPRLRHALYHMARVAMQRDTHFSSVYTALRAKGQRHGQALRAISDRLRRILVAMLRNGTCYDASRIRRESAVQMG

SEQ ID NO: 100338 - protein, 343 aa, unidentified
MQVTTIGLDIAKRVFQVHGVDAAGKVGFRRKLQRSEMAAFFAGLPPCLVGIEACATAHHWARLIGAAGHDVRLIPPSYVKPYVRRSKTDAADAEAICEAVGRPNMRFVPVKSAAQQAALLHHRARDLLVRQRTMLINALRGHLGEFGIIAPAGRHRVPDLFNLLQEASDAEVPALAREALRSLIAELHALEQRIDAIEAVIVREHKANEVSRRLATIPGIGPITASAMAAAIADPTAFKSGRELAAWIGLTPRQHSSGGKQKLGRVSKQGDRYLRRLLTVGATSVMRRLPGKTDGHSAWISALLGRRPFRLVSLAVANKMARIAWAVMVRQEEYRKPAIAAAS

SEQ ID NO: 100339 - protein, 437 aa, unidentified
MTSHCRSCNHKISGGVLLAFKIFRFNCCGLDVHKTWIFACIGLTDANGRTEYKEKRFSSFSRGLRELAAWLASYKCTDVCMESTGKYWIPVFNVLEKTCNVILAHPKYTKPQKGNKTDRKDAKWICDLFMCEMIKPSFIPPAEIRHLRDLVRYRSKLTNMLTGEKNRAQNCLTVSNLKLDDVFSDVFGKSSRSITEYILAHPGEAFDVTPFVDKRCKTPIEEIQAAVDGAVSPEQAIKLRQCLDHIDELEKHKAEMEREILRVSNSYLDALELIRTVPGLDKNPFTAIQILSEIGGDMSVFPTDKHLVSWAGCCPRNDQSNFKIKSTRISRAGSYLKPVLVQVANALIKSKKHPEITERYRRIKSHRGHKKAIISICRLLLTAIWHILTDLKPYSAEGYLAPRPVKEDKVLTTSQALSLLKLRGYIIKDDDSPATAC

SEQ ID NO: 100340 - protein, 437 aa, unidentified
MQRVRRLREKREGSRRRQEVSTEGKAGSNRKVALHRSDTDGRRPSLTADWRTKRQSRIRMEPAMEGITFVGLDAHKLWIMVAMLLPGREVAIEWRVPNEPRAIRRMLRRIEREAPGEVRFCYEAGPCGYTLQRQITAWSEASCMVVAPSLIPGKPGDRVKTDRRDARKLAFLFRAGLLTEVQPPTEGDEAARDLCRAREDAREDLLRCRHRLTKFLLRRGIIFTAGKRAWTQAHRRWLHSLRFEQTCHEIVFADYLLAVEHLEQRLEAFVAQLERLAQDQRYAPAVAALRCFRGFDTISAMTIAAELHSFHRFNSPRKLMAFVGLIPSEHTSGQRRRLGAITKTGNSHVRRLLIEAAWNYRHRPRVGTLARRRKGQPPWVIALADKAMQRLYRRYLHMIAKGMPSQKATVAIARELLGFVWAALSPIAAGAQMPLAS

SEQ ID NO: 100341 - protein, 417 aa, unidentified
MKKNSNSPRKKEPKATRVKAQRPVQREPKEVLAELVEKLRGKLERKTTSASPGEAGPRAELSPNLDRLTVGVDLGDQWSHYCILGLQGEMLSEGQVQTRQAEVTEFFKALTPARVVIEVGTHSAWVQEIIAGEGHEVLVANPRLMEGSKRRKRKNDRIDANKLARLGRVDPQSLHPIEHRSREVRQDLVLLRARDALVAVRTELINTTRGMVKSVGKRLPKCSSRSFGSQAEKELPVEIREALLPLVQLADALSHCIKEYDVKIEAMASQKYGHTNLLRQVKGVGPITALAYVLTLESPERFAKSRDVGPYLGLVPKQEDSGESQPQLGISKAGDRMLRTLLVGSAQYILGPFGPDTDLRRYGLRLCERGGKNAKKRAAVAVARKLAVLLHRLWVSGEVYEPLGYTSSRAIVQQAAA

SEQ ID NO: 100342 - protein, 387 aa, unidentified
MPQPNDLSRSLTALDQDSTLIAVVEISQSTWLVAGLVPGVDRQPLKKLAADEAALLQLLYRWRDEATRAGHAIDRIAVAYEAGRDGFWLARWLQRQGIEAHVIHPTSVAVSREHRRAKTDRLDTELLKRVFLGWLRGEQRHCSMAMIPTLEEEDAKRPNRERESLVGERTRIVNRMKSTLARLGIRGFKPHLRKAPDRLDKLRLAEGAPLPPNTLAELRRDMARLRFVMDQIREIEVARLVRLEQHPEQRHHAMILVLARVIGVGVETADMLVHEILSRNLRDRKAVARYGGLTGSPDESGAKRREKGLARAGNARVRRGMIQLAWRFLMFQKESALAQWYRARTADARGATRKTMIVALARKLLVALWQLATTGEVPHGVVLRRAA

SEQ ID NO: 100343 - protein, 360 aa, unidentified
MSNSIVHDDPSVKVIVGVDTHKHEHVAVAINGLGARLATARVAANQAGYAELLAWARQLGTIEAFGIEGTGSYGVGLASFVRRQGCRVVEVNHCDRRKRRNNGKDDTLDAETAARSVLAGIATAIPKTADGAAEMVRQIKVARDTAVKARSAAIITLKTLIVNAPDALRETLEPLTDRQLIDRCAALRPGDIIDPTASVKHALRALATRWRTLSNEIATHDDVLDTITKAAAPTLHDAFGIGTDSVAEMMIVAGDNPTRIRSEAAFAKLCGACPVPASSGVTNRHRLFRGGHRQANAALYRIVIVRMGSHQPTIDYVRRRTAEGLSKKDIIRCLKRFVAREVYHALIDDYWVGAASAEAA

SEQ ID NO: 100344 - protein, 351 aa, unidentified
MLADQVDHVIGVDTHCDAHELAVVAASSGGVVARSSQRANPRGYAETIRFAAAHAPGRRVWAIEGTGHYGAGLARYLALHGEAIVEVGRMPRSGQRLEGKDDRLDAIRAARAALGSDKLAVPRVGERREALRMLLSTRRSAVEVRRQSLTQLRSMIVTAPEELREQLRSLPTQQLLTRCGRLRGPRSGSPDELAAVLVLRTLAQRIHAATHEATTLKREILGHVRAVAPELLDEPGVGPIVAAQLIVSWSHEGRVRSESAFARLAGAAPIPASSGHTTRHRLSRGGDRQLNRALHTVILYRRHNDPATKAYIARRIAEGKSSREAVRLLKRYLARHLYRVLNQAGKPAIAT

SEQ ID NO: 100345 - protein, 405 aa, unidentified
MKLYIGIDWSQSKHDICFVNTKGVIQSQLVIPHSQTGFWEFEQRRKRLGVPAEDCLMGLETSHSILVDFLWDRGYANLFVLPPTLVKGSRTRMRSSAAKDDPGDAYLIADILRTDHGRLQAWQPDSGLTRQIRTKVRFISFLTRNIVRMTNRQRAVLLRYYPVATELFSSLSTLISQHFILAYPTPQAAAALDLDSFRKFASQHGYTHKSKLANILAKLDQDDPQADMDIIDACQDEAQGLAHVLLEMIRLKQDNLKQLQQLLDLHPDQNIFASLSGTGVYLQAALISKFGDDRGRFPAPDRVQAIAGTSPVTIRSGKSKYVRFRKSCDYEFRHIVQQWAKQSLRSSVWANAYYARVRPNCDSESHAFRCVANRWLAILWRLWQDHNPYDETYHLKQRALRSQPR

SEQ ID NO: 100346 - protein, 338 aa, unidentified
MAAPASYDLVVGIDIAARTATVVELPHDGTPSRPHTIEQSPAGQAAFLQHLSSLNLPLARILVVMEATGSYWIALATILAHAGLAVSVINPAQAHDFAKALLKRSKTDAIDAQTLARLGALLLPPCWTPPPAIYHELQQRLLHRDALLDLRQQVRNQLHALLQQPTVIASVRTHLETLDTTLTEQIAVVDAELASAVQLDEAWAATLARLQTIKGIGLLTAAWLLVTTLNFTVSRDAKQAAGYAGLVPRQHQSGTSVRGRPRLDHAGNSRLRRALYMATLSAARHNPVVQPFYKRLRAAGKPMKVARCAAARKLLTIAWAVATKQQDFAAPLVSQSQP

SEQ ID NO: 100347 - protein, 387 aa, unidentified
MTHFVGIDIAKYKHVASVYNSITGELVIDSLHFDNNDKGFKALLSNVSKLDDLVFGFESTAHYHQNLFHFLSSNKYKCFLLNPIQTSRFRGLSIRNAKNDNIDSKSIAQFIMFSYKELINQEYIHNDLKELCSQRDSLLNQSSSLKIKLLSYLDRVFPELESIVGKNGIHSKAIRAILLKYPTAKSISETRIDHLCNLAKKASGNKFKQEKIVKIKEAAKASVGFHSSALSLKIKQTIDSLIHLKKQIDEVNHEISHHSLITESPLHKIKGMNSIEIAYILSAINNISYFNSVKKIVAYAGLDPIVRQSGTFQASRTRMSKRGNRLLRYALIWAANNVRKHNKDMEQYYLKKRSEGKNHYNALGHCAVKLIRYIYFVMTHPEQDFSN

SEQ ID NO: 100348 - protein, 353 aa, unidentified
MTSTKYIGMDVHKESISIAVRSDSGKLVMECVIETRANAILDFIHGLHGKLHVTFEEGTWATWLYDLLKPHVTRLVVCDPRKNNRQGNKNDQIDARELSDRLYMNKLSSVYHGGAGVRTLKELARSYLTISKDLARVMSRVKAIYRSWGIPCAGKQVYAPRHRAEWLAKITEVGVLRRAEFYFQQLDALRSLRQAVRRDLLAESKKHKATKLLRQIPSIGPIRAALLIALIQTPNRFRTKRPLWKYSGFGIETHSSADYRSVKGELQKSRKQVSVRGLNRDCNHDLKNLFKSAATIASVKPGPFQEFYAALLAKGMRPEMARLTLARKIATIVLIVWKRGVSFDAKYLKPQTA

SEQ ID NO: 100349 - protein, 392 aa, unidentified
MRKPKQRKPLNDLSRSLTTLDANHTLIAVIEMGQQSWLVAGIVPGVERQPLKKLDSDENALLKLLDRWRMEAEKAGHNIKRITVAFEAGRDGFWLARWLSARGIEAHVIHASSVAVSREHRRAKTDRLDTELLKRAFLGWLRGERDHCKTVAIPTIKDEDAKRPNRERDSLVGEQTRILNRMKAALARLGIRNFNPKLKKAVERLAGLRTPEGEPIPPNTLAELHRDMERRRLVIDQIRQIENARLQRLAQAPSDGPHAMVRLLARVIGISIETADMLVQEVLSRNLRDRRAVARYAGLTGSPDESGSKRRQKGLARAGNARVRRGMIQLAWRFLMFQKESALAQWYRARTENARGSRKTMIVALARKLLIALWHFVRDGVVPEGVALRPAQ

SEQ ID NO: 100350 - protein, 341 aa, unidentified
MGKVTTFGVDIAKHVFAVYWVDVQTGEIGEKTMSRAKFEEFMRNRESSRVVLEAGGSAHHWARWLAQQGHEVRLIAAQHVCAFVRTNKTDQGDARAVWEAAQRPGMKWIPAKSAASQAVMSLHRMRTQLKDMRRMQSNQLKALLYEFGILAPVKVSAAHVEQWVTAGRLPQLLQASLGKQIERIAQLKREELELTRCIEQHNAADELATRLQAVAGIGTLTASALAAELGDGAAAGYANGRQYAACKGIAPRLSGTGGKVRAGSISKRGDPYVRTLLIHGARSVISHQMRSKLLSPWLKALLERRPLNVVVVALANKMARTAWALAAHGRSYQQDYGARAA

SEQ ID NO: 100351 - protein, 370 aa, unidentified
MKQQHQDSEVTIGLDLGDRRHRFCALDSGGEVLEEGSLLNDRASLARLTARYRGALAVMEAGAHSPWVSRYLEGLGWEVIVSNPRKVRAIYQHERKSDQRDALMLARIGRMDRALLYPVRHGSEQAQQDLLRIKLRDSLVRARVALINSVRFSLKSLGYAVRNPSSERFHKVAMERLPERLQQMIAPSVQALAELSTRIAVLEREINVLARTKYPQTLWLQQVPGVGALTALYFVLKIEDPQRFENVRDVGAYAGLCPRRDQSGESDPQLRISKRGDAYLRRLLVSAAHYILGPFGPQSALRAYGLMLAADGTARAKKRATVAVARKLAVLLLSLWKSQQPYQPFPGSPPQWPTRGPTIRNDCGASHGSD

SEQ ID NO: 100352 - protein, 340 aa, unidentified
MEQITTIGLDIAKHVFQAHGADERGRAVFSRKISRAKLLSFFADQPQCVVALEACAGAHHWGRELARLGHDVRLIPPAYVKPFVKRQKNDAADAEAICEAAQRPTMRFVAVKSEAQQASALMFRARDLVVRQRTQLANALRSHMAELGWVAPKGLAHMARLAELVEDPASELPEDARSVLRLMLDMLAGLAAQIAVLDREIARRAREDEAARRLMTVPGIGPVTATALLALAPAPAFNRGRDFAAWLGLVPRQHSSGGKERLGAITRMGDRTLRRLLILGASAVVRHAGSRGAAEGSWLAGMLARKPRMLVTVALANKTARIAWAVMRKNESYRAPALTA

SEQ ID NO: 100353 - protein, 363 aa, unidentified
MKIMVGIDLHSNNALCGLMDTSGRRLLHKQLPCDLTAILQLLKPYKKRIDTIAVESTFNWYWLVDGLQDHGYHVVLANPARMQSYNGKKHTDDVSDAYFLAELLRLNILPTGHLYDRKLRPVRDLLRRRLLLVHQRTTLILSFKSLNERTLGQRVPLARVRAMEPAEAQARFAEPADQLLAGEQITLMDHYTAAITKLEKHILEVAGKTPAYQRLQEMPGIGKILGLTIALEAGDAQRFAEAGNFASYCRCVKSLRQSNGKKKGENNRKCGNRYLAWAFVEAAHFACRHDDQCRRFYDRKKQQANPMIATKALACKLAKAAWHVMVADVPYDATRVFGAAKKMDLGETGREPGAASGRPSQIA

SEQ ID NO: 100354 - protein, 318 aa, unidentified
MARGRKGVMKILYRRCAGIDIHKKSVSVCIRRRVEGHKEAELEEAVFGTFTQDLERLAEWLKQRKVKQVAMESTGVYWIPVWNILEHRKWKLELMLVNPSTVRALRGQKTDRIDARRIAEYLQYGLLRASYIPPRPVRQLRDLTRMRTHIQGDRNRVINRIGRLLETVNIKLGSVASNIAGKTGRAILERLSEDSGNAEQLAELALGSLKKKIPDLILALDGRADQHFRWMLKRLLRKLKMQDTELAEIDARLADQYTEHADLLKRLCTIPGVEITTARVLLAELGTDMSHFPTAAHAASWAGLCPGNSESAGKRFSR

SEQ ID NO: 100355 - protein, 438 aa, unidentified
MSNKVIFNLDELFISVGIDVGADFSWMSIALPNQQFVGKPYKILHNSIDSLTTAVSKIKEAEELYSLESRIFLETTGIYHYPLFCYLRDKGFNCSVINPIITKNSTNINIRKVHNDRFDSKKAALVGLKPDLKVSLMPSDLALNCRNLCREYYDLMDNRSAYVNKLQGELCMAFPQYLDIFSKVTINTSLTLLETYTSPSAFLEADRQEIIDIIRSTARFGLTYAQNKYNAIVQAATDANQFGYIINSNIKRIRLYISFIRKYDEEINRILESLHELVDANEDADFVKQIHLIETFKGAGFLSAVSIMGEIGDFSAFSKPKQLFAYFGLDPAVKQSGKFEGTKVQMSKRGSAIARRVIHTLTLQSISISRNREAKNPVLREYYLKKCDSKPKLVAMGAVSHKVCNMIFAILRDNKPFKIIAPQEHIKQYNSAKCDIAA

SEQ ID NO: 100356 - protein, 389 aa, unidentified
MNSSRHTDTLAAVEEHCTMYVAFELGKAKWKLGIVVPGKTKLSRYVVDGGNVEAAWRLMTKAAAQAQKRLGRPVRMVSCYEAGYDGFWLHRWLVERGVESRVLDPASLQVDRRARRAKTDRLDLEQLMQALIRHEGGDRRAYSVVRSPSVEHEDDRRPGRERERLVKERTAHTNRISGLLHGQGVRELAPRAKDFMAWLTEVRSGDGHALPAKLVAEIRREAMRLELVEEQIAEIEAHCRIARQAAAPGTMAAKAAQLMELKSLGPVSSQTLVNEVFWRDFQNRRQVGSYFGLTGTPYDSGRSVREQGISKAGNARARTSAVELAWLWLRNQPSSALSRWFKERVGTQQGRVKRIAIVALARKLMVALWRFLTQGLMPEGAVLRAPARG

SEQ ID NO: 100357 - protein, 297 aa, unidentified
MRTEITKDSFKGQSFYVGIDSHKKSWKVTILGEQYEHKTMSQNPDPDLLATYLHRNFPGGNYHAVYEASFNGFESCRRLNELGVNCIVIHPADVPTNQKEKLQKTDAVDSRKLARSLRSKEFEAIHIPDRKLEADRALVRQRFRLTKDVGRTKNRVKSLLFQFNIPIPDRFTTAQTRHWSKVYINWLKVLAIGEQSLKQVLDNYIAVGERQRNDLLMVNKQVRNLSLTEDYYHNYQLLLSVPGIGLVTAITFLVQIGDIKRFDQLDDLCNYVGLVPKMYGSGDKMQVGGMIKEAEKS

SEQ ID NO: 100358 - protein, 457 aa, unidentified
MRLASPVGEQGIGNLDDVLNFSFPVSGEVPSEARRRRRKGSEVFTWSKYFSYGNAEVRRHRYAMSRTPAASGPSGHLVCGIRAEMRCLERAEPLSRRTGRDRCHLGHEAAAEPGPARSSVYSPNSWKVTRPQTRKGFRMARTRSVVHVGIDVAKDTLLVALRPLGKCFEVRNSVEGRRDLVMRLKRMRVRRIVLEPSGGYERELLKLLRARKLPAQLVPADKVRNFARATVGWVKTDPIDASVLAHYAEVVDLPEPMPRSELAEQLHEFLMLRDYLVQQRSGLQCKTKQTRIAALKSFIVEEIKRLKACIAELDAAMHQKISQDSQGAALLRRLLTVPGIGRLIAISLIAELPELGRLAYRKIVRLVGVAPITRDSGSMRGYRAIAGGRYLLRRKLYLAVLTSIRLSGNDIAAFYQRLRQAGKPAKVAIVATINKLLKRLNAMIQADMDWRPHAAAA

SEQ ID NO: 100359 - protein, 312 aa, unidentified
MQKIFIGIDIAKDTIDISVLPSGDKWSVGTTSAELSKTVDRLVALNPTNIVMEATGGYETRLAALLVTTGLPVAVVNPRQVRDFGRALGILAKTDAIDAHLIALFAEKVQPECRPISTDDERALKELLIRRRQLVDMRTAELNRQQQTNSQQVYNSITQLIDFINHELDTIEHEIDKRIKASPVWRAKEKLLQSVPGIGKVTASMLIITLPELGQLNRRQIASLVGLAPMNRDSGTFRGRRMITGGRASIRSGLYMPILSAVRYNPKIKQFYDRLIDAGKLEKVALTASMRKLLTMLNAIIRENQPWRSIPA

SEQ ID NO: 100360 - protein, 345 aa, unidentified
MDQQHYVGLDVSLETTSICVIDHAGSVVWRGKCSTEPEPIGEAVRVHAPALVRVGLETGQLSNWLTLALRKRGLPVVCVDARHAKAALSLQVNKTDANDAHGLAQVVRTGWFREVAIKSMDAQTLRLLLQARGQLVSQRQAVANTIRGLLKTFGVVIARSSGGLFAVRVRTAIVDNATLTVIVEPLLLAWQALREQVAVLDQRVNRRAKTDPVARRLMTAPGVGVIVSLAYIAVIDDPLRFKRASSVGAYLGLTPRRYQSGEVDKAGSISKCGDGFLRAHLFEAANVLLNRHARMSKLKAWGLALASRIGMRRAKVAVARKLATIMHRLWKDDCDFEWGNPSAVV

SEQ ID NO: 100361 - protein, 386 aa, unidentified
MSQPNDLSRSLAAFVQDNTLVAVIELSLSSWLVGGVVPGIERQPLKKLEPDEVGLLRTLQRWRDEATKSGCTIDRIAVAYEAGRDGFWLARWLRGQGIEVHVIHSSSVAVSREHRRAKTDRLDTAMLLRVFMGWLRGERGHCGMVAVPTIEEEDAKRPHRERENLVGERTRIINRMKAALVRLGIRGFKPELRRAPKKVDGLRTPEGLAIPPNSLDEIRRDLARLAMVREQIDLIEQARLERIEQAPETGPNAMVRLLASVVGVGVETADMLVQEVLSRNLRDRRAVARYAGLTGSPDESGSKRREKGLAKAGNARVRRGLVQLAWRFLLFQKDSALSQWYRARTGVQGVRKTVLIVALARKLLIALWRMVTTGEVPHGVVLRAAT

SEQ ID NO: 100362 - protein, 409 aa, unidentified
MLWARGEANGTIVAATKAMERAMAKQNDLSRCLITLEQDATVIAAIEIGQSSWLVAGIVPGLERNPLKKLSPDPDALLQLLHRWQKEAVQAGRAIKRIVVAYEAGRDGFWLARWLRAREIEAYVIHPSSVPVSREHRRAKTDRLDTELLKRAFLGWLRGEPKHCSMAAIPTLADEDAKRPGRERQSLVGERTRIINRLKANLARLGIRNFRPNLAHASNRLEALRTPEGSAVPANTLAELRRDMDRLRFVKQQIKEIETTRAKHLAEAPNEQRQAMIRLLARVVGVGIETADMLAQEVFSRNIRDRKALARYAGLTGAPDESGKKRREQGLAKAGNARVRRGMIELAWGHLLHQKASALTAWYRKRTSDARGGTRKTMIVALARKLLIALWRLVTTGETPAGLLLRPAA

SEQ ID NO: 100363 - protein, 387 aa, unidentified
MGVIIGMDPHKRSATIDVIDERARVLAAGRYGTDKAGYAEMLRAGRKFEDRVWAVEGCNGVGRHIAHRLVASGETVLDVPAKLSAQVRVFATGNGRKTDPVDAHSVALAALRSPKLVQVEVSPDLLVLGMLADRRDELGRARTQTINRIHRLLLELIPGGAKQFLSAAQARALLATTKPRDIVGKTRRRLAAELITELEAIDRKIRACKKEITALVRAQGSTLLQLHGIGPSSAARLLADVGDIHRFVSRDHFASWNGTAPLDASSGQQLRHRLSRAGNRRINRALHIMAVAQLRNATEGRAYYDARKAAGKTSMEAMRCLKRRLSNVVYRQMLYDQDNRQVTGPGGHSGTTLKSSVTDLTPDIGSSDKPLPGPAAPQPRTPVRAAS

SEQ ID NO: 100364 - protein, 347 aa, unidentified
MRFYNQQHDYYCGIDLHARILYVCIVDSAGNTVLHKKIDANPDALLDVLAPFQDQIVVGVECMHCWYWVSDLCLDYAFDFVLGHALYMKAIHGGKTKNDRIDSYKIASLLRGGNFPLAYVYPKAMRATRDLLRRRTKIMRHGADLKAHVSNTFSQYNHSAPNLQLRYPYAREEVRNRFNEPAINRNLDIDLNVIAFYTKELASVEHFIEQNAKQHNPQDYQLLQTVPGIGRILALTILYEIGNIQRFPTVQQFASYSRLIKCKAESAGKQYGTNGNKIGNAHLKWAFSEAAVLYLRGNKKAKKYLNRLQKRMSKAKALSALAHKLGRCVYFMLRNKTVFDEQKFLPE

SEQ ID NO: 100365 - protein, 423 aa, unidentified
MLGVGIDWAEEFHVVALGSPGAGVIEVVRVEHRPEAVAALVARIAGLEADPAEVRVVIETRHGLLVEALVAAGYTVLPVNPQLVSRRRGPARKKDDAEDARICCLLALDRHAGLKRLIPHGQLAGELRSIARDDERACRDERRLLNRLRADLLATFPAALAIAGEDLGATRILRLLERWPTAAALAAASREEIIEFGRAQRTGYLARFADKIQTALAEDQFTAPEHLVRAKIDTIRLTARQLLLIDAQRRAWEKRMGELLLGPPAGQHEAEDQPGQTFPGGEIYLSFPGLGRRLAARIAGEVGEHIEQFTTPNSLQCYAGRAPVTRRSGKRDLVIAHRLACNRYLADAVHKWAFASLRRSAWAREFYDAQRARGKNHHAALRALGNRWLEVLWHCLTHEIPYDEAVHVANRNRALATITVPAA

SEQ ID NO: 100366 - protein, 339 aa, unidentified
MYPFYLGIDLHLKRTYMVLMDAKGKVMAKERISNQEIKEYLEEKVPRETYAVLEATRNWQFMYDLLNEHVQQVDLVHAKGVRAIANAAVKTDQIDASTLAHLARMNYIPKAYAAPQEIRDLHQLLRHREWMVNQRSKAKNRIHAVLAGYNLVSPVTDLFGVTGREYLHQVIQEELRPSAKQVVEDHLALIDHLTERIQAVEKSISLSEKQEHIVNLLSSMPGVGKLISLIILAEVGDISRFHSSKALCSWAGLTPKVHSSDAVVQHGHITKEGSRYLRSAMVQAATTACRVSPKWYRVHEHMALRCGRRAARVAVARRLLTVIYFMWKKDQPYLENYGQ

SEQ ID NO: 100367 - protein, 367 aa, unidentified
MTKVRFVGLDVHKESIAIAVADSDGSAPETVATIPNDTAAVIKRLKKLGHGAALRCCYEAGPTGFVLQRALTEAGINCIVIAPSLVPQRAGDRVKTDRRDAVKLARFLRSGDLTEVHVPEAETEAMRDLERSRDDAKRAERTARHQLSKFLLRHGRRYEGKSSWTGMHLDWARGQRFAHEALNRVLMDYVHAVETATARVDRLTKDLTELVETWSQRPLVKALQALRGVQLVTAVILVAELGDFSRFSSAPALMAYLGLVPSEHSSGETKKRGRITRTGNGHVRRVLVESAWAYRFRAAMSWEIRKRNDGVAPAVQAIAWKAQQRLSGRYRKLLGRGKNKQQTVTAIARELAGFVWCIARQPELLAA

SEQ ID NO: 100368 - protein, 329 aa, unidentified
MSSDARGHEELLLWARALGSERCFAVEDCRHVSGRLERHLLPRGERLVRVPPKLMARARSSARTYGKSDPIDAACVARAALREPGLPEAHLAGPEQDVRLLVDHRDDLVGERQRIQKRLRWHLHDLEVDLELPPRVLDRYVWLDRIAEALQAVSPDTRRRIALEQTRRCRELTAEIRALEREIRTMMRALAPELLTLPGCSALSAAQLVGQVAGASRFAGEAAFAMHVGTAPLPVSSGKSTRHRLNRCGNRRLNATIHMIAITQARMHPPAIAYMERKRAEGMSSREARRCLKRHITRMVFKTMLRSERARAGQVLQAKFGPEVLAVAV

SEQ ID NO: 100369 - protein, 430 aa, unidentified
MKSNTQNAKIEAITEKTLVLGIDVGSEMHYARAFDYRGIEYSKKPFKFSNTEAGFVTFKEWILDLKERHEKDKVVPGMEPTGHYWFNLGKFLQDNEMKPVLVNPHHVKKSKELDDNNPTKNDRKDPKVIAGLVREGRYMIPYLPDGVYADLRTASNIRFQLQAELTRIQNRISRWFNIYFPEYKTVYGKPDAKSGILILKAAPLPEDILTLGIDGVNQIWREAKLRAVGKARAKTLIEAAEHSVGSKEGAVSARMEIRMLLEDYESRNIRLQEVMTLIEGLVKQIPMAEKLLKIKGVGIKTVSGFLAEVGDISRFNTPKELQKLAGLALVESSSGKHKGETTISRRGRKRLRYLLFEVAMSLVAKNPEFRELHNYYTTRRLSPLKKMQSLMAIAAKLIRVFYAMLTKGVDYDPKKMVSDIKRPAVYLQAA

SEQ ID NO: 100370 - protein, 324 aa, unidentified
MTRIVCGVDVSSRTLAVRIGRDGAQSVFPNTPEGVARLAAFCRAHGAERVAMEATGGYEQQPFALLAEAGLPVAILNPRQVRRFAEGMGVIEKTDAIDAGLIAWFAEVKCARSSPPPAPDQQHRRALVTRLRQLTQVRTAQSNQRRLIADPVVLASIDELLALVERQIRALEQQIAALIAEDPLWRELDQEFRSLKGVAARTVARLMAEMPEIGTLSNKAISKLAGLAPLARDSGQHQGKRQTRGGRAPVREILFVVASVAGRFEPDFIAFRQRLSAAGKPPKVVRIALAHKLLVRLNAKARDVRQRMAAPPAAIDSHAAPQPV

SEQ ID NO: 100371 - protein, 338 aa, unidentified
MTIIAIGIDLAKNVFAVHGVDETGKAVLVRPSVKRDALVELVAKLPPCVIGMEACSGAHHWARQFQAHGHTVRIIAAKFVAPYRLSGRKGKNDAADAQAICEAVQRPHMRFVPIKSEHAQGQLSIHRVRQGFIETRTATINRIRGLLSEFGVVLPQKAEVVRREAGLRLEALPGWANTAIGDSLSELHHLDERIAEYDRHIEAMAKADDRGVKLMAMPGIGAKTASALLASVGNGHDFKCGRQLAAWLGLVPGQYSSGGKQRLGRITKAGDSYLRTLLILGARAVVAAGKNKTDRLSRWAQNVAERRGYWKAVVAVAAKNARMAWAMLSKGEAFKPLT

SEQ ID NO: 100372 - protein, 346 aa, unidentified
MTIVEAPRAVTGGVDTHLDLNVAAALDDIGGLLGVEEFATDACGDRSLLAWLQSFGTVMLVGVEGTGSYGVGVARALRAADIDVVEVDRPNRLVRRRQGKSDPLDAVEAARAALSGRASGKAKTRDGNVEAIRALTVAQRSGRATRTKSLNQLRHLGFCAPESLRQRFQGLSAAAMALEAAGLRPRADADPVIFATKTAMRTLGRRVAVLDQEKIDLDELLGKLVANTAPELLALHGVGVVTAAALLVAAGDNPERLRSEAAWAHLCGVAPLEASSGKVVRRRLNRGGDRQANAALWRIAMVRMRSDPRTRTYVERRVEEGRSKPEIIRMLKRYIAREVYRHLPRG

SEQ ID NO: 100373 - protein, 347 aa, unidentified
MKDTTIAVDLAKSVFEVAVSRRAGRVDERHRLSRAQFSRFLAERAPATVVMEACGTAHYWGREAGTRGHRVVLMPPHAVRPYVLRNKTDGADAKGLLEAVRNEAIRPVPVKSVDQQVLASLHRMRSAWMATRTARLNTLRGLLRELGYSIPVGARQVVPQVWVLVSDADSGLPDALRPVLAEAAREIGEIEARLRGVERSLEAMARASDVLVRLRTIPGIGLLTATALLAFVGDVRRFPSGRRFASYLGLTPRESSSGLRRRLGGISKRGDPYLRMLLIHGARSVLLHAKKKPSGEHDRLRAWALERERARGHNKAAVALANKLARIAWAVWRRERAFGLSSMEGTD

SEQ ID NO: 100374 - protein, 352 aa, unidentified
MVHAGLDLSRKRLDIQLLADDGTKLRYLAVVPDADGLRTVARLVQTTYGQPVRAAIESMTGARFVHDQLELSGWDVTVANAQLVKGVAPLACKTDRIDAGVLAELSRRDLVPAIWLPDPAVRAERERARWRLFLVRHRTSLKNRIHQTLMTYGYQCPVADLFGRGGRALLERLELPEPWLSTVTASVHLIDDLTQQVHQCERELRALGADHPYVPLLQTVPGIGWVLAYTIAAEIGDITRFASPTKLCGYTGLAPLVRQSGNRDFRGPLAKNGPRYLRWALVEAAHTAARHPRYQQRYAATKQRLGKQRGSKVAAVELARTLTQAIWYMLTRHQPFAPAGATFCLAAKTALA

SEQ ID NO: 100375 - protein, 349 aa, unidentified
MQIKSQIRSIGIDLGKTTFHLVALGTRSQIVVRKKFSRSQLLIYTANLPASLIGMEAGVGSHFLGRALREQGHEVRLIPAQFVRPFVKSNKNDYRDAEAIAEAVERENMRFVPIKTEDQLDLQALHRVRDRLVARRTSVINQIRAFLLERGISFRKGPASLRRQMPEILENVDAKLSPGMRRLLDFLWQEWKGLQAQIESLNTDLEQIASSDPSCVRLQQIPGVGPLVSTAVVSAIGNGAAFKRGREFAAWLGLVPRQWSTGGKTKLLGISKRGNPYLRKMFIHGARAAVLRVKREGSTLGRWMSGLETRAARNVVIVATANKLARISWAVLASGNDYHPMHKAAVFSN

SEQ ID NO: 100376 - protein, 348 aa, unidentified
MSEYAGQQFVGIDLHRRRSVVVRTTESGEVLENIQILNDVDRLGSVIARAGEAPEVVLEATYGWYWAVDALQAAGANVHLAHPLGVKAFEYRRVKNDVRDAIDLADLLRMGRLPESWIAPPATRELRELVRHRAKLVGLRSHCKVEIHAVLAKCGVQVLMTDLFGVNGQDLLDRVAMPGPYAARVQSLRRLIDDLDKEIDLFARLARGKLAANPGYTAVQQLPGVGPVLASVFVAEVGDVGRFATAAQLGCWAGLTPKHHESDTHVHRGRITKQGSRLVRWAAVESVKALSPRTPVGAYKARVAATRGKNIGTVAAARKQIEFVFYALRDHHVRALHKPQLAAAAVPA

SEQ ID NO: 100377 - protein, 351 aa, unidentified
MQHLAIDLGGRESQICIRDERGKILRQARVFTSQLQRVLAEEPPSRVVMETCSESFTVAQWARSVGHDVRIVPASAVRALGVGARGLKNDVRDAQVLSDVSTKVDIISVHMASDLARERKARCTAREALVKARTQLVNTVRSFLRQHVIHVRCKAENLPKKAREVLLASSNGIPDYIERLLSALEAITDQIDRADIELSELAVQDKTCKLLMTVPGIGPVTAMRFVAAIDDPARFPSASHVCSYLGLTPGENTTGFKPRRTGITKAGAACVRRTLSQAAWCLWRTRPEDPLVLWAHRVADKRGKQKANIALCRKLAALMFVLWRDDSPYNPKHHEQKNKLNKQSEENIAIG

SEQ ID NO: 100378 - protein, 364 aa, unidentified
MTIVAHNHPFVVGVDTHARSHALSVIVATTGEEVGSKQFPASAAGLAKAMAWVGRTTGADLDTLWVIEGAATFGARLAALVEATGYRVVEAARMSARGNRGLGKSDPLDARRIATAVLRLPLDRLRNLRQDSGARSGLRVLVAAREMMTTERTAAINALTALLRAADLGIDARKPLTATQIAEVTRWRARNEEIGLSTARTEAIRLAKRIIALGQDLEANKRNTVELLELTPAKALLNEPGIGPITAAVAMTSWSHAGRLRDEAAFASLAGVNPIPASSGNTVRYRLNRGGDRRLNRALHTAVITRMRFHEETKTYVQRRTAEGKTTKEIRRCLKRYLARQIYRTLNANTISAPNTTPTAITPA

SEQ ID NO: 100379 - protein, 362 aa, unidentified
MNRNTGMSAGQIIGTMNGLQVMGLDIAKHVFQLHTVDMGTGEIVNVQIKRAKVLEHFVNRPKSLIAMEACGGAHHWARELTALGHTVRLLHAKIVRPFVSGNKTDATDARAIWLAVQQPSVKFVGIKTAAQQATLTLHRQRELLMKMRTMQTNALRGLLYEFGATFAQGRKALFKDIERALEELSTQLPQMVRDSLREQVGRIKEMGDAMLEIEKRLALQLKADPHMQRMAQIPGVGLLTATAAIATMGEASAFKSGREFCAWLGLVPSQTGTGGKVRLGGISKRGDTYVRTLLIHGARSVLSHAKEPSPWLQQIKERRPANVVIVAQAAKMARTIWAVTAKEQSYQRGFQSVRPSAAMHAA

SEQ ID NO: 100380 - protein, 345 aa, unidentified
MQPMYYIGLDVHKRKISYCVKDSGGKVYAEGSLPATRFDLDHWMKTLPQPWTAAMEATMFTGWIYDHLKPHAAALKVAHPLMLRAIVAAKKKNDRIDANKICDCLRCDFLPECYMASTAIRERRRTLRYRNLLVRQMVQMKNKTSMLLMEAGVSYNKQRLHKAGYFRELLATNPDIDEGLVPLLRLCRETVVRLQRTESALVRSLERDSLLMDRVERLMTIPAVGPITALTWALEVGDAQRFSSIKKAISYCGLCGAEKSSANTVQRTPLSKQRNKHLQTTLIEAAKMAPRNSPELAMLYDTEKQKGNANRATLAVARKLVAYLMAVDRRQRDFQVVETSSGIAA

SEQ ID NO: 100381 - protein, 355 aa, unidentified
MTTAQKQSCMFVGIDVHKDTHTAVGISPYGEKLFEITVGNYQNDFETLTLKVKEHSGILSPYIGLEDVRGYGERLAGYLYEKYPIYHVPSILVDRARQNATHPEKSDSLDALGVAKVMIQSIDTLLPYTISKESEKAKQLKEISIDREDLVLERTRLKNQVHTLLYRIYNTNYAKIYKDPFALKALRFWRNAKPKCDSFLLKTMKRKVRRLLDIHVEVVDLEKDMEQLLDDNYTIQTASGCGVVLASTIIGEIGDINRFTSPGALAKYAGCSPRERSSGKKIRHVKSRGGNRRLNCAFHRMALSQISRMGNEKARQYFKRKISEGKSKSQALVCLRRQMVNIVWMMLKHKTTYRY

SEQ ID NO: 100382 - protein, 337 aa, unidentified
MQITTIGLDLAKHVFQVHGCDAAGNFGVKRRLRRNQVLEFFAGLAPCLVGIEACGTAHHWARELRALGHDVRLMPAHYVKAYVKRGKNDAADAAAICEAVSRPSMRFVPIKTREQQAVLTMHRTRDLLMRQRTQLINAVRGHLAEFGIVEPQGVWHLGRVLRHLEVDDEVIEPARQVIGLLASQLNDLEGRIKEVDKQIALWHKASPTSQRLATIPGIGPVIASAIAATVPDAGVFRSGREFAAWLGLVPRQRSTGGKQRLGRITRDGDRYIRRLLIMGAQAVLQSSKAARANPWIQNLLARCPRLKVAVALANKTARIAWAVMTKGEIYRQAAASA

SEQ ID NO: 100383 - protein, 351 aa, unidentified
MMIIGVDYHPSDQYIAFADAGTGEYGERRLNHSDREAEKFYRELAGRGVSVRVGMEATGYSRWFERLLTELGIEVWIGDAAEIKTKRVRKQKTDREDARLLLRLMRENNFPRIWVPSPENRDLRQLLWHRHRMVQMRTRIMNQLQALAMNEGQRRKKKLWSGPGRAELEKLPLAPWASRRRQDLLELLDRMNPTIEELTTVVEQEAKKRPDVLRLMTHPGVGPLTALAFVLIIGTPERFQCGKQIGSYVGLIPEEDSSAGHQRLGHITKQGSSLLRFLLGEAAQAAARCDADWRRRYMHLVMRRQRNIAKVAMARRLAVRLYWMWRNGWEYTQSVKFGSNAGQLGTGHGVN

SEQ ID NO: 100384 - protein, 438 aa, unidentified
MSNKVIFNLDELFISVGIDVGADFSWMSIALPNQQFVGKPYKILHNSIDSLTTAVSKIKEAEELYSLESRIFLESTGIYHYPLFCYLRDKGFNCSVINPIITKNSTNINIRKVHNDRFDSKKAALVGLKPDLKVSLMPSDLALNCRNLCREYYDLMDNRSAYVNKLQGELRMAFPQYLGIFSKVTINTSLTLLETYTSPSAFLKADKQEIIDIIKSTARFGLTYAQNKYNAIIQAATDANQFGYIIDSNIKRIRLYISFIRKYDEEINSILESLHELVDANEDSDFVKQIHLIETFKGAGFLSAVSIMGEIGDFSAFSKPKQLFAYFGLDPSVKQSGKFEGTKVQMSKRGSAIARRVIHTLTLQSISISRNGEAKNPVLREYYLKKCDSKPKLVAMGAVSHKVCNMIFAILRDNKPFKIIAPQEHIKQYNSAKCDIAA

SEQ ID NO: 100385 - protein, 424 aa, unidentified
MNLTQNDRLNQVTADTLVVGVDIGSQDHFARAFDWRGFEFSKRAFRFSNTSVGFLSFLRWLYELQGKTDTKKVIVGCEPTGCYWLTFQKFLKDHGILLVTVNPYSVKKCKELDDNSPEKSDLKDPKTIAGLVKDGRYSTSYLPSGIYAEIREASVCRDMVMKQHVRLANQIQGWLQKYFPEYFECYKDWNSTSGLMVLKNAPLPQDIIKLGSGGINQIWREAKVRAAGIKRATTLVEAAQNSVGLEGGEAARLEIWILVNDYISKVEQLDRLDAFLKEKIMEVPNVEKLLAIKGVGLSTVIGFVAEVGDIGRFTDPKQVQKLAGLEITKISSGKRKGQPGISKRGRRKLRRTMFESARALINWNPAFLEVFLYYRNREHRPLGSMQAKIAVACKAIRVFFVIMQTGCDFDEERFRKDILRPEAA

SEQ ID NO: 100386 - protein, 417 aa, unidentified
MDDEVYYERCAGIDVHKKVLVVCLRIGRKTEVRKFGTVTHEIRAIVTWLKENDCQMAAMESTGSYWKPLYNIFEQEKLPAMVCNAYHIKNVPGRKTDVNDAQWIAKCLSQGLLKPSFVPDREQRELREMTRFRKSQIEERSRNINRLQKFLEGANVKLGSWVSDIEGKSATELLELIIGKPDFTVDDVAKRMYGRMKSTAEEVFRSLEGSITPTQRELFTHMMAVIRQQTAQIEKTDAMIQRNLNANYKAAVVALDEIPGIGKVSAEQIIAETGVDMSHFRNQHSLSNWAGVCPGNNESAGKRKNSKTQPGNKMLKSTLTQCAKSANRNKDSFFSAKYSRLVSHRGKNRATMAVAHAMLIAIFFVLSGRKFNDLGAGYYNQFNRLKKINSHVKQLSKLGVAIPVNVLQAAIDSLPDG

SEQ ID NO: 100387 - protein, 375 aa, unidentified
MPTTLATVCQLMVVAIEIAAAKWVVASHAGGKIRRKSLTEDAPEARFAALLQELEDARKKLVVSPDGRCLVAYEAGQEGFWLVRALRDAGVEAEVIEPSSLQVDRRSKRAKTDRLDAEALAASLWRYANGEMRALRMVRVPDVAAEDAREWQRERDRLMSEQRSCKDRITKKLRTHGVWRLPEKWREALREDRLRGFAGQALGRELHAALLIELSRLELVEAKLKEHTARAAELDEVTRARIDQLQQVRGIGPVSARSLCMQLYWRTFNNRREVGACVGLVGTPYDSGTHRQDQGISKAGDPRLRALLVELAWLWVRLQPDSAISQWFVERTRGAGARGRRIMIVAVARKLAIALWRYVTTGEIPAGARLKAVAA

SEQ ID NO: 100388 - protein, 344 aa, unidentified
MKEAITIGIDLAKNVFQVHGVDAEGAVVFRRQFRRARVLPFFKNHPPCLVGMEACATAHHWARQLIALGHEVKLMPPHYVKPYVKRNKNDAADAAAICEAVTRPTMRFVSVKSTEQQSILMLHRTRELLVRQRTMLINAIRAHMAEFGIVAPVGVAHVKKLLGIIADTPDARLPPIARACLESLARQFLSLHEEIYATEKQLHAWHRSNEVSQRLETIPGIGPITASALAASITDPEVFKNGRELAAWVGLVPRQNSSGGKQRLGKISKQGDQYLRWLLVAGAMSVILHEKRRGTSNVPWLGDIIARKPTKVAAVALANKTARIVWALLRHGGTYQKPVGVPAT

SEQ ID NO: 100389 - protein, 313 aa, unidentified
MSEPLVYVGMDVAKATLDLHVPIGSRPRCRQFANTATGCRALVAWLQGLGSVQVVCEATGGYERAVVAALQSAGVAVSVVNARQVRDFARATGRLAKTDRIDAAVLAEYGAGVHPSVTPTPSVGQRQLAELVSRRQQVQQLRAAEHNRLEHLQHPALRRQLQRHLAVLDRQLEQLELWLRELVQAEPMLAQKVARLCLVVGVGSTTATVLLALVPELGTLNRRQAAALVGVAPFNRDSGPRRGRRVIAGGRAAARRALYMAALVAAFRNPRLRVFYQRLVGAGKPAKVALVAVMRKLIILLNRLLQDPTLQPA

SEQ ID NO: 100390 - protein, 347 aa, unidentified
MAIVGGFDIHRRQVTFDYLDTVSGQVRRGRIDPACRAELRSWLGRFAGRGDVTFAVEGCTGWRFVVEELEQAGITALLAEPAETAHQRGPKKRAKTDKTDARHLRMLVAEGRVPVSWIPPEQVRELRVLLQLYRDLREEHTAWAQRIHATLFHQGVPGLAGRLSDPQARALLEHGQDIGLSPAGALAVAAALRRMDDLEAELTPVHARIAAFARRQAACKALAAELYGVGPLVAAIVWAFLGDARRFSSSAQAVRHTGLDVTVYSSDGKRTPGHLSHQGPPILRWALFEAGHHGSRTTSPDHLYYTDVTARIDANRAALSVARKLARRSHHILRRLGDQAYAPLPGW

SEQ ID NO: 100391 - protein, 452 aa, unidentified
MVSRVKTSGKQMEAIASNTAGIDIGSEEHYVAVDSDSSERPVRSFGCYTPDLEEMARWLLECGVKTVAMESTGVYWIPVYQVLEQHGLEVMLVDARHVKHVPGRKTDVCDCQWLQQLLSYGLLRGCFIPPAEVQPVREYWRQRASHIESISREILHMQKALEQMNVQLHKVLRDITGVTGMKIIRAIVSGERRPLVLAAMREPGCKKSESEIMKALSGNYREEHIFALTQALELYDVLHEKVVDCDKRVEQCLCTFASKADPATMPPKKSKRGSRRKNQPHFDLEKHLYRITGVDLTAIDGIESLTAQTVVAELGFDLSDFATEKHLCSWLALSPEHRITGGKVKTRRTRKSANRVATALRLAAQSLHSSKTALGAFFRRIKAKKGTPKAITATARKLACLIYRMLRYGMEYVDLGQREYENRYQEQEHKLLQKRAAALGYTLTPLPNGGVS

SEQ ID NO: 100392 - protein, 394 aa, unidentified
MVYVGIDIAKDKHDCFIVNSDAEVLFDVFTIQNNMDGFEDLLFKIKSVEKNADKVKVGLEATGHYSCNILGFLKNKGLETIVINPLYTSLSRKSISLRKTKTDKVDARTIASMIMSDVSLKPYSDKLYHNEDLKSLTRYRFDKVMQRAKLKQSVSRLVNILFPELETLVSTLHGKAVYELLLEFPSAQHIASANLKHLTHLLNTSSKGRFKRVTADEIREAARKSISSYLPAKSLELKHTIKLIREITLEITEIEAEIKKIMDAIDSPILGVPGIGQNLGAMIIAEIGDFSRFDSADKILAFAGCSPSTYQSGQLYSSHAKMEKRGSRYLRWALLNAAAYVCNWEPTFAAYLQKKRSEGKHYYVALSHAAKKLVRVLYHLETTGETYSPTAILS

SEQ ID NO: 100393 - protein, 425 aa, unidentified
MNQSNHYTQNDYAAFIAIDWADKKHVFSLQAAGQTKKEAGTLEHKPEVIGPWVAKLRERFAGRPLAVAVEQSRGALIHALLTYDFLVIYPLHPTTVSKFREAFKSSGAKTDPLDADQILQILTKHLELLKPLTPDTEETRLLARLAEDRRKAVDLRTSHIQALTAALKEYFPQAIELVSGNLTSRLACDLLMKWPTFESFRQAKPSTIKRFYYGHNIRSSEVIQRVLDLAKAKSLTTDPAIVQSGSRLSQMYTQLIRALNPVIDDYDSSIEKAFEAHPEVNLFNRLPGAGPALAPRLLTFFGTDRSRYQSAQNVHSFSGIAPVTKSSGKTRAVYFRVACPKFDRQTFHEFARLSIAKSQWARNYVDYYTDKGKNFHTIIRALAFKWIRILWKCWQDRTPYCEEKYMQALKKRGSVFATLHLQNKS

SEQ ID NO: 100394 - protein, 365 aa, unidentified
MKKSTTVAMASKKNLQGKLTIGLDLGDRWSWYCVLDEAGAVIQEQKLSTTPKAMKEVFAATPRSRVALETGMHSPWVSRLVSELGHETIVAHARNVRLIGESRRKDDRLDARTLARLARIDPQLLAPVKHRSRQAQADLMVIRARASLVRARTALVNAARGLTKSYGERLRGCNPRNLDQEKAQALSPELQATLGPLLQALEALSEQIAEYNRQIENVAQQRYPQTALLKQVKGVGTLIALTYMLTLEDPHRFRKSRDAGCYAGLQPGRRNSGQSEPQMHISKEGDPYLRTLLVQGAHHILGPFGPDSDLRRWGLKLAERGGRNGKKRAVIAAARKLAVLLHRLWVSGEVYEPFHNSRARLMATA

SEQ ID NO: 100395 - protein, 457 aa, unidentified
MCYTVEDAVDWLLSPTTRWFLKGSDHSPLQFFVNQLNTARRFMWNKVTKQSVLWMQHHNFTVGGLIMISVGIDVAKDKHDCFIISSEGEVLADVFTLPNSLDGFQSLLQKIRSCSSPQDKIKVGLEATGHYSYNILGFLLDNGLPTYVLNPLHTNLYRKSLSFRKTKTDRVDARTIAAMLLSDVGLKPYTDTAYHNGELKSLTRYRFDKAKERGRLKQSIARLVCILFPELEKLVPTLHMVSVYALLEELPGAKQIAEAHLTRLKTLLHDASRGRYGRDMAVDIRETARKSIGSVMPAKSLELCHTIRLIWELDAEIDEIETSIQNIMNELHSPITTIPGIGTRMGAMILAEVGDFSRFGSPDKLLAYAGLSPSTYQSGQLKNCYAHMEKRGSRYLRFAIFNAAKYVCHWDPVFAAYLSKKWAEGKHYNVAVSHAAKKLVRLIFALEKSGKPHHLTA

SEQ ID NO: 100396 - protein, 377 aa, unidentified
MKSIKFVGLDVHAETIAVAVAEQSGEVRSLGVIPNREESIRKLVKKLGPVGQLRFCYEAGPTGYVVYWQLTALGAKCEVVAPTLVPVKSGERVKTDRRDALKLARCHRAGELTAVWVPDAQHEALRDLVRAREAAKKDQLRAKHRLGKFLLRHGRRPPTGVKPWTLKYLTWVKKEVHFEQPAQEATLLDYVHEVEHAEARIARLDLAVEEAVKSTPPKMKAVIEGLQALRGIAQVAAVTIVAELGEISRFSRARQLMGYGGIVASEHSSGESNWRGGITKTGNAHLRRVVVEAAWGYRHRPNVGAALRQRQELVSEEVREIAWKAQHRLYARYRKLMARGKDKGKVITAIGRELLGFIWAIGIKVEAAQKVTERRAA

SEQ ID NO: 100397 - protein, 469 aa, unidentified
MSTIYVGVDVSKGYVDVVFLNDAGSVLGEPYLFDDTPKGHKAMMSVLTELVRRDKEISFMIGVESSGGLEKNWLKFFSSISVQLPVSPYYLNPFCVKKFMARELHGGKTDILSANAIALYLKRGLRLSDKPYVEENTSDRLRFNLIRSFSKHCALMTNQLHILLIQVQPYLVQYCRSGFPDWILNLLVKYPTAKKLATAKPEKIAKIPYITLSKAQDLIAQAKESVGALTDSNTARTIELLASELLRNQKLVEDEKKSLIKSNSNNMDKEILTSIPGFGEWIAIGFLTLIGDISKFQKASSLIAYIGSEPVVEISGDLKINRGISHHGSKELRALLYPATLAAISFNKVIRNFYDRLREKGKSHLVAMMACMNKLIRIAYSCLKTRMKFDASYGEKRRQEIETRAQLERKQNVRKRYKVSISLESPISARKAKERREMRKATENITRSHASKIYGVKHHKTQCLPHPSL

SEQ ID NO: 100398 - protein, 480 aa, unidentified
MAIKATTEASKDKRLTRKQRKELGRQIWSGSPGLDIVHRDAAGIDIGSREHYVAVGPDRASQPVQVFGCFTTDLHRLAEWLKECRIKTVVMQSTGVYWIPVYDVLEQQGFDVWLVNARETRNLPGRKSDVQESQWLLKLHTYGLLRKSFRPTPEIRALRTCWRERAEYVQQAGSCIQRMQKALTEMNLQLATVLSDLSGVTGMNIVRSIVAGERDGMRLAEFRESGVKASKETIAKSLQGTWLPEQLAILRRQLTDWEHAQEQMAACDLDLKTLMREMPNAKVEPAPEPPDPTVSKQARRRRKKVSKNEPNFDLSAELKRVTGVDLTRIDGIKAMTVQTIVTEAGLDMGKWPTEDHFVSWIGLAPGNDASGGKVLKKKTRKVKSRLATALRVAANTLRESQSYLGAQFRRLRTRLGNPKAITAMGAKLARLVYRMLKYGQEYVDRGTALYEEKYRQQQIKLLAKKAAQHGFTLVLAENPA

SEQ ID NO: 100399 - protein, 366 aa, unidentified
MKKINTVQIFESEIFNEQRLTIGMDLGDHWSCYCILDEAGKILLEQKVATTPEAMKQAFAKIPRSLIALETGTHSPWVSRVLTELGYKVIVAHAQKVQLISKSNRKDDRHDARTLARLVRIDPELLAPVRHRSAKAQIHLTVIRARAELVRARTALVNAARGLAKSYGQRLPKCGTQQVSRELGAGLPAELREVLEPLLKEIESLNERIQEYEVRMEKIAKESYPHVEVLKQVKGVGTQIALTYVLTLDDPQRFAKSREVGCFLGLKPGRRDSGESQPQMNISKEGDRYLRTMLVQGAHYILGPFGEDSDLRRWGLKLAARGGKNAKKRAVVAVARKLAVLLHKLWVSGEVYEPLRNSNKAMRAAA

SEQ ID NO: 100400 - protein, 353 aa, unidentified
MKCDKYMGMDVHQAMTVVVVLDADGRVILETMVPTEGAAIIRLVQSLSGPLRVTFEESTQAAWLYDVIRAYVTEVIVCDPRRNKLLEDGSKADKVDARKLAELLRAGLLRSVYHGHEATRNLKELVRAYETLSIDTQRTMARIKAIYRARGIRTPGRGVYQPKQRQRWLDLLTEAGIHQRVAWLYKQLDQLKPLRREAKQAMLAESRRHRAVSLLRTIPQMGPIRCAFIVATVDTPHRFRTKRQFWSYVGLAVVTHMSSEYEMTAGRVVRRRKPVATRGLNHNCNRRLKEVFISAATGGSLHEPYKPFLERLKQNGMRAEMARLTLARKIAAVALIVWKKGVVFDSTKLNCTT

SEQ ID NO: 100401 - protein, 351 aa, unidentified
MALTIVEKRAVTITGGVDTHADVHVAAALDHIGGLLGVEEFPTTSDGYRRLLGWLRGFGPVVLVGIEGTGSYGAGLARHMATVGVRVVEVDRCDRQERRRAGKSDPLDAVSAARAALSGRARGAPKGRDGTVEAVRALMVAKRSARSERTQSINQARALVVTGPDDVRARFAKHSTSDLVAGLAGLRPRCGEVVGHATRVALHELGRRAQFLEGQIARLDELIVPLVSSYAPGLLNLYGVGPDVAAILLVAAGDHPERLRSEAAWAHLCGTAPIPASSGKTSGRYRLNSGGDRQANHALWRIVFTRMGLHRPTQAYVERRVKEGLSKMEIIRCLKRYVAREVYPHLRPVAD

SEQ ID NO: 100402 - protein, 352 aa, unidentified
MEQFIGCDAHKRYSVFVAVGEDGGCSPAWKVSHTEGAFEAFLEELPEGSEIALEACSSYYWMVAAMERTGHHPHLAHPLEAKHRMGKTHKTDKLDAGGLGILLRNGTLPEVWIPPAELRDQRELLRLRMQFVQQRTRWKNRIHGALTRYNVQVGVSDAFGVRGREQMTQQLGALPGHTRKSVEQQLAVLDFVESQIADCERRLAGLLDSSEEVRLLRSLPCVGPILSAVLWLEIGDVNRFPAAPHLASYAGLVPRVRSSGGHTRLGSVCRDVNHHLKWAFVEAANLVAVNQRRLAPCHVLELYQRLKKRKNHQKAVVAVARHLAEATYWILKKREAYREPKAPRLALSSTRG

SEQ ID NO: 100403 - protein, 407 aa, unidentified
MEVLYPRCAGLDVHKQTVVACVRCVSSASAHEVRSFATTTRELLELADWLDSHGCTHVAMEATGVYWKPVWHLLEGRFELVLANAQHIRNVPGRKTDVNDAMWIAELLAHGLIRSSFVPPAPIQELRDLTRTRKQLVREISQHSLRIQKVLEDANLKVASVLSDVLGLSGRAMLTAIIDGEDNPEHLADLARGTARKKRSELVEALRGHVTPHHRDLLKLHLGIIAALKSALEQVDASVGKALAPISYAAGLLKTMPGVSDIVAHVVLAEIGADMSRFPTAGHLVSWAGLCPRNDESAGKRRSTRVRKSGTWLKTTLVTAAWAAVRKKDSYLRAQFLRLKARRGPKKAILAVAASMLTAAYYMLRNRVEYCDLGPHHFERRDKSKAVARLVRRLQDLGCHVELKDAA

SEQ ID NO: 100404 - protein, 340 aa, unidentified
MNWRLDISKASISVHIPINSLDLEIDNTLVAFKALYSKLKKLYKKDLDKLTFVYEPTGSYSFLTKKFCANKNIKSFIINPKQSSNFAKALGNRSKSDKIDAIMLSRAIAIARVDEIRVPVIDDTLETIKEMMSYYKFTVKQRVALSNHHEALSCKDGNKYTLKDIAKRLKSFRDKESEILDKIKEIIESDDKLSLTYKNIQTIPGIGKIAGIVLVHLFISYPNANKNQIVSLTGLDPIIKDSGTSVKSKPRISKAGIKLYRGSLFMATMVAIKYNEQMKEFYNRLKNNGKHSTVAQIAVMRKLIVIAHSLYKNNCIYSPEVYEKACGKYTVNCDKNGVIT

SEQ ID NO: 100405 - protein, 413 aa, unidentified
MQVVYERCCGIDVHKQTVVACVIVPGPDGQPLKETRTFGTMTADLEALADWLAGLGVSHVAMESTGVYWKPVYNLLDGRFAILVVNAERIKALAGRKTDVQDAEWIADLLRHGLLKGSFIPTEVLRELRDLTRYRTKLGDERKSEVNRVQKVLEDANIKLASVASDIMGVSGRAILAELVEGQTDAATLAALAKGRLRDKQDLLLKALSGRVRPHHRFMLAQHLSHIDFLDEAMAQLDQQIAEQMRPFAAALATWDSLPGINQRIAEIIVAEIGADLTPFEDADHLASWAGMCPGNNESAGKRKSGRTRKGSPWLRRALIEAAHGAAHTKHKYFQALYRRLASRRGTQRAAVAVGHSLLVTGYHLITRQTAYEDLGGNYFDERDREAVKRRAVRRLEKLGYRVELAPTAVPAG

SEQ ID NO: 100406 - protein, 369 aa, unidentified
MNECITYIGLDVHKETIAVALAEGSMRGEVREYGQISNTPAALTRLSIKLSRPGSVLRFCYEAGPCGYGIQRQLAAAGHDCVVVAPSLIPRKPGDRIKTDRRDAINLAGLHRAGALTAVWVPDPAHEAVRDLVRARLAAVRSLRQARQQLSGFLLRHGRHYSRPAWTLMHRRWLAGLRFEQPAHHIVLEDCIATIEAATARRDRLTAQIEAMLADWVLAPVVHALQSLRGMALVSAATVIAELGDITRFANPRQLMAYLGLVPSEHSSGGTRRQGGVTKAGNSTARRMLIEAAWSYRFPARISREQLLRQEALPKPIRDTAWKAQVRLCGRYRKLSRAGKPATTVTTAIARELAGFVWAIACQLPRPTN

SEQ ID NO: 100407 - protein, 333 aa, unidentified
MATIMQAYLGIDISKDTFDAFLTQENRSTPFQTSNNQVGYEKLSKWLKKHGGSNVHACMEATGRYGDELAEFLHKEGLTVSVVNPRRIASYAASQLKRNKTDSLDAAVIADFCRTQNPDPWQPPPPAIRDLQMMTRHLESLLDMRTEERNRLQSGVTAPAVVKAIEQHITFLNTQIADLERQIADHLDQHPDLKQQRDLLVSIPGIGDTTAAKLIAEIKDINRCDDATQLAAYAGLCPSRRTSGTSVRHKPKLSKIGNAVLRKALYFPALSAKSHNPLVHSFCERLAEQKKPKMVVVAAAMRKLLHIVFGVLKHRKPFDPDYLKLVMQPGAAT

SEQ ID NO: 100408 - protein, 344 aa, unidentified
MKYYAGLDVSMEESSVCVIDEAGAVVAEAKVASEPAAIAAVLAPWSGSLAKVGQEAGGLSPWLHAGLMGLDLPALCIETRRMKAYAKASPVKTDRRDAKLIALALRAGLYRSVHVKSVEAHKLRLALTARQAVLRQARQLQGKIRGDLKVFGIKLGRVGSGGFAGRVKVCLAEHGDLWALVVPLLEMRAALLAQVRAYDRLLHRLARSDELCRRLMTAPGVGVQTALAFRCGIDRPERFRRSGSVPAALGLTPKIDQSGERERCGAITKAGDKLLRSLLFEAANALLTRTRSWCALKRWGVALAKRRGMNRARVAVARKLAIILHRMWCDGTEFRWSEHQTKAA

SEQ ID NO: 100409 - protein, 482 aa, unidentified
MKKRTIFPYQSQELNTIFEEAGNNAKVMCIPIDYAKKEHVVMFCNGHGNILRKPFPIKNSPKGIEYLTQQVLSSCHHRGIDPKYAFFGGEDVGSYAENFINTLRSGGWIVAGVNAHDAKKQRANAQASTDNLDLMGIASMLLNRRANCSPAQTGIYRNLRGLTRHRKKLVDMSTEEKNRIHTIVDQAFPGFLDEKNTGISPFSNSSLYLMADRFSPAQIRRRKRQKLIDTLRRYGTVKPEVSADKLQLYAAHVLNTPTEYLSALQISLAQHIKHFKCLQESTEQLEKEMALWLAQTQGAFLTTLRGIGIVLAAGATAEIGDPTKQKPVANLVSYSGIIPRVKQTGGPEGQTRTGKVSKRCNRILKNYVVQSAHHIGLHGPEDLMADYKRRDANGQHADFGIGRRYIRTAMCLMRNSQIYIPKRLRSKGINPEERAGYFLMIWPSLRDKWAKLGALETAFTNDNPLGRWRNMVQELYEIKLKL

SEQ ID NO: 100410 - protein, 412 aa, unidentified
MQTLVERGCGLDVHQATVVACLLIVRKDGRVQKQLRTFGTTTRELLSLREWLLSEGCTQVALESTGVYWKPVYAILEGAFQIVVANAQHVKKVPGRKTDVKDAEWIADLLCHGLLRSSFVPPQPIRELRDLTRYRRKLVESRSAELNRLLKVLETANIKLASVATDVFGTSGRLMLRALIEGKATPQEMADLAKKKLRSKIPQLELALEGKLEEHHRFLLKLQLDRLESVESDLAALEQRIQEKLQPYAAQLALLQQIPGVERTLAAVIIAELGVDMTVFQSVSQLASWAGVCPGNNESAGKRKSSRIPKGNVYLKTALVEAANSAARAKGTYLRDKFYRLKARRGYKRAAVAIAHKILVSIYHMLSQNVSYNDLGDLYLDTLNKHHLTRNLVHRLERLGYSVTLTLQQEPA

SEQ ID NO: 100411 - protein, 374 aa, unidentified
MERTIKYVGLDVHKDTIQVAIAEEGRRSPVMSYGNIHNTPLSIDKLIRKLKSTGHELSVVYEAGPTGYGIYRQLKSKNVDCAVVAPSLIPQKSGDRVKTDRRDAINLARLHRSGDLTEIHVPNEEDEAIRDLTRAREDARICSKKAKQRLNSFLLRNNKIYSGKTKWNKTHLAWLSETSMPHPAQQVALQEYIDTLRESLQRIDRLTNQIVSVVEHWRLQPVVKAIQSLRGVSMIVAVTTLAELGDIKRFENPKQLMAYLGLVPSEHSSGLKTKKGGLTKTGNGHVRRVLTEAAWAYRFNPKKSLHILRRQQGIPKPVCDIAWKAQLRLCNKYKALSNRKVTQVAVTAVARELIGFIWAICKEMESVQENRLAA

SEQ ID NO: 100412 - protein, 359 aa, unidentified
MPHPWHGSIVPWGDFHPRFQQIAYLDKESGEYGERRLNHPEEASQFYRGLVGKSVQIGLEATGSYRWFRRLVSELGHEIVVGDPSAIHATIPRRQQTDKRDARHILKLLVEDRFPAIWLPPVENEQVRQLLVHRCRMVQLRTRLMNQLDAVAKDEGMLDPRVWQQKHRLQVEALPLTGWRAEQRNDLLGLLKELDKRIQPLNKAVRKLADENTEACRLMTHPGVGPIVALAYVQAIGDWQRFPRGKQVASYLGLIPQEASSAGKRQLGHISKQGNGMVRWLLTEAATIAQRHDPSWHRQYVRLSMQKHHGVAKVAIAHKLAVRLYWMLRSGNDYEQVKERGSHAGQSGYPTGCSLQPKG

SEQ ID NO: 100413 - protein, 439 aa, unidentified
MNGGNTLKARIYPQDIPVMGIDVSKEKSDFCVLDVSNKVVKRGIVHHTPDSITDFLEKLSKISTALDARPVCVMEATAHYHRILYKQLVDNGYTVMVINPIQSGSIKNVDIRNIKNDKVDAYRLAYLYRLGKLKASNIPEGELSQLRSLCRFHITLTDDIAEHIIRLRSYTDQSFPGFEDVFSKLKGKTPLAVLEKYPTPKAILNADEKELVQLLSSASRKGMRYAEPRVAKLKATAEAALKIGLDRPEDEILIPAEIAIIHQLQDNLYRVDKEIAEVVKGSEMLTEQVELLKSIPGIGENSATALIAEIGDISLFSNAKQLTAYFGLEPSQRQSGKFTGTKTKLSKRGSSYLRRVINMVAFKCAFKQRNGTFINPVLAEYYERMCEKKEKKTALCAVMRKLVHIVFAVLRDQKPFEFRTPEEHEQLIRAKNLECRMSA

SEQ ID NO: 100414 - protein, 423 aa, unidentified
MEVMYRRVAGLDVHKETVVGCVRAMVGRKTTRECRTFATTTEGLLALLGWLTESQCRHIAMEATGVYWKPVWNILSDGDFSLILANAAHIKQVPGRKTDMNDAMWIADLLACGLIKASFVPAADIQELRGLMRTRKQFVREQTRQVQRLEKTLEEANIKLGAVISDLIGVSGRRMIEAMIAGECDPQRLASLAERNLKASPQALHDALHGRLREHHRFLLKLHLQQWDALDRAIRQIDRQVAWQIERSDAAAVDDQPAFCQLILRLSAIPGVSRLSAIAILAEIGRDMSRFPTAAHLVAWAGLCPGPNESAGKRKSSRLRKGAPWLKTMLVQCAWAAKRAKDSYYMAQFHRLPSRRGPQKAICAVAASILTAVYHMLKSGLPHRDLGADYFDRRSPQAQAKRLVSQLARLGFKAQLQPLPAAA

SEQ ID NO: 100415 - protein, 342 aa, unidentified
MDYFAGLDVSVKETSVCVVDDTGRIVREAKVASEPDALLSVLTNPAYHFKRIGLEAGPLSQWLFSVLAEAGLPAICVETRHMQAVLKAQINKTDRNDARGIAQMMRAGLYRPVHVKTLRSQKLRMLLTHRKLLQSKAIAIENDLRATLRNFGLKVGIAGRVKFEARIKELVENLPDLVVLVEPLLIVRRVLREQIVILHRRLLAIVRDDDVCRRLMTVPGVGPVVSLTYRATVDVPARFRKSKAVGAVFGLTCSKYQSGEVDRNGRISRCGDEMMRVMLYEAAQSMLRSKKWSWLKAWAMQIARRRGMKKAIVALARRLAVIMHRIWVDGTEFRWTRETVAA

SEQ ID NO: 100416 - protein, 314 aa, unidentified
MNKEKVYVGIDVAKANLDIALYSSEKKWQFTNDEAGISRATELLKELSPVLVVMEATGGYETPLAYALKASGIPVAIVNPREVRDFAKATGKLAKTDALDAKVLAHFAAVIEPEPRPISDEELQELGAILARRRQISEMLTAEKNRLHTARKVVGAGIKAHIAYLEKEMAEIEAGLQNKIQKSPIERAKYNLLRSVPGVGPTLCATLLIELPELGKLNKKQIAALVGVAPLNRDSGTLRGKRTVWGGRATVRRPLYMATLVATRHNPVIEAFYDRLCAAGKAKKVALTACMRKLLVILNAILQHGTPWAYASFS

SEQ ID NO: 100417 - protein, 353 aa, unidentified
MHEITRVGVDLAKRVIQVHGVDRADQRVVGRALPRDKFTAWCAQLPAGCMVVMEASSSAHYWARKLVALGLDARIIAAHLVAPYRMQGKHGKNDANDAAAICEAASRPQMHFVPIKSVEQQSMLCIHRLREGFKKERIACTNRIRGLLGEFGIVLAQKPEILHHALPDVIEDASNELPTLARLALQRAWEQWQELDAHLSWCDARIAAHLKANEQVRQAEQLIGVGPLGASALIATVGDFKQFKNGAQFGAWMGLTPRQNSSGGKSNLGGITKHGDTYLRSLLIQGAKAAVFTAHRRDDPISKWAHQLREKTGWQKAAVALANKNARILWAVFTRGKPFDARHVSVRPAIVNG

SEQ ID NO: 100418 - protein, 355 aa, unidentified
MNDAKYIGMDVHQATISVAVRDSRGNLVMEAILETKAETILQFIGGLRGSLYVAFEEGTWAAWLHDLLQPHVARVLASDPRKNALLKAGNKSDRIDARKLSELLYLNKLSPVYHGEQGIRTLKELARSYITITRDLTRVMSRLKAIYRGWGIPCAGQQVYAPRYRAEWLAKISEAGVGRRAELYYQQFDALAALRQGTRRELLAEARKHPAMRLLRQIPAIGPIRAALLIALIQTPNRFRTKRQLWAYCGLALRTYTSGEYRFVGGQLKRSKKVLAVRGLNINHNHDLKNIFKGAATRAAATAGPFQDFYQATVARGMKPHLARLTLARKIASITLLVWKKGARFDAEHLKQQAA

SEQ ID NO: 100419 - protein, 343 aa, unidentified
MQEITTIGLDIAKSVFQVHGIDASGAVIVRRQLRRSQVLPFFGKLPGCVIGVEACATSHHWARELEKVGHEVRLMPARYVKPYVKRNKNDAADAEAICEAVTRPTMRFVAVKTCEQQSVLMLHRTRQLFVRQRTALINALRAHMAEFGIVAGIGRNGVEKLLELITGGEDDRIPTTARACLMALAAQLVLVKRQIQEADRRVLAWHRTSKTSKRLEAIPGVGPLIATALVASIPDPSVFRSGRDLSAWIGLVPKQNSTGGKERLGSISKAGNRYLRSLLVVGALSVIRRAKQLGYTRHPWLVRLMERRSVKTAAIALANKIARIAWAMMVRNESYRTPLPASA

SEQ ID NO: 100420 - protein, 353 aa, unidentified
MKRPKDRLIAGLDLHSNNVMIGVINQEGKRVAHRKVDCDLGQVMEFLKPLKAQLQSMAVESTFNWYWLVDGLRAQGYPIDLANPAKIEQYSGLKHADDKDDAFHLADLQRLNILPQAHVYDPELRPVRDLLRRRTNLVHQHTALLLSFQSLYTRTTGQRLDLGEVKKLAPKEAPKLYEHPANQLIAQVQAEHIGALAKSIQRIEKAVLSCAREIPLYEKLLTLPGIGRILGMTITMEVGDISRFKTAGDFASYCRMVDAKRMSNGKCKADNNQKCGNQYLAWAFVEAAHFARRYNESCRRWYDRKAAKAGKIIATKALGCKLAKAAWHVMAQQCNYDEKRMFPELAAKTMKTS

SEQ ID NO: 100421 - protein, 438 aa, unidentified
MSNKVIFNLDELFISVGIDVGADFSWMSIALPNQQFVGKPYKILHSSIDSLTTAVSKIKEAEELYSLESRIFLESTGIYHYPLFCYLRDKGFNCSVINPIITKNSTNINIRKVHNDRFDSKKAALVGLKPDLKVSLMPSDLALNCRNLCREYYDLMDNRSAYVNKLQGELRMAFPQYLGIFSKVTINTSLTLLETYTSPSAFLEADKQESIDIIKSTARFGLTYAQNKYNAIIQAATDANQFGYIIDSNIKRIRLYISFIRKYDEEINNILESLHELVDANEDADFVKQIHLIETFKGAGFLSAVSIMGEIGDFSAFSKPKQLFAYFGLDPAVKQSGKFEGTKVQMSKRGSAIARRVIHTLTLQSISISRNGEAKNPVLREYYLKKCDSKPKLVAMGAVSHKVCNMIFAILRDNKSFEIITPQEHIKQYNASKCDMAA

SEQ ID NO: 100422 - protein, 385 aa, unidentified
MLEHGRKGEQRERIETTPPALRAFARTLRSTDRVVLEASVNTWAIAELLREHAGEVIVSNPMRTRAIASAKVKTDRVDSAILAQLLAADFIPPVWTPDPATRALRQQIGHHQSLVQQRTRLRNRIHSVLHRNLIDHSFTDLFGKAGCRWLSGVPLPRDERDQVDSALRLLTAVEAEIKLAEQRIAQAALAAPQAMRLMTIPGVGLITSVALLAVIGDVTRFERPTQLVGYLGLDPRVRQSGERPAHTGHISRQGQAHARALLVEAAQSAIRVPGPLHAFYERVRARRGRAIAIVAVARKLAVVAWHLLTYGTDYKWTPPSLAAHKRRKVELKAGAPSRRGHPGKSAPTNGQRLTATEERELLQDAEKHYQAFVSARCAARWEEKP

SEQ ID NO: 100423 - protein, 400 aa, unidentified
MVNVGVDLHKTQFTICARRHGEGDFFSRYSTEEGGYKEFLKLIAKWQKDGEEVRVGVESTGNTRYFKNRMEDAGVVVKVINPLKMKVVNESVKKTDKHDAATIAEFLEKDMLPLSQLCSRESEQLRRLLKVRTSLVRTVTVIKNQIHALLLSEGLPSLKSGTLQSKKGRKETLDTLNQCINGLVAQPLFEMIDKLEENVNSIEKQLRTLTKGDKMVELLMTIPGCGEVCAWTIRAYTDDIKRFANPKKYSSFAGLAPWVQNSNETIRHGKITKRGPKELRTAFVQVVMGLRRMKAKTFTWHMIKRYDVIKQSKGSGKAIIATARKIAVMIWHMLTREEMFQIERMIDPKLVKKSEVMRKTMGGKEDEFQIEKQEKPVKVKSSRKIVKKTGVARKQKKKVG

SEQ ID NO: 100424 - protein, 358 aa, unidentified
MLAEVVDAVVGVDTHRDTHEVEIASPNGVPIARCSIRNDSTGYAQLLAWIVDHAPGPRLVASIEGSRSYGVGLSRALTAAGLPVLESEQPPRSARHGKGKSDAIDAHLAVLSALRLDATHLPAPRVDGDREALRILLGARHDLTVAATAQTNRLRALLLGSDNDADRDLARGALSDAVLTELADRQPRAGATREQAVRHGEIRRLALAIRDGGRALKENRAQLQAVVEDTAPGLTERRGIGPVTAAQVIVGFSHVGRCRNDAAFAALSGTSPLEASSGRTVRHRLNRGGDRALNSALHTIAMVRMRCCPRTKAYVTRRTAEGKTTREIRRCLKRYIARELHRALTATMAATTASDSPA

SEQ ID NO: 100425 - protein, 342 aa, unidentified
MKHYAGIDVSLEQSSVCVVDADGKIIREGKVASEPAALIAWFESLGIALERIGLEAGPLSQWLYAAMRDAGLTVELLETRHVRDAFKAMTVKTDRNDARGIAQLMRLGWFRPVHCKSMAAQETRAMLTARKLVQSKLHDVEMSLRGILRGFGLKVGKTTSSGFGIRINELVAGHPSLQSLAEALLKVHAVLLREFNGFERQVRAIARADSRARLMMSAPGIGVIGAITFVAAIDDPTRFKSSKGVGAHFGMAPKKYQSGETDRTGRISKVGDPTVRAVLYEAGHVILTRPIKNCSKLKSWAMRIAKRAGMKKAKVALARKLAVILHRMWIDGTPFNPALAAA

SEQ ID NO: 100426 - protein, 370 aa, unidentified
MHSATKYVGLDVSKEKISVAIADAGSRDLPRYFGTIPHTAAALRKLIKEIGPAGTLAFCYEAGPTGYETHRWIESMGASCTVIAPSLMPKRPGDRIKNDRRDAEQLARLFRSGELTPVYVPDREDEALRELVRARETAKEDIHRARQRVLKFLLRYQVNPPETIKRRWTKKYHVWLTQLTFAFDSMQIAFTEMLHALNEVEQRMGRIEKALLSQASVGTKASIIQVLQSLRGIGLITAITVAAEIGSFARFRSPAQLMAYLGLVPREHSSGVSIRRGAITKAGNGRLRRALVESAWSYRHRPAIKGDLAIRLQGLPAVVQQISWNAQVRLHKKYRHLVFGKNKHKNVAISAVARELTGFIWAVARSVEHI

SEQ ID NO: 100427 - protein, 488 aa, unidentified
MALVVAVVLSLLILEDVMPRRKPASSQPDPATAALLQTLNPHAAGIDIGATELWVCVPPSAVASPAAPSAPAILPPHVRRFGAFTADLHAIATWLRQCQVTTVAMESTGVYWIPLYDLLESAGFRVLLVDPRQVQRAPNRPKTDVHDCQWIQRLHSLGLLTAAFRPEEPIRVWRSYQRHRASLIEDAGRHLQRMGKAMEQMNVKLPEVVSDITGLTGMSIIRAIVRGERDPKALAQLRDHRCKESAETIARALQGTWQPEHLFALQQSLALYDYYHEQIRDCDRVIEAHLTGMALPEVPPLEPTRRVRRRKDNEVAFDARQRLHHVTGVDLTAIEGIEESTALVVLSEIGTDMNQWPSEKHFGSWLGLAPNPRKSGGKVKSSATRPGAHRAAQALRLAAKNLQRSKSALGAFFRRIAARRGLAKAITATAYKLARIIYALLKHGTAYVAQGLAAYETAYRERVVRQVKRKAAELGLVVVERDAVGQPS

SEQ ID NO: 100428 - protein, 341 aa, unidentified
MEQATIIGIDLAKRTFQLHGAAADGSVAFRKKLPRERVLLFLAAQPPTVVAMEACGSAHHWGREITALGRTVKLMPPIYVKPFVKRQNNDMADAEAIAEAASRPSMRFVAVKAAEQQGQGMLFRMRDLLVRQRTQSINALRGHLAEFGVVAPKGPARVDGLAQAVADETVALPVMVRELARLLLGQIAELGEKIGTLEKDIRRRAPQDEQIARLMTIPGVGAICATAVQAFCPSMAAFQSGRNFAAWLGLTPKQHSTGGKTRLGRTSKMGQCDIRRLLIIGASAVVTWAGRKGPPQGSWLARMMMAKKPRMVVVVALANKMARAAWALTVRETTYRDPAAA

SEQ ID NO: 100429 - protein, 352 aa, unidentified
MRILALDLGKYKTVACEYEAESGRHRFATVLTTPKALHDLIVDREPQRVVIEICSIAGWVADLVRSLGIELQVANTSDERWQWRKVKQKNDRRDALKAAQLSAVNQLCPVHVPELQMRQWRALIAYRSKLVQRRTKVKNHIRDLLLREGQLLPRGRMAWTQVGLTTLAAMVKPFSELSADELWRGELGIELAQLKELQQQIMTVHAKLDEMGAADPRVQLLRTIPGVGARLAEAIVTMFDDVTRFDTAGQVGAYIGMVPKQFDSGEMARSGRITRHGNRLVRSLLVEIAWASLRHNPWARQTFQRLSGGKQSRRKIAIVAVGRKLLVRCWGMLRHQTPWHWQTSIATQSSGG

SEQ ID NO: 100430 - protein, 340 aa, unidentified
MEAIAVIGIDLAKSVFQVHGVDARGQVMVRKRLSRAKLLPFFAKLPRCLIGMETCASANYWARELMVLGHEVRLMPPQYVKPYVKRSKNDASDAEAICEAVTRPTMRFVGVKSPEQQSVLMLHRTRSILTRQRTQIGNAIRAHLAEFGIVAPVGRQGLDRLIAVIGDEQDARVPIPARRCLAMLVEQQRLVLAHLLDTDRAIRADSRASEVGRRLQEIPGVGPLVASALVATVPDPHVFKTGRGLSAWLGLVPRQHSSGGKERLGGITKAGDTYLRKMLFVGAMAVIRHAERYGTRRPWLTKLLSRRSPRVAAIALANKIGRTAWALMTSGERYREPVVA

SEQ ID NO: 100431 - protein, 355 aa, unidentified
MSIVANTYDYVVGVDTHSRTHTFVVLDALTGAKRDARTFPTTRSGLSRAITWLARRTGEPAAALLAIEGIGSYGAGISRACQTAGYRVAEPFPTARVHRHGHGKSDELDAELIARSVLPADVDELRAPREDDGVRAAIRVLVVAREHLTAERTRAINALTSLLRITDLGIDARRSLTKPQLATIASWRDRDEDLATATARREAIRLAKRANECADDLATNRVELEALVSASDGAALLDEPGIGPVNAAVIITAWSHRGRIRSEAAFAALSGASPLPASSGNTTRHRLNRGGDRRVNRALSSIALTRMSHHAPTRDYVARRRAEGRTTKEIRRCLKRYIARQVFRLLNTENRVDRT

SEQ ID NO: 100432 - protein, 337 aa, unidentified
MEYFAGLDVSMSETHVCVVTQDGAVIREVRAPSTPADIAAALARVPACRRILFETGRMAPMLYHGLSQLGLPVVCVESRQAYQALKSLATHKTDRNDARGLAHLARTGFFKPVHVKSLSAHAVRSLIIARKKLVGQRVTLENQIRGLAVVFGVRLPRALSSAFITQALRASEGIPGLSAAMQGLVAARAAVLAAVVAIDADIRRMVRASDACRRLMSIPGVGQLTALAFTAAVDDPGRFRRSRDIGPYFGLVPRRYQSGEVDYTGSISKCGDRRLRTLLYEAANVMLTRYKGPLKLKDWAFAIAKRSTMRKARIALARRLAIIMHAMLRHGTEFKPA

SEQ ID NO: 100433 - protein, 496 aa, unidentified
MSAFLRRSGQNPHRWATKGMKSKKELLAKKKHIKRKSAKAKHNRVLGIHNPHAAGADIGATEIYIAVPPDRLEMNVRCFGTFTQDLRAIVQWLREYKVTSVAMESTGVYWIPLYELLEQEGFEIYLVNARHVKNVPGRKSDVQDCQWLQYLHSVGLLRGSYRPAQDICAMRAISRYRDNLLHFGAQHLQHMQAALDQMNLRLHHVIADLSGLTGMAIIEAILAGERDPRQLAKLRDPRIKASQETIAKALEGNWRVEHLFVLGQALQSWKQVQQQLGQCDQKLQELSSQLEGKIDLANSPLPPSAKYCGREPRSKNQPNGPWREELYRHFGVDLTEVPGLSLGVVLTLFVELGADLSAFPTPRHFAAWMGLCPDNAITGGKVIRRGTRRNRQRIRLALRLAATSLHHNKTQLGECFRRLRARLGAPKAITAMAHKLARIIWHLVTHQVGYDESIFAEREEQLLRRKQRQLRNLAHSLGFTLVPNPRPAATSNAEVS

SEQ ID NO: 100434 - protein, 351 aa, unidentified
MKKVFVGIDVSKKTLDASVIAPSLTEDKPVIISYGKFDNRPCGYRKIVSMARKAAKAVDDAEILFCCETTGGYDHALCDYMSDKHLDIWREHAARIAKTRPDHGKDDRKDSILIAEYAWRNRDRAQVYVPSSRSVRDLRQLLLYRRQLVEMRKQLNVRMTDLKATVQSDPTMSFIYSESEKQVKRLTDCIEKCESMIRETIDSDNEMLKNFGHIMTVKGIGLVSAVAIIAYTGNFKTIGVYKSFACYCGTVPFYEDSGTSIHKREYIGHKSNRMVRSYLIQAAHIATIYNEEMVAYKQRMQSKGKPAGIIVNNVANKLLRLVFSLVANDCDYEREHEFKREERLKKKTMSA

SEQ ID NO: 100435 - protein, 420 aa, unidentified
MLVACLIKGGKKESRTFSTMTADLLCLLAWLTQAGCTHVAIESTGVYWRPVVNIREGSLDVLLTNARDAKGFKARKTDVIDAEWLADLLRHGLLKPRFIPPRPIRELRELTRYRESLVREQPALAKRIQKLIESANIKLGQGASDALGVSGKARLRALAAGETDAEKLSQLAHTTLRRKQPQLQQALEGRLTQAQRWILGQLLDQYEQVEAAISRVAARITQEVESSPDPFVPEAVQLLDTIPGVGETVAQIIVAEIGVDMARFPPAHHLASWAGMCPGNNERAGKRKSGKTTTGSRYLRAALVQAAWAASHQKGTYLAAQYKRLVRRMGKKKALVAGRVQKGLSPVDWKPMTTVGPGVVEIRIHTAQEYRVLYVAKFAEAVYVLHAFNKRTQKTLQRDIDLAKRRYSELMRARSRTKEQ

SEQ ID NO: 100436 - protein, 405 aa, unidentified
MDIIFERGAGLDVHKGTVVACVMGTGIKKEIRTYRTMTNDLFRLKEWLKENRVTHVAMESTGVYWKPVFNVLEDSFKVMLVNARHVKNVPGRKTDVQDSEWLCKLLRSGLVRGSFIPPKPVRELRDLTRYKRKLIQTITSEKQRVEKILEDANIKLSSIASDTFGASGARIIQELLKGELEPEEMAELSKGRLRKRKEELKEALVGNVEEHHKRMIRTSLGHIKAMEEILFTVEQKIQENIERHFKEEYELLKTLPPMKDSASVIIAEMGVDMDLFPTDGHLSSWAGMSPGNNESAGKKKPGTTTHGNKHLKTILTEFAWIASKMKGTYLWAKYQSLVGRRGKKKTLVAVGHKILIMCYHILKYKVPYKELGSNYLDVRKKDRIAKSYIKRLTNLGYAVTLKEVA

SEQ ID NO: 100437 - protein, 358 aa, unidentified
MMTTQNTKPDFTGQHLFVGIDVSKNSWKVCILTQHVEHKTFTQPPKPEVLTSYLQRHFPGARYHCAYEAGYCGFWIHDQLTTLGVECMVVNPADVPTINKERTHKTDPVDARKLARALRNGELMPLYVPNRAALEDRSLIRTRHSLVRKQTRCKNQIKGLLNFYGIPLPQEPSTANWSKRFLVWLEQLSMQSGSGTHALKALIQELKYLRQMIADTTKQIRSLANEPPYCSYTVHLITIPGVSSLAAMILLTELVTLSRFRTLDQLSSYVGLVPGEYSSGDREIITGISPRRNPFLRGLIIECAWVAVRKDPALVLAFNKLCTRMPKHQAIIRIAHKLLNRIRFVLKHQTAYVPAIVQ

SEQ ID NO: 100438 - protein, 353 aa, unidentified
MSEDKYTAFDVHQATTVVSVVNAAGREVNTAILPTQAQALLGFVEGLRGRLHLTLEEGTYAAWLYDLLQGRVGELVVCDPRRNALLKEGSKTDRHDARKLADLLRTGMLRAVYHGERSLRNLQELAHCYQALVQDTTRVMNRIKAFYRSHGIDCAGRGVYSRKQRESWLVRLPAGASRVRGELLHDQLEQLRSLRRRARHELLAESRRYTVAARLRGVPGFGPVRVALLIAGMQTPCRFRTRSKLWSYAGLGLVQKGSSEYRLVEGRAVRRPGALQLRGLNRNRRAGLKEIFKSAALAAIRQPGPFKDYYQSRLQRGVDPAILRVSVARKLAALVLSLWKKGGRYRAEGMKQA

SEQ ID NO: 100439 - protein, 371 aa, unidentified
MTTKKIIYVGLDVDDSAFHGAGLDLTTGEYSQFQCKPDSGVLLKKLQAVFKDQYEIHHCYEAGHLGYSLYRTLRSKGIHCDIVAPSLIPKMAGKRVKNDRLDALKLAEFYAKDLLTTIYVPTEEDEEVRYLIRSRRFLVKQRKCLKTHIVSVCKRYEINFQKETGKKTNWTDTHIAWLKKRASELSRLTCRIDLELLLAQYTSLSESIERLEEAIERIAQNEKYSGKVSALNSFRGIDTLTAMTLTTEIGDIHRFKHPNQLMAYAGLDVAEYSSGGKEHKKGITKTGNKHIRTILTESCQLVAVPPIISKRLKELRKGQPQEVIDIADRCMNRLHKKSVRMIFAGKHRNKVKTACAREMLAFIWEVMNKVA

SEQ ID NO: 100440 - protein, 326 aa, unidentified
MQGKEASEQETKVQSNVGIDISKCWLDAHVLPGDERLHVANNCAGIRQLKRWLSHYRIALVAIEATGKWHRHLHRSLVASAIPAAIVDPYRVRMFAKAQGILAKTDQLDARVLALFAAMMAPPVRPVAPQAMAELAELVVARGSAVEAQAALKNQFAAAESAFLKRQLDRRISRAGKDIAALDREILKRIKADASLARRYAVLTSIPSFGFTVAATLIACLAEIGSATAKQIGMLAGLAPIADQSGDRDGVRVIWGGRPAVRRVLYLAALSASRFNADMKAFYKRLIDNGKPSKVALIAVARKLVVLANTLVSEDRTWQPCAPMQA

SEQ ID NO: 100441 - protein, 340 aa, unidentified
MQTPRHIGIDLHRNQFTCCVRLENGRNYLTDWKLEDLPRFVKKLRPSDQIAVEVTGNTRLFHDAVAPHVARVVAVDPNQFKVISHSVKKTDPNDARNLALYLEKDLLPEVRMKDKTQAQLASLTQTRDTLVKLRTALKNKINNILSAHGINLEKEALSSEKKLREVLAMKFDAMIRIELKVIVEQIRSLNQSIAELEKTIADEGSKLEGHKNLTSIKGIGPLTGSILLSVIGDINDFADEGKLAAYFGIVPRVSKSNETEHTGRITKRGSKLGRTALVQCALIAQRYSPYLKRHYEKVKARRGTGKAIIALARKLLGIIYRTLKNKWVFEDFPNFVLAEA

SEQ ID NO: 100442 - protein, 393 aa, unidentified
MALDHHFDEPTAIRTNLDAIFVSLELSRSTWLITSVSPGGGEKMSKRGVSAGNVAALFTRLSELKQKAFARTGKSFHVVAIQEAGLDGFWIHRVLQSEGVESHVVDPASIATSRRRRRAKTDKIDGEALVRALLAYKRGEPRVCAMVRAPTPEEEDRRRLCRERKTLTNERVQHVNRIKGLLFAQGISDYQPLRRNRHQRLDELKTGDARPLPPHVKAQISRELDRLELLLEQIKAVEIERDALISAMKPGGMNADAVRSPPAMLTKLNGIGPEFAAVLWSEGLYRSFANRRQVAAYAGLAPTPWQSGSVRHEQGVSKAGNSRLRTTMLQLAWLWLRHQPQSALTLWFHERVRRNGARLRKTTIVALARKLLVALWKYVNAGVVIDGAVTRAV

SEQ ID NO: 100443 - protein, 347 aa, unidentified
MNFYTQQHTYYCGIDLHAKAMYVCILDQSGTKLVHKNLPTTPEAFLRVIAPYREDLVVGVECIFTWYWLADLCQQEGIAFVLGHALYMKAIHGGKAKNDKIDAHKIAVLLRGGMFPQAYVYPAAMRATRDLLRRRCHLVHKRAELLAHIHNTNSQYNLPEIGKKLAYKANRAGVEDHFPDPSVRKTIEVDVSLINHYDQLLGEVELYITRTAKAHDVQTFSRLQSVPGIGQILALVILYEIQDIARFPRVQDFVSYCRLVKCAKESNGKRLGTSGKKIGNVHLRWAFAEAAVLFIRQSQPGKAYFAKLEHKHGKAKALTVLAHKLGRAVYYMLTREQAFDLNRFVTA

SEQ ID NO: 100444 - protein, 471 aa, unidentified
MAIPHSSRLNRKQRRELTRRLRSDDPGLDVLHPNAAGIDVGNSAHYVAVRPDRDPDPVRRFDCFTADLHRLADWLQHCGVTTVALQSTGVYWLPLYDILEGRGLEVYLVNARHTKNLPGRKSDVQESQWLLKLHTYGLLRNSFYPSADIRVVRTYWRQRADHVRAVSTCIQRMQKTLTQMNIQLANVISDLSGWTGQRIVRAILAGERDPQTLAALSHPGIHASRDAIAKSLEGTWRPDLLFVLQQEVTMYDAYLQRIEECDQALEQHLKSFADKPADTPDAVASPAARDQARRRLKHRRKAGSHTPQFDLGRELRRISGVDLTRIDGIDVGVAQTVISEVGLEMSRWEDEHHFASWLGLCPDNRITGGKVLRRGTRHVINRAATALRLGASTLLRSQSYLGAQYRRFRGKLGAPKAITAMAHKLAVLVYRMLRWGQEYVDKGLQYYEERHREQQIRLLKKRAAKLGLLVV

SEQ ID NO: 100445 - protein, 319 aa, unidentified
MNQKELFIGVDVSKHHLDVAFGHGEDAPVERIQNAPDPVAQLVARLQQLQPTLIVVESSGGYERMLLEACHKAQLPIALVQPQRVRAFAKAEGLLAKTDRLDARLLARFGARMCPAASEPPDEKQPIMDELAKRREQLMQMRTAELNRLKTTRCAARELIQKHLEYLEQELAEVERKIDELMKQSNELSAACDLLMSVPGIGRVTANILLIRLPEILKLGPKAIAALAGLAPMANQSGSKDKRRRIHGGRQDVRNVLYMATLSATRYNPVIKPFYQRLIARGKPFKVALVAAMHKLVCILNAMLKRKQAWNPNLCPSTS

SEQ ID NO: 100446 - protein, 426 aa, unidentified
MDILYPHSAGGDVHQKTVVVCALWRDGTRQRQETRTYATTTGELLKLADWLDSVGITHLAIESTGVYWKPVYWVLEGHLEVWLVNAQHVKKVPGRKTDVSDAEWLASLMKHGLVRPSFVPPKPQRELRDLTRQRANLVRDRTQTLNRLQQVLEDANVKLTSVVSDVNGVSALAMLRELVAGHTAPNALAALARGTWRKKTAELEAALTGRFNDHHRFLLMHALMQLDFLDDELATFTPESDRRVTAQCQAQVTTPVAPPVSFERALQLWDSVPGINAHNGQVLTAEIGADMSRFPTAEQLASWCGVCPGNDESAGKRRSGAIAPGERPVRKALVQAAWAASHTKGSYLQALYHRIAARRGKKRAIIAVAHSIVISGWHMLTHNEPYREPAAAVLTEKQKATALKRSVKKLKSLGYAVELKPLSSMS

SEQ ID NO: 100447 - protein, 412 aa, unidentified
MRIIYKRCCGLDVHKKVIVACLLLLEHDGELRREIRKFGTMTQDLLELLDWLQQAGCTNVAMESTGVYWKPIYNILEGHLEVVVVNAQHLKGVPGRKTDVLDAEWLAECFQLGLLKASFIPPAPVRELRDLTRYRTSLIRERARTVNRLQKVLEDANIKLAAVVTDIQGVSAWAMLEAIVKGTTDPVALADLAKGLLRKKREQLVAALSGRVKPHHRFLIAEQLSQIEYLEESIQRISAEVGERLRPFELAVQRLDSIPGIGRQTAEVLLAEIGWDMSRFPSDKSLASWAGMCPGNNESAGKRRNGKTRKGSRWLRHALIEAAHGAARTKNKYLKTQYHRIAAHRGKKKALVAVGHSILIISYHLLTRGQEYSDLGANYFDERDRSAVQRRCVKRLEKLGYSVQLQQTTLAA

SEQ ID NO: 100448 - protein, 387 aa, unidentified
MQKPHDNSKASPAAFMQDNTLIAVIELGLSNWLVAGLIPGVSREPLKKLEPNPEDLLKLLHGWRDEAIKAARPITRIAVAYETGRDSFWLARWLRERGIDAHVIHATSVAVSREHRRAKTDRLDTAMLKRAFLGWLRGERGHCTVAIVPTMEEEDAKRPHREREGLVHEQTRVVNRMKSALIQFGVRNFNPKLRNARAKLETVRTPEGKSLPPNTIAALRRDMERLKIIKEQIKAIEQTRLQQFEQKPEALANRMVYLLVRIYGLGWETADLLVHELLSRTLRDRKAVARYAGLTGSPDESGSKRREKGLSRSGNARVRKIMIQLAWRMVKFQPDSALVQWFKQRTENAKGSRKPMIVALARKLIIALWRYANDGVIPEGFKLHSAV

SEQ ID NO: 100449 - protein, 366 aa, unidentified
MGEITTVGIDIAKYVFQLHGVDAAGEVVLGRRLRRSQIAAFFAALPPCVVGMEACGTAHFWAREIAAVGHDVRLMPPSYVKPYVKRNKHDAADAEAVCEAVRRPSMRFVPVKTPEQQAALVAHSVRDLLVRQRTMLVNALRGHLAEFGIVAPRGIHKAEELIAVIGDVSDERIPSAARRVLPVLATELAALGLRITAIEAEIVARTRADPVARRLATIPGIGPIIASRITATVPDPSIFQSGRDFAAWIGLVPRQNSTGGKIRLGGISKRGNGTLRRLLVGGAMAAMFRTKVLQNDPWLCQLRARKPAKVAAVALANKIARTAWAVMQHGEDWRPATALSSRPQEPAAVLAAVKTMPPSAMAFGQS

SEQ ID NO: 100450 - protein, 382 aa, unidentified
MITVETRVHPLVASRPLNGLLIPIGNGDAPMSYDYHIGVDYHKAYTHLVVQDSGGKVLRSGKVKNDPQSLAGFLTPYLENSHAVMEASRNWTVMYDWLDELCDDVVLAHPLKVKAIADAKIKTDKIDATILAHLLRADLIPESYVPTEAARELRQALRERIFFVRLRTMVKNRVVTIFDRYPTQTRALREMTDLFGKEGRGQLELLCVSVIDREHIDRAIAFIDDINQKICEAEKTIRRFSKDNADVKRLKTIPGIGEFFARLIAAEIDDISRFRSAKKLAAYAGLVPSTYASGGKCWNGRIIKAGNKWLRWAFVEAAIPAIRAEPALKFDYERLKATKGANRAKVVIARKLLTIAFQMLRDKRDYERRDALEQLPTNSRLS

SEQ ID NO: 100451 - protein, 357 aa, unidentified
MDKSTKLDFSGYNIYVGLDTHLKSWRVTTMVEDKVYQTFSQEPNAEALKTYLAKRFPKANYHSAYEASFCGFHIHRKLLALGINSIIVNPADIPTTDKERKQKEDTRDNRKIAKQLSQSDLVPIYVPDIEIEGDRQLVRYRKTISKEITRSKNRIKSQLHFLGIEIPPRFSNATHWPKRFTQWLEEVEVPTNSAKIILDSHLETVTGLRKKQLMINRAIRQISKKDIYNKNYNLLISIPGIGALTSMIILTEIGDISRFENFDHLSSFVGFVPMTNSTGEKDKVGDITIRRNSMLRGALIESAWVAIKADPVLMLAYQNLTKRMVANRAIVRIAKKLLSRIRYVLINQKPYEKGVVE

SEQ ID NO: 100452 - protein, 391 aa, unidentified
MYIVGIDIAKRKHEAAVIDGEGTVIIKPFSFTNNCSGYNRLLAMLTKAKLPLDEVSFAMEATGHYWLALFTRLQKEGFRVQVINPVQTNSIRSFYIRQAKTDPRDALLIAEVIRFGHFSESTLHPENIYELRELCRGRHAIVSMQADVKRKVVALLDQVFPEYETAFTNMFGDTSMAILQTCPTPKELSEMRLEELCHLIEVSSHKRFRMAKAQELQALARNSFGFAMAGDVFSTMIRLYAKHLDFLKQQVREMDRKIAEIMETLDTPITTITGIGLTLGAYILSEIGDISRFSSAAKLAAYAGIDPTMRQSGEYNGVRNRMSKRGSPYLRHAIWLAASSAVLHDPALKLYFQKKRDEGKPYMASVGHACRKMVSIIYAVMRDNKAYCLCA

SEQ ID NO: 100453 - protein, 443 aa, unidentified
MLRESTRVCVLAEVPPDRRREAKVASGAGKGTGMEVMFDRVAGLDVGKETVTVCLRTPGPKGRRHAETRTFKTTTGSLHMMRDWLVEVGVSIAAMESTSTYWKPAFYCLEEVMEVWLLNAAHMKAVPGRKSDVRDAEWIAQLLEHGLLAPSFVPLPEIRRLRMLTRYRVQLMGDRAREIVRLELMLEDASIKLSSVVSSLKTVSARAMLTAMIEGEQDPLVLAEMARGRLRRKIPDLAQALTGHFDANHARLARSMLRRLDLVEQALAELDAVIVDACEPWQHQIELLQTIPGVGEKVVPVIIAETGADMSRFPTAAHLAAWAGLAPAMHESAGKQSPAGKRHGNKWLAAMLVEAAGSVGRMHGRNYLAARHARLMKRRGMGRAQVAVAHSILVAAYWMLKRDEPYHDLGADWHRRRNDEAHARRLVAQLERLGHTVIINPAA

SEQ ID NO: 100454 - protein, 409 aa, unidentified
MFYAGIDIAKRNHEAAVIGADGQALVESLSFANSQAGCEKLCQLFERLRIPVQELVIGMEATGHYWLAVYAYLSDQGYTVHVINPIQSDAFRRMSIRQAKTDAIDALLIAQIMRFGQYSTTTLSEENIVALRQLSRYRLALVDICGDCKRRVIALLDQVFPEYERLFSDMFGVSSRELLLRCQTPEDMLDISTEELAALLNKTSKGRFSGQKAEEIQSAAASTFGITYAREAFAFQIKQLIEQICFTEQQLEQLETQIAGILRRTNQVIATIPGIGETLGAVILSEIGDIHRFETPAKLVAFAGLDVRVNQSGEFTGTRNKLSKRGSPYLRRAIWLAATRAAFCDPTLSAYYQSLRARGKHHLTAIGAVSRKMCNILFVILRENRPYEPFPPKPAPHQLSEPEPSSGIQ

SEQ ID NO: 100455 - protein, 410 aa, unidentified
MSLPSVSSITRFFGVDLHKHFIYIAAVNSLQEIIFKPLKKTLEEWPAWARDHLLPTDVVAVESTTNTWDFYDGIVALVASVQIANAGKLPWITKSRVKTDKHDSIKLAKLCAAGLIPQVWIPPVHIREARCLLAHRRRLVGIQTMTRNRLQSLLHRHMLELPAGEPFSNRNLPWWDSIPVSPVEKILLRHYLDILDHLKPLIGQLDAQIASLSNSPEWRDLMTFALQIPGIGLILGMTILAAIGDISRFESPKKLVGYSGLGASVHASGQTFRQGRITKAGRRDLRTALIEAAWAAVNFDPYWKGEFDRLSQRLVPGKAIVAIARRLLVVLWHVLSKRQSYRHTADEKIAVKMMLWSEKVRKQNRQAAATRLFVRRRLMTLGVGKNLSRFTYSKKSRVLVSEEEASASMA

SEQ ID NO: 100456 - protein, 334 aa, unidentified
MQNITLIGIDLGKHSFHIHCQDKSGKVLLRKKFTRTKLIEFLAGCASSTVVMEACAGAHFMARRIADLGHEAKLISPQFVRPFVKSNKNDFVDAEAICEAASRPSMRFVQPRTEAQQAMRAIHRVRESLVSDKVKTTNQMHAFLLEFGISMPTGVAVVKRLSTVLAENELPPYLAQLLMRLHAHYIYLVGQITELEIALEQELSRDEVGQRLQTIPGIGPITASVLSSQLGDGKQYSCSRDFAASTGLVPRQYSTGGKNTLLGISKRGDKNLRRLLVQCARSFIQRIENQSGRLADWVRALLARKHSSIVCCALANKLARIAWVITTQQTVFER

SEQ ID NO: 100457 - protein, 342 aa, unidentified
MDHYAGIDVSLERSSVCVVDATGRIIRETKVASEPEALVRFFRELGLPLTRVGLEAGPLSQWLHAGLTGAGLEAVLLETRHVKAALSAMIVKTDRKDARGIAQLLRMGWYRPVHRKSPDAQEARALLAGRKLLQAKLRDVELSIRGILRGFGLKVGEVSKGRFAARVDELVAGHEMLEAVIGAMLQAREGLRAEFARLHRRMLAIVRNDTVCRRLMTVPGVGALVALTFKTAVDDPERFRRAKAVGAHFGLTPKRYQSGETDVSGGISKVGDASVRTALYEAANAMLTRVSGISALERWAMGVAKRRGMKRAKVALARKLAGVLHRMWANGADFRWGEEAVA

SEQ ID NO: 100458 - protein, 400 aa, unidentified
MISVGIDVSKGKSTVCILKPYGEIMCSPFEMLHGEKELNALDDLLNKLDGEIRIVMEATGIYHLPILTFFHEKGYFVSVINPFAMKKYAKDNSIRGAKTDKLDSIMIANYGIEKWFKLQRYKGDEEIYAELKLLGRRYRHYMELHVKALQELTHILDYVMPGIKKMFNSWNEANGKDKLSDFVEQFWHFDLITAMSLEKFTEEYLDWAKEKKYHRSRSKAEAVYELASNGISTLSSGTPSTKMLVQEAISVLRTVDSSLFLILTRMQELAKTLPEYSTVREMGGVGDVLAVKLIAEIGDIRRLHSAKALVAWAGIDPPPYESGQFIGSKRKITKRGSSTLRKVGYEVMRVLKSHPAPKDDAVYNYILKKESEGKSKKHAKIAGLNKFLRIYYARVMAVYQ

SEQ ID NO: 100459 - protein, 380 aa, unidentified
MASMHDSVRFKTTVYAAIELSKKSWVVAIARPDRDRPSIHRIAGGDLADLIGRLRKAAGEKQRIVVCYEAGYDGFWLTRSLAKIGIDCRVLDPASIQVNRRARRVKTDRIDSLALLRALIAIDRGERHVCAVVRVPTVEEEDARRSHRERQRLVRERTGHINRIKGLLFAQGIRGIEPKRRRTRIDFGKLTTAEGRPLAERLRRELEREYQRLELVQSQLRIVEKERDTADAQDPAVERKRELLCALQGVGGASAAILAREVFARPFASRRQLGSYLGLTPSAYDSGSTTRCQGISKAGNSWARRVLIEVAWLWRKYQPGSPLSHWYARKTADQSPRIRRIMLIALARKLAISLWRYVETGLVPDGAVMAKTTPHMAAAT

SEQ ID NO: 100460 - protein, 358 aa, unidentified
MEYGAIDLHKKDSQIRIVTERGETFDRRIVTTRERFTALFEGRRPMRILLEASTESEWVAQHLETLGHEVIVADPSFAPMYSERSRRIKTDRRDVAALADACQRGCYRAVHRRSASQRTVPVHLNVRRELTDSRTRAISQARAVLRGAGLRIRSGSTGSFLVRMAALELPASITETLAPLQRLIAVLNDELATADDRVARIAAEDPVVARLTTVPGIGAITATAYVAALDDAARFGRAAQVASYLGLAPREYSSGEQQRRGRVMRSAHPYVQSLLVQAAWCVWRSKDPRTAGLRGWAQSIAHRRGKSIAVVALARRLARILFAMWRDGVPYDAARTRPTRFHGDTAIGEAAAPSALPS

SEQ ID NO: 100461 - protein, 342 aa, unidentified
MEHYAGIDVSLESASVCVVDGSGEIVREGKVASEPEALIGWFGALGLKLARIGLEAGPLSQWLYAGMRQAGLATELLETRHVRTALATMPVKSDRNDARGIAQLMRLGWFRPVHCKSIGAQEMRAVLTARKLVQSKLCDVENSLRGILRGFGLKVGKTTNRSFAGRVQELVINHASLAMIAAALLSVHAALLRELKAFEKQVRSMARSDAKAKLLMSAPAVGPIVALTYASAIDDPRRFKSSKRVGAHFGLTPKKYQSGQTDYSGRISKIGDATVRTALYEAAHIMLIKPIKGCTALKSWAMRIARRSGIKKAKVALARKLAVILHRMLVNATPFDAALAAA

SEQ ID NO: 100462 - protein, 458 aa, unidentified
MSKRSKKTKSQSFKAPSLPRHLQHINLNAAGIDIGSERHLVAVPEGRDEISIREFGTFTADLEVLAAWLKQCGVTTVAMESTGVYWIPLFELLERRGCEVKLVDARHVKNVSGRKSDVLDCQWIQQLHTYGLLAGAFRPPDEVCVLRSYLRQREMLIQTASRHIQHMQKALQQMNLLLHNVVSDITGLTGMKIIKAILAGERDPRVLAGNRHERCQNDAATIAKSLVGNYREEHLFALRQAVDLYETYQAKIADCDQAIIKQVEKQPDISDDEPPTPEKQVQARDRIRDGVDVRDLLFKKSGVDLFAIPGLAADTLLTLVSEVGFDMKPWKTEKHFASWLGLCPGTKKSGGKVLNNKTKRNPNRATQAFRMAAASLYRSQTALGAFYRRIKSRAGGQQAVTATAHKIARIYYAMLTKGTSYVELGQQAYEQRYKQRRIDHIMTQAKSLGFQLVPCVTS

SEQ ID NO: 100463 - protein, 403 aa, unidentified
MNLNAVGIDVSKDKSMVAILRPYGEIVSSPFEIKHTSGNIQSLIERIKSIEGESRIVMEHTGHYYEPLARELSLAGLFVTAVNPKLIKDFGDHSLRKVKSDKADAVKIARYTLDSWTQLKQYSLMDEIRNQLKTMNRQFGFYMKHKTAMKNNLIGILDQTYPGVNTFFDSPAREDGSQKWVDFATTYWHVDCVRKLSLNAFVGHYQKWCKRRKYNFSKDKAEEIYGAAKELVPVLPKDDLTKLIVKQAIEQLNTASKTVEELRTLMNETASKLPEYPVVMGMKGVGPSLGPQLMAEIGDVTRFSHKGAITAFAGVDPGVNESGTYEQKSVPTSKRGSSSLRKTLFQVMDCLIKTKPQDDPVYAFIDKKRAQGKPYYVYMTAGANKFLRIYYGRVKEYLMSLPE

SEQ ID NO: 100464 - protein, 287 aa, unidentified
MKYVGLDWAYRRAQWCALGPGGDVAGEGRIPADRDGLARLVLGLGDEVKACLEMMSGALWVRDELVACGWQVEVADARKVKTVAPLAAKTDKVDARLLAELSRRELVPALWLPSFDERALRERLRRRMHLVRLRTSAKGRIFGLQTQWGVRVSLARLRRADGLTLLERAGVPAVWRHSVSECLALIDFLDARLEPLDRELKPFAKADPRAVLLDTIPGVAELLALTIAVEIGDISRFRRPAHLVSYGRLAPRVHQSGQARARQRPAQQVGLTVARLGGSGSGPTRVA

SEQ ID NO: 100465 - protein, 385 aa, unidentified
MATTATTHVDQETAFTPTLFLAFELGVNKWKLGFTTGAAQRPRERQVPAGDCQRVLEEIRRAKSRFGLPEAARVVSCYEAGRDGFWLHRFLVSQGVENAVVDSASIEVNRRYRRAKTDRLDVHKLLTMLLRHAAGEKKVWSVVRVPSVAEEDRRQLHRELLTTKRDRTRVINRIKGLLASYGIRMGLQGEVETQLDEVRQWDGSPLPTALRARLKREWQKVQGLTEQIGSLEAERRAELRTSEEPVMAKVRQLATLRGIGVNSAWLFVMEFFAWRGFQTPKQVGALAGLTPTPYQSGQASRELGITKAGNGYMRTMAIEIAWGWVRFQPESLLTQWYQARFGQGSARLRKIGIVALARKLLIALWRFLETGELPVGAVLKAEASG

SEQ ID NO: 100466 - protein, 350 aa, unidentified
MKRILKQSVGIDVAQKELVVQVGRLYEDLSTELYAYKCFANTAKGFIFLVQWVLKLTEPTVSIRYVMEATGVYHESLASYLADHGYSVSIILPNKISNYFRTLSVKTITDKSASEAITLFGLERNLEDWKRPKPVFKYLRQLTRERDQVVQERTMIKNQLHAEKTESDPNSSTLKRIKQRIDLLNKQEKVIKDEIATLSKKEKELKGELALLCTIPGIGILTAATILAETNGFELVRNKRQLASYAGFDVQEKQSGTSVKGKTRISKKGNKNLRKAMHLPSLTAIRHDPRFKAIFSRLVSKHGIKMKAAVAVQRKLLELSYTIFKTQRPYNKSHLQEAGAPSQKTEMQIA

SEQ ID NO: 100467 - protein, 342 aa, unidentified
MQVITIGLDIAKNVFQVHGVDNAGNAVLRRKVRRDQLIPLLRDIDPCLIGMEACATAHHWARELIALGHVVKLMPPAYVKAYVKRNKNDAADAEAICEAVMRPTMRFVAVKSADAQSILMLHRARHLLVRQRTAQISAMRAHLAEYGVVAPKGRAHVRGLIEALDKGDGPLPAMARQVLILLARTMEGLGAQIRKIEIELLGWYRTNQVCRRLSTIPGIGFITATALAATVVDAKVFRSGRQFAAWLGLVPKQHSSGGKDRMGGISKMGDRYLRHLLVVGATAVIRYTRRKATAVSAWANQLLERKPARLVTVTVANKVARIAWAVMAREENYRATPSMARG

SEQ ID NO: 100468 - protein, 316 aa, unidentified
MKERPVVGIDVSKATVEVGIVPGDRVFTCAREAKALDGLAEDVRKLRPRLVVLEATGGLEMDVIDALLRQGLPVHRSEPSRARHFAKSLGRHAKTDGIDALVLARFGATGELKAQSFANEEERHLEALVTRRRQLVDMITAEKNRLGASADARARASVQKHLKFLEREQRAVEAAIEKALAATPEMQAKADLLRTAPGVGKVTAATLVASMPELGQLNRWQAAALSGTAPFDNTSGTFKGKSRIWGGRADVRRVLYMATLAASIRQTWIRALYLKHLAKGKTKKAALTACMRQNIVRLNAMLRDNEPWRQTAPAAG

SEQ ID NO: 100469 - protein, 338 aa, unidentified
MEAYAGIDLHSSNSYIGIIDEHDRRHFSKRLPNSLTQILVALEPFKKDLKAVVVESTYNWYWLVDGLQEEGYKVHLANPSAIKQYEGLKHTDDKWDSFWLAHMKRLNILPEGYIYPKEERPIRDILRRRLLFVRHRTAQILSLQSTISRNLALKMSGSAIKKLKQEDAKDLFDSPFLVLTAKSNIAVIQFLTKTIKAIENAVKSEAKLRKEFQLLKTISGIGDILSLTIMLEVGDIDRFPKVGNYSSYCRCVKSARFSDGKKKGENNRKNGNRYLSWAYVEAAHFAIRFSQEAQKFYQRKMAKTNKIVAIKALSNKLARASYYIMRDQVAYDESKLFS

SEQ ID NO: 100470 - protein, 348 aa, unidentified
MQISTIGIDLAKNVFQVHGVDAAEKLVLKKQLRRSQVLEFFSKLSPCLVGLEACATSHQWARELKKLGHDVRLMPASYVKAYVKRGKNDAADAAAICEAVTRPSMRLVPIKSSEQQSALMLHRTRDLLIRQRTQLINAMRAHLAELGLVARKGREGLQQLIRTVAEADDERLPSDACFACQAIIAQLQAVQIQITRLDKRIHQAHRVNPASKRLEAIPGFGVIVSTAVVATMTDPKAFKTGREFAAWIGLVPRQNSTGGKDRLGSISKQGDRYLRRLLIVGALSVVKSARARPDKYPWIMTLLGRRPAKVVAVALANKMARIAWAVLAKGETYRASAHTTSGAVAVST

SEQ ID NO: 100471 - protein, 400 aa, unidentified
MDDIDDVGVFLGLDVGKSAHHGHGLTPAGKKVFDKQLPNSEPKLRAVFEKLAAKFGTALVIVDQPASIGALPLTVARDAGCKVAYLPGLSMRRIADLYPGEAKTDAKDAAVIADAARTMPHTLRSLELTDEITAELTVLVGFDQDLAAEATRTSNRIRGLLTQFHPSLERVLGPRLDHTAVTWLLERYGSPAALRKAGRRKLVEVIRPKAPRMAQRLIDEVFDALDEQTVVVPGTGTLDVVIPSLARSLAAVHEQRRALETQIGQLLEAHPLSAVLTSIPGVAVRTAATLLVTVGDGSSFPTAAHLASYAGLAPTTRSSGTSIHGEHAPRGGNRQLKRAMFLSAFAALHDPASRTYYDKCRARGKTHTQALLRLARQRINVLFAMLRDGTFYEPRTPRLA

SEQ ID NO: 100472 - protein, 383 aa, unidentified
MRDAEPRFVGLDLHRHDVMVGAVNAHQDIVLTPERVTLRRFAQWAPRHLRPTDQVAIEATTNTWALYDLILPHVAKVVVAHPQQVRLIASAKVKHDKRDALILAQLLAANLLPEVWVPPPPVRQLRSLIVHRHHLATHQRMAKNRLRGVLFRFNLPAPPGDVASPAHRAWWQSISLNPVERLRVQHDLDTLDHLTAQITEVNASLAHLSVCSPWAAAVPFLLQMPGIGLVSAMTILSAIGDISRFPTPKHLVGYAGLGAGVRSSGQTTRSGPITKSGRGELRTALIQVAWAAARYSPYWREGFSRLAPHKGPQKAITILARKILVVIWHVLTHRTMDRHADPAQVERAFLKWATDHRLATSQGVSRTQFVQNALVLVGFRPPD

SEQ ID NO: 100473 - protein, 338 aa, unidentified
MGYYVGIDLHSNNNFIGIIDQENRRVFKKKSINDLSEITKTLYPYKREIQGIVVESTFNWYWIVDGLMDSGYRVHLANPSAIKQYEGLKYTDDTWDSFWLAHLLRLGILPEGHIYPKDTRPIRDLLRKRLMLVHHKTAHILSMQSMVSRNNGIQMDGNAIKRMDVKELSGLFTDKHLLMSASCNHQVINFLSKQIVKIEKTVLSKVKLQETYKKLLTVPGIGKILAITIMLETGSINRFREVGNYSSYCRCVSSANFSNGKKKGKGNKKNGNRYLAWAYIEASLFARRYSPEAQRWYQRKISKSNRIVAAKALSNKLARACYYIIRDQVPYDEAKIFQ

SEQ ID NO: 100474 - protein, 344 aa, unidentified
MKHYAGLDVSVKETSICIVDEAGRICREMKVVSHPEDLLAVLCDPAWRLERVGLEAGPLSQWLFSGLAEAGVPAICIETRHAKAFLKAQVNKSDRNDARGIAQMMRVGLFQPVHVKTLASQKRRALLAARKILQEKALAIENDIRGLLRNFGRKVGIVGVVGFEQRIHDLVEGVPELADIMEPLLAARRVLREKFAKLHRKVLLLARDNEVCQRLMTIPGVGPVVSLAFISTVDVPARFRNSKAVGPSLGLTPVLNQSGESHRVGRISLCGDEAMRALLYEAAQVMLTRVQKWSWLKAWAMNIAKRRGQKKAIVALARRLAVIMHRMWSDGTEFRWTREMAPTI

SEQ ID NO: 100475 - protein, 408 aa, unidentified
MNPLFVGIDVSSKNNVAYLMKPDGSKHSSFSVQSNLGGAKLLSERIVSALGSMQLERVVIGLEATSIYGDSLVYALREDGRLGRFQRKIHVLNPKQVRKFKEAYSDLPKNDWVDAFVIADHLRFGRINREVYMDDYRYKALQTLTRARFDVIQNLTREKQRFANYLFLKCSGMAQDKDIQNTSATTIALMEHFETVDDLANADLEELTAFITETGRGKFADPDATAKAVRAAAKGSYRLPKTVNDTVNQAMAVSIASMRALKGQVKVLDKAIEQQFEIIPNTLTSIPGIGKVYSAGIIAEIGDIHRFDSQASVAKYAGLVWNRSQSGDFEAEHSRMIKSGNRYLRYYLLEAANSVRRCDSEFRRYYDLKFKEVNKYQHKRALALTARKLVRLVFRLLKDNRLYIPPEG

SEQ ID NO: 100476 - protein, 343 aa, unidentified
MQVSTIGLDLAKNVFQAHGVSAEGKVVLKKQLRRGQVLSTFAKLPPCLVGMEACAGAHYWARELRKLGHDVRLMPARDVKAYVKRDKTDAADAAAICEAVSRPSMRFVALKTPEQQGRLMQHRVRDLLLRQRTQTINALRAHMAELGLVAATGRQGLCLLLAIVADAKDERLPQDARASLKLLASQITALQAQIDTLDKRLHAQHRQCPASRRLETIPGIGVIGATALAATITDPKAFKSGRDLAAFIGLVPRNNSSGGKQRLGPISKQGDRYLRRILVVGAHSILKQARARPDKHPWLARLMARKPGKLAAVALANKTARIAWAVLARGETYRAPTAPAAAG

SEQ ID NO: 100477 - protein, 344 aa, unidentified
MNKYAGLDVSLEETAIAVVDERGRVVREAQVASEPEAIDAWFRAKGVEIVRLGLEAGPLSSWLYAGLKARGWPAVCIETRRLRAVTRAMPVKSDRKDAEAIAQVMRTGWYRVVDVKSLASQRLRVLLRHRQILQAKRLDLENELRGTLKAFGLKLGKLGQRPFAARVLELVAGEPWLERLARPMLAARAALRESFAELHALLLKIVRDDAVCRRFMTVPGIGAVNALAFKTGVDDPTRFRHSADVGPHFGLTPRRYQSGETEHIGPISKAGDAMVRSLLFEAAMALLHRVRAPSSLKRWARTLAKRVGTRKAAVAVARRLAVVMHRMWLDGTDFNPELGRATAH

SEQ ID NO: 100478 - protein, 336 aa, unidentified
MRYIGVDLHTTQITVCYLKAEDEFEMKKYQLCEIDKFVSGLQATDEIAVEATCGTRWFYEQVAAAVSRVVLVNPRQFEVVKNSVKKTDKRDAINLARFLRADLLPEVRAKKEEAEKVQSLVNTRTKLVRLKTSLINKIHALYVANGRKLKKTSLASEKGLEKVLLEQWTAIEQIELEIIIEQIRSLKASIKKLDKVIEQEAGKLKGYENVVSIIGIGSLSAGILLAVIGEVKDFASADKLASYFGIVPRVANSNETVNHGKITKRGSKTGRTTLVQCALSAIRKNEYLKKYYEQVKARRGHGKAKIALARKYLGIIYNTLTNNWVFADFNNFELAE

SEQ ID NO: 100479 - protein, 325 aa, unidentified
MAVIGIDVSKQKLDCAWLRDVATGKVKTRVFGNRRQDFPRLLEWLEHQTGEPLDQLHVLMEATGIYHETLAYWLHAAGIQVYVLNPAQVRDFSRSLGVRGKTDKKDSVVLARYGATQRPEAWKPEPEEVRKLKALAARLDALDKDIQRERNRREKAEFAMATDILRSIDDILLALTRERDRLQQEVDDHLDQHPGLKQDRALLQTIPGVGPAVSLRLLAMLRSRAFESARQAAAFAGLVPVSWESGSSVRGRPRLSKAGNPKLRQSLYMAAVVGLRRNPDVSALYQRLTANGKSKMAALGAAMRKLVHIAYGVLKTQTEYRPQTA

SEQ ID NO: 100480 - protein, 326 aa, unidentified
MAHIGIDVSKNKLDCLWLRDVQARKVKTKVFSNQHAHYPSLLDWMIRHTQESPETLHVYLEATGIYHEPLAYWLHQAGVTVYVLNPARVRDFAKSTGIKNKTDKADSQALALFGATQPQQRWEPEAEEVRELKRLVARRDAVQQDIQRERNRLEKAQFSRDSQATTSIHHVLVALEQEDKRLQQAIEEHLDQHDHLKRDRRLLASIPGIGPLLSTRLVAALRSRAFKSARQAAAFVGLVPMHHASGHSVEKKPRLTKMGSAKLRQQLYMGAVVALRHNPDIEAQYARLLRAGKPTMTALGAAMRKLVHIAFGVLKSQTEYRPQPTQ

SEQ ID NO: 100481 - protein, 322 aa, unidentified
MSAPILGIDIAKQRMEVALLIDGKLKNKSFKNTLEGFEALALWLRKLGIPHVQVCLEATGNYGEELAIYLHEAGHSVSMVNPARIKGFAQSELIRTKTDKVDAGIIARFCLAMKPEAWIPPPAEIRVLRALVRRADSLIDMLTQEKNRLATAHESAIPLIKDHMSYLKKEIKAVRDQIADLIDQNPNLRQKKELLASIPGIGKATIAVILAELDNLEKFSHVRELVAFIGLAPKETLSGSSIRGKPRLCKVGHARFRKALYMPALVSIQCNPVMIAFYNRLKEKNKNGKVIVCAIMRKLVHIIFGILKSGKKFDPNYKPIFA

SEQ ID NO: 100482 - protein, 373 aa, unidentified
MPKYSTAFGMDVHLRSTTVCALDADTGEAVTRRFPGNPWGEIAGWMDGFPGPSLAAYESGYLGFAPQRELAGLGVECVVAAVSKIPRSAADSASKNDRNDAARMAKAILAHDISPAWVPSPEVEGIRDLAGAYDGATARLATARQRLLAFLARRGFVYGGTTPAGNPRKYWTYDFLRWLDKVRPEDDGGVRALAALRNEVEAAAEARADLLSEYRAAADASPIAAEVAALQSIKGCAFALAAAFSAEVGDFTRFRSGRQVTAYFGLAPSQRSSGDSVRLGGISGAGNALVRKLAVEGSWCYAAARHQPKLMPRDTGVPLEIRMHGRKGSERLLRRREEMLARGMPAAKANAATAAELVRWLWALGMMCREGGE

SEQ ID NO: 100483 - protein, 390 aa, unidentified
MFYFIGIDIAKFKHTACVLDQNGASCVEPFDFSNDSIGYNILWEVIKPYVGKEHRVGMEDTGHYADNLRMFLLDKGCTVCMINPLTSTHLRKAEGLAKNDRLDSTVIAGILMNPRLFRSVTKENFNYLTLRQYTRLHHKRTEELSRYKVQLQKDIDHVFPEYNSIFPTAYSKTYIAVLKEFQSAATIAHTDIRRLRSVMNPKSRGKMISLSAEDLKAAAQKSVGRPDVAIEMEIVHLISFIELIESSLAEVDKKIEEFSKTLNSPILAISGISDFSAMSIISELGDISRFRNEKCVIKFAGVNPTVYESGTYSMTHTRLEKKGSKYLRRTLYQIIDSVIRCNTVFKAFYDKKISQGKSYRCAQGHCVRKLLRVLYKILSTNCRFDPALLR

SEQ ID NO: 100484 - protein, 351 aa, unidentified
MSEYIAFDSHKRYTWVDRQDHSTGQTRCHRLEHAPGAVQKYLSGCEPGTAVAVEATGNWYWIIDEIEQAGLQPRLVHPRKAKLMMGLTNKTDKLDAQGLNRLQRNGTLPTVWIPPGPLRDLRELARTRLVLVAQRTRLKNRLSATLAKWGTPASEYSDPYGKRGRAELEKHLQRLPEQTRWVSGQLLAQLDFVGSQVQQLEQRLKELVEVTESMQWLLTLPGVGVILAATIALEIGEIQRFPSAMHLASYSGTTPRVHASGGKVRYGPLRVDVNRYLKWAFVEAANSVAVNQARCPERHVSQLYRRLRQHKGHAKAIGAVARHLAEAAFHVLRGKQMYQDPSLGRGRTSQG

SEQ ID NO: 100485 - protein, 376 aa, unidentified
MKKHGEAFIGIDAAKSRIAVAVAEVGRDGEIRYLGEIDNTPDGVARLVRKLADRYETLHFCYEAGPTGYGLYRQVLAMGHDCTVAAPSLIPRRPGDRVKTNRRDAQSLARLLRAGELTAVWVPDETHEAVRDLVRTRAMAIEDYRRKRQHVSSFLLRHGRAYPGRTSWNGRHLRWLDAQNFAHPAQRLAWQEMLNAVRGAAERICRLDAALIEVVPSWTMAPVVSAFQAMRGVQFVTAVTMVAEAGDLRRFDHPRQLMAFLGLVPSERSTGDTRRQGGITKTGNISARKALVEAAWTYRHSAGLGEKHQRRQRGLPQQVRDVAWKAQTRLCARYRRLIAKGKRNTVVVTAIAREVAAFLWAIAHQVDPMPPRTVSR

SEQ ID NO: 100486 - protein, 427 aa, unidentified
MNNTHPPLLFAATIGLDWADKKHDLWIQPAAGGKPEHLVIAQTPEALHEWVAQVRARFANERIAIAIETSRGAVISALGAYDFIVLFPINPGMLCSYREAFCVSGAKDDRTDAMLLEEYLRFHRAKLRPLEPDTELTRKLAGLVENRRDLVDERTRLVNQLHSLLKTYYPLIQVLFDDLTSPLVAQFLLKWPDLASVKKAEPAALRKFFYAHNSRSDKVMEQRLLDIGKARPLTTDPALIEPAALKAQALAGMLKALHQSIDKLEKRIEQTTDAHPDAALFRSFPSAGPTMAPRLLVAFGTNRDRFESAQAAQQFYGIAPVKKQSGNTKVIHMRHRCPKFARQTFHENASHVVRKDGWAKTCCEQQRARKKGHHAAVRSVAFKLMRIYFSCWKHKQSYDPNLYEKSLQKHGSPLAKLLKNKTTATGE

SEQ ID NO: 100487 - protein, 331 aa, unidentified
MAKIGKIIGTDISKSTFSVAYRKGTSVETRTWDYTQEQMAAFAETLDEGSTVVMEATGVYHTRIAYYLYHKGIGVSVVNPLAAKNFARTLMRRTKTDKADSKLLMEYGETMDLEPWTPRETWCVEVQQTYALLESKGKELTAARNRMEALSHSVIASGVCMKMVKADIKRLERDIACLEKEIERLVKDKAGDDMKRIEEIPGIGRRTACVLIALTGSMKSFDNHRQVASYLGLCPRVYESGTSIRGKAKICKMGLESVRRMLYLCALSAMKYNKACRELYERLLEKGKAKKLALVAVANKLIKQAFAILRSGMNYDENHISEKKVQKMLAN

SEQ ID NO: 100488 - protein, 413 aa, unidentified
MEQLIDCCAGLDVHRDTVVATVRAPGSERRERRIATRTFATTTGGLSKLGDWLAAEHVELVGMESTGVYWKPVFFALEERIDQVWLLNAEHLRNVPGRKTDVADSVWIAELVEHGLVRPSFVPPADIRALRDLTRYRRTLVEERTRAIQRLEKVMQDAGIKLTSVASTLLGKSGRAIIDALLSGVSDPVVLAELARGRLRSKIPALREALMGEFHVEHHGLLVTRMLAHVDFLDESVAAIDAKIESAITVHEPVIERLVTIPGVARKTAIGLIAEIGVDMSVFPTPADLASWAGICPGNNASGGKRRSGRTRHGSVWLRTVLTEAAQAAARTKGTYLAAHHATVRGRRGRFKAIGATRHDLLIAYWHVVHDEVNYRELGADWAVRRYSPEHQLNRLIRQIERLGKTVTVTDAA

SEQ ID NO: 100489 - protein, 410 aa, unidentified
MEVLYERVAGLDIGKATLTVCVRTPGPRGGRRAETRTFSTMTRSLQVMRDWLLERGVTIAAMESTSTYWKGAFYCLEEVMEVWLVNAAHIKAISRRKTDVKDAEWIAQLLECGLLRPSFVPPPDIRRLRMLTRYRVQLMADRTREITRLELMLEDASVKLSAVVGSLTSVSARAMLAALISGEDDPRVLAELAKGKMRRKIPALTEALTGHFDDAHAQLARSMLARISSVEAALAELNAVLAVAFAPWVHQLELLQTIPGVGEKVTQVIIAETGADMTRFPTPEHLASWAGVSPGTRESAGKRYPVRPPHGNKWLTAMLVEAAGSVGRMKGANYLAAQHARLTSRRGMARAQLAVGHSILVSAYWMLAPDQPYHDLGPEWLARRNDEAHARRLVAQLERLGHTVVLNPVA

SEQ ID NO: 100490 - protein, 421 aa, unidentified
MAEELGALLFVGDDWAEDHHDVEVQDEAGRKLAARRLPEGIAGITGLHELIGAHLVEGGDGRDVVVGIETDRGPWVTALVAAGYQVHAINPKQVARFKERYPASGARSDAADAHALADMVRAERHQLRQVAGDSQDAAAVKVVARAHQTLIWERTRHVLRLRQALREYFPAALEAYSGAGLAAADTLELLVLAPDPDTAARLTVTRITAALTRSRRRDAAGKAAAIRDALRTAQLGQPPAVTAAYAATVLAAARVIITMNEQIRELEGRVSAHFGVHPDAEIYLSQPGIGKVTGARVPGEFGDDPGRYASAKARKNYAGSSPVTRASGRSRAVLARYVRNQRLADALHAQAFAALTGSPGSRAYYDLQRARGSGHNTALRQLSNRQVGILHGCLKTRTLYDEATAWPQYATQFPASEPLAA

SEQ ID NO: 100491 - protein, 355 aa, unidentified
MNDEKYIGLDVHQATIVVAVLDSTGKLVMESILETKAATILDFFAGLRGTLSVTFEEGTWAAWLYDLLKQHVAKLVVCNPRKNALLKDGNKSDRIDAHKLAELLYLNKLSSVYHGETGVRMLRELARSYLTIVKDLTRVMCRLKAVYRSWAIPCAGRDVYYTRHRAEWLDKIKEAGVRRRAERLYQQLDMLQYLRQQARRELLAESRKHAITVKLRQIPSLGPIRSALAVALIQTPHRFRTKRQLWAYSGLALETRTSGEYCYVKGGLRRSKKQISIRGLNKDHNHHLKGLFKGAATRASVLPGPFQDFYQRSLAKGIKPTMARLTLARKIAAITLTLWKKGENFDADKLKSQAA

SEQ ID NO: 100492 - protein, 340 aa, unidentified
MFVNFVGIDVSKSKFDLALIKDQDKDHVIQGVFDNTRNGIKSMSKFLEKEHHVQLSETIFCMEFTGVYCYPLTDFFVKKECHVWIEMPVNIIRSLGLQRGKNDRVDAHRIALYVYKNRDDVKLWKPQREAILKLRDLLALRERLIVAQKSLQMPINEKISMGDKKGAEMLRKGCQKSMSSLENEIGQIDKNLDDIIKDDPQLKELFQLATSVPGIGKLTALFMICFTNEFSMYTNPKQLACYCGVAPFEHSSGSSIRGRTRVSHMANKVLKRMLHMGAMSVVSKDPELSEYYQRKVAQGKNKMLVINAVRNKIIHRLCAVIKRGYGYQSEIIFKERLVLS

SEQ ID NO: 100493 - protein, 345 aa, unidentified
MDVAYDGRQVVGMDLHRRRSVLVRMAMDGRRLETVRIENSPAGLRAVLARAGEHPLVVLEATYGWYWAADVLAGAGAEVHLAHPLGVRAFSYRRVKNDERDAADLADLLRMGRLPEAWIAPAEVRALREIVRYRHKLVRQRTSCKDQVHAVLAGAGIAVTHSDIFGRGGGIWLDQLVLPQPYAAKVASLRALIGVLDGQIGWLGQQAAGQLAGDRGHAALRELPGIGPVLAAVIIAEIGDITRFRRPGQLCSWAGLTPRHHESDLKVIRGHCSKQGSRLLRWALTEAIQHQPATARPRQAREAIIARRGPEARNIAKTAAARVLLTQVFYALRDGHVRRAWRPAA

SEQ ID NO: 100494 - protein, 351 aa, unidentified
MSYKLDSGLAVIGIDIGKNSFHVVGHDKRGAIMLRQKWSRGQIEARLANLPPCLIGMEACVGAHHLSRKLQMLGHDARLMPAKYVRPYSKGQKNDFRDAEAITEAVQRPTMKFVATKTAEQLDLQALHRVRERLVSQRTGIINQIRAFLLERGVAVRQGLRFLRAELPRILAAPCDALSPRMLRVIEDLAGDWRRLDERIEILSSEIEALARQDKNCERLMTVPGIGPIVSSAMVAAIGTGDAFSKGRDFGAWLGLVPKQTSTGDRTILGSISKRGNRYLRTLFVQAAWVVLVRIGPKHWHRYGLKSWIEAAKKRLHHNVLAIALANKLARIAWSVLACGRAFEASKIQAS

SEQ ID NO: 100495 - protein, 381 aa, unidentified
MESLSANYRNPHAILQSYDRPVVCAFEATGNYHRPIAWRLVEAGFETRLVSSLALARTREALHNSWDKNDPKDAQVILHMLRIHSTQVYHDPLRAGINDVQELSKTHEAIANAKTEIQHRILTHYLPLYFPEIERFRGNSRSDWFFAFLDAFPTPSSITTLTKEKFVEAAWDVVGRKVSKSQILMDIYETARTSIGLPLPLDAPAIRMFRMVVAEARSLIRQRNEIEAQADDLLRNSRDYQILRQIPGIGPINALTIIAEAGDLRRFHHHRQFLKFCGLDLSTQQSGQYRGQTRLSKFGNARLRRTLWIAGQVAIRQRENGFRHKFERYIARDRDNPDLRRKAMTAITAKMARVVHAVVKSGSDYRPFVEGRVPGGRTSVS

SEQ ID NO: 100496 - protein, 340 aa, unidentified
MSAKTKFFIGIDVSKLWFDASLMAVVDHLKQTMETERFDNNEKGIKAFEKWLKRFKVTFDEQSLLVMENTGIYHRMLWAFCGNRNLPLYIGNAAHIKWSFGIARGKNDVIDSKRLCGYAQKHAEELKVTPGLNPVLMQLKDLMTVRTKLLSHKNSIKVHIQELKNVNDKTVQKELEQVYHAPLKAYEKSLKEVAAKLAAIIDENSALKGNYKLLLTVPGIGKLTAIYMICCTGNFTGGITGKQLACYAGVVPFEQTSGSSIRGKNKVHKMANKDLKKLLHMGALSAIQAYPEFRNYYERKKEEGKHNLSVLNAIKNKMVLRAVAVVNNKKPYVDNTKIAA

SEQ ID NO: 100497 - protein, 407 aa, unidentified
MLFVGDDWAEDHHDVHLMDETGQLLARRRLPEGLAGVGAFHELVADHADEPSGVVIGIETDRGLWVQALVAADYQVYAINPLAVARYRDRHNVAGAKSDTGDAKVLADLVRTDRHNHRPIAGDSPDAGAIKVLARGHQNLIWSRNRQTNALRSELREYYPAALVAFEDLAHNDCLAVLAKAPTPAMGARLSVGQISAALKRGGRQRNLDRRAHEIRDALRGEQLSAPEPIVDAFAATTIAAVGIIAELNRQITKLERSLADRFEQHPDADIYRSLPGLGVILGARALGEFGDDPDRYANPKSRKNYAGTSPLTVASGKKRAVLARHIRNRRLYNTIDQWAFSAITTSPGCRTFYDQRRAAHDLHHQALRALGNRLVGILHGCLQHHELYNENTAWAHRQTAVTKEAA

SEQ ID NO: 100498 - protein, 344 aa, unidentified
MENYAGIDVSLELSSVCVVDAQGKILKEAKVASEPDALVDFFETLGFAVKRIGLEAGPLSQWLHAGLRKAGFETILLETRHVKAALSAMTGKTDRKDARGIAQLIRMGWFQPVHAKSVGAQEIRALLIARKQLLGRLIDVELSIRGILRGFGLKVGPVTRRNFEARIRELVAGQATLERIASAMLSARSALKAEYGRIHKAVLVIVRDDAVCRRLMTVPGVGPLVAITYKSAIDDPHRIAKSKAAGALFGLTPKKYQSGEKDVTGGITLAGDETVRTVLYEAANVLLSRITRFSKLKRWGMDVAKRRGSKRAKVALARKLAVILHRIWVDGTTYRWAETGPIAA

SEQ ID NO: 100499 - protein, 361 aa, unidentified
MQYYIGLDVSQRQTAICIIDSDGERVKEGKALTIPSDIYGWIIKQVAASDIIKVVHEAGAMSFWLQTELTKLGLPIVCMEAFQAAALLKTQRNKNDKNDARGLAQIAHMGGKFIRPVIVRSQDNQEARMLLTMRQHLVERKVALENNITGSLKPFGLVTPRGKACAKKFRENVLATVVRAEERGVRVRETIMPSLDHYEDLRKQLDILTKRVSALANASPVCRRLMTVPGVGPIVALSFATAVDDPKRFRHLCDVGAYFGLTPRQEQSGEMDKMGSASRRGNTMTRTHLVQAATVLLCHSKKWCSLKAWGMKLAKRHGLYAARVAVARKLAIVLCSLWLNEQDFCWTTAADCQELAEVKPA

SEQ ID NO: 100500 - protein, 356 aa, unidentified
MRVYGLKHQKEKRSMDHFAGLDVSVKETCVCIVDDSGKIVREAKVASEPEALLSVLKNPAHRFKRIGLEAGPLSQWLFSALAEAELPVVCVETRHMQAVLKAQINKTDRNDARGIAQMMRVGLYRPVHVKTLRSQKLRMLLTHRKLLQSKAIAIDNDLRGTLRNFGLKVGMVGKVKFEARIKELVENLPDLAVLIEPLLVVRRALREQFVVLHRRLLALVRDDEVCRRLMTTPGVGPVVALTYRATVDVPARFRKSKAVGAVFGLTCSKYQSGEIDRSGRISRCGDEMMRVMLYEAAQSMLYSKKWSWLKAWAMQIARRRGMKKAIVALARRLAVIMHRIWVDGTEFRWTRQTAVA

SEQ ID NO: 100501 - protein, 387 aa, unidentified
MEVLYQSCAGIDVHQANIVVCILHGPLTSTRPKREMATFDTTTKGLRACHDFLSQFHVEAVGMESTGVYWRPVWHALCDDFELILAQPAHMKAIPGQKTDKKDAHWIAKLTRIGLLPRSFVPDETIQELRELTRQRKHYVESRNRETNRIHKILQSGGIKLTTYIEDIMGLSGRNLLQLLVDGTPITPRIVHQSVYTSLKKKVPQLLEALDDYFSDHHRFMLKQSLEIYDFYQKQIELLEERMNVYLSQYEKHVEILDSIPGIDVITASVIISEVGVDMSQFPTFGHLASWAGLCPGNNESAGKKRSTKIRHGNSYLKKCLCQAAFAARNQKGSTLADRFYQIQSRRGSQKATIALAHQLLKIAYILLKEQMTYPEFLAQKRLLGTS

SEQ ID NO: 100502 - protein, 402 aa, unidentified
MNAVGIDVSKGKSMVAIMRPFGEIVSTPFEIKHTSSDINSLVKLIKSIEGESRIVMEHTGRYYEVLAHQLSEANLFVSAINPKLIKDFDNDSLRKVKTDKADSVKIARYALDKWQNLKQYSVMDELRNQLKTMNRQFGFYMKHKTAMKNNLIGILDQTYPGVNTYFDSPARSDGSQKWVDFASTYWHVDCVRKMSINAFIDHYENWCKRKKYNFSKSKAEEIYGKAKELVPVLPKDDITKLIIKQAVDQLNSASITVESLRTLMNETASKLPEYPVVMAMKGVGTSLDPQLMAEIGDVSRFTHKGAITAFAGVDPGVNESGSYEQKSVPTSKRGSSDLRKTLFQVMDVLIKTHPQDDPVYQFLDKKRAQKKPYYVYMTAGANKFLRIYYGRVKEYLASLPES

SEQ ID NO: 100503 - protein, 380 aa, unidentified
MKSNSDTTPQLYIGLDVHKEKSSVAIADPGATGEIRHHGEVATTQVALDRLIRRIAKSKNIPLSRISVCYEAGGCGMWIARMLHKMKVPCTVVAPSLIPTKAGDHVKTDKKDAIKLARLLRAGELVSVFVPDETDEAIRDLCRARVDAIDDRRRAKTRLLGLLRRLGFNYTGKTTWNDAHKRYLRHLSLPFAAHRVILEELIGQIDQLDERIARYESHMESLYADWRRKPIVDAVMGLKGFQMIAAMMIVSEVGDFVRFSHPKQLMSYLGLTPGEYSSGGKSKRSGITKCGNSHARWIMVECSTHYGKEPRIGAHLSTRQAGLARWIIEKSWKAQNRLYLRTSNLRKRLMHHNKIKVTIARELCGVIWEIGYKIQSNPAK

SEQ ID NO: 100504 - protein, 473 aa, unidentified
MPRKRRKTQRLKVVNPDCAGIDIGKDRHFVAVDPERSSEPVRSFDGFTRDLEAMAAWLSSCGVKKVAMESTSVYWIPVYEVLERGGFEVMLVPPRMTKQIAGRKSDVLDCQWIWQLLSYGLLRGAFRPSDAICPLRSYVRQAKRLIEDRSRCVQHMQKALTEMNVRLDSVLTDIVGQTGQKILRAIIDGERDPQRLASFRHRRVKASADTIAASLEGTWREEHLFALEQAMQRYDFLEQQLEHCEARITTRIDSLTPPDDSTGGGAVVETPDVAVSSTTSSRTSRATKSVASNEKAMSQALHEMMGVDLTAIPTIGVNTALVIASEIGPDFSAFPTVQHFCSWLGVAPGTRISGGKSLPGRTHKVVNPVAQALRMAAMTARSSKTFIGAKHRARLARKDKPVAITATARELACLIYLMVTRGEEYVEQGMEVYEQRRLNRTFAHLDRRAKQLGYQLVQIVQDDKEQRLATSAA

SEQ ID NO: 100505 - protein, 373 aa, unidentified
MPDVSSAAPVDVRLWVALDVHKLSIVAATLPPAGGEPEVHRIETTERAIRRFVDRLGGPEGLAACYEAGPGGFDLLRLLSGIGVACDVVAPSLVPVRAGDRVKTDRRDAKKLVRLFRAGELTFVAAPTPQTEGLRDLMRCRDDLRCARTAARHRVAKQLLRHGRIYRDGKKAWTKTHRAWVARQRLDDPLAHAALAQMLIHLDGLDRQLDALEHDLERIAAHEPWHERVAELTAFRGISTRTALGLIAEIGDFKRFAHPRELASYLGITPSEYSSGDQQHRGHITKAGNRHARRLLIEAAWHYRHHPRRPDRGPHRPIAPGKPKPVLHHRWTHLTTHGKRSTVTNVAIARELTAFIWAAMTNQPQRAEVTPAA

SEQ ID NO: 100506 - protein, 596 aa, unidentified
MLPQPAPAPQPPRRVGVGIDTSRYGHYAAFLRDDLQPAAPELQFAESAAGYALLRQRLECIAQRHPPAHFVVRLDAAGQYAENLPHFLHRLATPPADPLAPAARLALTISCGDPQRNQNYRAAVFGPQKSDPVAARAAARFALTERPGRDRPLSLPLRTLRQVAGRLQAVVRQRTRLINQFHHLLALTFPELALQTRDLAAGWVLELVHRYPTAVCLAGASLADLLDVPYLPDAQAGPLLEHARASVASLGGAATEELVRDHVRQLRDAGARQKRLEKLLVSAYQTLPRDNHRATIPGIGDVTAAVLTAFVLDIDRFATPGQLVAYFGVLPIEASSGVDREGQARGPRRYVMSRRGNDLVRRYLWMAARSAVRYNPAVRALYARVVAKHPGRKAIAIGHAMRKLLHLAFAIWKSGRPFDPGHYPWQAPGHVETRGQDKGTEEEAGGKGPAEGDQAAGHRPDTQPARQVVTAACADSVAGAVPFGEATAIDFAHRKRQLPIARALDQLGLSDRLRGRGPQRRCACPLHRGDARGRSFSVNLEENVFPCFDRQCGRKGDVIDLWAAAHGYALREAALDLVRTFGLEPTPRSGTEKRNG

SEQ ID NO: 100507 - protein, 336 aa, unidentified
MAGPADGEPRSEVRSFETTVGALRQLREWIEQEGCTHAIMESTGSYWKPVFNILEGAVKVALANPHEVKARKGHKTDHRDAWWLAHWLRHGMVTPSFLPPRPQRELRDLTRRRKKLLSAASSEKNRMAKVLEDANVKLGSVLSDLFGVSGQRMLEALLEGQSEPAQMAAFAQGTAKKKIPALIAALEQHPMGEHPRKRIRFSVEHLRFLEDQIAELDPEILDRIQQAGYEREWDLLQTVPGVQEPTAAALLAEMGPDTSPFESEKKLSSWAGVAPGNNQSAGKNKSAHTQPGNKWLKSALTETAWGVARKKDCHLRDKFWRIAAKSKPKAVGGDCP

SEQ ID NO: 100508 - protein, 372 aa, unidentified
MMIIGCDYHPSWQQVAWVETETGECGERKLVHATGEAKVFYQQLGSPALIGMEATGNSQWFIELVEDLGHAIWIGDAAQIRASYVRKQKTDKRDAAHILRLVVENRFPRLWTPDREQRDLRQLVLHRHKLVEIRSRVKNELQHLAMNKGMQKKATLWSQAGQQMLRELPLKPWAGCRREDLLGLLGMLNQQVGTLDQAVQKAAEEHAQARLLMTQPGVGPNTALAYVLTLGDVTRFQRGKQVASYLGLIPREESSGGRQKLGAISKQGNRLLRSLLVEAAQIAVRFDPGFRKQYLHRCHQKPKGVAKVAAARRLAVRLYWMLRTQVAYPEIVRIESSPRVPRVGASQTDGLIGRSRIPQAAGCSHRRIMVEV

SEQ ID NO: 100509 - protein, 413 aa, unidentified
MDAIVERCAGLDVHLDTVVACVLYGKLDIKPKKEVKTFSTTTKGLLELLDFINQKECTHVAMESTGIYWKPVWNILESGAFELIVANAKKIKNVPGRKTDVKDAEWIASLLRCGLIEKSFVPPERIRDLRDLTRLRKELLGEVNRNKNRIHKVLQDANIKISSVLSDVFGETGKSILNQIIGNQCITEEFIYSLYEGRGKSKLKSTPMEMYEALNGKIRGHHVILLGMHNSNIVFLEKQINELEKEIDILLQKERDSLELLETIPGISKISASSIIAEIGTSMDVFKTEKHISSWAGLCPKNNESAGKKKRSGTKSGNNWLRSMLCECAWSATKKKDSRFKNKYWSMVPRMGRKKALIAIANMMLRLIYHLLKTKSTYKELEIQYFIDKDKRREDRIIKELKSKGYLVEKDSL

SEQ ID NO: 100510 - protein, 325 aa, unidentified
MNEVTKFFGIDVSMGTFDVSTADQKHFQFSNDVEGYSRLLNLLDDQSHCVMEATGAYHQKLATWLYSHAIKVSVINPTVIKRFAQMRLRLAKTDKADADMIRQYAEAEKPEVWSPPQEYVMQACEINGLVMLLIRQRTALKNRLHSVLHKEGSFSNILKSLHRQIKHLDQEINQLEKSMEDLIKKHEGEMLTSLCSIPGIGKKTAMFLIVLTDAFRSFENSKQLCAYLGLAPTIKTSGKSVRGQSRISKTGNGVIRSLLFMCSFTACQRNKACRELYTRMVNKGKSKKVALIAVANKLLKQSLAIAKSGIIYDEQYQSMKPASVH

SEQ ID NO: 100511 - protein, 456 aa, unidentified
MPRKRAMRGPASSELSPIHPDAAGLDVGATVHVVAVPADRDVQPVRTFRTFSGDLHRLAEWLKEVGITTVAMESTGVYWIPVFEILEARGFEVLLVNARDVKHVPGRKSDVTDAQWLQQLHAYGLLRGSFRPREGLVQLRAYLRHRERLVEYAASHIQHMQKALMQMNVQLHHVVTDITGVTGMRIIRAIVAGVQEPTTLAAFRDARCAASPETVRAALTGHYRPEHVFTLRQALELYDVHQAKIAECDTEIETGLRTLNAERPTPDAPLPAVRHAKGRNEPQFDARPALYTLLGADLTQIYGFGPYTVLRLVAECGDDMSKWPTANHFTSWLSLAPGNKVSGGRLLSSKTRRSANRAAALLRIAAVNIGRTQTALGAFYLRLAARIGKAKAVTATARKLAILFSNALRFGMTYADPGASYYEERYRRRVLDNLRRRAHQLGFTLVADAASHGGVS

SEQ ID NO: 100512 - protein, 371 aa, unidentified
MDQSSKILYVGLDVHKESIAVAYAPEVRGAEVVSLGPIGTRQSDIDKLIRRLESKGAALVFVYEAGPCGYGLYRYLTGKGVACHVVAPSLLPRKPGDRVKTDRRDAMTLARSMRSGDLSAIYVPGIEDEALRDLSRGRDDAMQDLKRSKRRLKSFLLRQDIRYEGRATWNAAHLRWLAEVVCPTPPQQIVFQEYLRAVSEQHERRQRLEHELHEAVKGWRLYPVVEAIQALRGVELTGAIILMTELGDITRFDNPRQLMSYLGLTPSEYSSGERRRQGGITKAGNSHARRALVEGAWAYRYPAKVSRHLQLRLEKLPTEVQAISWKAQVRLCKRYRQLTARGKHVNQVVVAIAREMAAFAWAIARLVPLAS

SEQ ID NO: 100513 - protein, 428 aa, unidentified
MSYRIAGIDVHKRMLAVVVSDVEVDGEYQFERRQFGATPNCLRLLAEWLLGQEVEEVVMESTAQYWKPVWGALERHWKPTRQKREGACPTSGTLHLAQAQSNRGPQGRKKDFPDAERLVKRLVARELTLSFVPDAEQRLWRTVTRRKYQLTRNRVQLQNRVECLLEESHIKLSSFVSDLLGASARRMLKALAEGETNPATLAALADRNLRATPEQLCDALGPCTELNSVYRRLMKMMLEELQLIEEQIHQLDLEMADLLQPYQGQVQRLAEVPGLGVSSAQQIIAEVGPTAATFPSEKQLSSWVGACPGDNESAGVSYSHRSPKGNRNMRRVLNQSANAAVKSKGSIFQIVYRRTVPRLGHKQTIGAVAHRQCRLIWKILHQGIRYEERGLAVNTKSRQRHTARMIHELRSLGYQVERVSSKTAPNTP

SEQ ID NO: 100514 - protein, 340 aa, unidentified
MNHYVGIDVSLEASSLCVVDANGKIVREGKVASEPDALIAWLRELKLELTRIGLEAGPLSQWLYAAMRQAGLAVELLETRHVHTALETMPVKSDRNDARGIAQLMRLGWFRPVHCKSMVAQETRALLTARKLLQTKLHDLELSLRGILRGFGLKVGPTTPARFEERIRELVAGHPSLEVIAHALLAARVALRREFDHFEKQVRDAARCDTRARLLMSIPGVGAIVSLTFTAAIDDSARFKSSKQVGAYFGLTPTKYQSGETDIDGHISKIGDASVRAALYEGAHIILTKPLKGCTVLKSWAMKIARRSGMKKAKVALARKLAVIMHRMLADGTSFRNAAA

SEQ ID NO: 100515 - protein, 343 aa, unidentified
MQAVTTIGLDIAKSVFQVHGIDAAGQVVIRRQLKRRYVLAFFQKLPPCLIGIEACASSHHWSRELQALGHTVRLMPPAYVKPYVKRQKNDATDAEAICEAVTRANMRFVVTKTPEQQSGLVLHRARHLFIRQQTAVINAIRAHLAEFGIIAPVGRHGVEELLNVVADPNDKRVPEIARACLLAFGAQLRRLKEQILEFDRMIRAWHRSSETSRRLDDCPGVGPVLATALVATVADPKSFRSGRNFSAWIGLVPKQHSSGGKNRLGSISKQGDCYLRGLFVAGALAVIRYAKIHGTKHRPWLTALLARRPTKVAAIALANKIARMAWAMMAKGERYKEPVALAA

SEQ ID NO: 100516 - protein, 392 aa, unidentified
MNTTKVLENQEFVNVGVDLAKNVFQVAYKEPRTNTLINQQMNRTQFVKFLKDSKIKFKVVMEACSTCHYWGRECRKYGHLPMIIPAEITNSINIGSKDDKNDARAIWQASFLPDIKTINVRSEENQAEGYLLKTRDFLLKVDTETNNNLKSLLTEYGCVCNTTGYEKTKAVAQAFLDKAFQDNQPWASTLKESVDALNKVREAIQESEKKLHENIVETAKNNELAQRLMTIPHVGPITSLAFVNVMAEPTLFKNGRQFADYCGETPYHTGSGGKIIVLGVNRKGNSVLKRSLYEAASGLYNRVKTGIESKTCHYYQSDWILNLVRSKPRKVAICAIANKMCRIAWAVAATENGRYDRTKTSLVSVLMKSPEQIEQQKAAKAQAKAQAAAKAA

SEQ ID NO: 100517 - protein, 368 aa, unidentified
MNKNSIVFIGLDLGDKFSYLAILDQGGTLIEETRLPSTRDSFRRWFSRLAPCRIAMEVGAQSRWASHLLQELGHDVLVANARKLRAIYHNPRKGNRVDAETLARLARLDPELLSPIHHRSPEVQAHLAVIRSRDALVRSRTLLINHVRGLTKSSGDRLPSCSADCFASKVAQAIPERFLPALLPILDTIASLSQQIRAYDRQIATRCQEEFPETRQLQSIAGVGPLTSLAFVLTLETPGRFARSREVGPALGLVPKRDQSGDRDPQLRITKTGDSYLRRLLVGSAQYILGPFGPDCDLRRWGLKLAERGGKNAKRRAVVAVARKLAILLHPLWKTGEVYDPLYQANRKEEFAGEERVTQVATVPAGVR

SEQ ID NO: 100518 - protein, 345 aa, unidentified
MELHTIGIDLGKTIFHLVGLNQHGEVVVRKKFSRKQLLHFTANLQVKLIGMEACGGSHFLGRALREQGHEVRLMPAQYVKPYVKTNKSDYIDAEAIAEAVERPKMRFVPIKSDDQLDLQSLHRVRERWVMRRTAVINQIRGLLLERGITLRQGRRHIDAALPGILEDASAKLSGAVRSLLAQLRLELDHLQMRIDEADAVIQKIAGENEACRRLVAIPGIGPVTATAIIAAIGNGAAFKKGRGFSAWLGIVPGEYTTGGKQKLLGISKRGNSYLRRLLVQGARAVLQQSAKQSSGLSAWLAQLTTRAHSNVAAVALANKLARMAWAVLAKNEPYRPPTLAAAATT

SEQ ID NO: 100519 - protein, 345 aa, unidentified
MTHHPTTVAVDLSMTVFELGIADRHWQIVERRRLTRRQFARFLADQPASHVVMEACGTAHHWGRVAHSHGHRVTLLPVRYVKPYLRGNKTDRTDVDALLDAVRTGHIPPVTVKTAAQQEIVALHRIREQWMATRTARINALRGFFREHGIPLPAGPRAALAAVPAFAEQLPSQLALAVTSVYDDVRALETRIIGVERQLAAIAKEHDTVQRLLEIPGVGLLTATALVGSVGRITTFRRARQFASWLGLTPREHSSGPRRRLGSITKRGDVYLRCLLTHGARAVLLTAQRQAAARKPLTGLQPWAVQLAARKGHNKTTIAVANKLARTIWAVWARETTYTTTPAAA

SEQ ID NO: 100520 - protein, 324 aa, unidentified
MTLPALGIDIAKLKFDVCLMNTQGKLKHKIFSNTAAGFAQLAAWLSKQQVERTHVCMEATGAYGEALAYALHAAGHRVSVINPAAIRAFAGSRLSRTKTDKVDAELIARFCLAQQPLAWTPPAPAVRELQALVRRLEALIEIRVAEENRLEAGSVVAAVRASVEAHVAYLSAEIKRTEEVIRNHIDNHPNLKQQSALLDSIPGVGKTTAALLLAEIVDVTQYRSARQVAAYAGLVPRQRRSGSSVRGRTRLSKIGNPRLRKALYFPAITALRCSEFFQSWAKGLRERGKSKMSVIGAVMRKLIHIAYGVLKSGRSFDPELAKSA

SEQ ID NO: 100521 - protein, 429 aa, unidentified
MICAAVERCAGIDVGKEFLAVCVMTGPLQGEARKQTRRFGTIIAELERLRDWLKQEEVTHVVMESTGSYWKPVFNVLEDTVKVYVANPQEVKVRKGHKTDDKDGWWLAHLLRHAMIHPSFIPPRAIRELRDLTRRRKKLLGAGTGEKNRVQKVLEDANVKLGNVLSDVFGVSGQLMLDALLKGDAKPAEMAQFAQRRAKRKIPEIIAALEGHRMSDHHRKMMGYSLEHMRFIEDQIGKLDEDIVAKIQEAGLEREWQLIQSAPGLQETSAANVLAEIGPDMSQFPSAKHISSWGGVCPGNNRSAGKNKSSHTTGGNPWLRAALTECAWAAAAKKGCFLKEKFWRITTKSGGKKAPAIVAVAHTLLGLVYEALRTGEPYQETKVADLNPGQRDRMIRHHVKRLGKLGVQVRSNPLKRQTKVVKTKNAKRT

SEQ ID NO: 100522 - protein, 338 aa, unidentified
MKTYFGVDYHKKFSHGTIMTESGKILKQGRFSNQPESVASFLDGYGDGECFSVLEATRNWTVMHDILEDLTSDVTLAHPLKVRAIAEAKIKTDKISSTTLADLLRCDLVPAAYVCSPRARVIKNLLRHRMFLVRLQTMVKNRIHVLLDRHPETSQQRSASGLFTKTGISELRQLELPRYDHHILNSELDLLEQLQEQIKQADRWLTEVGKKDKRVKHLMSIPGIGRAFALLIVSEIDDVGRFRTDKKLHAYAGLVPSTYSSGGHTFHGRITKTGNKYLRWALVEAVWPAIQKDVSLNQYYRRIAHRKGANPAKIATARRLLTIVYKLLKENRRYHYGA

SEQ ID NO: 100523 - protein, 487 aa, unidentified
MAKARQSTFERLRSGQMNRQQRRDLARRLAGNDPGLTVVHSNAGGIDVGNESHFVAVPPDRDPNPVQEFGCWTADLKRMAAWLKACRIDTVAMQATGVYSIPLYDILTAQGIQVVLVNAQHTKNVPGRKSDVQECQWLMKLHTDGLLRDSFRLEEKMEGVRTIWRLRDRHVKDASRAVQHMQKALTKMNIQLANVISDITGVSGQAIISAILKGERDPWKLADLKHEMVRASRDEVARSLEGNWRADLLFELQQAVESYYFAHQQMRDCDRKLESFLASLPKRTLQRPSQSGVTPPATTPQEKKARKRPKTRRNEPTIDLKGELKRICGVDLTSIDGIDVITAQTILSEVGTDLSGFPTENHFASWLGLTPSKDSSGGKVIGTGKRKVQNRVAMAFRMAATTLLNSKTYLGSRYRHLRKRLPSHAAAIKAMARYLAVLVYRLLTRGEAWVDRGAANYEQRRSEWEVASLNSKARAKGFKLVPITPAS

SEQ ID NO: 100524 - protein, 355 aa, unidentified
MNSVRYVGLDVHRDTISAAVLSESGRMVQQSILATRAAAILDFIGGMRGTLHVTFEEGTHSAWLYDLLARRVARLVVCNPRKNALLKSGNKSDAIDARKLAELLRADLLSPVYHGEKSAQEVQHLARSYTMLTEDTTRVMGRLKAVFRGQAIACAGKKLYGRKHRETYLAELGTGALRRRAECLYAELEALQLLRRQAKRDMIAECRRYPESKLLCSIPFLGPVRAAVLIGRVQTPHRFRTKRQFWAYCGLALEMRDSGEYRMVDGQVERRKRPAQIRGLNWNHNHELKNLFKAAATSASASEGVFREFYLGLLKKNMQPEMARLTLARKIAAIALKIWKKGEAFNAEHLKLQAA

SEQ ID NO: 100525 - protein, 403 aa, unidentified
MTMRRRAWVGIDVGKTSHHACAIDETGKVVWNQKVSNEQRAIEQLVTRACKGAEQVRWAIDLTSPMALMLITVLLCAEQSVVYVPGRTVNTMTHAFRGEGKTDAKDARVIAETARLRNDLSNVVLPDELVVELTQLTGYRADLMADWVRGINRLRALLGSIFPGLEAAFDYSTRTPLILVSGLCTPAEIRAAGIDGMTAFLVDNHAWPTGIVKSAATAAALANEQPLALPGEAGTAALVKRLARRLLELDREIKDIDKTITERFREHPYARIIESLPGFGPGLGAEFLVVTRGDLASFATAGRLASYAGLVPVPKDSGRITGNLRRPKRYNRRLRRVFYLAALSSLRADGPSRRFYDRKRAERLIHTQALLALARRLIDVLWALLRDDREFTPEKPTAATAAA

SEQ ID NO: 100526 - protein, 585 aa, unidentified
MYSVYFIKRSERSDTILRISAIRFLTQAPAAEAASLIEKEILALCYKSASPIKLLSSSGSSQGPYSSGAILPLYKHDSGRPLITDEAYALSHTRINQEPPRAAAATIPRRRQITMARKQKSDKSKKHQRPIQSLETIQPHAAGIDLGSREHWVAGPPQEDKAPNVERFGTTTPELLRLADWLTQQRIKSVAMESTGVYWIPLFEILDSKGFEVLLANARQVTHVPGRKTDMLDCQWLQLLHACGLLRGSFRPSDDICQLRALMRERNTMVEQRSDWVRRMQKSLDQMNVCVHHAVSDITGVTGMRIIRAIVDGERDPHALARMRDRRCRKSEEQIAAELTGNWRAEHLFTLRQELKMYDQLCTVVDDYDSEILAYLQTLQPADDNDTVAPPPASKAKERNIAKQGQEPLRQALYRFSGFDLTTIDGIGVDTASVILSELGLDFSKFPDEGHFVSYLRLAPNMSISAGKKVPSKSKASTCTRVATALRLSALTLRNSKTALGAYYRRMAWRKGASVAVFATARKLAQIVYRLVRYGQAYVDAGAKAYEARFNQRRLKFYTKALNDMGYNVEPIAAVEASTLEASIV

SEQ ID NO: 100527 - protein, 348 aa, unidentified
MARLARIGIDTSKSVFQLHGVDEKEQAVLRKQVRRRQFVAFFAKLEPTLVGLEACGASHHWARELQKLGHQVVLIPPQYVKPYVGRNKNDKTDAEAVCEAMSRPKLQERLVPIKSVEQSAAQMLLGVRESLVKRRTQLTNTIRGHAAEFGLVAAKGLDKIEPLLARIAADDGLPALTKEMFALLGREHAELGPRIAQIDKKMLAFHRSNEMTRRLMEVPAIGPIGACLLVTKIVDPHAFRSGRRCAAWIGLTPKDHSTAGKQKLGGITRAGDERLRAVLVSGAMACIRHAQNRRSNSSPWLVELLKRKPPKIAAVALANKTARIAWKLMTSDERYDPNRGAAHQSVAA

SEQ ID NO: 100528 - protein, 374 aa, unidentified
MADIIEAFVAFDTSKLRNAVAIAEAGRTGEVRFLGEIENTGAAVAKLVRKLAGKYGRLTFCYEAGPTGYGLYRQIKSLGHECIVVAPSLILKKPGERVKTNRRDAVSLVKQLRGGDLTAVWVPDPRHEAMRDLTRAREVAVEDLRCKRQQVSAFLLRQGLHYPGERTWTKAHRNWLMSQKLEYAEHRIAFEEMLLAMRQAQERIERLEQAIRVAVPDWSLAEVVTALMAMRGIDFISATAFLAEIGDLSRFPTPRELMGYLGLVPSEASTGDTIKRGPITKAGNRRARRILVECSWSYQHPPRVGKEKQERVAAAPQAVREIAWKAQCRLSARYRALTRKGKLKTVAVTAVARELSAFIWAINRQIINPRAAAR

SEQ ID NO: 100529 - protein, 359 aa, unidentified
MTQNAREVIGGVDTHGHTHHAAVIDQLGRHLADQQFPATSAGYRELWAWMSSLGEVLAVGVEGTGAYGAELARTLTHAGVLVLDVDRPDRKTRRMKGKSDPIDAYAAATAVASGRATGSPKSRTGTVEAIRVLRIARRSAVKARTQAINQIRGILVSAPSALREQVAGLQRGELIRTLAGMRPGQELALPLNATKAALRRLARRHQNLDEEIGELDAQIAPLVRQASPALLEMFGAGPETAGQLLVSAGDNPDRLRSEAAFAHLAGVAPIPASSGRTHRHRLNRGGDRAANNALHTIVLVRMRHDPRTRAYVERRTTEGLSKKDIMRCLKRFVAREAYHALTSTTAPAQQTPGTLTPAA

SEQ ID NO: 100530 - protein, 349 aa, unidentified
MIRNKPRGATVYGIDLGKNIFHVVGTDSAGNVVQRVKFRRDTLRAFFERAERALVGMEACPGSQWLARKLQAMGHTVRIIPAQFVKPYVKSHKNDTIDAAAIAEAVTRPTMRFVQVKQPEQVDLQSLHRIRDQMVGSRTRLICQMRAFCLEYGVAIRQGAGLFKSDLPRVIADECNDLTPTMRRLLNELFEDLMRLEKRIAQVTREIEALAARDEKARRLMTIPGIGPLGATALLAAAGNGQQFKKARDMAAWLGLVPQQYSTGGKTQMFGISKRGNRYLRRLLIHGARSCVMHLDRSRDRLGAWLRQLHSRMHVNKVTVALAAKIARIAWVVLNRPGAIYERRDPALA

SEQ ID NO: 100531 - protein, 349 aa, unidentified
MVTIGVDPHKRTHSAVAVNEVGGELDGRTAAAVRDGVGTLLLWARALPDPERVWVIEDCRHVSGPLERFLLDFGETVVRLAPHLMAGARQSVRERGKSDPIDALAVARAALREGIESLPAARLAGPELEIRQLVVHRQRLVDARTRLINELRWELHDLWPGWEIPTRALKGTAWQQRVARRLQRAQPTVRVRVARDEIRRIRDLTRTITELHQELAVLVAQVAPQLLAERGLGVILAAKLIGEIAGIDRFASDAQLARMAGCAPIPVSSGRTDRHRLDRGGNRQLNHAIHLLAICKITHDPRTAVYIAKQRARGKTNKEAIRSLKRYLIRRVYNLLKDPKDTPSTLICG

SEQ ID NO: 100532 - protein, 345 aa, unidentified
MQPMYYIGLDVHKRKISYCVKDGSGRIHAEGSISATRLDLDHWMRSLPQPWSAAMEATMFTGWIYDHLQPHAAVLKVAHPLMLRAIAVAKKKNDRIDASKICDCLRCDFLPESHMASTAIRERRRTLRYRNLLVRQMVQMKIKISALLMEAGVSYNKQRLHKAGYFRELLATNPDIDEGLCSLLRLCRETVVRLGKNESALVRSLERDSLLVERIERLMTIPAVGPITALTWALEVGDVQRFSSIKKAISYCGLCGAEKSSGNTVQRTPLSKQRNKHLQTTLIEAAKMAPRNSPELAMLYDKEKQKGNANRATLAVARKLVAYLMAVDRGQRNFQRAERSSSIAA

SEQ ID NO: 100533 - protein, 314 aa, unidentified
MALQRIFVGIDVSKEWLDLWLAPLKRFERIGNDAAGWAGVIELLKPLGVEAGTVVAFEATGGYEQSLRRALLEAGFEVRRLNPLRVRLYAKSLGRNAKNDRIDARVIARYAEAADTAPDILDPAREALAELASHRRRLVDERVAVGNQTSTLRSVLLQAHNRKRLALIERQIEETDRLILEAIGQIPSLAAKVELLKTLKGVKTITAIALVALLPELGRITRRAIAALVGLAPFDHDSGKFKGTRSIAGGRAAVRTALYMAARAAARSKSPLGDFYKRLIAAGKKPKVATVALMRKMLVTLNAMIRDGQVWKHA

SEQ ID NO: 100534 - protein, 355 aa, unidentified
MDSKKYIGMDVHKESISIAVMNGAGKIVMECVIETKANMILQFIDGLRGDLQVTFEEGTSAAWLQDLLKPHVTKLLVCDPRKNASMRDGNQSDKIDARRLAELLRLNHLNPVYHGEHGLRSLKELVRSYLTITKDVGRVMSRVKAIYRSWAIPCTGKQVYAPRHRAEWLGKITEPGVRRRAEFYYQQLDVLRSVRQQVRRELLAEAKKHKAWKLLCQIPSIGPIRAAVLLGILQTPHRFRTKRQLWTYSGFGIETQSSADHRSVDGQLQRTKKQSSIRGLNRNCNHDLKNLFKGAAIVASSKPGPFQEFYTALLTKGLRPEMARLTLARKIATIVLIVWKRGACFDAQHLKPQTA

SEQ ID NO: 100535 - protein, 449 aa, unidentified
MQEPEEVLDGEHEQVLARVAAIDVAKASGMVCTRVPHPDVAGRRVTKVWSVSATTNAILELADHLVELDVERVTVESTSDYWRPFLYLLEASGLAVWLVNATEVKNVPGRPKTEKLDAVWLAKLTERGMLRPSFVPPTETRVLRDYTRLRADLTAERSRHAQRLEKLLEDALIKLSTVATDLMGVSGRAMIEALIAGERDPQVLAELARGRLRVKHAALVQALTGRFDAHHAELARMLLEAYDTADGQIRRLNERIEALIAAMPAAQGVDTDGTTGPHAGIGPDAPVLPALVRLDEIPGVGAKTAQVILAEIGLDMTRFPTAAHLVSWARLSPRTVQSGPRHRAGKTGKGNPYLKGVLGEAAAAAAKTDTFLGARYRRLAKRRGKLKALVAVARSILTIVWHLLADPTARYHDLGVDYHTRRIDTERRTRSHIRQLEALGYKVTLAAAA

SEQ ID NO: 100536 - protein, 347 aa, unidentified
MYPFYLGIDLHLKRTFMVLMNANGEVIDKQRITNQEITTYLQEKVPQETYAVLEATRNWPFMYDLLQDHVQQVDLVHAKAVRTIANAAVKTDQIDASTPAHLARLNYIPKAYAATKEMRDLRQLLRHREWMVNQRTRAKNRVHAVLAGYNLVSPVTDLFGVAGREYLAEVLEKELCPAAQQVVTDHLALIDHLEERIHALFKSISLDEQKEHIVKLLMSMPGVGRLTALTILAEIGDISRFNSPKSLCSWAGLTPKVHSSDAMVQHGHITKEGSRYLRTAMVQAATVACRVSPKWYMVHEHLALHCGRRSARVAVARRLLTVIYYMWKREQPYQENYGQNQSEALGA

SEQ ID NO: 100537 - protein, 429 aa, unidentified
MNYTQNEKIEQVTDTTLVIGVDVGSQLHYARAFDNRGMELTKRVLSFQNSIEGFNTFNQWVEKIKTENEKTDVMIGCEPTGHYWFALAKYVSDHKMTLVMVNPFSVKKIKELDDNSPKKTDIKDPKTIAKLVVDGRYSIPYMPEGIYAEIRDLVYSRDRIVKQHNISANRIQRWLAVHFPEYLGIYSRFDAASGLAVLEKAPLSKDVIALGIEGIRKIWHDKRMRGRGVTEDRAKILVEAAHNSIGLDGGAGTRSELYMLLEEHQLWNSQLEAVEKALEETTLKVDHVEKLLAIKGVGIITIAGFIAEVGDIRRFKSPKQIQKYAGLELVENSSGKHKGRSRISKRGRRKLRRILYQVMIPVLASNKEFREIYDYYVIRVKNPLKRRQAMVAVSCKLIRVFYAVLTKGVDYDRFKMMSDIHRDSELIAA

SEQ ID NO: 100538 - protein, 433 aa, unidentified
MKPPPEQPAPDWLVHRAFGGLDWASQKHNVIVVDPHGKVLEDFEIEHSALGWKKFRERLAPYGAIPFAIETSQGTAVEQLLKAGMKVYPINAKSAKSYRERKAPSGVKDDRLDAWSFADACRIDGQGWRALRPEDPLVKELRLLCRDEVSLIEQRTSFICQLRHALAEYYPTALEAFEDWGSVSAWMFVQRFPTPQLLQVAGKRAWEKFLHARHLWRTESGPRRIELFSHATELSGTVPMANAKSQLALSLISMLFALEKQLGIYRKRIDELFGRHPDHDLFGSLPGTGPKLAPRLLSEIGDDRERFEDGPQALQCLAGSAPVTRRTGKCKVRANPDRWPCHQRWACDKHLRHAMHLFSEHTLRQCVWAQIYYQHHRQKGSSHADALRRLTQRWLKIIYRMWMDRTPYDPMLHHHNQLKHGSWVFELQTTNCK

SEQ ID NO: 100539 - protein, 362 aa, unidentified
MSSTFQSLVGVDLHQCTVTLAAVDPLGARIAQLKISTKSVGKIEEWLSALPQPVHLAVEACPFVEWFIERFRPSVERIDIADATELANRRGKRRKTDRNDAQDIAQRLARGECPLGFIAPPELMQFRKLGRHWRCLSRLLSRTKHSMKSMLHAANIRGPKFDGASAQRWLLANRDLLGAVQQDAFADFIDILNLVERQRERLRRQMIFASRSGACAPTIARLMTVPGIAEVWATTIAAEIGPFERFPNADALEFWAGLTADMKESAGRTQSGHITKAGSATLRWALGKAAVTLCQCDARQEATRQRLIARLGKPKANVAMARRLLRILYAMMRDGQAYQGGPRRDRTAAANRARLGRKKQVA

SEQ ID NO: 100540 - protein, 341 aa, unidentified
MAIATIGIDLGKNSCSLAGLDATGAVVLRRRLSRGKLVEFLSHLPPCVVGMEACCGAHHLGRVFVAQGHEVRLMAPEYVQPYVKAQKNDDRDAEAIAEAATRPTMRFVSLKAEAQLDQQTLHRARSRLVNSRTRLMNQLRAILLERGITVAKGRRALALALGDLLDGEGSGLSPRMCELLGAMREEWAELDVRIAALDREFVETARASAPARRLATISGIGALNATALTAAVGEAEDFASARDLAAWLGLVPRQTTTGGKARLGGITKRGNVYLRTLLIHGARAALPGLSRGETRLGAWLRGLLERAHPNVVVVALAAKLARIAWAVLRSGADYDRRAARA

SEQ ID NO: 100541 - protein, 349 aa, unidentified
MSQNLNSAVAVIGIDIGKNSFHVVGLDNRGAIVLRQKWSRGQIEARLANLPPCLIGMEACVGAHHLSRKLKALGHDARLMPAKYVRPYSKGQKNDFRDAEAIAEAVQRPTMKFVATKTAEQLDLQALHRVRERLVSQRTGIINQIRAFLLERGVAVRQGLRFLRAELPRTLATPPEVLSPRMVRVISDLAEDWRRLDERIDQLSSEIGVLARQDSGCERLMSVPGIGPIISSAMVAAIGTGDAFAKGRDFAAWLGLVPKQMSTGDRTILGKISKRGNRYLRVLFVQAAWVVLIKPMSWERYGLKHWIGAAKKRLHRNVLAIALANKLARIAWGVLAGSRTFEASKLQAA

SEQ ID NO: 100542 - protein, 386 aa, unidentified
MQASTAATLTIGDYGTIFIAIELSQKTWLVTLHSPDKDRISRHRLEGGNHAELLALIGRIRERAARALGGVPAVVSCYEAGYDGFWLHRLLLAAGIANYVFDPASIAVDQRARRVKTDRIDGEKMLRTLMAYLRGEPQVVRIVRVPSAEQEDARRASRERDRLIKEQTAHTNRIKALLRLLGMAVGNPRRRKWLSWLATQRDWQGQAVPPQMLSEIRHEHTRLMLVRERLDALAKTPAQADPSPATAQMAERSELLLRLKCLGPAFATTLTHEVFYKDFRNRREVGSYFGLTPCPWQSGGIERDQGISKAGNPRARGAAIELAWLWLRHQPDSVLAQEYRRRTRDASKRIKRVAIVALARKLMVALWRYLTTGLVPNGAVLKTVKA

SEQ ID NO: 100543 - protein, 419 aa, unidentified
MNTLNTTSFTAFIGIDWADAKHDICIQSADGDEREFDVIPHQVERIDEWAHAMRQRFGSPIAVAVELSKGPIVYALQKHDCFVIFPVNPTTLAKYREAFQPSRAKDDPTDAELAVDLILRHHERFKPLHPQSVEIRMLASLVEQRRNLVDDKIRITNRLRVALKQYYPQMLEWFDHIDTPLFCDFLVRWPTLLQVKRARKSTLRKFFHEHNMRFEHVLERRLNAIKTATPLTLDEAVVVPHRLQALVYIEQLHVMLDAIKRFDIEIESVAEQHDDYVLFSALPGAGPSLAPRLLVAFGEQRERFKSAADLQKYSGVAPVTERSGKKHWVHWRWQCPTFLRQTFVEWAAQTINKSYWAGEFYRQQRAKGCTYQAAVRALAFKWIRILFRCWQTRTPYDEVVYLKAMERRGSPLLTEAKVA

SEQ ID NO: 100544 - protein, 424 aa, unidentified
MKVTYQTCCGVDVHKSFLVATIVKTTGGIEPSYQKKRFSTFNNSILEFKQWLLDNDCHDVCMESTGKYWIPVFNLLEDEINVVIANPKWVKTVKGNKDDTKDSKWIGDLFRLGLVKGSYIPCKKVRILREYTRYRYKLVSCRSSEKNRYQNALTVCNVALDSVVSDIFGKSSTSIIDYLLEQSGTSINHEEIASKLLRSLKSKEDAVIESVEGYQMTDAQKYRMRLVRAHMDYITAEINDVDKMIENMISSNPDFENAVQFLCTIPGVKRDSAITIISEIGTDMSQFSSSKRLCCWAGLTPGSNESAGKKKSVRITRAGVYLKPALVQCAHAAVKSDKSPYYKKKYESLVKRRGKKRAIIAIARMILTAIYQMLSTGEQWNPSDLYKIDMPVALVEKQKAKAIKQAKKLLQREGLLPPDEPLAS

SEQ ID NO: 100545 - protein, 321 aa, unidentified
MQTVLGIDCAKAKFDAALLIGGKYKTKVFSNDARGFGELQTWLNQHGSGTVHACMEATGSYHEALALFLVEAGYAVSVMNPAQIKGFAQSVLTRTKTDRVDAKLIARFCLVSTPALWTPPAPEVRALQALVSRLEALNQMRTQEGNRLATAQPLIRGSIEKVIGLLDAEIAALKEQIRDHVDGHPGLREQARLLETIPGVGEATIAQLLAVVGDLARFKSARQLAAFLGLTPRQHQSGSSVRGKTRMAKMGHAQLRKALFFPAIVATRFNPLVRAFAQRLAQAGKPKMAIVGAAMRKLVHIIFGVLKSGRPFDPTMHAACV

SEQ ID NO: 100546 - protein, 349 aa, unidentified
MNFYTKQHQFYAGIDLHARLLAVCILDQAGQIVCQTKIPADKRILLDTLAPYRADVVVCVECLFAWYWVGDLCTEHGIPFVLGHALYMRAIHGGKTKDDDIDAEKIGRLLRGGNIPTAYVYPKGMRETRDLLRRRNHLVRKRAQLIAHIQITNAQYNLPAFAKKLIYAHNRAEMQVAPRFPEGPVRKSIEVNLALVDALDVQLADLELYLERTVKVEDPQSYHLLKTIPGVGKILALILLYEIHTIRRFPTAGDFLSYARLVRCVHKSAGKPLGHGGKKIGNAHLKWAFSEAVCLLVRCCPAVKAWQQRREKKHGKKKTLGILAARLGRAVYHVLRRGQAFDLQKFLGQ

SEQ ID NO: 100547 - protein, 465 aa, unidentified
MNPSTPSTVEFGAFVALDWADQKHAWALQALGQGRRQHGELENTPEAIEVWASELEQRFGGRPIAVALEQPRGAVVAVLSKYAHLVLFPVHPSTLAHYRQSFYPSGAKSDPSDADLLLELLVQHRDRLRPLQPDTMETRLLQFLVEERRRLVDDRTRYSNRLTACLKQVFPQVLKWFDDVTCPLVGDLLQRWPSLTELQRARPDTLRRFFQEHNCRDQERIEERLRLLPQAVPVTHDPALLQAGSLAIRSFVQVIAQVREGIARYERKIEEVAQSHPDFLLMDSFPGAGPALAPRLIAALGTDRSRFQSAQELQCYTGIAPVLAASGQQRWVHCRWACPKFVRQTIHEWAQHSIGGCDWARDYYQAQRSRGKSHHTAIRALAFKWLRVLFRCWQDRAPYQEQIYLAALGRRASRSPVAGAPPPPAHQPTPEPGAPPAPAQPPTASAVQLRWESCAGFFKLGVVSS

SEQ ID NO: 100548 - protein, 419 aa, unidentified
MISFSRRQRAQTAAAVVGVDAGKFAHTLVVRPRGQPDSRPFSFPTTRAGFEAAAAFLQAQAPGAELSQMLAGIEFAGNYGFTLAHFLDQLGVPVVSVLPAHTKRWKDVAHNQPLKTDAKDAGTITDLLGQGHFVSFPFLAPAYADLRYLVAARERLSLLRRAAMTQLRSLLQVVFPEFEAIFPLLTKKTPVALLRAFPTPEDLLRASKAKVLRVLHTASRGHLGAETYQQLVTAARATLGLPGAQCRLRQEIALVLERLALFEQQMKTLEAAMVDALQGVPETPYLLSIPKIAPVTAAVFLGSIGDPRAYESGRQILRVAGLSLVERSSGILRGTQRISKRGRPLLRQAAYMFAVRSITKGGLFRAEYEALCQRNGGQKMKAVVAVMRSGLRLLYSVARDRRPFTVAPPAPRRQAAAVA

SEQ ID NO: 100549 - protein, 433 aa, unidentified
MIKINYLSTLFVGIDVSSKSNAVYAMDFEENTYISSTFGNNQPGADELAAMIVSCMEKHNNFDTIVVVLEATSVYSVHISNFLATSEILMPYKPYVFCVNPKATANYRKSYIGMEKTDPSDAFLIADFARVGRTKKLEPWRGGQFIALKRLTRHRMHLAECIAREKTYMVSNLYLKFSELQLLDGDNRPFSNMYGATASAVLTEFLSPQEIIELPEEELLLFLARKSRNRISDISRTSELLRKAARDSYRLDKCMYEPLNISLASSFNCIHAYQKEIKLIEQAIDKTICGMNPNGLTILQSIPGIGPVWASGILSEIGDITAFHSSDALAKYVGLFWPKGDSGDFTSEDNKMSRSGNPYLRYYLGEAANSVRKYIPEYAEYYARKYAEVPKHQHKRALALTSRKLVRLVFGLLVKNQLYTGEKLGTEFNTNPN

SEQ ID NO: 100550 - protein, 347 aa, unidentified
MDYFAGLDVSLDTVNVCIVNDTGDVLLERKVEAEPTVITDLLRRFGQPFKRVGLEAGPTSAWIYSALREAGYPAICLECRHVKAGLSAMRNKTDRNDARGIAHLLRLGWFRQVHIKSEEAQQVRMALVNRQQLLNKAHDIENAVRGSLKVFGLRIGIVTRRAFEERVLELVADHPILSAITEPMLRVRQTMIEAFECLDRMCRQLARRDPVCRRLMTIPGVGVVVALTYRTGVDAPERFSRSRDVGAHFGLTPKRYSSGQTDFDGRISRCGDEMVRTALYQAAHVLFHHGSWSSLRSWAMRLAKRGNVKVAKVALARRLAVIMHRMWTDGTEFRWSGAAASTTAVAA

SEQ ID NO: 100551 - protein, 347 aa, unidentified
MDYYAGIDVSLETSSVCVVDASGKIMREAKVLSEPENLIGWFRDLGLEMTRIGLEAGPLSQWLYAAMKEEGLAVELLETRHVHDAFKAMPVKSDRNDARGIAQLMRLGWFRPVHCKSMPAQEVRALLTARKLVQSKLFDIEMSLRGNIRGFGLKIGRTTPNGFGPRVEELVAGHPTLDIIGKALLAAHQVLLRELNGFEKRVRQQARQDKRVRLIMTAPGVGPIVGLTFVAAIDDPARFKSSKQVGPHFWLTPKKYQSGETDYNGRISKIGDASVRTALYEAANVILTRPLKGATSLKSWAMKLAKRAGMSKAKVALARKLGIILHRMWVDGKQYADRAGSPKPAAA

SEQ ID NO: 100552 - protein, 300 aa, unidentified
MTGMVTYAGLDVHARSTHVAAIDVSTGELLRARFGPGVEEPVAWLASLPGQVRACYEAGPTGFGLYRAASAAGVAVEVIAPGKTPRGPSDRVKTDRKDAELLARLLLAGSLTTVVVPPVEVEAARELMRAHDACRRDLMTARHRVSKMLLRHGRVYPESSTWTVAHRRWLAAQQFDETASELVFADLIASVDGLSARKAAIAERLSRLVEDEQWWPTVARLRCFRGVDTLTAFALHLELGGDWQRFARASALSAWLGLIPSLHQSGESSHQGAITKTGSGFARRLLVESAWQYGRPHGSG

SEQ ID NO: 100553 - protein, 345 aa, unidentified
MEQVSRIGMDTSKHFFQLHGVNAAEKVVLRKKLRRKDMVAFFKALAPTVIGIEACGAAHYLARLLGSFGHEVKLIAPQLVKPYVKRGKNDGADAEALCEAMSRPTMRFVPVKTAEQQAALMMVGLRDRLIHNCTQLSNAIRGYAAEFGFSAAKGKAHLVPLLERIQADESVPVLARELFAAQAEEYARLQAQIDAVDAKLRAWHKADESSRRLVKIPGVGPIGAVLLMLKTPAPELFRSSRQFAAWIGLTPKDHSTAGKVRLGGITRAGDEALRSVLVVGATSIVQHVRRGGRGSPWIVDLLKRKPPKLAAVALANKMARIAWKLMITGESYVAKSTLATLASAA

SEQ ID NO: 100554 - protein, 347 aa, unidentified
MALHGQIVLGIDTHKHTHVGVILDGLGRVSGALQFPATEAGAQRLLAWNQENGGAMIAGVEGTGSYGYPLTRALQLAGVTVLEVNRPDRANRRRRGKNDTVDAEAAARAVLSGQANAVPKDREGAVDALRALTMTRNSAVKATTQASNQIKALLVGSPERLRQQLTVKSLLQLATRCAELDPCSGMHTALRSLGRRWLLLRAEIVELDTQIRALVRDTIPTLVARPGIGIHSAAQLLITAGGNPTRLHSDAAFAALCGASPVQASSGQRQRHRLNRGGDRAANNALWAIANNRLIHDPATRAFAAKRRAQGDSRNEILRILKRYIARETFNLIISSLRPLVALAAAC

SEQ ID NO: 100555 - protein, 427 aa, unidentified
MTEQVDDSAELVERVAALDIGKATVMACTRIPHEDGRRRLQEVREYGTTTGALLALAGQLHELGVTLVVMEATSDYWKPVFYLLEAEGFTCWLLNARHVKNVPGRPKTDKLDAVWLAKVAERGMCRPSLVHPRPIRELRDLTRYRRSLIRERTAEKQRVEKLLEDAQIKLSSVASNIFGVSGRQMLAAMLDGEGDPTVLARMAHGRMRAKIPQLREALAGNFTSHHAFLLRMMLDRIDGLTARVEEVTARIEEQAAPYARAVEQLDEIAGVGITSAQELIAEIGVDMSRFPTAGHLVSWAKFAPIDRSSAGKPKGSSTGKGNPWLAATLGEVIAAAARTDTFLGERYHRLARRRGKRRAIVAVGNSILTIIWHLLSDPEASYRDLGHGYYHQRSDNRHRERDLIRRLERLTGQTVTLQPAPGQEPAA

SEQ ID NO: 100556 - protein, 370 aa, unidentified
MRSFQPPADTRFYAGVDRHARSAFLVVLDRDGQPRLSRNLPAAPAPFLKAVAPFRDGLLVACECMHCWYWLADTCRDAAIPFVLGHAWSMKAVHGAKTKCDRHDAEAIARLLKGGNFPPAYAYPRERRGLRDLLRARLRLVRQRAELYGHVHTARRQANLPPVSSDVQYKSKRGDCTADITDPFVRRRVETHLALLAPLDTAIRQLEADIEDAAKEHYPTELAVLQSTPGVGAVLSLTILLETDTIDRFDTRQQFCSYARLCGAVQTSDHKRTGDGNRKAGNAWLKWAFSEAAVLAAQKDERIGGLLARLASKLGKAKALSALAHKLGRAFYHLLHTKEVFDVNRFVRHGATGRPASRRLTGADGASPRR

SEQ ID NO: 100557 - protein, 442 aa, unidentified
MKALAVLDPRAAFVDVGSEKMHVSIGGGPPRVFGTVTSELEALRDYLIEQQVRSVAMEATGVYWLPLYGVLESAGLDVQMVDGRQTRHLPGRKSDMQDCQWGSTLHGHGLLRAGFVPPAHIRRLQDYLRLRGEHVAAAAGHVQHMQKALERMNIKLHDAIASLTGVSGLAVVRAILAGERDPAALLGLCDVRIRRAKADRVLESLRGNWADEHLFALGQAVGSWDHYQAQIVDCDRRIAEVLARMPGGDAPSAGAEQPARRRTQPGVNAPQIDNLRDLLQRMCDGKDATTLPAHSEYTVLQLVGEVGTDLTRWPTEKHFASWTGLAPGSAQSGKRRAAVRRRRNRAGKIFCVMARALARSKYIALGSYYRRMAARRGGLVANKALAHKLAILFWRVMVKGMDYVEKGLAHYEAQVLETRQRLLRKLAKQFGQQLVPIHANPP

SEQ ID NO: 100558 - protein, 310 aa, unidentified
MKVVGIDIAKYHFDLHLLPEGQTGRYRNDAEGIQQCARFLAHVQPERIVLEATGGYELGLTRVLQAAALPVIVVNPRRVRDYARSLGLLAKTDRIDARVLAEFAQSPRVQVRELPDAHARQRLALLARKRQLVEMHVAERNRLEHATDRTVAQSLRQLLRLLEKQIAQLDRKLAQLLAADPLLQRRAAIADSVPGIAPATAAVLVTELPELGRVNRREIATLVGLAPMNRDSGQFRGKRMTGGGRVRVRNALYMPMLTVIRCNPVIRPFYQRLVAQGKAKMTALVAAMRKLLTILNTMMKNNQLWNPKNA

SEQ ID NO: 100559 - protein, 406 aa, unidentified
MLTQTVPKRFIGLDIHKKYFVATGVDSKLNQVLGPHEAPIRYLERWAKKNLTSEDAVVLEMTTNTYVVYDTLQPLVHSVTVVHPPHVALIVRAQVKTDKKAALNLAQLHAAGLLPGVWIPPVEVREWRALIAHRRKMVKLSSIAKCRLHALTHRHDFELPDGWEPFSAEMRIWWEHLKVSSLERYCLLSDLATLDFARSQIESIEKAIQEIAAKDERIPLLVQITGIGLLTAITILAAIGEISRFPSAKQLVGYAGLGARVHASGETFATGCITKAGRKELRWAMVEAAHHAVLDHPHFKVEYERLSKTIGQKKAMVAIARKLLVVVWQVLAKGATDKFANPVQVACSLFAFAYRVRVKNLPNGMSALQFTRSQMDRLGIGQNVLVVPWGTKSFKLPPSKLAVKNN

SEQ ID NO: 100560 - protein, 332 aa, unidentified
MYLGIDVHKRYAQVAVMDEAGEIVEEVRVENANLDDLAQRYAGAQAALEATSNYYHIHDTLSEHLDVTVAHPKELTQIANSDKKTDRVDAKELARMVRLNSVPESYVPTNEIREARALVRGRQTLVEDRTKYANKVHGLLSDHGITEDVKPLSVEGREFLRELSLPKPWDSLLESYLEVIETLTEEIHNLDETIEERAGALQETQLLMTIPGVSYYTALTIYAELGEISRFDGDKEVVSYVGLNPVIRESGDSRIEGNISKRGSGRVRWLLVQAAHTAVHTCNDEYLSRFYERLASRKNSQKAIVATARKMLVSIYHMLNRDEVYDPPGVSA

SEQ ID NO: 100561 - protein, 357 aa, unidentified
MATQLTAQPKLYIGMDIHKKSWSIHMRTDISDHKSMTIPADEEVLINYVETNFAEHHVSLVYEAGCCGFGSARYFLAQGWEVLVVNPADVPTMDKQYYQKTDKIDCQNLSKQLKAGHLKGIYIPDIEQDQLKSLLRQKAEVARQLRNVKSQIKSLLLYHNIVVPDNFDNPNWTKDFITWIKQLQWDFTSGKACIESKLRVLQLFHNEDLHIANELRAYCRKHFKKDYYLLKSIPGIGGYLASAILSEIGDLRRFNTEAQFASYVGIIPTMRNSGGTEHVTGVTPRCRALLRTYIIESAWVAYRLDPQMQKYYRKHIGKNPKSIIVKIARKLLNRMLSVIKNETPYKLNTSLQNNQSK

SEQ ID NO: 100562 - protein, 307 aa, unidentified
MSEKIYFGVDVCKASLVFYGPGVAEEVPNNVPGVRRLLARLPKGAHLIIEASGGYERELVSVAHQSAVSLSVVNARQVRNFARGVGRLAKSDPIDAEMLARFGAEVNPPLDVVPTAWEVALQELISARQQLVEERTVLLQQQAQHLNRIVRRLDRARHKLLQRQIAQLELAIGSILEEQSVLKQKVERLQKVKGVGFITAVSCIALCPELGSLSRRQTAALVGVAPYDDDSGARKGWRHIAGGRPKLRRALYMAAISAIRSNPILRRFYQQLRQRNKPPKVALVAVIRKLAILLNHLLQNPSFLPAS

SEQ ID NO: 100563 - protein, 450 aa, unidentified
MSRTKKSRSRRDISPTHLNAAAIDIGATMHVAAVGPDQASEPVRSFGTFTGDLHRLADWFTTCGVRTVVMESTGVYWIPVFEILDQRGFEVIVVNARDAKHVPGRKTDISDAQWLQRLHEYGLLRASFRLKGEVAVMRAYLRQRERLLDYAASHIQHMQKALTQMNLQLHHVVADITGVTGMAIIRAIVAGERDPMVLASYRDPRCHASAETIRHALVGNDREEHIFALTQALELYDVYQAKVALCDVRIEAVLKRLRQVSSTPVGTPPVRTTQKQSNDPAFDVRAALYGLLGCDVTQIHGLGPYLTLKLVGECGTNLSAWPSAKHFTSWLCLSPSNKISGGKVLSSRTRRSGSRAAALLRLAAVAVGRTQTALGAFYRRLSARVGKAKAVTATARKIAVLFYNALRHGMEYSDPGASHYEDNYRRRILTNLERRAKSLGYVLQPTPMPA

SEQ ID NO: 100564 - protein, 436 aa, unidentified
MKTPDVFIGIDVGRHHHQCSFVDGERKPIAKTLRIREDRDGFQALKLEMDNIVQKEGEVRFHIGMESTGHYHQNLMAFLQAINGLDVEVTCINPVQTKRFIQMQMLREQNDKIDARAIAEYRCVQRSAPTPQKRSDMQPLRDLSRLRCQLITQRTAILNQLHAILDHVFPEFEQVFTDIKLEPLAWALLSRYPCPQNLITAKTSQLILVQAKKGGGYLGKERALQLKKFAMQTVGSSRGEVYAFQVKILVQNVKSLQQQIEETDKAIENSIQALELPPWKTIPNVGIQTMATLLGDVGDPRLFGSAKKFSSFLGLTPRGKQSGSSVNRKGHISKCGPSHARQKHYMCVVSALATKKNPLIIEIYNRLVSKGKPKNVAIVACMNHLARIIYGVFKSNQPFNPEYQEMKSGLGRPQNGNLATMHGVLPPRPSCNIATT

SEQ ID NO: 100565 - protein, 391 aa, unidentified
MSLYFVGIDISKYKHDCCIISATDQKVISKFSIKNDKVGFEELITTFNSLSSPEDIRIGFESTAHYALNLELFLENAHHSFMEVNPVLIKEYKKSTTLRRTKTDSVDCESIARWLMTVEYKPHSKGFYHSYSLKSLTRLRDRLIRQRSFYLVKITNVLDHTFPEFKPFFNERLSKTAIYLLENYGSAEKMAHMNSASYDKLRCASRGKFSIQQFLRLKELAANTVGVNNSIFDIELNSLLTLYNSLCKEIKTLEAEITKLIEEVHPHYMSIPGIGPISAAVIYAEYGDISNFSNPGQMLAFAGIEPGINDSGTESHGGRMVKHGSSQLRYVLLNACLPLIRFDITFATYYAKKRAEGKKHRVAITHVAKKLIRVIYALERQDVDFNVKKLR

SEQ ID NO: 100566 - protein, 343 aa, unidentified
MKLSRVGVDLAKNVYQLHGVDRHGKAVWKRRLRRGQWLQALMDKAEPGCVIGMEACTGAHHWARELQSRGYEVRLIAPQFVKPYVKSNKNDANDAEAICEAMGRPHMRFVSVKSVEQQDIQATHRVREELKAHRNAKANQIRGLVAEYGLVAPQTLLALRKALPCWLEDAENGLTDHFRSLLHGLWDDLLTLEDRLKELDKEIEKIARSNEVAMRLQQLRGVGPIVATALVATVGDGAQYKKGRQMAAALGLTPRQFSSGDKYRLYGISKRGDVYLRTQMIHGARAVVSQAKHRDDPLSRWVTDIAKRRHPNVAAVALANKTARMAWAMLRDSTDYDPALAVG

SEQ ID NO: 100567 - protein, 354 aa, unidentified
MAHANRVDFTGQTIYIGMDVHRKSWTVSIFMELIEHKTFTQPPDVEVLVSYLRRHFPGARYRAVYEAGFCGFWIHDKLREQGIPCLVVNPADIPTRDKERARKGDRNDSRKLARGLRNGELEGIYVPPRETVEDRSLIRSRQAMVRKQTRCKNQIKSLLHFYGIPVPDVYGHWSRNFIHSLEALRLERESGNLAMKAHLMELIHLRQILAQLDRDILALSRTDEYRNRVQLLRSVPGISTLSAMVLLTELGDLSRFTSLDKLCGYVGLTPDTHASGEKLGVGDMTRRCNPVFRSLLIECAWVAVRKDPALALAYHNFCKRTLKTKAIVKIARKLLNRIRFVLNNRCQYVSSLAA

SEQ ID NO: 100568 - protein, 468 aa, unidentified
MITQVQTSHAGIAEQYYVGIDIGYREHVAAVISKSTFLQGAVRWKKAKAIHFASSRGGLDKLHQYLLSFSNDPKAFLILCEPTGGQYGVSLYQDLLKRKYSPMLVDNSTTRHMREKIFGSLPKTDEMDARVMARIAYLHDVVGEEFTLKVLRLPDPDQEELLALCRNNWKLNGMVTRVRNQFAQLMAVVFPELKFFFEGSVSSSTPIRLMASYPSPAEIANAVPEELYNFLWKARSYQHARRVPELQDLARNSSGSLPDSGRAWRLAWMSKFLLSNFELLSQLDKQIEQVCSNHPNYTLLMDIPYSGPNTLGTILSITGDCTRFKNYRQYVAYTGYFAGLERSQTIDHTRMSRRGNRNLKRAYFQIVAPMVWFDHGENFYKNLYKRKVAEGRAWYVAMPFACAALARHIYHCLKFQEPYQLEKAFGRVLTSHVEDLAKSKIQADLEDTFEVMDAHLSQEEELHPPLRK

SEQ ID NO: 100569 - protein, 367 aa, unidentified
MENVITYVGLDVHKKMIVVAMLVPGAAAPVRWDCPNEREKVRRTLKRIRREAVGQVQMCYEAGPCGYALQRQVAEFDSSMKCMVVAPSLIPRKPGERIKTDNRDALKLAEYLRSGLLTEVHPPTAAEEAVRDLCRAREDASEDLRRGQHRLTKLLLRQGVAFTKGKKAWTRSHRLWLNGLKFDHAEAQAVFDDYLLGIEQTEARLLGLQIRLTELSQAEPYAEPVGRLRCFRGIDTITAMTIVVELYAFGRFRSARGLMAFLGLVPGEHTSSDKVRRTGITRTGNGHVRRLLIESAWHYRHRAVPGAALKKRRLGQPAHAIAIADKAMLRLNRRYTRMVARGKSSALTVTAVARELAGFVWATLHVA

SEQ ID NO: 100570 - protein, 409 aa, unidentified
MIYCRIDWAERTHDVALVDDSGQLLATRHITDDAAGYKILLELLAEYGDIEEHPIPAAIETSRGLLVAVLRQGKRKVFAINPMAAARYRDRHSVSRKKSDPGDALVLANILRTDMHAHRVLPDDSDLARAIAVLARAQQDATWNRQQISNQLRSLLREYYPAALTAFESWKNGLCRSEAHEVLKLAPTPTRAARLTRAQLQAALKRAGRQRGIEAEAERLREIFRDDYSHQPALVEDALGKQMLALLAQLQAACTAADDLVQAVEEAFPQHPDAEIILSFPGLGVQLGARVLAEIGDDRSRFTDARGLKTYAGASPITRAFGKKTSITRRWVKNDRLNHAGYLWAFSALRASPGAMAHYRRRRDEHGDWHAAAQRNLFDRMLGQMFHCLQRRKLFDENTAFPTALTAAA

SEQ ID NO: 100571 - protein, 339 aa, unidentified
MKTYAGIDLHSSNNYVGIIDENDKRLYKKRLPNRMDDVLTALSPFKESLDGVVVESTYNWYWLVDGLMEEGYKVCLANPSAMKQYEGLKHTDDQSDAFWLAHMERLKIIPQGYIYPKEERPVRDLLRRRLLFVRHRTAHILSLQSMITRNLGYKMSNNDIKKLKEEDAIDLFDSPNLVTMAQNSISTIEFLKQVIKRIEKTVASQVKMRKEFEMLLTIPGVGLILGLTIMLEVGDISRFRSVGNYSSYCRCVGSKKTSNGKKKGENNKRNGNKYLAWAYVEAANFSARYCQSAQRFYQRKMADKNGIVATKALSNKICRASYYMMRDHVPFNESNLFRS

SEQ ID NO: 100572 - protein, 404 aa, unidentified
MEVLYERCCGLDVHKKSVTACLITPEGKEIRTFGTMTKELLKLSDWLVKSGCTHVAMESTGVYWKPVYNILEPSGMKLLVVNAQHIKAVPGRKTDVKDAEWIADLLRHGLVSGSYIPDRAQRELRELVRYRRSLMQERAREVNRIQKVLEGANIKLGDVATDILGKSGRAMLQAIVEGKVDPKLLASMAKGKLRNKRDELEQALHGLLGPHQRMLLARQLRHVEFLEEEIEGLNQEIEERMRPFEPQIKALDKIPGVGRRVAEQILAETGTDMNRFPSAAHLASWAGICPGNNESAGKRKSGRTRKGNPHLRATLVEAARGAARSKGTYLSALYHRIAARRGSKRAAVAVGHAILVAIYHMLKTGTPYQDPGPDYFDKLNKQAIVKRAVKRLETLGYKVTLDVA

SEQ ID NO: 100573 - protein, 476 aa, unidentified
MAGSKKAISNMALIPMLPHETLYVGVDVGKSRHVAGFLSRTLLQRHERFEGCPTFVFEQSREGFCSLVDRIREYVPLEQATVLLEHTGHYHKNLEQYLLEWDITVYRIHVQERPKGMTKTDKRDALSLANRLYTQLELGAQVEEKMQLVRRAVHPTQAAMQLRGFMQHRYELSHQRTQLRNKLTAICDELFPEFTHIFHDPNLEVALAFREKFPTPHDIATASLSALRETRVKYFPSEANLLRLQQLAGETIGINNKDRLRGMKLEQELLIKELRLVQGHLERLDTEITDIVRTSREGQILLSMPPIGPVQAATIIATIGHIDNFEKASELKSYFGWAPTRDQTGVTFDRTKLSHRGVRPVKQMLFLMAARATTLDGEWARIYRRLLPRMATYDERVKEYRGKKKVLGRIAGQMVSMIFALLKTDQETLSRVPSGEEPPPPMLYDPEIHRKHQEGSYRSLKPGTQPRKILQLPSKS

SEQ ID NO: 100574 - protein, 340 aa, unidentified
MPLYGGIDLHANNSVVVLLNEQDQVIYQKRLPNHLPAILEPLSLHHDAIEGLVVESTYNWYWLVDGLMEAGYRVHLANPAAMQQYSGLKYSDDHSDARWLAHLLRLAVLPEGYIYPKAERAVRDLLRKRAHLVRQHTANVLSVQNIMARNTGARFSVKRIQELTKQELQSVLTEEPQVLAVTSSLAVLDCLKHQIKTLEQTVHKRLHHTPSYEQLLTVAGIGTILAQTIALETGDIRRFPSVGNSASYCRCVDSNKISNGKRKGTGNVKNGHPYLAWAYMEAAQFAMRFQPAAQRFDQRKLAKSRNNMVLARKAVAHKLSRACYYMMRDLVPFEATKAFG

SEQ ID NO: 100575 - protein, 458 aa, unidentified
MGRKKSKNNDRCTMSVVHPNAAAIDVGATMHMAAVNADRTPEPVRSFGTFTTDLHRLVDWFAECGVDTVVMESTSVYWIPIFELLDARGFAVFLVNARDAKHVPGRKTNVSDAQWLQRLHSFGLLRASFRPKGQIAELRAYLRQRERLLEYGASHIQHMQKALTEMNVQLHHVVTDITGSTGLPIIRAILAGERDPAVLARMRDRRCHATVETIEKALAGNYRIEHLFILEQALALYDTYQQKAFACDARIEAVLKELSVRRGREGGQLPAARQNRSHQQNSLLFDVRAALFKLLGKDLTQINGLGPFLALKLIAECGDDLSTWPSAKHFTSWLCLAPSNKISGGKVLSARTRRSGSRAAALLRLAAATVGRTDTALGAFYRRLSARIGKAKAVTATARKIAVLFYNAVQHGMNYVDPGASSHETRYRARVIDNLRRRAKAFGFVLQPAGPIPGIAVS

SEQ ID NO: 100576 - protein, 324 aa, unidentified
MNLPRLGIDIAKVKFNACLLHLTGKLKHKVFPNNAAGFAQLQEWLEKQQAPLVHACLEATGTYGEALSHYLHQQGHTVSVMNPAAIKAFAASRLSRTKTDRVDAELIARFCLAHQPPPWTPPAPEVRELQALVRRLESLIEMRVAEENRLSSGLTVVAVRTSVEEMIAYLKEQITRTEKLIRQHIDKHPGLKQQHELLDSIPGIAATTAALLLAEVPDIKRYRNARQLAAFAGLVPRERQSGSSVRGRVRLSKIGNARLRKALYFPAITALRCSPFFQEWAEGLRQRGKSKMSVIGAVMRKLIHIAYGVLKSGRPFDPELAKSA

SEQ ID NO: 100577 - protein, 350 aa, unidentified
MTMIGGLDVHRQQITFDYVDSDGLVRWGQIRPATRKTLRAWLAEHCPDGDAEFALEGCTGWRYVSEELAAAGVAVHLGDAAEIAGLRGPKKRAKTDRADARLLRTLLLQGRFPESWIPPAHVAEIRTLGRLYCTLMDERRAWQQRIHAQLFHQGCPPIRALLTQPGREALAGAELSAAGRQYVDTALRRIDELSAEIEPLRAQLVNFAKRQPGCQVLQHHYGIGWLCAAIIWAEIGDARRFSSSDQLVRFAGLDVTVYSSDAKRSPGHLSRQGSPGLRWAAFEAAKCASRRSSPDYGYYRKLAAKRDGHNGKNPTLAVERKILRRCYHALRALGKAALALPAPERKEAAA

SEQ ID NO: 100578 - protein, 385 aa, unidentified
MTQTVDIAAAVDYERTLVLAIEVSNESWVLAAQVPGLPHTKAKRTINPDAESLMAAIAGYRARATASGHSVERVITVYEAGWSGFWLARWIMRHGMEAYVIQPSSVPVDRRMRRAKSDGIDAELLLRTLLAWLRGEPRVCSMVPIPDEADEDARRCVRERTELISERVGLTNRIGAVLATLGVSDYNPLLRSRHRRLTELRTGLGEPLPRNAQAKIERLLARLELVLAQIAELERERDAVVEAEASDKASKMIQQLTNLRGIGVQSATVLVREAFVRRFANGKALGSYAGLASSPYSSGGIDREQGIGKAGNRRVRTVMVELAWLWTRYQPGAAQVRWFRERVGSTGRRARKIMVVALARKLLIALWRFVIDGVVPEGAILKPAA

SEQ ID NO: 100579 - protein, 437 aa, unidentified
MRRVIGIDIHRTFGEVVIWENGLTRHEGRVEMTRTALEGFGRQLKKTDEVVIEATGNCMAVSRVLSPHVKRVVIANPLQVKAIAHAHVKTDKVDAATLASLHAAGYLPEIWTPDAATERMRRLVARRYQVVRHRTRIKNEVHAILHAHLIPKCPHADLFNKRGRDWLHRQPVPEDERAAIARHIRELDRLGEDLAVLDRDIAQDAIDDEAIQRLLTITGVNLTVAAGLMAAIGSIDRFNSPQKLVSYFGLNPRVRQSGLGPAHHGRISKAGRSHARAMLVEAAWAAAKAPGPLRAFFIRIRARRGHQIAAVAVARKLATLCWHMLTKGEDYHWARPSLVAHKRRAMELAAGQPQKKGSKRGASYAYNVKDLRQQEARIAEHAEKSYEQFVAAWQTRPPKNSGGCAIASNRQGLSRLPGDASSRHATLRHEVDRTEKK

SEQ ID NO: 100580 - protein, 353 aa, unidentified
MTLEKEDLVMVTTIGIDPHKATHTAVAIDATETVLGELTVPADQYQTNRLLDWAGQLNSNGRIWAVEAAGGLGYLLSQQLVARDEEVIDVPPVLASRVRVLSSGKSDKNDPNDALSIAIAALRQPGLARVLREDHVQVLRILAKRHLELTSLRTQAVCRLHSVLVQLRPGGLPKRVSAKRASQLLRNMRTLDYVSEQRRAYARAHLADIRRLDRDIKANKALIRRAVAVSETTVTDIYGVGPIVAAFLIGYTGNPTRFATADHYAAYNGTAPIEYSSGGKTRHRLSLRGNRKLNHAIHMAAVCQIRFDTPGRVYYDKKLAEGKTRKEALRALKRRLSDTVYRRLIADQQQANQ

SEQ ID NO: 100581 - protein, 315 aa, unidentified
MAAQMVQDVGIDVAKRWLDVAVFQTQEQARFDNDEDGWAKLIQWLKGRNVRAIGMEPSGGYERGVAKALRKAGRPARNVNPHKLRHYARALGRLAKNDRIDALLIARYTAQMPTRPVRCDPIAEQLADLVVARRQLSDDKVSLANQLEQLREPTVRRLFTQRLRRIELDIALLAKRMADLVASQPALAATDRLIQSFHGAGPVFSHTVLALAPEIGQASRRQIAALAGLAPYDFDTGTFKGRRIIWGGRHALRRVVYMAALTASRSNPVLKAFHQRLIARGKQPKVALVAVARKILTIISAMIRNNEPWMPNKAA

SEQ ID NO: 100582 - protein, 336 aa, unidentified
MTELTRIAIDTSKSVFTLHGTDADGRAVLRRNLRRQDMVPFFARRPPMEVVLEACGGSHHWGRVLAGLGHTVRLIPPQYVKPFVKRGKNDRNDAEAISEAAARPEMREVAVKSARQQANAMLLSVRELLVRQRTQLVNALRGHAAEFGHVGRLGRQGVAKLLADVAEDAELPTPARDALALLGAEIGRLDARLAEVDARLVAQHKQTPTSQMLAEVPGIGPIGALSLVLRVDFSQFKSGRHFASWLGLTPREHSTGGKTRLGGISRAGDERLRQLLVLGATAVIRQAKPGRASAWLIALLARRPRKLAAVALANKMARIVWAMMTRGEAYRQPATA

SEQ ID NO: 100583 - protein, 402 aa, unidentified
MNCVGIDVSKGKSMIAVMRPFGEVVVSPFEVRHTANELSELAGLLKSLDGETRVVMESTGNYHAPVAWLLHDAGLYVSVVNAMLVHDYGNNSLRRAKTDKKDAVKLANYGLDHWLTLPRYIPEEDTRLMLKICYRQYQQYSKVQTMLKNNLISLLDTTFPDANRLFTSPPRADGSEKWVDFVATFWHCECVCGLSKKAFTAKYQKWCRKHGYNFSQDKALDIYASACGRFGVMPKTNTAKLLVEQAISQLRATSAALAALKQEMQSLAASLPEYPVVMGMFGVGPTLGPQLLAEIGDVRRFHSKKALVAFAGIDAPPYQSGQIDVRSRSISKRGSASLRRTLFLVMSVILQCAPIDEPVYQFMDKKRSEGKPYRVYMMASANKFLRIYYASVKAYLESLEHD

SEQ ID NO: 100584 - protein, 335 aa, unidentified
MRYVGLDVHYRSSTFCVLEENGKELQCETIRGHWPKLLERLRSIAGPWTICFEATCGYGYLYRELSRLAQRVVVAHPGQLRLIFRAKRKNDRIDARKLAKLLYLDEVPAAYVPNEEVQSWRELIEHRRHMMDRQTTCKNAIRSLLRSHGKIAPKGLWTKKGLAWLRQEEMPTAAARLKRDLLLDELTDAKRRVRTVTKVLDESGERHPGVLLLRTIPGVGIRTAETVAAYMDNAERFTRSKQVGAYFGFVPCQDASAGVNRLGHITRQGPATARKYLVEAAWQGVYRSPTIRAYFERVQHGRPERRKIALVATAHYLLRCMHAMLVQNQPWHEAA

SEQ ID NO: 100585 - protein, 375 aa, unidentified
MEGAPMLDTTTFVGLDVHARSIKAVSLDVMTGEVRCATFGYDAGAVAEWVRSVDPKARCVYESGVTGFDLQKRLSGLGVDCVVGAVSKMIKPSADRRRKNDRNDAEFLARMLSVGNVVEVWVPDDECEAARDLTRALEDARDDLSRSKQRLSKFLLRHGLAFDERTPTGRRKGNWTRAHWSWIESIRFAEGADNDVLAYYVDAVRRAAEEKARLEGLVEAEARKPRWRRRVDSLRCLKGVDTATAADLVFEAGEFSRFRNARSFAAWVGLTPSEHSSGESDRRGAITKAGNKHLRKALVEAAWHYLTCSGRPKDLAKGQAPDRVARRHAAKGVRRLVERREALLARGVHGNKANVATARELACWVWAVGLMAEEA

SEQ ID NO: 100586 - protein, 316 aa, unidentified
MYLGIDVSKLTIDCCLISDGQNHEKRFSNNPKGFQLLTDWLKFHQMTSELHCCCEATGKYYEPLANYLYQHYTVTVENPRRIKGYAIAELQRSKTDKQDARLIAQYCQDRKHKLKAWIPPSQEQKQLQELSRYLDHLKQQRATEITKLHEASDYIAPHIKTTIENLSGQIRDIKKQLLQFYKSHTDYNTQRKRLKTITGIGEQGAAVLLSAYKRHPFSNQKQFTAYLGLDPRKNQSGSSVNGKSRISKIGNADIRKSLYMPAVVAYRCNVFSSFVNRLKAKGKPIKLILIAIMRKLAVIAFNLLKNGQDFEPERYK

SEQ ID NO: 100587 - protein, 414 aa, unidentified
MAVMDVVHGRCAGLDISKKDAKVCVRVAGTGRRKTTETVTTWGATTNQVLALREHLMTEQVTCVVMEATGDYWKPFFYLLEDAGFEVLLVNARHVQNVPGRKTDVADATWLAQLGAHGLVRGSFVPPEPIRVLRDLTRARTAITRERGREVQRLEKLLEDAGIKLSSVASDIMGVSGRLMLQALIEGQHDPAVVADLAKRRLRSKIPALTEALTGRFTEHHGFLARVHLDLIDQHTHAIEELTSRIEVVIEPFQAFRDLITTIPGIATLSADVIVAETGADMSRFPTAGHLASWAGTTPGHNESAGRVKSTKTRPGNPYLQGVLGAAAMSCAQHPGTFLGARYRRIASRRGPMKANVAIQHSMLIAIWHMGRNGTLYDDPGGDYFQRLHPERAKNRALHQLEAMGYQVTLDRVG

SEQ ID NO: 100588 - protein, 420 aa, unidentified
MDVLIERCAGIDIGKNEVVACVRTPGPGGRGRHKQTRTFSSFTGALEEMADWFGDEGVTDIAMEATGPYWKPVWYVLEERAFQLRLVNAHHVKILPGRKSDVLDAEWLAELLEHGLLRASFVPPPAIRELRDLTRYRKRLIQSHTAEQQRIQKTLEDAGIKLDSVASDVLGASGRAMLEALIAGERDPVVLAELARGTLRRKIPALRQALRGRFRDHHGLLIGLCLEHTDHLEAAIARLDASIDALIAEHTSEAGIPFARARDRLTTITGVGKRAAECILAEIGADMSRFPSAGHLASWAGMAPGINKTGGKPGSGKTTDGDKWLTDILTQCAWAAARTRDNYLAAQFWRLARRIGKKKAAVAVGHSILVICWHLLTNDCDYDDLGGDYFTRRANPDRQRDRLITQLHALGYRVTLDPVA

SEQ ID NO: 100589 - protein, 345 aa, unidentified
MKFKFTLGVDMSKEWFNFCLMNAEFQTLWQGQVDNNEESIFKFLTQLSQREEVTKAQAVLADIVLIMEHTGIYVQHLVKCYLSKAGRVSLVHASKVSDLLAGKQKWDEKTDAMDARRLAEYGLRYKDKLELWQAKEPTLIKLRVLQRQRRRLKDAMNLLEVPVNESVQFDSVAVSELLKTNQQATIQALKNDLKNIEKQLQQLMESDVELTQLFNLITSVPGVGAVTAREVIITTSAFKDFTPKQAKQFARYAGVTPKDKQSGKMKKRKRTSKRGNKKLKSLLTMGATSLIGTNSELGFYYLKKIEEGKRHFSVINAMRNKLILRIFAVVRNQVTYKKNMNICLD

SEQ ID NO: 100590 - protein, 342 aa, unidentified
MQITTIGLDIAKNVFQVHGIDAAEKVVVRKQLRRSQVLEFFKALPPCLVGMEACATAHYWARELTKLGHKVRLMPARDVKAYVKRNKNDAADAEAICEAVRRPTMRFVQVKSAEQQSQLMLHRTRDLLIRQRTQVINALRAHLAELGMTAAQGYAGLKELLAIIAGAADERLPAEAHASLIVLAAELQAMQTLITSIEKRIIVQHRSDEASKRLRSIPGIGIVGATAIVATITDPKAFRSGRDMAAWIGLVPRQDSTGGKQKLGPISKQGDRYLRRILVVGAHSVLKLAKQKPEKYPWLTQLLARKPFKVVAVALANKMARIVWALLAKGGRYRARALVAAA

SEQ ID NO: 100591 - protein, 333 aa, unidentified
MGDISLIGIDLGKHSFHLHAQDSSGHMVFRKKLTRSQLLAQLGNFQACTVAMESCAGAHWLARRLAATGHQPKLIPPQFVKPFVKGNKSDFADAEAICEAAVRPNMHFAAPRTEAQQALSALHRVREALVGDHTCTTNQIHAFLLEFGISLAKGEEAIKAVPVLLARHEDLPPAIVDVLLRLQAHHKYLDGQIADVDREIKRQLKADERSSRLLEIPGVGPVTASALSIELGDPHRFKNARQFAASLGLVTRAVQHRRQAEAPGHQQARRQEVALASCAGCTEPHEAHRAANRRHWALGLRHARAPTFQRGGLRAGQQARQDRMGNAGQGIAL

SEQ ID NO: 100592 - protein, 481 aa, unidentified
MKAKPPEKIQKATDPSTRGRWKEMNRKQRREMMRKIQSEDLSLEVVHPQAAGIDIGNEFHYVAVPPTRDSQPVRRFGCTTVELKAMAEWLKQCGIRTVAMQSTGVYWIAVYDILEAAGFDVYLVNARDTKNLPGRKSDVQESQWLMKLHTYGLLRNSFRPSQEIRTMRTYWRQRNDLIRTAVSHIQRIQKTLTQMNIQLANVLSDVSGVTGQAILKAILAGERDPHKLAALRDPRVKASEEQIARYLEGNWQEDLLFVLKQEQEGYEFCQQQMAECDRQLEQYLQQREDRSQGASLPKEVRKGRLVRRKGNKPAFALRAELFRITGTDLTQVDGIDVVTATTILSEAGWDMSPWKDEDHFVSWLRLCPDNRISGNKVLGKGRLPTNNRASIALKMAASTLRVSNTYLGAQFRRFRTKLGAPVAIKAMAAKLARLVYRMLRYGMKYVDQGAKFYEAQHRQRQITQLKWKAAKLGFHVVEAAA

SEQ ID NO: 100593 - protein, 460 aa, unidentified
MNRKKTKSKVDRTMPMVHPNAAAIDVGATMHMAAVRADRALEPVRSFGTFTADLDQLVDWFTECGVETVVMESTSVYWIPIFELLDARGFAVLLVNARDAKHVPGRKTDVSDAQWLQRLHSFGLLRASFRPKGHIAELRAYVRQRERLLEYAASHIQHMQKALTEMNLQLHHVVADITGATGLCIIRAILAGERDPEALACLRHYSCHSSAETIAKALTGSYRAEHLFALDQALALYDAYHEKASACDVRIEAVLKELSIHRGRDHGSTPPASRRRNRTDQANALAFDVRAALFGLLGKDVTTIDGLGPYLSLKLIAECGDDLSSWPSAKHFTSWLGLAPSNKVSGGKTLSSRTRRSGGRAAALLRLAAVTVGRTDTALGAFYRRLSSRIGKAKVVTAPARKIAVLFYNAVRHGMDYVDPGASSYETRYRTRVINNLHRRAKAFGFVLQPLEPKAGAAVS

SEQ ID NO: 100594 - protein, 412 aa, unidentified
MKDLLEISCGLDVHKEKIVACILTGPLGKPTRSEIREFSTLIPDMIALRNWIVSKNCHHVAMESTGIYWMPIYEILEDAFSGDITLLVVNARHMKNVPGKKTDMRDSEWISTLLRAGLLNGSFIPEKRIREFRDLNRYRKSVIRDITSQKNRIEKFLQSSGFRLSSFISDIFGASGRNIILHLIEHGQIDKTALDSCLKTKTRNRIDEILMSVNGTLSEHQKAFLRILMTHYDSLKKHLAEIETSLEEDMAPFALQVEQLNSIYGISTTASCAIIAEIGIDMKPFKTAEHICSWAGLCPGNNESAGKRKSTSVTKGNPYIKSMLCEIAWVIAGKRNTYLSAWYWRIKQKKGAKKAIVALARKLLVIIYTMLKQGTLFDESCFETRRKNCEQKQLSRYIRELEKHGYHVEAQS

SEQ ID NO: 100595 - protein, 344 aa, unidentified
MNITAVGIDLAKNVFHVHGVDERGGVVIKKKLNRNQILDFVRNLPQTLIGLEACGGAHYWGREFRACGHEVRMMAPQFVKPYVKANKNDMADAEAICEAVTRPNMRFVGIKEVEQQEVLMIHRIRSRLVRQRTALSNEIRGLLMEFGVTIPQGIWSVKKFLKEEEFECKGKVTAFAVRAFKELKEEFFEINRRVEGHDKTINQMAKSHPICVQLMTIPGVGPITATAAMASVGEAKHFKNGRQFAAWLGLVPRQNSTGGKQRLLGISKRGDKYLRALLIHGARAVSRYATAKTDRLSVWVAKLMEKKGVNKASVAYANKIARAMWVILSGKDNAYKTFEVVQSS

SEQ ID NO: 100596 - protein, 334 aa, unidentified
MWHVGIDLHRETVVIAAVNDTGEVIKPVSVRCEDTATIVKVVKALGSFRAVIEASATYRWLYDLLQPYGTILLAHPFRLRVMVQRRSKTDKLDAQLLANLLRINQIPLAYIPPEPYQQLRELTRRRARLGRELAAAKIHLRALLARQNRQAPYRVPFGVRGLAWFRGQDFGWIENLVRDELLARLKHYGRQSTILDRHLERLADAFPQVEAILDIHGIGLYSALLIVAELGEPDRFRWAKQVGAYAGLTSRVHQSGGHCYRGSITRQGSTWLRWILVEAAIKVIREDAALKNFYTRVRKRSSAKIARVAVARKLAEICWKRLRRWQREHANQAA

SEQ ID NO: 100597 - protein, 347 aa, unidentified
MNLSRAGVDIAKSVFHVHAVDRHDQPKWQVKLKRADWLDVLCRRLAPGAEIGMEACASAHHWGRKLQERGFHVKLIGAQFVKPYVKSNKNDRVDAEAICEAMSRPGMRCVAVKSVAQQDTQAAHRIREELVGQRTAKANQIRGLVGEYGIVAPKGIQQLRRALPDWLEDAENGLTDNFRVLLADLADDLRYLDERIANLDEWIAQGVKDDPVARRLLALRGVGPLTASALAGALGDGTLYSKGRDFAASLGLTPRQHSTGGKDRLLGISKRGDAYLRKLLVHGARAVLRHAKNRDDGLSQWLKALSARKHVNVVTVALANKTARVAWAIVHNDTAYDPELVAGSHAS

SEQ ID NO: 100598 - protein, 343 aa, unidentified
MSNYSGKDLFMGIDVHKNTYTFVVLNEKEVVKKATIAADPELLVTFIKNNYAGAKVHTAYEAGFSGFHLHRHLTSNGLNNIVVHPASIEVSARDRVKTDKRDAMKIAVQLQSGRLKSVMIPDEKREGFRAISRLRAKFGEHKKRIGNQIKSLLFQHGVIGANDNRRISQKWLEWVMELNLNEDVIYSLQLMKEQWITLHTKINEIENKLEEQSLKDARLHMIYNSFPGVGLYTSRIIANELGDMSQFSNQKKLFSFTGLTPCEHSSGDHIRQGHISRQGRSVLRKVLIQASWYAVSNDEHFKNRYEALSNRIGNKKKAIVAMARIMVGMMRACVKSGSMYNAA

SEQ ID NO: 100599 - protein, 315 aa, unidentified
MTKPLPLVNVGVDVSKDKLDVHLLERDLSLSVPNHESAISALITRLARYRLERIVVEATGRLEHAFVSAAVARGLPVVVVAPLKVRRFAEAAGQLAKTDAIDARLIARFAAALKPTARPTADANSQFIKDLVVRRRQLTALRTTEKNRRGVMPETLKPGIDRIIESLDREIASLEQLIQDAVEQHAAWRHKRDLLTSMPGIGPSVASTLIGDLPELGSLSRRQIASLTGVAPFNRDSGHFHGKRRIRGGRAHSRTALFLSAMVAIRYNPDIKRFYKRLLQTGKHKKVALTACIRKIVTALNAMLRDNKPWQSSFA

SEQ ID NO: 100600 - protein, 351 aa, unidentified
MNTEQTAHPKLYIGIDIHKRSWKIHCATDLFSGKSFTMPPKPELLESYVNKHFSSYEVTTAYEAGCCGYYAHRSFESYGWRSLVVNPADIHRKGKERFTKTDKIDAHLIARELKDGRLDGIHVPEVEREQLRSLFRRRNDLVKDLRRIKSIIKMQLLYFGVSVPDEFDNDHWSHSFRHWLDSLEFDHSPARETLDSRMRSFRFIDKELRDVSTKIRAYCRKHYKKDYYLLRSIPGIGGIVASGIICELGDLRRFNSIKHLAGYVGLAPGVHQSGDNQKHTGITMRAHRLMRSYFIEASWQAIRTDPIMQAYYRKHVGKNVKSVIVKVARKLLSRTLAVIKTGIPYTIGVVE

SEQ ID NO: 100601 - protein, 342 aa, unidentified
MDEYDGRQFVGIDLHRRRSVIVRQSESGEQLSAVRIINDPVALGLEIERAGPNPEVVLEATYGWCWAVDTLQAAGAHVHLAHPLGVKGFRYRRVKNDVRDAADLADLLRMNRLPEAWIAPPATRELRELVRYRAKIVALGSGLKAQVHAVLAKAGVLIPVSDLFGVGGRQRLAKVPLGAAYVQRVISLLELIDALDAHETRFSVMVADKLGGHAGYQAIQQLPGVGPILGAVFVAEIADVHRFADPARLCSWAGLTPRHHESDTVVRRGHITKQGSKLVRWAAVEAIQRHPTTSKIALDRTRIESRRGKNIAKIAVARKLLTLVYYGLRDGHIRALAPRRAA

SEQ ID NO: 100602 - protein, 413 aa, unidentified
MDVLHPRCCGLDVHKSSISACILLREAGRVQKHQRRFGTMTQDLRELAEWLRQFGVTEIAMESSGVYWKPVWNILEKQFTIVLANAQHIKNVPGRKTDQKDAEWIAQLLQYGLLRPSYVPCEIIRDLRDLTRMRASLSQEASRISSRIQKVLEDANVKLASVATNVLGKSGRAMLEDIISGEDDPAHLASLALGHLRVKIPQLRLALEGKIRSHHRFLLRRLVDQIQFVEHEIALLDERLEEIAQQRPELSQAVARWDTIPGIDRVAAWALLAEIGDNMAQFPTAEHLPSWAALCPGNHESAGKRLRGTTRQGSPWLCRMACQCAWAAARTKNTYLSSQFRRLAARRGKKRAIIAVAHTIIVIGYHLQKNQSNYEDLGGNYFDRIHSDGLKRYLVKRLQQLGHKVTLEPMQAA

SEQ ID NO: 100603 - protein, 349 aa, unidentified
MDRTTYGLDIAKSVMQLHWVDGETGEIGRKQLARARLAAYFAPLQPVRIVMEACGSAHHWARVFGAQGHEVELLPASEVKAFVRRNKDDAADARAIWLAAQQGDIRRVPQKSVEQQAVLALHRTRSHWVSVRTATLNALRGLLYEFGVVLRGGRRAGLKALGEQRAGIDAQLPPTMRTLVDGQLQALRQIDERIDVLEGEIAALQKQLPGAARLRRVPGIGVLGSTALAATLGDAKAWRSGREFSASIGVVPAHAGTGGKVRVGHLSKRGDPYLRTLLIHGARSVIQHAKDKPKWLEQLLARRPLNVVVVALANKMARTAWALIAHGRAYQRDWQSARPGGGAAQAVAA

SEQ ID NO: 100604 - protein, 391 aa, unidentified
MIYIGIDVAKDKHDCFITNSDSEVLFKAFTIFNNLDGFNDLYQKIESVMDDVTKVKVGLEATGHYSYNLLGYLIDKGLPTYVINPLHTNLYRKSLSLRQTKTDKVDARTIASMLMSDVNLKSYSDTSYHNEELKSLTRYRFDKVKERAKLKTSVSRLVCILFPELEKLVPTLHMASVYALLSKFPSTKHVATAHLTRLTNLLSESSKGRYCKDTAITFRDAARASIGSNMPAKSLELKHTIKLIQELDSEIDEIENEIKIIMDGINSPILSIPGINYRMGAMIIAEICDFNRFDSPDKILAYAGFSPSTYQSGQLDGAYAHMEKRGSRYLRYALYNATKYVCHWDPTFAVYLAKKRAEGKHYNVAISHAVKKLVRVIYHLEKTKQQYIKAS

SEQ ID NO: 100605 - protein, 398 aa, unidentified
MGYVVIGMDPHKRSATIEIIDERQQVLSAGRFGTDRDGYRAMLAAGRKFKDRVWAVEGCNGIGRHLAQRLVADGEPVAGVPAKLSARARLFSAGQGRKTDPVDAHSVALAGLHSPGLRVITADDAAVALRLLADRRDELGVARTQTINRLHRLLLELLPGGAKKFLSAAQAKDLLAAVRPRDIAGKTRRRLAAEMITELARIDKRIKAADAELKQLVTATGSSLLTLHGIGPSSAARLLGDVGDIARFADKGRFASWNGTAPLDASSGDQNRHRLSRAGNRRINRVLHIMAVVALRNGTEGRAYYRRKLAAGKTTMEAMRCLKRRLSDVVYQQMRADARRLATGPGGHTGTTTGSSAAGSNPCTGSSEKSLPGPAVNDPTPLPRPASRSVLQPVPGAP

SEQ ID NO: 100606 - protein, 367 aa, unidentified
MLPVVAGFQSFVGVDLHKCTVTLKAVDAAGAAAGHLTISTKSVEKIEAWLRALPRPVWLAVEACPFVEWFIERYRDVVDRIDIADATRLASCRGKRRKNDPNDALDIALRLARGECPLGFIAEAQLMQLRKLGRHWRQLSRLLARTKHAMKSMLNAANLHGPKFDGAGAQRWLLAHGTLLHPAQRQAFGNYLDVVLLVERQREVLRRQILMADRSPQFLDTQLILQSVPGIGDIWGLMIAAEIGPFDRFPNADALEFWAGLTADLKTSAGRSQSGNITKAGSAPLRWALCQAAVTLCMCDARQEEIRQRLIKRIGKAKANVAMGRRLLRTLYAMVRDQKPYRCEKPVDRTTRMNQAKAPRKTQQKVA

SEQ ID NO: 100607 - protein, 420 aa, unidentified
MKVVYQTCCGVDVHKSFLVATIIKTTSGVEPSYHKKRFSTFNNSILQFKEWLIKNQCRDVCMESTGKYWVPVFNLLEDEINVTIANPKWVKAVKGNKDDTKDSKWIGNLFRLGLVPGSYIPSKPIRILREFTRYRYKLTSCRSSEKNRYQNALTVCNVALDSVVSDIFGKSATSVIDYLIEQSDNSINHEEIASRLLRSLKKKSDSVIESIEGYQMTDSQKYRMRLVRAHMDYITSTINDIDTMIDSLIAPHENAVQLLCTIPGVDRNSAITIISEIGTDMAQFSNSKRLCCWAGLTPGNNESAGKKKSVRITRAGVYLKPALVQIAHAAVKSDKSPYYKAKYERIAKRRGKKRAIIAIARMILTAIYQMLSTGEEWNPTDLYKVDMPELLKEKQKEKAIKQAKKLLIREGIISESQLAS

SEQ ID NO: 100608 - protein, 339 aa, unidentified
MSKPTNSQQSKVFCGIDVSAATLAVAVIEPDRPLRQRQFSNRASGHKALIGWLGKYRARVRVSLEATGIYSLDLALALHAAPHIELAVLNPKMANRFAQTLRRSKTDAADAMVLAEYSQRMPFLAWTPPSLNGLRLRAVGRHIAALVAQHARDLNRLHAAESSRAVPGCVLQDLKRSLALLERRIVKMRRAAMELIRADAEIDQRFRLLTGMPGIAETSAVAILGELVLLSPHLTARQWVAHSGLDPVHQDSGTSVHKRSRISRAGNRHLRRALYMPALAAVRWDPHMKAFYEALQQRHKTKLQAIIAVARKLLHAIYGIFKSRTPYDGSKLFPQLQTA

SEQ ID NO: 100609 - protein, 341 aa, unidentified
MDHYAGIDVSLEQSSVCVVDGSGKIVREAKVASEPGALIEWFRSLGVSLTRIGLEAGPLSQWLFAGMKEAGLAVELLETRHVRNAFKTMPVKTDRKDARGIAELIRLGWFRPVHCKSMPAQETRALLTARSLVQGKLRDVEMNLRGMLRGFGLKVGKTTSTRFAARIKELVTGHPTLEVIATALLAVHEVLLREFKSFEKRVRIMGRHSDRARLLMSTPGVGVVISLTYASAIDDPARFKSSKNVGAHYGMTPKRYQSGETDYTGRISKVGDKSVRTALYQAAHIILTKPVKSSGLKSWAMKLAKRIGMPKAKVALARKLAVIMHRMLVDGKPFDFAATAA

SEQ ID NO: 100610 - protein, 395 aa, unidentified
MNPLYVGIDVSSKNNVIYLMLPNDGSTQLVKRIFTAMTSNNIDSVLIGLEATSVYGDNLVYFLKEDTTLASFDRKIHVLNPKQVNKFKESYNDLPKNDYVDAFVIADCLRFGRINKEVYMDDYRYKALQNLTRARYFAVTNLTKEKQRFINVLFKKYSTMTQEKVFSDTFSTTALAVYEKFESAETLAKMDLQELTAFIMEKGKNRFPDPDAVAKALQKAARSSYRLPKTVNDSVNQVLAISITSIRALESQIKAFDKAITKQMELLPNVLISIPGIGPVLSAGIMAEIGDINRFQNQAALAKYAGLAWQQHQSGDFEAQTTRMIHSGNRFLKYYLCEAAFSLVRCDKEYSRFYHLKYKEVNRFQHKRALALTARKFVRLVFALLKDNRLYRPAE

SEQ ID NO: 100611 - protein, 401 aa, unidentified
MKRVCGLDVHKDTVFCATFNGKKHGPVVEYTTLTSSIRAMGESLRKEGVDEIAMESTGMYWIPVWNILEDMGFPLILVNPFLIKQMPGRKSDVKDAQWIATLLHKGLLRSSLIPCPQIRELRTYSRKYVKLQQRQTSVLQDMERTLEMCSIRITRFVSNISGKSVLRVIEKIVQGETSPDVLVEVIHGRIIHSHTTKKIKESLTGFIKEHHRFMLELSLNEYEMLVIQSNLCLSKMEELCNEHYKKELKLLLSIPGINTIAAMIVLAETGADMKAFEHSGKFSGWTGLRPRNDESAGKYKSTATTKGNRYLRAILVQIAWGAIRTKGSFFKEKFNRLAMRKSRKKALIAIARKIGVLIWNVLYYEKGYDPKRLIVYDPGTLQAKILYHQKEYNRLQKLIQH

SEQ ID NO: 100612 - protein, 312 aa, unidentified
MTVLERAPSTVVGIDVSKDTLMVCGQALTSVGNTRAAIAKLVTSFDPGTLVVCEPTGGHEALLVSALLTHGIACHRADTLKVQAFIKSFGRLAKTDAIDARALAQYGQERWRQLPLFQARDEAQAELARLVARRQDLMAFKIAETSRAKAPGSKMLAGSFKAVIACVQKQIDKVDERIEELIAGSRDLSRRKQTYCSLPGVGTRTAIALLATMPELGTLTRRQAASLAGLAPHPRDSGTLKGYRKMRGGRPEVRSSVFMAALAAARAKGPLRAFYQRLIENGKKPIVALSALMRKIIIILNAKIRDEMHAMS

SEQ ID NO: 100613 - protein, 399 aa, unidentified
MIHVGIDIGKNRHAAAAVDEAGVCVMPPRFLTQDAGGFASLFGALDGLGGAASVAVGMEATGHYWKVLRHALASRGYRVDVINPLITSREASADVRGRKSDKLDALAIANVMRKGDYSPAPAELPASDALKSLTRYRRTLVARCTDAKLRLTSALDVAFPEAAKTLGDLFGAASLAVIKAFPSARLAAAADIRRLTSLFAKASGGQLGREAAKAYREAARHSLSLTIHNEGEEFVIARIVDEIRAVTARIEEVERRILAEPQPVIAGILGSIRGAGKIQPMVVAAELGDLSRFAGADMARKVLAYAGSEPRVRESGTWKGRAKISKRGSRALRNALYLMAGTIRLHSPCFNEVYKRQVAKGKHHGVALGHVVRKIVDVMCGMYKTNTLFVPPQTKATPC

SEQ ID NO: 100614 - protein, 348 aa, unidentified
MNATRKTVVGVDMAKSVFQVYTVEPETGEVINKPIKRAQFLQWFANRAPCLVGMEACGGSQHWARKLQEMGHEVKLMSGKIVKAFVCGNKNDAADAHAIYMAAQQSGVRAVAVKTEAQQAVLAIHWVRQQLVKMRTAQINALRGLLAEYGEVFGTGRKAFDTGVKAALERLAERLPMALIDTLRDQWNELARLDERIDRIEASLLAWMRQDRAAKAISAIPGVGLLTATAAVAAMGDEKAFRSGREFAAWIGLVPRQTGSGGKVRLLGMSKRGDTYLRTLLIHGARAVLQHAKSPSPWLQQLSRRRPPNVVIVALANKMARTIWAVLAHARVYDKDHVSVRPHAAGAA

SEQ ID NO: 100615 - protein, 427 aa, unidentified
MGRFGKGPTVEIIYERVAGIDVGKKIIAVAVRTPGERPGKRRQQLRKFNTYYQTLTEMVAWLIAEGVTHVSMEATGVYWRPVFHALCEAERALEVLLVNARHVKNVPGRKSDALDAVWLAELTECGLLRGSFIPPREIAAIRELTRYRKKLIEQRTSELQRLAKVLEDGGIKIDSVASALTTLSARDMIEALINGERDPGVLAEFARGKMRRKISDLRLACAGRFGAQHALMCTLHLEHIDHLADMIARLDTRIDEASLPFVRQTTSLATIPGISERAAQVIISEIGIDMARFPTAAHLASWAGLCPGNNESAGKHRSGRTRKGSKELRALLTECAWSAGRTSTYVGTQFRRFHRRFGSKGGKKAATATAHTLIVIIWHVLAEATAYRDLGSDYFTRRLDSPEARKRRLIHELEALGHKVTIEPAAA

SEQ ID NO: 100616 - protein, 355 aa, unidentified
MSGEKYIGLDVHQATISVAVMDSQGKVIMESILETKASTLLEFFAGLRGSLFVTFEEGTWAAWLYDLLKPHVTELLVCNPRKIPLHKQGNKSDKIDARKLAERLRLHDLKPVYHGETGIRMLRELARSYLTVVKDLSRVMNRLKALYRSWAIPCVGRDVYYRRHRREWLDKIPEAGTRRRAEQLYEQLDLLRHLRQQARRELLAESRKHAITAKLRKIPSLGPIRSALAVALIQTPHRFRTKRQLWTYSGLGLETRDSGEYHFVKGQPRRRKKQATIRGLNKDYNHDLKNLFKGVATRASVKPGPFQEFYQRSLAKGIKPTMARLTLARKIAAITLTLWKKGEDFDINKLNSQAA

SEQ ID NO: 100617 - protein, 430 aa, unidentified
MKSNTQNAKIEAITDKTMVVGIDIGSETHYARAFTNRGIELSDKPFSFSNTEAGFLEFSTWMEDLMKKNGMEAVAPGMEPTGHYWFNLGAFLQDRGIQPLHVNPYHVKQSKELDDNNPTKNDRKDPKVIAGLVNEGRYSKPYIPKDVYAEVRSLSNQRLQAQESLTRAKNRLARWFSIYFPEYKDVYNSPDAVSGIMILKKAPLPADIKALGVDGVNQIWREAKLRGSGLKRAKTLVSAAEHSIGSREAQEAARMEVSYLLDDIERYIKRVNDLIELLDQKLAEIPYVDKLLAVPGIGKRTVCGFIAEVGGIRRFDSPKQLQKLAGLSIVESSSGKHKGETHISYRGRKRLRYVLYEAALSVVARVPEFRTLHDYYTQRRKNPLKKMQSLIAISCKLIRLFYAILTKGIDYDGTRMLSDIQRPEGQLQTA

SEQ ID NO: 100618 - protein, 372 aa, unidentified
MGHHIESFVGIDTSKSRNAIAIADGGRGGEVRYLGELPSTEAAIRKLVAKLAAKYCHLTFCYEAGPTGYGLYRLLKGLGYECLVVAPSLVPKKAGDRVKTNRRDAVSLAKLLRAGELTAVWVPDERHEAMRDLSRARQAAKKDLQGKRQQISSLMLRLGRIYPGKTTWGRAHMKWLTAQKLEHREQRIAFEELLEGIRQESERVERLENAIREAVPEWSLAEAVTALQAVRGIDLIAAVGVLAEIGDLSRFQNPRQLMSYLGLVPSENSTGDKVKRGGITKAGNGRARRILVEAAWSYRYPPRVSRDKQPKVAAAPRPVREIAWKAQTRLCGRFRSLERKGKRRTVIATAIARELSAFIWAINREVMEHRPA

SEQ ID NO: 100619 - protein, 340 aa, unidentified
MLLYGGIDLHANNSVIVLLNEQDEVLYRKRLANELSTILDQLAPYDTTLQGLAVESTYNWYWLVDGLMEAGYRVHLANPAAMQQYDGLKYTDDHSDARWLAHLLRLGVLPEGYIYPKAERAVRDLLRKRTHLVRQHTANVLSVQNILVRNTGARLSVKRLRELTKREIERLLPEADQILAVTSSLAVLDCLSQQIKTLEHTVQKRLKHTPAYEQLLTVQGLGAILAQTITLETGAISRFPTVGNYASYCRCVDSTKLSNGRRKGQGNVKNGNPYLSWAYMEAAQYAMRFQPAAQRFYQRKLAKSNKNMILARKAVAHKLARACYYIMRDLVPFDATKAFG

SEQ ID NO: 100620 - protein, 391 aa, unidentified
MIYAGIDVAKDKHDCFITNSVGEVLFKSFTIPNNREGFETLFQKIQSVSDDLTKVKVGLEATGHYSYNLLGFLLDKGLPTYVINPLHTNLYRKSLSLRKTKTDKVDAHTIASMIMSDVNLKSYSDTSYHNEELKSLTRYRFDKVKARAKLKSSVSRLVCILFPELEKLVPTLHMVSVYSLLSEFPSAHAIASAHLTRLTNLLSESSRGRYGKDTAICFRDAARSSIGSHIPAKSLELKHTIRLILELTSEIDEIEAEIKTIMDKINSPILTIPGISYKMGAMIIAEIGDFSRFDSPDKILAYAGMSPSIYQSGQLDNCYAHMEKRGSRYLRYALYNATKYVCHWDESFGTYLAKKRAEGKHYNVALSHATKKLVRTIYAMEKSGQAYTNAA

SEQ ID NO: 100621 - protein, 419 aa, unidentified
MREIGLDVHRDFCEVAISEQGELRSAPRIKTTPEELELFAGSLGREDRVALEVTGNAWSVARAIEPHVAEVLVVSPNETGIRQARAKTDRLDARALARLLAAGSLEGLWMPDQQTRALRRRLQRRSQLVKARTRAKNEVHAALMRQLIAKPKVSDLFGLEGRRWLVALELPVEERETLDSALRQIDFLDREIAEADRVIARDALGSAEIRRLMSVPGVNVISAATFMAAVGEIGRFPDPRRLVGYLGLDPKVRQSGSELAHHGRISKQGSTSARHALVEAAWSVVLQPGPLRAFYRRLRARRGAQVAIVAVARKLAHLFWCLLTRSEDYAYAQPSLTRKKLRRLELAAGAPKGEVERGLWSTNAAMRTAERELARQGETAYERTVADWKAQQGKRVGAGAAPGRASRAARQGSAPEPAL

SEQ ID NO: 100622 - protein, 346 aa, unidentified
MEISTIGLDLAKNVFQVHGISATGEVIIRKALRRSQMLQFFEKLPPCLVGAEACGTSHHWARELTKLGHEVRLMPAAYVKPYVKRGKNDAADAEAICEAVTRQTMRFVPIKSREQQAALSLHRVRQLLIKQRTQLVNMMRSVLAELGTAIPVGIVKALHMAREIVDGESTLDLPPEAANVVAMLAGQLLQLHIQLRKLDLRLAALQRSDERARRLATIPGIGPIGATALAASVTDPSQFSSGRQFAAWLGLTPRQSSSGGKERLGRITKMGDRYLRQLLVVGATALVRYAKQKPSTVDPRFVALLARKPARVASVAIANKMARIAWAVMARGGVFERGHAPMLAAA

SEQ ID NO: 100623 - protein, 361 aa, unidentified
MLIRYVGLDVHKDSIKIAVAEEGREPAKLLASIPGESGKLIKQISKLGPSSSVRCCYEAGPGGYSIYRALTAAGIDCKVVAPSMIPKQSGKRVKTDRLDAENLAHYFRSGDLSEVWVPDENTESIRNLVRLRDDARIARHKARQQLNQFLLRKGLVYHLKTKWNTGHMTWVRSQIFPQEADNVTLADYLRHTELLDERVANIEEDLRVYSGYWGKSSLVESLQGLRGIAFVSAVAIAAEVGDLRRFPTAGHFMSYVGLVPSEYSSGQKEKRGSITRCGNVIVRRLLVEAAWHYRHKPSRSRAITLRNENLPKRVQDIAWKAQERLHRKYMKLLMSGKPKNKVCVAVARELAGFIWAIGQSI

SEQ ID NO: 100624 - protein, 347 aa, unidentified
MKVLKQVLGIDVGQKELVVTLGRNYEDFSLELFAYKVFKNKEGAFDSLVKWVEKLTIGGPKVKFVMEATGVYHQKIAYYLVANGYDVSVILPNKISNYGRTVEVKTVTDKTCSEIIARFGLERKLELWTPPKRIYRELQQLTRERAQIVEERTSVKNQLHAEESEAFPNKNSLKRIKTLINFLTKQEAEIKRDISTYLNTDSSLKEEIRNICTIPGVGELTAIIVMAETNGFELIRNKKQLVSYAGLDVVEKQSGTSVKGKPRISKRGNKNIRRAMHLPAISAVKHNENYKEIYARLVSRTGIKMKGIVAVQRKLLELIFIVYKNKTTYVKDYELRKRAQLQEVAAL

SEQ ID NO: 100625 - protein, 440 aa, unidentified
MRTIGLDLAVQAAHKAVVLDDAGHFCTPLLTIHTRPSELDYLLARAREGAPSTDVQIVMEPTGMAWFPVAVYYARQALLRRYYQRHAKSDRIDARVLARLPLVNPDKLHRLVLPSATALACQRACKQLDHFATQITAVKNRLQAIDRFAWPGLEEQVFADPFAPAARFFREHCYDPRQVVLLGATAIRQQCEASALSADDGDAWVESLLTLAQQVLTLYGTDGQFLDFAQLQAEVQRDQAWLTWLEQQHHTLRLRTVRPLYRAVHPSRNLETLKGVGQDSAAVYASFIGDPRRFSSTRLFRGWTGMVPSSEQSADTEAKGLHITQAGPDLIKKYAYLDAEIARRYDPQIAAIYYDQMMHKGKHHKQAVCACATHLLDRVLAVLRADKPYEMRDSDGTAISNQQARELIEERYTVPPEVRRRTNKRNRRQQADQRAERRAT

SEQ ID NO: 100626 - protein, 457 aa, unidentified
MTARKNVKKKSTSKTNVQLPALHPHAAGIDIGATQIQVAVPCDADSKPVRTFTTFTDDLLALRDWLKVCGVRTVAMESTGVYWIALYQILEAAGIEVCLVNARHCKNLPGRKTDVSDCQWLQYLHSVGLLRASFRPPEQICVVRSFLRQRANLVRYASQQVMQLHKALTQMNVQIHNVISDIVGVTGLAILDAVLAGERDGQKLAQLKDHRIKASRDTMARSLVGDWRAEHLFALRQALATWRHYQNLITECDAETARVLAAFESRVDVQANPPPPSTLRHKKPQANEPRFEARTELYRITGVELTQVPGLQVGTALVLFGELGPDFVTRFPTAKCFASWLGLCPDNRITGGRVISVKTRDVKSRAAEALRLAAQALWQSKTYLGDCFRRWKARLGTPKAITAMAHKLARILWHLLKYREAYDPKVWVMAEEKMRAKKLKRLHQNATALGYKLVSAT

SEQ ID NO: 100627 - protein, 331 aa, unidentified
MLTPTDQLHFIGIDIAKDSFAAAIHGATTKSFPNSPQGAALLAAWARQHYPAGECRCVCESTSQYSRFFAHNLASGPGFSCAIVPPQRVRYAARAFARHTKTDSVDAKTILAFAQQTCPEPYCRPSPANAKLDALRAAIEDLKTLSAELANRQHLLPFTPDAPPAVVQAFTQIQAVLAQELARLGAQIELLFADNADLAVQRQLLQSIPGIGPVLSVELLCVSEVLQQRQPKQLAQYAGLAPAHRQSGASIKGKSMITHAGNRRLRKLLYMAAVSAARHHPHLREFYARLLSAGKPKKLALIAVARKLLLLAQAVMLSSVPYDRTFGKRAA

SEQ ID NO: 100628 - protein, 355 aa, unidentified
MSQEKYIGMDVHQATISAAVRDRNGNLLMECILETKADTLLEFVQGLHGTLSLVFEEGTLAAWLHDLLKPHVNRVVVCDSRKAARLRDGNKNDRIDARHLSELLRTNQLKPVYHGEHGLRTLKELGRSYLTVSKEMTRTMNRIKSLYRSWAIPCAGTTVYAPRHRREWLAKIAEPGARVRAEHLYEQLDHLQPIRVRARRELLQESNKHDAVRRLRQIPSIGQIRAALLVALLQTPHRFRSKRQIWAYSGFAIETHDSGEYRYVRGKLQRNRERITVRGLNRNHTPDLKNIFKGAAISASSRPGPLQDFYETRVALGMRPTMARLTLARKIAAMTLTLWKKGANFDPQQLSRQAA

SEQ ID NO: 100629 - protein, 305 aa, unidentified
MDVSATTLEARVGRDGPVERFARNVAGIAALAAFCKQYQVALVAMEATGGYERLPFGLLWAAAVPAAIVNPRAVRRFAEAMGILEKTDRIDTGVIAWFAEVKRIAPQPPASDLQQRLAALVTRLRQLTELRTAQSNQRRLVTDVVALAAFDELLILITRQIRSLAAHIAQLIDSDPLWHRLDAAFRQIKGVADRTVARIMAEMPEIGTFSNKAAAKLGGLAPIARDSGTLRGKRAVRGGRSGVRAILFVVADVVRRYDPDFADCHRRLTQAGKPKKLIRVALARKLLARLNAKARDVRRQLANAS

SEQ ID NO: 100630 - protein, 342 aa, unidentified
MSEIITVGLDLAKNVFQAHGADRAGQPVLRKKLRRDQVLAFFSGLQPCVVAMEACGGAHFWGREIGKLGHDVRLIPPAYVKPFVKRQKNDAADAEAICEAALRPTMRFVPVKSEETQGAAMVFRVRELLIRQRTQAINALRGHLSEFGQVAPQGAANASKLIAIAEDPESGLPADAIPTLKVLIAALTQLEAEIVKLDAEIARRAKENDVARRLMTVPGIGPLIATAIATLAPPPETFRKARDFAAWLGLTPRQHSTGGKQRLGATTKMGERSLRRLLIIGANSVIIKRHVHAAAQPGTWLAGMLSRKPPMLVRVALANKMARIVWALMARGGIYQSPATVA

SEQ ID NO: 100631 - protein, 356 aa, unidentified
MIANKVSRKNKKNNSSLTETESYDHYIALDWSKKNMAIARMGKKDSEPKVIDVPTDLKGLKKYLSNLKGKKILTIEETTTSHWLYVELHDQADKIFICDPYRNKLLSDGPKTDRIDAGKLCKLLKNRMMKEVFHSTNELYELRKLVSYYDDEVRAGVRLLNQKSALYRAENKSWKKQEQLEASQVNKFIVAQLNEKIESYHEKHKRYEKEFERISKNNKVLRSLKTIPGLGTISSVTILSIVIDGKRFKSNNHYLSYCGLVKHEKQSGGRSYGRRSPRYSRRLKAVYVSAAVRVASTENPMREYYEYLLNEKKLPDYNAKNALARYIARVSLGIIKSGEKYKPYKWRDNKKEKEAA

SEQ ID NO: 100632 - protein, 357 aa, unidentified
MERYIGLDAHGASSTFGVIGPSGRKLRKDVVETNGATLVKYLRNVPGRKHLCLEEGTHSAWLYEILSPHVEEIVVAGIGKREGQKSDVIDAFRCAEDLRTGAIKTRVFKAPLRFSRLRELSRVHSMLVGDVVRVQGRVKAMYRSRGVLTPGKRIYHPRGRDAWLKQLPVPCRWATEKLHEEYDRLLDLKQETEKELVAESHKHRISKVLATAPGIGPIRVAQLLPIVVTPHRFRTRSQFWAYCGLGIVMRSSSDWVQTPAGQWARAQIQQTRGLNRNHNSRLKAVFKGAATTVITHLNSDPLYGHYLRLTSVGTKPNLAKLTIARRVAAIVLRMWKDEKEYDPGKLKQQEIIASAVD

SEQ ID NO: 100633 - protein, 355 aa, unidentified
MERYIGMDVHAASCTLAVISEKGRKLRDFPVETNGQALVEAVRMIPGHKHLVLEEGLQSAWLYETLSPHVDELVVAGITQSQGHKSDKRDAYGLAEKLRVGNLDKSVFKAPRQFTRLREFSRSHMTLVGDVVRGQSRIKSLYRSRGILVSGVNVYGVRHRAQWQQQLCSSAQARAARLYDHLDFLLEQKKQAEVDLLREAKKHPIVRVLETAPGFGPIRAARLVPIVVTPHRFRTKRQFWSYCGLGIVTRSSSDWIQAADGGWIRARVPQTRGLSRQHNHFLKSLFKGAATTVITQLSKDPIHARYQRLLDGGTKPTLAKLSLARMIAATVLRMWKDEKEYDPRRGDPSTATREG

SEQ ID NO: 100634 - protein, 410 aa, unidentified
MEIILRCCAGLDVHKDSVEACVRRMSGGGKVEHEVRHWGTTTRALVEMAEWLCSSGVTHVAMESTGVYWKPIFNILEAQFEILLVNAHHMKNVPGRKTDIRDCQWIAQLLQHGLLKGSFIPPRPQRELRDLTRQRTQLVDEASRISNRIQKVLEDANIKLGSVASNVVGLSGRLMLEAIIAGQDNPVELADLAQRRMRSKIPQLEQALYGKLTEHHRWLLRLLLDQFETSERFITRLDERIAELTRPLEPVLEKLDAIPGVDRRVAEVLMAEIGPDMTPFPSDAHLASWAGISPGNNESAGKKRSGKTTKGSRWLRRALVQAAWAASHKKNSYFQAHARNLMHRRGRKRGLVAVAHSLLTVIYHMLKGGTAYRDLGAQFLDRIRATQLVRFHVRRLQQLGLQVAIAPAAV

SEQ ID NO: 100635 - protein, 319 aa, unidentified
MKYTFILGLDVASKKLDLCLLDTESQKRSFTTIEYSRDVLEDFLQEHSEVIPKDCLVGLESTGDYHLKASKFFLEKGFDVKILNPILTNQYIRTTIRGTKTDKTDSELICKLLVEEHGDLLKLDKLTSNSKELMRLSASLIGVSTQLKLRRQSVQRKALDNTENIEKEIEKIIDSIKELSDNIVKQATEVRTEEEEFIDSIPGFSTKLSAVVYHEIGDIDRFPNSKCLSAFAGLDPRIKQSGERLNTTGRITKRGSKYLRTGLFMAANVARMHDTDLKEYYEKKKIENRTHKEIMCMISRKLLARIFVVLKERRNYEKR

SEQ ID NO: 100636 - protein, 338 aa, unidentified
MNIVFLGIDLAKNVFQLCGLNQAGKPVYTKRTGRKELLQTLANIPACLIGIEASTGAFYWQREFEKLGHKVKVISPQYVKPFVRGQKNDGNDAQAIAVALMQPTMQFVPPKSPEQQDIQALHRARQRIVNHRTATVCQIRGLLLDRGIPIGSAVSRVRRAIPLILEDAENGLSSRMRRTIAELYELFNDLGRRIHFFDKEIETVFRQSEACQRIARVKGIGPKTATAVVTAIGKGTEFKNGRHFAAWLGLVPRQHSSGDRQVLMNMTKKGDKHLRTLFIHGARAVVRVATNNNDGHMNQWVNQLKERRGFNKTTVAVANKNARIIWSMLRNETEYQVV

SEQ ID NO: 100637 - protein, 368 aa, unidentified
MEKFITFVGLDVHKNTIDVALADAGRNAEVRHYGKIGGGLDDLDRLVKKLSSPNKELHFVYEAGPCGYDIFRSLTDKGFDCAVVSPAHIPKKPADRIKTDRRDAMMLARLHRAGELTYVFVPRADDEAMRDLTRAREDAKKAQRVAQQQLNGMLLRLGFRYPKDNWTKQHFLWLADQKMPMPAQQVVFQEYINAINETNARVERLTQQIETLVPTWRMAPVVKALQALRGVSLIVAVTTIAELGDLTRFEHPKKLMTYLGLVPSEHSSGEKTQRGKITKTGNGHARRVLVEAAQAYSHPARITRPLLKRQEGLSQEVRDIAWKCQARLCTRFRRLMAKGKNRNAVITATARELAAFMWAIANHTPIAV

SEQ ID NO: 100638 - protein, 489 aa, unidentified
MSTARKQREGKKGSDAHRSASKRKARGSHCQPGEGHRRRSKLTITNPDAAGIDIGAQVHYVAVPEDRAEVSVRSFGAYTAQLDELVQWLKDCAIKTVAMESTGVYWIPLFQKLEEAGFEVLLVDARQAKHVPGRKSDVQDCQWLQQLHSYGLLRAAFRPEDSICRLRTLQRHRKNLVESAAMWIQHMQKALNEMNLHLHHVLSDISGQSGLRILDAILAGERDPRKLASLADRRVEKSQAQIEAALTGDYRPELLFVLSQSLQNYRQIQEQIAQCDLNIEKQLAKMADCANPNQASEAIQQSQDSAGCRPRKRKPKDALELSLAGHLKRILGVDLTTIPGLNILAVLNLLSEIGTNMGKWRNEKAFVSWMGLSPDNKISGQRVLSSRTRKVVNRAATTLRLSVMVLGKTNTPLGSFYRRKRAQLGAPKAITATARKLGCLIYRLIKNGQGYKEPDLHTYELKYKDQILNSLRKRANSFGFDLVQVPKAA

SEQ ID NO: 100639 - protein, 354 aa, unidentified
MIAVGVDVHKRQCSLAMQFEDGELASFAPFENRREEWRELLAVLPPEAEIALEVSTSGYFAMSVLEEAGWRERAHWVHTAGIDSLRKQKTDRLDARRLARKLSVSDRDPLPEAWFPPRDIRELRLRARQRCWLAVLRAQGKNRLQSLLQMHGRRPPMTDVFGVAGRRWLAEQTLPAAARESVAQILRLHDFLSAELEISEGYLRAVEAEFPELRRLRTIPGIGPILSPVIWSEMGRLERFASADAFVNYTGLIPRLYESGEVSICGGITHQGSAWLRWALIAAAQGAILGRNAFAQRYRRLRRRKPANVAKTAVARSLARCAYGVLKHQEDYQELRWGVRRPGVGRSVGAASLR

SEQ ID NO: 100640 - protein, 339 aa, unidentified
MKHTVVGVDIAKRVFQLYWVEKETGEIVNLQLKREKFLEHFANRAPCLIGMEACGGSQHWARQLKALGHEVKLLPGKRVKPFVGGNKNDVADARAVWTAVQQPGIKTVAVKSEAQQAVLALHRMRQQLVKFRTAQINGLRGLLVEYGEVMPQGKTGIGKGVSKALPRLAERLPAVLIDTLREQFERIGELDAQVAEIERRLRQWHKDDPASQRIAAIPGVGLLTATAAVATMGDAKAFNSGREFAAWLGLVPRQSGTGGRVKLLGISKRGDTYLRTLLIHGARSVLTNSKAPPHWATDLAKRRPHNVVVVALANKMARTIWALLAHDRVYQKGFVSQPA

SEQ ID NO: 100641 - protein, 466 aa, unidentified
MTPPKDYCLEAPCPPTPLLPPLPVLSDALQVCNPHAAGIDIGEAEHWVAVPPGRDPQPVRRFGTFTVDLDALADWLIDCGVITVAMASTGVYWMPLFELLEARGVQVLLIDPRQAKRAPGRPKTDRLDCQWLQRLHAYGLRAGAFRPDDQVCVLRAYLRHRQRLLTYAAHHIQHMHKALQQMNLKLTQVVSDLTGVTGMAIIKAILAGERNPQHLAKLRNPHCHHDADDIAKALQGTWRAEHLFALRQAVELYEVSHQQMAQCDQQITRHLETFADKSDGQPLPPKARRHKKTNEPRFDARTPLSRLAGVDLTTIEGIEENTALILLSEIGTDMHRWPSVKHFCRWLGLCPQHKISGGKVLSRRVRPGAHRVTVALRLAARRLHHSQSALGAFFRRMQVRLGTPKAITATAHKLARLVYSLWQHGSAYVQQGLDAYEAQYRERKVTTMAKQAKALGYTLVLLAAQG

SEQ ID NO: 100642 - protein, 392 aa, unidentified
MVVSVGIDVSKDKHDCFIVSSEGEVLADAFIIPNTMDGFHYLLQRIRHCTAPQDKIKVGLEATGHYSYNLLGFLLDNGLTTYVLNPLRTNLYRKSLSLRKTKTDRVDARTIASMLLSDAGLKPYTDTAYHNEELKSLTRYRFDKVKERAKLKSSIARLVCILFPELEKLVPSLHIASVYALLEEFPGAKQVANTHLTRLKALLETASNGHYKRDMALEIRNAAKNSIGSQMPAKSLELQHTIRLIRELDREIDEIEEQIQSIMDELHSPITTIPGLGFRMAAMILAEVGDFTRFDSPDKLLAYAGMSPSTYQSGQLKNCYPHMEKRGSRYLRYALYNATKYVCHWDPAFADYLAKKRAEGKHYNIAISHAAKKLVRLIFAREKSGQPYCSAA

SEQ ID NO: 100643 - protein, 345 aa, unidentified
MQTPQMMSFAGDHFFVGVDAHLKNWKVTIHLNGMELKTFSMNPAPLELIAYLRKHYPDGIYHVVYEAGFCGFWALRIFRQNSVDCIICNPADVPTMNKERVNKCDPIDSRKLSRELENKSLHGIYIPDTFQEELRMLMRLRYRIIQSQTRIKNRIKGLLYAQGILIPLQFSGNNRWSHAFILWLEKLQLLTPAGNFTLQNLILQLKEIREHNKNVLKQLRKEARNKDIAPIMNVLQGIPGIAFISAMSLYTEIIDMKRFPNDDALANFVGLVPSTQTSDDKVYVNGISYRQNKFLRSLMIESAWVAVKEDPALTLKYKELTKRMKPQERMSQTPLIKDKKGTVMT

SEQ ID NO: 100644 - protein, 427 aa, unidentified
MSETNCNKQAERRQKISKSTLIVGMDIGSEFNAMALMNEAGEVLGRHPKVYNSREGFGYFERSIEEVKRRKGLKRVLIGMEPTGHYWRKIAYYAKDQGHEVRFIRTTALRHQRELDESSSAKTDIRDAVTIANVVREGKYIDTVIEDGIYRQLRMLAHVRENIQRYNVGTKHRLAAVLDDYFPELKEIFWSMKAKGLWAVLEECPFPEDVIKCSVEQIAELIGKSSKRKGKALEKAKKVYQGAKETIGLKDVSEADRYRLRSCLEEIKRCEGQMKEVEGQMEGLLEQIPATEILMSIRGVGMITTAVFLGELGDPKNFSNPKQIIKYAGYDPQENDSGKSVGRKRISKKGRWLLRKYLYFMGLRVLYRNTFFRKYYERKLKVKNCWGQLLKKKEAICAVVIKLIKVIFALLRDNRKFTSARPVAVAV

SEQ ID NO: 100645 - protein, 370 aa, unidentified
MSHVTSVGLDVHARSVAACAFNPYTGEVRQKTFGTDAQEIASWIKAFEDPRAVYESGPTGFALCRELRGLGVDCIVGAVSKMQKPAADKRRKNDRRDAAFLARLLATHNIIEVWIPPVEVEAARDLSRALDDARIDLQRARQRLSKFLLRRGYAFDEVDALGRKRGAWTRAFWRWVEGLRPQEAAAAHAFDHYVTCVRCAESDKRALEKLVLAEARSGRWKDRVGALASIKGIYVISAFSLAAEAGLFSRFPTAGAYASWVGITPSEHSSGEREARGGITKTGNGASRRVLVESSWHYMSCSPKPKAAPSGYEVPRHVKSRADDATARLAHRHESLRAAGKRTCVANVAVARELACWVWEIGRRAEGTLG

SEQ ID NO: 100646 - protein, 342 aa, unidentified
MEISTIGIDLSKTTFHLIGLSPRGEIVLRKKLSRKQLLIYTATRQPMLIGMEACAGAHFLARALRDQGHDARLMPAQYVKPYVKTNKNDYLDAEAIAEAVQRPTMRFVPIKNDEQLDLQALHRVRDRWVARRTAVMNQIRGFLLERGIAIRKGPSYLMTQLQIIFSDGNPSFSERLLHLVHELKHEWDELERKIEEANTELARIAKEDDACHRLMEVPGFGPIVSTALVAAIGNGVSFRKGRDLAAWLGLVPRQHSTGGKTRLLGISKLGNEYLRRMMLHGARSVVMQMERKPSALGEWLTSLSSRRHRNVTVVALANKMARIAWAILSKGTHYCAPAFVAA

SEQ ID NO: 100647 - protein, 289 aa, unidentified
MSIVYVGLDLGSSAFQQVAIKADGSIKVNRSFTTSEANLRAAFADQQGEIQVHLEAGELAPWAASIIAPLVTRVVCSHPQSNAWIAKDADKCDRIDAYKLAELLRLNRFKEVPYPPDQRRRNFKQLVQHYDELTSQQARLKTKLKARLRMQGVIVGGERVFSSSGRKPVLTEVKSAEVRTALKQLYAVLDQSVMSQTEARLLMLRAAQAFAEIRIFRTAPGVGPIGACRFSAYIHTPNRFSSKRKLWKYCRLSVSHRSRRGPRAGSPRGVLVTANLYVGHDWIAAAVGV

SEQ ID NO: 100648 - protein, 412 aa, unidentified
MEVLYSHCAGLDVHKDTVVACVRHMATGSVEREVRTFKTTTKDLLALSDWLAEHGCTHVAMEATGVYWKPVWHILSDGDFVLVLANAAHVKNVPGRKTDVNDATWLADLLAHGLIRGSFVPDEQTQEMRNLLRTRKQLVRECSRHIQRLQKTLEDANIKLDSVISDIMGLSGRAMIEALIAGESDPERLAQLAHRRIKAPPEALCEALRGRVTRHHRFLLRLHLKQIDAVNVAIDDIDQEVDAQIEPFRTAIQLLITIPGVSELSACVILAEIGHDMNRFPTAAHLISWAGLCPKNDESAGKRRSTRMRKGAPWLKTTLVQCARAAARKKASYFQAQYHRLRARRGDKKAIGAVAASILTTAYHMLKYGTLYEDLGPDYFDKRGKGKHVHRLINRLQNLGFAVQITPVEAAA

SEQ ID NO: 100649 - protein, 338 aa, unidentified
MNSVTILGIDIGKNSFHLHGQDAQGHQVLRKKLNRGQLLPLLAQIPPCKVAMESCGGSQFLAREITKLGHQVQLIAPQHVKAYVTGNKNDFIDAEAICEAASRPRTRSVQVKSVDQQVLSTVHKLRKSLVSRRTGVINQVHGFLLEFGVIFSAGYAALDRVPALMEEHNLPLRLRQAISRMLDDIRQLTSEIKALDIEIKQQVNGSDAGKRLQSIPGIGPLIASALVADVGDASMYKSSRDFSASLGLVPRQYSTGGQTTLLGISKRGDRYLRTLLMQGAQTLIYRIDKRNDALGVWARNLLARKPLNKVACALANKLARIVWALLTKGGTYNGYFTA

SEQ ID NO: 100650 - protein, 391 aa, unidentified
MSMYFVGIDISKYKHDCCIISAVDQQIVSKFTITNDKDGFEQLLISLNSLSNPEDIKIGFESTAHYALNLELFLENAHHSFMEVNPVLIKEYKKSTTLRRTKTDSVDCESIARWLITVEYKPHSKGFYHAYSLKSLTRLRDRLIRQRSFYLVKITNVLDHTFPEFKPFFNERLSKTALYLLENYGSAEKMARMNSASYDKLRCISRGKFSIQQFLRLKELAANTVGVNNSIFDLELNTLLTLYKSLSDEINTLETEIIKLIEEVHPHYMSIPGIGPISSAVIYAEYGDISNFSNPGQMLAFAGIEPGINDSGTESHGGRMVKHGSSQLRYVLLNACLPLIRFDLTFATYYEKKRAEGKKHRVAITHVAKKLIRVIYALERQDVDFNAQKLR

SEQ ID NO: 100651 - protein, 402 aa, unidentified
MNCVGIDVSKGKSMIAVMRPFGEVVISPFEVQHTASELSELAKLLKSLDGETRVVMESTGNYHTPVAWLLHDAGLYVSVVNAMLVHDYGNNSLRRAKTDKKDAVKLANYGLDRWLTLPRYVPEEDTRLLLKNCYRQYQQYSKVQTMLKNNLISLLDAVFPEVNRLFNSSPRADGSEKWVDFVSTFWHCQCVSTLPLKSFSARYLKWCRKHGYYFSQEKAFEIHSKAQSCIGVMPRNETTKLLVQQAIAQLKATSAALAALKQEMQSLAASLPEYPVVMEMFGVGSTLGPQLMAEIGDVRRFHSKKALVAFAGIDAPPCQSGQMDIHSRSISKRGSAALRRTLFLVMGIYLQSAPLDEPVYQFMDKKRSEGKPYKVYMMASANKFLRIYYASVTAYLNTLARI

SEQ ID NO: 100652 - protein, 340 aa, unidentified
MSLVLQPLLPFPDGCQGMSPHQQGRGTKMTEHCYGGIDVSKDRLDVMVLPDRKSFSVDNNAAGYSELVKRLRGLSIAAIGIEPSGGYERAVIRALLAADLSVRRINPNKLRQFGRARGVLAKNDRLDARLIAEYVAIMPTRVVQRDPATEQLAEVVTMRRQLCDEHVAVENQTAHLEDAMLRRLNKRRLARLAADILLLDRRMAQIIASNANLTRRYELLTSMQGVGPTLAFTLVALLPELGQMSRKQIAALVGLAPYDFDSGRLKGHRCIYGGRLPVRNVLYMAALSACRYNPALKVFYHRLAATNKKPKVIIVAVMRKMITTLNAMLRDNVAWQPKSA

SEQ ID NO: 100653 - protein, 344 aa, unidentified
MQIARIGLDLAKYVFEIHGVDAHGKTVVRKTLRRHAVSAFFANLPPCLIGMEASNGAHFWAKALSDLGHDVRLISPQFVTPYVKSNKNDRNDAEAICEAVGRPNMRFVPVKSAEQLAVQAVHRIRSRLVADRVRLVNQVRGLLGEHGIVVAKDIGNLRRALARIVGDDEDRVLNPLVRALMAELREELTELDARIAGYDRKIRELYRNSEICQRLGKVEGIGPVTATALVAAVGDRSSFKNGRQFAAWLGLVPKQRSSGGRARLFGISKRGDRYLRTLLIQGARAALGRVRDKRDPRSLWLGKMRQRRHPNVVAVALANKNARIAWSLLTSDTVYDASLSVGAA

SEQ ID NO: 100654 - protein, 373 aa, unidentified
MDVHLTSYTVYCVQFELFVEDKIFGHMKLEPTVASVKRYLAKMTVQLEKAGISAQFVCGYETGYSGCSLYNEMIAAGLECIILAPSTMKQRPKHAIKTDKRDAEHIAKCLAYGDYQSVYIPTAEDEQVRDYIRMRNDHHQALKKIKQQINAFCLRLGRHFAAGRSNWTQLHLDWLRQLPLDSLNREILGEYLITYDAHVTRLAVFDERINELAAGDRYRERVQQLSCFIGIKTHTSLSLLVETGDFARFAKAHYFASYLGLNPSEQSSGENIRRGGITKAGNAEMRRLLIEAAHSIGRGQIGYKSKALKARQRGNDSKVIAYADRANERLRRKFYRMIRQGKRYNVAITAVARELACFIWGMMTGHFNVRKAS

SEQ ID NO: 100655 - protein, 413 aa, unidentified
MKQIPSYYAATIGLDWADQKHDFCLQSSGSESLEYGLLQHSPEAIDEWALSLQKRFKNQPVAICIELKAGPVVYALLKYNFIVLFPVPPKALAKYREAFTQSGAKDDPTDAYLQLDYLLKHPSALKPLLPDDQETRILQRMVEDRRVLVSEKVRLTNRMTAALKSYYPQALQWFTDIDTQMFCDFIQQWSTLKKAKKARHLTLSNFFKSHRCVRNTVIEKRIKAIKSAMPLTEDDGVIIPFERMTCVLSLQLSVLLKTIHEYDLEIARRFKQHSDYEIFESLPGAGPVFGPRLLAAFGANRERFNSADEVNRLSGVAPVLERSGKKSWIHWRYSCPTFLRQTFVEWANQTIRYSFWAREFYDEKRASGKSHQATLRALAFKWIRIIFSCWKNKTVYDESAYLFALKKRKKAMN

SEQ ID NO: 100656 - protein, 352 aa, unidentified
MLIIGCDFHPGFQQVAIFDNETGEYQEKRLNHRQEAEQFYRSLAGQKVRVGMEACGHYPWFERLLAEMGVELWLGDAGKIRASVVRKQKTDRRDAEHLQVLLREDRFPRIWVPTLEERDTRQLLVHRHKQVQARTRTKNQLHALALSQGVQRKRKLWTEGGRAELEKLELLPYAAIRRERLLETLDRLETEITALNRQVEAEVKQRPAAMRLMTHPGVGPVTALAMVLTLGPAERFASGRKVGSYFGLIPSEHSSGGRQQLGHISKQGSSFLRFLLVEAGQSAARYDAELGRFYRRLAVRKHRALAKVAVARKLATRLYLMLRENWNYAQLCRAVVQVSPSHSVDGRQKPAA

SEQ ID NO: 100657 - protein, 343 aa, unidentified
METIYYIGLDVHKKTIAYCIKTVTGKLADQGVISADRKTLRQWVTDLPGPWLGAMEATIFTGWIYDFLKPHAVELKVAHPEMLKAITAAKKKNDRADAEKLADLLRVNLLPECVMMPEELRELRRILRYRNMVVRTASTMKNKMSGLLMEVGATYDKRRLHGKRYFKNLLERVEDVPESVKELLSLSRGGLDLFEGVQKKLIKTLRGNTLIRERVERLTSIAGVGEVLALTWVLEIGEVERFSNTRQAVSYCGLCSAQRESAGKEQRGPLSKKRNKHLQTMLIEAANLAPRWNPHLAAVHEKELLRGNKNQATIAVARKLVEYLLAVDRRGTPFTAEAPRLVA

SEQ ID NO: 100658 - protein, 339 aa, unidentified
MKTYAGIDLHSSNNYIVVIDENDKRLFEKRLPNTLEAIAPALERFKETLTGVVVESTYNWYWLVDGLKDIGYNIHLANPAAIQQYSGLKHADDKWDSFWLAHIFRLGILPEGYIYPKEFRAVRDLLRRRLLYVKQRTTHILSLQSMITRNLGLRMSGNAIKKLKAEDAEELFTDSYLVFTAQQNIKTIEFLKNIIKDIEKKVLKVAELAPEFIKLKTFPGIGKILGLTIMLEAGDIKRFSKVGAYSSYCRCVKSERISNGKKKGENNKKNGNKYLSWAYVEAANFAIRFSPEAQRFYQRKKAKRNGIVAIKALSNKIARASYYVMRDQVDYDVEYLFKK

SEQ ID NO: 100659 - protein, 369 aa, unidentified
MNNGSTVVGLDVHKATVVAAVLPPGADRTRETVTIENSPTAVERLVTRLAARGPVAFVYEAGPCGYEVQRQLTGLGQPCAVVAPALTPVRPGDRVKTDRRDAEKLARLYRAGELTPIRIPTRAEEAARDVVRVREDVLADRLRARHRLGKFLLRQGRVYRETKAWGVAHRAWLRSQRFEWPALQQTFAAYLRALEDVEAHLAVLDQQVVDLAQQAPYRLLVQALRCLKGIDTLSAVTLAVEAQEFRRFPRARAFMSYTGAVSMERSSGGTVRRGSITKAGNAHLRRILVEAAWSARHGTGVSPALTARRKGCPAEVVRIAKKAQARLHRTFWRLTSRTKPAQVAVVADARELAGFVWAIAHQVPEGGPA

SEQ ID NO: 100660 - protein, 347 aa, unidentified
MNRNQPQECAVFGIDIGKNLFHVVGLDCSGAIVQRVKFRRETLLQFFERAHRTLVGMEACPGSQWLARKLQTMGHSVRIIPAQFVKPYVKSNKNDIIDAAAIAEAATRPTMRFVGVKQADQVDLQMLHRVRSRLVSARTNLICQMRAYCLEHGVAMRQGAGVFKVDICRVMDDLDNDLTPMARSVLRDLHDDFRRLEARIKQVSDDIEKIADTDERARRLMTIPGIGPLGATAILSAIGDPTRFSKARDVAAWLGLVPRQYSTGGKQNLLSISKRGNNYLRRLIIHGARSCMLHLDRGKDRLGVWIDTLRLRMHVNKVTVALAAKLARIVWVVLTKPGATYMRQVAA

SEQ ID NO: 100661 - protein, 360 aa, unidentified
MQISDVSEGTTTIGIDVSDKYSRLCVLDGTGTVVEEGRVATTGAAFRRRFSTVPRARVALEAGAHSHWISRLLAEAGHEVIVANPRRLRLIYENDKKSDRVDAEWLARVARLDATLLAPIRHRESPSQAALAVLRARDALVRSRTQLVNHVRGTVKIAGVRLPQCSTQSFVKHVTPTLPANLSVLLAPVLAVIDTLSREIRGYDRQIAAMADASYPETKRLRQVPGVGPVTALTYILTLDDPRRFASSRAVGSYLGLRPRQQDSGGDEPQLPITKAGDGAVRRLLVGCAHYILGPFGPDCDLRRWGLALAQRGGKSAKKRAVVAVARKLAVLLHRLWVTGATYEPLRKGAAAPSGALEMT

SEQ ID NO: 100662 - protein, 486 aa, unidentified
MDDAATLWMKDPKSENDFLINAVELDSEAVFGRLEEPLIVAPYLEARRGNSHVERRPVGDLSGKTSDPFSGGTAMEVVYPRCSGLDIHKRFVVACLSVIEKGQRHRETRQFSTMTNEILVLKEWLKESRCTHVAMESTGVYWKPVFHLLEGDFEIVLVNAQHMKAVPGRKTDVKDAEWLADLLQHGLLKASFIPSSEQQAVRDLTRTRMRLIQERTRLINRIQKVLEDANIKLASVVSDIMGVTGQAILTALVAGQEDPERLAHLARGVLIKKQDQLQAALQGKLTAHHRMLLEELLQLITTLDRSIARFDREIAERLRRFDALIKRIDEVTGLSRRSIEVLLGELGWDMSHFPDAAHAASWVGICPGNHETGGKQLSGRTRQGNRWAKMVLIQAAHAAGHTQTYLGEQYRRISARRGAKKAAMAVGHSILVIFYHMVKTGESYHEKGVNYFTIVNKEKIQQRLVRQLERLGNTVVLQPQTQTTLA

SEQ ID NO: 100663 - protein, 367 aa, unidentified
MKQVTTFVGIDAHKKDLFIAMLIGDQSTPVTWQLANEPNAVRRLVRKLEREAPGPVRACYEAGPGGYALQRQMTTTRVSCQVIAPALVPRKPGERVKTNRRDARKLVELLRAGLLTEVRPPTPEEEAVRDLCRARDDARTDLQRCRHRLGKLLLRRGLHYSGRNWTRAHRQWMASLTWTHAAERVVVEDYLLAIDQVEARLRELDAHLTETAQTDPYREPVAWLRCFRGIDTLTAIVILAELHDFRRFQSPRAFMAYLGLVPGEDSSGEKHRRGRITRTGNTLVRRLLVETAWHYQHRPTVGIALTRRRKGQPGRVIAIADKAQQRLCRRFRKLAAEHKPAPKIAVAIARELAGFLWAALQPPVVAN

SEQ ID NO: 100664 - protein, 361 aa, unidentified
MTESSDYESVQVFIGVDVGKDTHHAVAINRSGKRLFDKALPNDENKLRSLISDLKQHGQILLVVDQPATIGALPVAVARSEGVLVGYLPGLAMRRIADLHAGEAKTDARDAAIIAEAARTLPHALRTLKLADEQIAELSMLCGFDDDLAAQTTQASNRIRGLLTQIHPALERVLGPRLDHPAVLDLLQRYPSPEKLASLGEKKLAAQLCKLAPRLGKRLAADIAQALAEQTVVVPGTNAAAVVLPRLALQLITLRKQRDEVALEVEQRVLAHPLYPVLTSMPGVGVRTAARLLTEVACRAFASAAHLAAYAGLAPVTRRSGSSIRGEHPSRRGNKALKRALFLSAFAALRDPLSGLTTPAK

SEQ ID NO: 100665 - protein, 379 aa, unidentified
MDHATTGTLAETVLHGALELSKDSWLLALQFSDRAQPSLYPIRGGDTEGLMTKLMAARDRWAKVSGKAPSIVLCYEAGYDAFWLARFLKARGIECLVVDAASVQVNRRARRAKTDRLDVRMLLRALIAWDHGERHVWSVVRVPSVDEEDLRRSHRERDRLVRERTAHINRIKGLLFGQGIRGINVKSKYKTLQIDKLVTGEGRPLPPRLASEITREIARLALIQEQIVALERERDQAPTPCKVTEKKRVQLMCLTGIGPAIAAVMTREVYYRQFDNRRQVAGFLGLATSPHDSGDVERSQGISRAGRGQVRGAIIQAAWLWLKHQPKSAITRWFVQRTAGHSGRIRRIMIVAVARKLAIALWRFLEQGLVPQGAMLANR

SEQ ID NO: 100666 - protein, 327 aa, unidentified
MTASVSSHNHIFIGIDVGGASFEAAWHRGGCTQYQNRPDAIAAFVARLSAEKQIIRIAVEPTGGYEKRLVKALRGAGLPVEMVHTSRFAAYRTLIGAKAKSDTSDARLLAAYAAAPEEVRGRKAGHVVLPQDDVREQLAELAARRDQLKHMIHAETCRLSTVRSRSIRDDITAHLQALRQADCKTYDAMMQLVRQRDELRNAKRLLQTIKGIGDKTALTSIAAVPELGLISNKAAAALVGVAPFVRQSGTMRAPAHIRGGRAAVRNAFYMAAVTASRHNPVLAPFYARLIAAGKPVKVALVAVMRRLVVFANAVLRSGQPWKGAQII

SEQ ID NO: 100667 - protein, 339 aa, unidentified
MAILYVGIDLAKNVFAIHGVDEHGKPALVRPSVPRARLHQLVAALPPCTIGMEACSGAHHWARLFAKQGHTVRLMAPKFVAPYRMSGKRGKNDAADARAICEAVQRPNMRFVPVKSQDEQARLCVHRVRQGLVEQRTATINRIRGLLSEFGIVLAQKAATVRREAAAHLEDLPGWANTAVGDSLSELHRLDERITEYDRHVVHMAREDERSRALMQLSGIGSTTASALVSTIGNARDFKNGRQLAAWLGLVPGQYSSGGKTRLGGITKAGDGYLRTLLVLGAKAVLAAARNKHDRLSRWAMALEVRRGYWKAVIAIAAKNARMAWAVLAKGDEFKPLVA

SEQ ID NO: 100668 - protein, 389 aa, unidentified
MFYLGIDIGKNTHIASLIDDKKKVIFKAFSFSNSVDGAKSLISKIESYKDSLEIGLEATGHYWLSLFSFLYDEDFTVRVINPIQTDGWRNGIEIRKRKTDIIDSLLIADLLRYGDFIETSLSDENFMSLRNLSRFRSYLVSSIGDLKRKTIAVLDQVFPEYASSFSSVFGKTSKEILKVCSSVEDFESITSEKLSEVLENVSRKKFAMKKINELQEKASNSFGVTFCMDSFSLQIKLLIQQIQFIESQVETVEAEIEELMIKIDSPITTIPGIGPVTGATILGEIGDISKFSNASKVVAFAGLDASVSQSGNYEADSMRMSKRGSPYLRRALFQSALIAEFNDPVFSDYYQKKRNQGKHHLVATNAVARKLVHTIFAVLTKNEPYKVQV

SEQ ID NO: 100669 - protein, 411 aa, unidentified
MDKLFVGLDVSKNDYKVCVLDAEGERVGKVFALKNNADDSEILVERIVEAAKIHETTKVFIGYESTSVYGWHLQYFLADSPTLQAFSPTIICFNPSVIENHKKSIGDLPKTDRIDAFAIADRLRIGRLPESTPVDFRYLALQRLTRHRFHIVENIVREKNYYLSNLFLKCSGLCQSGVFSNNFGAAATSLVDDIDNFEEIANMPLEDLVEWLVEKGREHFEFPEETAKKLQSAVKSSYRLNAAVDHSLNLVLRSCLANIKSLEQQKKAVEKSIREQVAFFEREYTCLKSVKGIGDVIAAGLIAEIAGISRFENDNALAKFAGIYWNAHQSADFSADESHLRRRGNKYLRYYFVLAADQLRKYAPEYNEFYSRKFKESKTHHHKRALILTSRKAIRLVFALLHDNKLYSPAH

SEQ ID NO: 100670 - protein, 405 aa, unidentified
MSRVVIGMDPHKRSATIEIMAGDESILGGGRYATDAAGFAAMFARVRPWPERVWAVEGCQGIGRHLASRLLADGEQVIDVPAKLSARMRVFAAGQGRKTDATDAHSVALAATRRAGLRPVAGDQQLAVLRILADRRRALGEHHTRMVCQLHHLLLELIPGGAKKDLSAAQAKALLAKVRPRDLAGKARRRVAAELISDLERLYQRKKAANKELSELLAATGSTLTSLHGIGPSGAARLLVEVTDIDRFPSKAHFASWNGTAPIDASSGDQVRHRLSRAGNRQVNRALHIMAVVQLRTPTEGRAYYDRKVAAGKTPMEAMRALKRRLPRHRLPPDDHRRQGSSNGPGEDTWGRLLAPARPACTPAPALRRSHFPDPPLTTLRQQSQPIPLVAPRAFRYRRAGKRPA

SEQ ID NO: 100671 - protein, 357 aa, unidentified
MTWVGLDVHARSTHGAAIDSLSGELSRVRFGPGAEPVVAWLRELPGPVRAAYEAGPTGFALARVAIDAGIDVRVVAPSKTPRASGDRVKTDRKDAELLARLLLAGQLTPVLVPPDWLEAIRHLARTREYVRRDLGRARHRVGKLLLLHGRVYPGVTTWNRAHRRWLAGQSFKHAPTELAFIDQLAAIDGLIARRDALDERLSRLAQDPRLWPTVARLRCFRGIDTLTALIVHLELGGDWQRFGSPRRLSSWLGLTPSLEQSGQAMTQGSISKTGSSIARRLLVESALHYLRRPTIGVSLQNRQAGQPDHVLQIAWRAQHRLHRVHHRLRERGKPANVATIAAARELAGFLWAAATAP

SEQ ID NO: 100672 - protein, 368 aa, unidentified
MSNHPHYKVGCDAHKHYSLFSVLDAGGHLIQRVRINHAPGAIRAFLSQFPPGTPVALETVGNWYWIVDEIEEAGCLPLLAHAAKAKSMMGHVHKTDKLDAGGLATLLHLGTLPAVWIPPGDLRDERELPRTRMAFSKVRTMLKNRIHSTLAKYALSLDTHSDIFTAKWRPQLLQVLEHLPAETRRCVQQELELLDLLQTHIHRLEARILERVELTPAIQLLMSIPGPAEILSIVIDRELGSIQRFPAPKHLASYSGLVPRVRASGGKVHYGRMIKQANNYLKWAFIEAANVIVRQRHHANWRGKYVVRLYERTRQRKGHAVAVGATARYLAEAAFWVLKKGEPYREPVPRRPAGRTSPASPKQGQARA

SEQ ID NO: 100673 - protein, 321 aa, unidentified
MHKYNEIFGVDISKDVFDIMNSKGDYDQFSNDLNGFKKFTKKLTKQTLVVMEATGYYHYCLAQYLYQQGYLVSVVNPLSVKRFIQMKLSKIKTDKSDAKAICEYGSFHEVPLYTAKDESQAECLQLIRLIDIYLKQSTAIKNKLHGETTLGIPSKVVYSSLNRSLKSIKKEISLLEDRLNDLVKDYQQKQLTLLKSIPGMGSKTAIMLIVMTDGFNKFENSKQLCSYAGITPTIRHSGSSVRGKSRISKMGNQKMRNLLFLCSFSACKYNKGCRAIYERIVSKGKSKKLALIAVSNKLLKQAFAIAKSGLPYDDNFVSVLK

SEQ ID NO: 100674 - protein, 320 aa, unidentified
MMTQNNLIVVGIDVAKDKVDACIRSLSLRLTVPNTESGWRQLIGWFRRHGGGKAVMEASGGYERGLAKVLRQAGIEAWIVDPKLVRSFARSARRLAKNDTIDAEMIAWFAETFDQAPGQPYDAAREELQKLVRARQGLLDFQTRVQNRDEHEVPMQVQKMHARMLKKVAGEILKLEAAIVAMIKATPRFAELAEIIESVPGLARTTAANLIAGIPELGQVSNKVAPALLGAAPYDDDSGRRRGPRHIKGGRRKVRNAFYMPCLGAATQHNAVIKEFYQRLLAKGKAKKVALIACMRKLIVILNTMIARGEKWDASRYALS

SEQ ID NO: 100675 - protein, 350 aa, unidentified
MEFFVGLDVSLDETHICVVDEGGRIVKETRAASEPKAIAKAIRHQGRRIERVGLEAGNLSQWLHEGLVREGFSVSVMEARHVRAAFAAMRVKTDRHDARGIAQLVRLGWFKRVHVKSLTAQETRVLLTARTFLIEKVTATENSLRAALRTFGLKMGSVTRKTWEARARELADGNPLLEGIVDAMLRVRALLLDELASLHGQLMALAKSDPVTRLLMTTPGVGVIVALTFRSAVDDPDRFPRSRDVGAWAGLTPRRWQSGKTDIAGRITKAGDPRVRVMLFEAAASILGRARVMSPLKSWGLRIAKRTSMKKAIVAVSRKLATILLAMWKSGTAYWAAGRPPASAQDLAAA

SEQ ID NO: 100676 - protein, 359 aa, unidentified
MVKNSMLIIGLDLGDRCSYLTILDQDGELIEESRLPTTKASLQGKFSNLQPCRVAMEVGAHSRWASQLLKDLGHDVLVANARKLRAIYHNPRKGDRADAETLARLARLDPALLSPIHHRSPQAQADLAVLRSRDAVVRSRTLLINHARDIVKASGSRLPSCSADSFAHKVAPDIPESLRPALAPILDTIASLTQQIRAYDRKIEELCSERYLETKLLREISGVGPLTSLAFILTLENPDRFRRSREVGPTLGLVPRRDQSGDKDPQLRITKTGDPYLRRLLVGSAQYILRPFGPDCDLRRWGLRLAERGGKNAKKRAVLAVARKLAVLLHRLWKTGEIYDPSYHARKHDQALEAIAAVA

SEQ ID NO: 100677 - protein, 343 aa, unidentified
MSQIKRIGIDTSKAVFTLHGVDQTGQPVLRTNLRRAQMIPFFKNLPPTEIAMEACASSHHWARLLAALGHTVRLLPPQYVKPFVKRGKNDRNDAEAICEAAGRPGMRFVPVKSTAQQAEGMVLKVRETLVCQRTQLVNALRGHAAEFGVIAAKGIRQIPPLLEAIAAETAIPSDAREMLALFGQEIDHLDSRLKAIEVKLIAMHKANPISRLLATIPGIGPIIALTLAIEVDPAAFKSGRHLAAWLGLAPKEHSTAGKQRMGGISRAGNERLRQLLVTGATAVIKVATRPGNKLATDWLLKLLQRRPRKLAAVALANKMARTAWAMMTSGEAYRHPPVAAVSA

SEQ ID NO: 100678 - protein, 413 aa, unidentified
MPSVSFLVDIFKKVSFESREMIKINSHINSIASLTNPKENTMLYTGIDLHRRVIALCTVNDSGTVIARTRIKTDPQAILTYFHQWSEPHKAVVECTTGWYWFCDLLHSAGIEIILAHAKYLKAISYAKVKTDAVDAHTLAQLLRMGFIPEAHQLPMEYRPLRDLLRQRMVMEHKRTNIIQRVASILAQFNIAPVPVSPYKPAFASFLESLSLPEEYRMTLSFYHQQCLQTTDHRKELEKYFKSRLRKTPTVQLLMSIPGIGDISGSIIAMETGDIHRFADDKHYCSYCRLVPGAKDSGGKYAHRSGSKDGNQYLKYAFTEVAIKAMMYYPEIKQFADSVAKRSNKTIARTVVAKELARCAYFVLTRQQEFKSFKGIEINKLLSLRLISLRLSDWPRARKPVRLTGDPITSPSA

SEQ ID NO: 100679 - protein, 417 aa, unidentified
MAMKIVRFNCCGMDVHKNLVVATIGITDRKTNVTEYFQRSFSTLNSDLYRLKDWLRSHHCSDVCMESTGKYWIPIFNVLEDEINVHLTHPKYVKAIKGKKTDKKDSKWICDLFKHDLIKFSFIPPKEIREPREIARYRYKLVCMRSSERNRYQNCMTVSNVGLASVVSDPFGKTASNIMKEVMKSNVIDDDKILKLVHKNCKNKDKILDSLHGYRIESDQRFKMEKSLDHMEYLDQLIDSCEVELIKRAYPFRRSFQHITQIKGISVLSAILIISEIGIDMSQFGSDKQLVSWAGLSPANNESAGKKKSVRISKAGQYLKPLLVQCALSAIKDKTSYFGRKYSNIKKRRGHKKAIIAIARMMLVSIYHMILTGEEFQPTDHESLMSPKSNTDQSLTVEKALNFLKRSGIDISSILVN

SEQ ID NO: 100680 - protein, 465 aa, unidentified
MSNYFLGLDISKGYSDFVMLNHDKRPVMKNFQLDDTAKGHNALTAFLESFLNSHPNAQIYTGLESTGGYENNWFNHLCRLKDTMPIQVARLNPARVTSNSKASAKNNKTDKISASDVAEYLISHPEKVNYEVADSYPMLRRQWNFIQLNNKVKTQLLGHLESLLYSAMPEILNFCRQGVPEWLLKTLQRYPTYDALLKADVKQLTAIPYVSDAKARRLLKLVKEGIGESNSVSGQIISSIANQIIELNLLIKLHKKQLEQNYQEAEREVDLIRTFNGIGIYSAVGLLLNIPGGITSFQTVKKLSSFWGIHPIYKESGDGSWGFHMSKAGRSEPRAILYMVAWSAIQSNPIIKELYAKCKAKGMASNAALGVCMHKVQRIIYGMLKNNTPFDPETDRDNQRKSQQNSKPKSHDKKRHLQPFDQDAPISKRQHKKRKEQTQSQGDNLAEYGISEPVPHLSVETDAFS

SEQ ID NO: 100681 - protein, 370 aa, unidentified
MEITTIGVDLAKTVFQVHGMNAHGKTVVRKRLSRDKFLTFFANLPPCLVAMEACGSSNFWARHLQALGHDARLISPQFVKPYVKTNKNDLNDAEAICEAATRPQMRFVPMKSIEQQDIQAVHRVRQLLVQQRTALVNQARGLLREYGVFIPAGIRQFRHAMPGVLEDAENELTDLTRQLMADLYQCLLELDQQIADYERRIQGLSRERPVCQRMEKVEGVGVLTATALMATVGDAKVFKNGRQMSAWLGLVPRQHSTVFQGLEMRVDDSRNSQWVDIAQIVVHEDIAEAANFPPGNFRAAGLQRLRQVLGSLRQGLQIAQRCIVQDLVLSQITSRLDPSNLGDGIQNMLRIGMPGLVHKSTASRMTWSRI

SEQ ID NO: 100682 - protein, 348 aa, unidentified
MIAIGADVHKQQCTLAVQRPDGKLSMLPSMDNTRENWLDLLTQLPPEAQIALEVSTSGHFVMSVLEEAGWRDRAHWVHTAGIDSLRKQKTDRLDAQRLARKLSVMEQDPLPEAWFPPRPIRELRLRARQRCWVAVLRTRVKNRVRSLLQMSGRCAGTNPFTASGRTWLKEQKLSEATRESVEQLLRFHDFLTTEREKSETSLRGMEKDFPEIARLQTLPGLGHILSAVIWSEIGELKRFDSPRALVNYTGLAPSLYESGERSVRGGITRQGPVWLRWALITAVNAATRGDNAFARRYRRLRRHKLPNVAKTAVARSIARCAYGVLKHGVDYQEQRWGRKAGIEMEQEA

SEQ ID NO: 100683 - protein, 333 aa, unidentified
MTYYVALDVGLRTVSLCIVDEAGGVKLEKSLPSEIEDIVACLRDFGEEIACVGLEAGTLTQWLTYGLRAAGFKPVVLEARHVQAALAAMRNKTDRNDARGIAQILRTGWYRPVHVKSIESHYIRTLLAARKALLRKCIDLENEVRGLLKVFGIKLMPGLRHGAFDRAVREPIEANGALRHALVPLLDVRLDIYRAFLEMDRRVKALAQADQICRLFMTAPGVGYIAALTFKSAVDDPSRFKRSKTVAAHFGLTPRRYQSGERDNPGRISKAGDTEVRSALYAAANIIMTRSTKPSTLKTWGSRLARSKGRKRALVAVARKLAVISSHHVDRRH

SEQ ID NO: 100684 - protein, 387 aa, unidentified
MARKRTLSTLDTSIAYEAVGLDLAKEDAAIAAFGPDHEGPYLIDRMPYDKLYELLADMAPTLVAMEPCSGAHQICEQIEALGHEVLMISGRHVQAWVKDHCNGQKTDLNDAFAILNLAYDRWLTPIRGKTREECRLLALQASYRQLKGQRTKTLVHVKATLHAWGFPIRTGSFNQKVLHELIDANREAFGDEMAETLHLMINRVRDLDHDIATVLKLLTEATKRDPRASLLRSIPGFGILTTSRWCAVIGDIARFDSPKQTMAFVGLVPNNRITGHHTETSSGREARGQGRMSKRGDKMLRSLCILGAASLCLMVRNDRLPDCPFVASIKERLASPRPWFKVLVYVAAKLVRIATALLKYGETFSYEKAGISKAVLKQWELEQAKAA

SEQ ID NO: 100685 - protein, 369 aa, unidentified
MIIIGADYHPGFQQIAFVDTETGELQERRLQHREEAEKFYRDLAAQGVRVRVGMEASGHARWFERLLAELNFELWMGDAAEIRTKRVRKQKTDRQDAQLLLRLLLEDRFPRIWVPSWGNRDLRQLLWHRHRMVQARTRIMNQLQAVALNEGLRCKKRLWGEAGREQLESFPLGPWASRRRRDLLELLDRLNPTIAELSQAIEQEVEKSPEAQRLMTHPGVGPLTALAFVLIIGTAERFRSGKPIASYLGLVPAEESSGDRRRLGHITKQGNSLLRFLLVEAAQVTVRSDPEWRSRYFHLAMRRGRKIAKVAMARRLAIRLYWMWRKGWDYEQLTKFGSHAGQPGNRVGVPLNTELTIGHPAPLMRGSSN

SEQ ID NO: 100686 - protein, 399 aa, unidentified
MKSPCIAIDVAKGSSYFQGFSEEGVGIGRARKIGHDLEGYDDLLDLGNTIQEQYSEVVYIFEATGIYHRSLQQFLEIQQQKYIILNPLEAAKIRKSSLRSTKTDKKDCESIAKAYFMRNYRYYEKQDKTYETLKTMNRHYNFLIDQLRVMKVNFRNYLDIVFPRFDELFDNPYQIVPIIILKKYSHPDILNKHKIETIAKYLTKNTTHRENYNLQQATKLKEYSNRTLSGCEKDSIEVDILKSLISLIGLKQGEIAKHLKRMKNTSKRNSLYLQLLTIPGIGENLAVRITAELGDLSRFSNKRQLVAYAGIDPIVYQSGKMTGDHLHITKKGNKNLRTLLYLAVSSNVRTGKQNSILDFYHKKRQQDKPLAYKVALIACANKLLRIIYSMHMSGELFHD

SEQ ID NO: 100687 - protein, 367 aa, unidentified
MKKDNTVSKSTGKKTGASGRLIIGLDLGDRSSRYCILDEQGEVISEGSVTTTKKGFAQVFGSKPRSRMALEVGTHSPWVSRYLADLGHEVIVANARRVRLITDSSRKDDRLDAKTLGRLARIDPELLSPIRHRSQQAQADLMVIRARAALVEARTMLVNSARGLTKSYGERLPSCGTGQVGENLAEPLSAPLQGALKPLLAVVASLSERIREYDGQIEQIGEQRYPETELLKQVHGVGTLTALTYVLTVEDPHRFRRSRDAGAYFGLRPRRRESGASRPQLRITKEGDAYVRKLLVQCAHHIVGPFGQDSDLRRWGLELALRGGKNAKKRALVAVARKLAVILHKLWVSGEVYEPLHVRKDGKAAAA

SEQ ID NO: 100688 - protein, 354 aa, unidentified
MTRLADPSRGVVGGVDTHKEAHVIAVIDEVGHILGTAEFATTLAGHKRALRWLRDHGEVLRVGIEGTGSYGSGLARYLSDQGVTIVEVDRPNRRVRRRRGKSDPVDAEAAARAALSGEAMGCPKAQSGKVEMIRALRVARRSAVKARTQAANQIHALVSTAPDGLRAELRRLPTKALVERASRFRVAGLSTPAEATKLALAELARRHIALTSEIERLECHLKTLVADVAPSLVAHYGISTDTAGALLVAAGDNPQRLGSDRAFAALCGVSPVECSSGQLQRHRVNRGGNREANSALWRIVLVRMAGDPRTREYVDKKRREGRSTKEAIRCLKRYVAREVYCELMRVPELTTLHQ

SEQ ID NO: 100689 - protein, 388 aa, unidentified
MIYVGIDIAKLNHFATAVSSDSEILIEPFKFTNDADGFQLLVSKLESFDKNSIIIGLESTAHYGDNLVRYLVAEFYQVCVLNPIKTCQMRKNNVRKTKTDKVDTFVIAKTLMMQDDLRFITFFDLDMIDLKALGRFRQKTIKQRTRLKIQLTTYVDQVFPKIQYFFKSGLHQHAVYALLKEAPSPKEIASMHMTHLANLLKVNSHGHFTKEQAKELRVLAQKSVGANDSAISIQITQTIQQIELLDSQSEKIEAEMTDIMRFNDSVIMTIPGIGYINGGMILGEIGDIHRFSNPNKLLAFAGLDPSVYQSGDFQAKTTRMSKRGSRVLRYALVNAAWNVVRNNATFEAYYNAKRAEGRSHYNALGHCAGKLVRVIWKMLTDEVDFNLE

SEQ ID NO: 100690 - protein, 326 aa, unidentified
MKKVFFVGADVSKEKVDFCFLTSVENVKPKFVSLPNDTDTIKAYFQSFIKDDIFITFEYTNNYHLPLQSALSDLKIKYSALSPAKTSYFLKHLTLQKSDITDAYGLAIYCKIFKADLNPSTHNREYNLIKSYNSTILLLSKIKVQLRNFKKSQEFVADTELSEIIKSLTVQVQKTQEKIKLIAFEILKSFVPNCEQIIKQNKGFGIDLALNLFPQLHFNRAKSEKQFISFLGLSPRIYESGSSVHKSPKINKRGSSAIRRILFLNAFSCVRFNDKFKKRYDHLISKGKSKKVALVAVMCAIVRYLKSLFPLSESYLNENLYNGHTS

SEQ ID NO: 100691 - protein, 372 aa, unidentified
MEERSKFYVGLDVHKDSISVAAAEPGRGGARLIGKVTHDVNKLLKVLAKIGTAEQLHIVYEAGPTGFGLQRALSERGYLCEIIAPSQIPRRPGDRVKTDGRDCIQLAECSRAGQLSAVWIPDPSDEAIRDLSRAREDAVNSRVQARHQLKGFLLRHDIRYTGRTSWSIAFYRWLATLNFGAGATQTAFTEYWQAVESADERVERLTKALQSSITGWRFEPVVGALQALRGVAAITAIGLVAEIGDLARFSHPRKLMGYLGLVPSERSSGERISRGSITKTGNAHARRLLTEAAWNYRFKARISREALARQEALSESIRTMAWKAQLRLTQRFAALRGRGVQVNKACVAVARELAGFIWAIGLQAQRERGQAS

SEQ ID NO: 100692 - protein, 338 aa, unidentified
MRLYCGIDLHSNNAYTVVLDEQDQVVYRRRLRNELELILEELAPFAEQLSGIVVESTYNWYWLIDGLMDAGYRLHLANPGAMQQYSGLKFADDSSDARWLAHMLRIGLLPEGYIYPREQRALRDLLRKRGRLVQLRTANLLSLKNLVHRNTGQRLAVAALRTVEFDELDSRHPDPNRTLALDSTRRVVECFDSEIHRLEQEIQRQLKPDPLLKLLKTVAGVGDILGPMIRLETGEIDRFPSAGHYVSYCRAVGSQRLSNGKSKGKGNRKNGNPHLAWAYLQAAHYAIRYRKSVRRFYERKQARTHRVVALKAVAHKLARASYYVMRNQVPFKIDLAFG

SEQ ID NO: 100693 - protein, 352 aa, unidentified
MLVTIGADSHKATHTVVAVDEVGRVLGEKQVRATSEGHLVLVQWAARFDQVVFALEDCRHLTRRLEADLLKAGHRVVRVPTRLMAQARRSAREPGKSDPIDAEAVAQAALRYPDLPRAELDGPAREVKLLSDHRRDLVGQRTRIAAQVRWHLHELDPGLDIPSRGMRRRSVVGQLQSRLAGASGVVARITRELLARCEELNTQINGLDAELRVLVRAQAPALLAIPGCGVLSAAVIIGETAGVHRFSSRARFARFTGTAPVPVWSGASAGKVRLNRGGNRDMNCALHTIAITQARQGVGPGSSYIAKQTGRGKDTTAALRLLRRRLSDTVFTALRTDQHVIARPATTLAEAA

SEQ ID NO: 100694 - protein, 361 aa, unidentified
MRGDFSLLYFIIIIGMKKVIKQVLGIDVAQKELVICLGKMSEGLQVELYARNSFANNEAGFKLMLQWVKKLTEAAVPLSYVMEATGVYHEQLAYFLTGLGLDVFIVMPNKINHYIRSLNVKTVTDKTAAEAIARFGLGRAMDKWQQPSPLLKKIKQLTRERSQIIEERSVAKSQLHAQGAGYEPNKSSLRRVKQRIALLDKQVLEITAEITALVKSEEKVASAVKLLSSITGISTLTAAIVLAETNGFDLIKNRKQLASYAGLDVTEKQSGTSVKGKPRISKKGNIFIRKAMYMPALSAIRCDERWKTIYDRLVSRHGIKMKAIVAVQRKLLELMLTLYKTGKEYDKYYLENDASQSKTAA

SEQ ID NO: 100695 - protein, 427 aa, unidentified
MTHTDQQQPEFAGFVAIDWADEKHAGAICSANGKVTIFELEQSAEAIDRWASALRERFDGRPIAICLEQSKGALIYALMKYEFFTLYPINPKQLKRFRESLAPSGAKDDPSDARFLLELLTKHRDRLHAWHPDNADTRLIGQLAEDRRTLVGQRTRLTNALKSRLKQYFPLALEVLGELDTELAAAFLLRWSSLEALKQEEPERVAEFYRMMHCNHPKLIQERLERIAQSVPLVTDPAITASGQMLVVSLASQLQALINPLKQYNLKLAELMEQHPDAPIFKSFPGAGDALAPRILAAFGSDRERLSRPDEMQRLSGIAPVTVQSGKSLHVHRRWACNKFLRQTFHEFALHSLAKCAWAEAYYDMMCKERGLKHQAAVRALAFKWIRILYRCWKTSTLYSEAHYFQSLYKRQSPLLKYMGSQSPQQT

SEQ ID NO: 100696 - protein, 432 aa, unidentified
MANVRFGSKADILGGLRDVRFTPERCYEASGESMTLSAPVINKRSRPMPKPNDLSRSFTAFEQDSTLIAVIEMSLTSWLIAGILPGIERHPLKKLDVDEEGLLQLLHRWRDEAINAGREISRIVLAFEAGRDGFWLARWLRARNIEAYVIHPNSVAVSREHRRAKTDRLDTELLKRAFLGWLRGESDHCSMAAIPTLEEEDARRPNRERENLLGERTRIVNRMKACLVRFGVRNFKPTLRKAPERLKTLRTPEGGPLPPNSFAELRRDMARLRFVMDQIREIEEARLQRLEHSPNEGLHPMVRLLARVIGVGIETADMLVHEILSRNLRDQRAVARYAGLTGSADESGKRRREKGLARAGNARVRRGMIQLAWRFLMFQKESALVQWYRSVTNEVRGARKIMIVALARKLLIALWRLVRTGEVPQGVALRTA

SEQ ID NO: 100697 - protein, 412 aa, unidentified
MELLHSRVAALDIGKRSLVACVCTPAKQCEAERRQELRTFATTTPGLLELRDWLVAEGVTCVAMESTSGYWRGAFYLLEDAVGDVMLVNPAHARNVPGRRTDALDAAWLCELAEHGLRRASFVPPRPVRELRDLTRYRASLIAERTREAQRLEKELEDARIKISAVVSDLLGVSGRRILHALVDGQCDPRELAQLAKGRMRARIPELAEALDGDFRDHHAFLVRMHLRRIDEITAAIDELSQRIEEAMGAFVRERELLETIPGVGQHTAEMIIAEIGADMGRFPSSGNLASWAGTTPGHYTSAGISTSYRTRPGSRWLAAALGLAAICAGRSENTYLGARYRRLLPRLGNDRAIVALQHDILVAAWHMLSRDEPYRDLGADHHERLDPERTRRNAVAQLQRLGYRISLVPAA

SEQ ID NO: 100698 - protein, 340 aa, unidentified
MEPFYGGIDLHAKNGVACAIDERGVAVKEKKLENNLVRVIEFFEPFGKRIQIAIESTVNWYWIVDGLMDAGYEVKLAHPLGLKLITDAKVKTDRRDAYKLANLLRLNALPEAYIYPKETRPLRDLLRRRSDLVVERAKCYSSLRMQFLQYNTNTMSQSALKRFADEDLFVMDLPEVVKGYGSLTLRRIELLGQQIEAIENHLESITIADPRFELLTKITGIGRVLGLTIYYEIGDISRFENVRHFSSYCRLVPGMHQSSDKVKRGKGSKQGNVYLKWAFTQAAIHMLTYDKDIRAYRDRRAAKNGGKNMKANAILAHKLGMAVFNVLKEGVAFKKELLFA

SEQ ID NO: 100699 - protein, 382 aa, unidentified
MQASTVDTPTAVHCGTIFVSIELSQKTWLVTLHSPDRDRISRRNLEGGDHAGLLGLLEDIRARAALKLGAVPKVVSCYEAGYDGFWLHRLLTAAGITNFVFDPASIAVDQRARRAKTDRIDGELLLRTLMAHLRGEPRVVRIVRIPSVEQEDARRASRERDRLVKEQTAHTNRIKALLRLLGMAVGHPRRGDWLGWLEQQRDRQQRPVPPHLLAEVKREHARLMLVREQLAALEAAQAAQAPAVPAPMAERRDALQRLKALGPAFTATLVNELFYKDFRNRREVASYCGLTPSPWRSGGIDREQGISKSGNRRARQKAVELAWLWLRHQPDSALSCWFRARTASAGKRAKRIAIVALARKLIVALWRYLTTGLVPEQATMKA

SEQ ID NO: 100700 - protein, 396 aa, unidentified
MFYLGIDIAKTNHVASLLDDEGKTRIRAIKFTNSTEGFSKLLENIYTVTSDLSEILVSMEATGSYWLSLYSALLDKQFHISVFNPYQIKSYRGAYNNRKQKNDIIDSIIIADYLRVFGSSSTALPTEDILSLRQLTRFRSNMVANTSSLKTQVVGILDKVFPEYKKAFSDTFGVTSIQVLLQCPTPEDILKISSTKLLNLISKNSKGRLGTSTTNTLKSLAKNSFGVKFTSDACSFEIKQLINQIIFLEKQIDELDVKIKAIYDKLDSHLMSIPGIGKALAPVILAEIGDINTFDKPSKLTAFAGIDPSQNQSGNKQSGSGRLSKRGSPYLRHAIYTASLVAMSNDKILRTYYDKKISEGKHHFVALAGISRKLLTIIFYVLKEKRDYIPYDKKQS

SEQ ID NO: 100701 - protein, 433 aa, unidentified
MEEVTDEPLYRDRVCGIDIGKAELYATIRVPSDKDPARRMSETRCFPATRRGVLALADWMRCWQVPALVMEATSDYWKPVLYRLEAEGFECVLADARQVKNLPGRPKRDPSDSSWLAQCFERGSVRPCFVADPEFRIIRLHTRYRRDLTEDRTREKNRAEKLLESAAIKLSSVVTDLHGVTGRDIMDHLIAGERNPKVLAQLARGRARRKISDLEQALDGAEFFTPEHAALLQTMLARIDQINTKISELDAVIEQLLAPWEEQLQQAESMPGWGRRSAQDVLAETGPDMTRFATGGHLASWGGRIPLDKQSGKRHGQARHKKGNKYIAAATGETAVAAGKTQTREGARYRKLARTRGKNKACVALGNTQLKVYHKLLSSPGMRYEDLGPDYYENRAATRRKIDYHVRQIEALGLEVTLCRKPGPTGPGEEQAA

SEQ ID NO: 100702 - protein, 317 aa, unidentified
MSRNVIGIDVAQQSLDACVRPAKLRRRFANSADGIAELVAWVRDSNPERIVFESTGHYQKAAVAALLAEGFPAVVVNARQVRDFAKALGQLAKTDAIDADVIAHFGEVATTTVRPLEAQELLDLRALYDRRSQLVRMLAAEKNHRHAAAAGSPKILKNIDKHIAYLESQIHDLEGRMDQIIQASESLREQDAILQSITGIGPQVSRTCLAYLPELGRYNRQKIAALVGLAPFNDDSGQHTGQRHIRGGRSKVRLGLYQAAIAAIRHCPRMKAYYASLKARGKASKIAIVAVARKILVLANALLRDRTRYQAPANSLC

SEQ ID NO: 100703 - protein, 394 aa, unidentified
MILVGIDIGKNQHTFSIVDMNTGEILSNPSLFNNNQEGFLFLIKKLNIYSKSDLLIGMEDTGHYHFALLKYLLDIRYTVALINPTTTDLTRKLQGGITKNDPLDSLTICDVIGSNQRKKPYRVTKVNRFDLYEQKQLTRHHHNLKEELNTYKNRLQKCIDIVFPEFNSLFRSKYGIVYMNVLKTFASAQKIANSDIRTIRKCFEYDGRGKRITLSADQLKAAAKTSIGIPSVAEEIQIRHLVCQIEMIEEQLSEIDKKIEEFSLQNNSPILSIPGISHFSGTSILAELGDICNYTKASQIIKFAGVAPYHYESSQFTAQHTAITKKGSRYLRKTLYQIILPVINHNTVFTAYYNKKLAEGKGHRCAQGHCIRKLLRIIYHLLSTEQTFDPALLI

SEQ ID NO: 100704 - protein, 359 aa, unidentified
MAKGSARRRGWQGVKVEAGDRVVVGLDVHKRDTCAAIRVNGVETDTWVMPPATKAIVETFGGLRGTPHKIVYEAGPTGFGLARGLRQAGLCVEVVAAGRVPRPANAGNKSDRIDCRKLALYAEKDLLTAVAIPSEEEEASRQVTRLREQVIKKVRRVKQQIKSFLLQHALAEPQGLGTWSAAAVAALRRCGVCEDLRFVLDTYLDELDDLSQALRRTEQRMRQMSRRRRYRSGEAILRSHPGVGAITSMTFLTEVYRPERFDAKRELTRYCGLVPRVSQSGETRHEGALIKGGRKGLRRLLVEAAWVWIGKDPHAMACYRRLVRNTGKSQKAIVGMARRLAIHLWSMVTRGEVYRAALP

SEQ ID NO: 100705 - protein, 339 aa, unidentified
MAIQTKKIVRELKSLFAGIDVGAEELILVVRKNGISCKSQKFANTPADRARLVKKLVNMPGIIVCLEATGVYHFDLSIALHDAGVALMVVNPKSSHNFAKVLMKNSKTDAVDADTLAQYAERMDFVPWTRPSDEKIALRGFARRIDTLTRQKAAAKNNLHALSASQETSKAVLRDVKLAISQLEKRIACLGKEALDLIEKHPDLERVFQLLTSVKGIAQTSAIALMGELLLLPAGLSHREWVKFAGLDPRAFDSGKSVHKKTRISKVGNRHVRSALYMPALSAKQHDPHVKAYFQHLVDNGKLPLQALCAVMRKLLHAIHGMLKHDKPFDNTRFYAIPA

SEQ ID NO: 100706 - protein, 416 aa, unidentified
MKQTQNTRGYERYFAIDTHREYHLVGGQNEDQEWVVSPRRVSIEKFAEWAQQNFRAGDIVVLETTTNVWDTYDIVAPLASRVLVANAAAVGEIAGARVKTDKEDIKRLLKLLVGGIVPEVWVPPAHVRELRAFISYRNRLVKMATMIRNRLNSLLHKHSLMLPEEGILNQAWWDAQVSISTLEKMQIRQELGLLDEIKKRQAAVNEELEKQSTGELWGKQALQLMQLPGVGVIVAMTVLSAIGDITRFEDAKHLVGYAGIGAGVHDSWKTHKEKHITKKGRKELRWIMVEAAWRAVRMSPYWKDQYEKHLRRMRKPTQAIVAIARKLLVAIWHVLTKEETDIHASEDDLAYKMLLLSWSLKDNVRMGLTYKQFAKYALMKLGVENDITRFVRREVPRRLAPREEVLMRMTELGIAQ

SEQ ID NO: 100707 - protein, 403 aa, unidentified
MTTFFAGLDWASQTHAVCIIDGQGAVHERFDIDHTAAGLTELRRHLVAAGSPPVAIERPSGLIVDTLVEAGFTVIPIHPNAVKATRPRYRSHGAKSDASDAYLLADLLRTDGHRFKPLAPQGDEIRALRTLVRGRDDLVATRVQLANQLRSLLDSFWPGAAAIFADVDSPIALAFVERYPTPESAARLGPKRMAAFCAQHAYCGRRTAEELLARLHQAPIAGTGELEADAKGELARSLARTLARLVEQIRLLTSRIEHHVASLDDGRIVMSFPRAGRICAAQILAELGSVRERFDSDVQLAAEAGVAPVTYQSGKSKSVTFRWACNHRLRAALTCLADNSRHASAWANRLYTAARTRGCDHPHAIRILARAWVRVLWRAWIDRKPYDPAQHQTACLALQTTQG

SEQ ID NO: 100708 - protein, 334 aa, unidentified
MLYVGLDVHSRQSSLCILNAAGGTVNQIQLKGPRAQVVDRLRQLDQPFSICYEASCGYGHLYEALRPLAQHVAVAHPGKLRLIYGSKRKNDRIDAQKLAKLLLLDMVPPVHVPSIDVRAWRSLILLRQRLLQQVVRAKNRIRGVLREHDIVGAKWLWSKKQIAWLGSLELHPVAKLRLELAVEEFKALQTKVKRIERELQKYADAHPAVALLMTIPGVGIRTAETFIAWVDDVGRFRNNRRLGAYFGLVPCQDASADRNRLGHITRDGPPVMRKLICEATWTAIKRCPRFKQFFERVSGGKSERKKIALVATMHRMIKVMGAMLRSGESYDDAR

SEQ ID NO: 100709 - protein, 388 aa, unidentified
MSLQYHQRDGQPAIRTDLGAIFVSLELSRSKWLVTSLSPGAGEKMSKHSVVAGDIASLFEYFAEFKRKAAARMERAFPIIAIQEAGLDGFWIHRVLEREGIESHVVDAASILVSRHRRRAKTDKIDGETLVRTLLAYKRGDPRVCSMLRAPTPEEEDRRRICRERKALIAERIVHSNRIKGLLFAQGVLDYEPLRRNRRARLNELLTGDGRPLPERMRAQIGRELDRLEVILAQLKAVEAERDDLLKEEGNGAPAPAALLSQLKGIGPEFATILWSEGFYRHFNNRKQVAAYAGLAPTPWQSGSIAHEQGVSRAGNPRLRTAMVELTWLWLQHQPHSALSLWFYERVKRDGGRMRKTAVVALARKLLVALWKYTSHGVVIEGAVMKAA

SEQ ID NO: 100710 - protein, 336 aa, unidentified
MDKDSGESQEKRLVHREEAEKFYRGLAGAGQKVRVGMESSGHARWFERLLAELQIEVWIGDAAEIRTKRVRKQKTDRQDARLILQLLLDDRFPQIWVPSGENRDLRQLLWHRLVQARTRIMNQLQAMALNEGLRCKKRLWRERGRQQLEAYPLAAWASRRRRDLLALLDRLNPTIAELSQAVEQEAEKSPAAQRLMTHPGVGALTALAFVLIIGQAERFQCGKQIASYLGLVPLEKSSGNRRRLGHITKQGSSMVRFLLAEAAQVTVRSVPEWRRKYVHLTMRRGRKIAKVAMARRLAVALYWMWRKGWNYDQSQSAVRARASSEQAMVCSRTPSN

SEQ ID NO: 100711 - protein, 353 aa, unidentified
MSDYYVGLDVHKASICIAVLNTEGKLVMESIVETSATTVIDFLKSLRGRVEVTFEEGTHAAWLYDILKKTKGHVLVCDPRKNRLLQEGNKSDKVDARKLAQLLRAGLLSSVYHGEHGTRDLKELVRSYEYLVEVATRVMNRIKALYRSRAISCAGADVYKPRQREVWLAKLPEAGARERAARLFSELDHLTGLRREARQALVVECRRHPASKVLRKVPTLGIIRIAQLIASVVTPHRFRSKRQFWSYCGLAVTTKSSADHRIVGADVRRTRKAATTRGLTQNHNRTLKYVFKGAALTASRCEPFKSWYAELVERGLRPELARVTIARRIAAITLAVWKSGEAFDADKLIKHMA

SEQ ID NO: 100712 - protein, 310 aa, unidentified
MNIHPGVVGIDVSKHHLDVFDAKLGRSERLANTPAALVPKLAAWRESEAFVLFEATGSYDRALARMLVAAGIAFARVNPGRARDFARAAGFLAKTDAVDARMLAAMAQCLRPKAQAAADPQREAMATLHKRRDQLVAARQQERTRKHECQDEDIAADLAAHLAFLDQAIARITQRIKTLIASSQTLEQAASLLTSVPGVGLITAATLLALMPELGNGTPKSIAALAGLAPFNTDSGAFRGTRCVRGGRKRIRDALYMAAVSAAHSKSRFAAFYKALRSAGKPPKLAFIALARKLLVTLNAILRDKLAFQP

SEQ ID NO: 100713 - protein, 361 aa, unidentified
MNKYDYTGKIVYVGIDVHKKTYHCVSICEGQTVKSDSMPAKPEVLLNYLKNTFHEALIKSAYEAGFSRFHLHRYLLSQKIDNIVIHPGSIEVASRDRVKTDKRDAFKIAKQLSVGRLRGIFVPSQEREDKRSITRLRTNILKLRHQVGQQLKSILFTQGLIEAEDDTRLCQKWLSKKLIEVEQSSHSNDFCYSVQQYAQQWLQLSDQMKEIESRLEIQADEEKNLQTVYESVPGIGFIHARQLANELGDMTQFKNEKQLFSFTGLTPSEHSSGENTRQGNITRQGNSVLRKILVEAAWVAITKDPSLKEVFNRLSNGRGKKRAIVGCARRLAGRIRSCVLTGMLYEIKPTQEACSLQEKVA

SEQ ID NO: 100714 - protein, 377 aa, unidentified
MSNVRFIGLDVHAETIAVAVAEPDGEVRSLGVIPNRSESIRKLVKKLGVAAPLRVCYEAGPTGYVVYWELTALGVTCEVVAPTLVPVKAGDRVKTDRRDALKLARSYRAGDLTPVWVPDAAHEALRDLVRAREAAKKDQLRARHRLSKFLLRQGRRPPTGVKAWTQSYLTWVKSAVDFAHAAQEATLLDYVHEVDHVAARIERLERAIDEAVKAAPVSMRAVIAALQALRGIALVSAVTIVAEVGELSRFTKPRQLMGYSGAVASEDSSGSRIRRGAITKTGNAHLRRIIVEAAWAYRHRPSVGPTLRKRHATLDEEVIAIAWKAQHRLHARYRSLTARGKTKQSAVTAVGRELLGFIWAIGMTVNAKQHHTPRRAA

SEQ ID NO: 100715 - protein, 409 aa, unidentified
MQPILKSCCGIDVHKNMIKASIAKGPLDSPPKFYTRTFSTMTRDLLKLKDWLTENDVEVVAMESTGVYWKPIFNILENDFQMILANPQYLKKVPGKKSDVKDCEWIASLLRCGLIPASFIPQRPIRELRELNRTRRKLVGMMSSEKNRIQKVLEDANIKLASVVSKIDGVSSMTMIQALLDKDRLSKEEITDMARGKLKSKVDQLVEALNGKVTDHHRFLLKLHLNSIAFLADQVQEIDEQIQKLMIPFQKEESLIQTIPGISKISAKAIISEIGVDMSQFPSEAHLASWAGICPGNNESAGVKKSGKIRKGNRYLKAILIEVAWAASRTKGSAFSAIYNNIAKRRGKKRALVAVGHQILIAVYRTLKTGELFVDQGAEAIYRRNLESRQQSAIRLLERSGYSVAKASV

SEQ ID NO: 100716 - protein, 314 aa, unidentified
MSTQVFVGIDVSKAQLDLALRPEGRFSAPNDEAGFAQVLERLSAVPPTLVVLEATGGLEIPLTGVLAAAGVPVVVVNPRQVRDFAKATGRLAKTDALDAQTLAHFAEVIRPELRPLPDEQTQALAAILARRRQLVEMLTAEKNRLGSARQSVRKSLRTHITWLERELAHTDSDLAQAIRESPVWREKEELLRSTPGVGPVLTTTLLANLPELGTLTGKQIAALVGVAPLNRDSGTWRGKRTVWGGRAQIRATLYMAALVAARFNPVIRVFYQRLCAAGKAKKVALTACMRKLLIILNAMLKHRTPWRTELVQCA

SEQ ID NO: 100717 - protein, 374 aa, unidentified
MSDRSEAYVAFDTSKLRNAVAIAEAGRSGEVRFLGEIDNTPAATAKLVKKLSGKYDRLTFCYEAGPTGYGLYRQIKSLGHECLVVAPSLILKKPGERVKTNRRDAVSLVKQLRGGDLTAVWVPDPRHEAMRDLTRAREVAVEDLRRKRQQVSAFLLRQGLHYPGERAWTKAHRAWLVSQKLEYAEHRIAFEEMLLAMRQAQERIERLEQAIRVAVPDWSLAEVVTALMALRGIDFVSATAFLAEIGDLSRFRTPRELMAYLGLVPSEASTGDTVRRGPITKTGNRRARRILVECSWSYQHPPRVGKEKQERVAAAPQTVREIAWKAQCRLSARYRALTRKGKLKTVAVTAVARELSAFIWAINRQIINSRAAAR

SEQ ID NO: 100718 - protein, 343 aa, unidentified
MQPKDTIGLDLHKRHSQLCMLTVDGELIEQRIVTSRARFTEILGARPPARILLEASTESEWVARHLEALGHAVIVADPSFAPMYATRSSRVKTDKRDARTLCEALRLGAYRPIHRVSDAQRHVRAELAVRDALVRTRTRYVAIIKAAVRREGLRLSSGEAERTVTKLAALALPAHVAQELAPLVALFPSLNEAIAAADVRLTRLATQHLVVARLCTMPTIGPITALAFVAALDEVGRFHSAGQVEAYLGLTPSEYSSGDRRIRGRITKRGDVRTRWLLVEAGWRLLRSPDPDVAHLKTWAEQIARRRGKRIAAVATARRIAGILFAMWRDDRAFARAATAAAA

SEQ ID NO: 100719 - protein, 356 aa, unidentified
MRYLGMDVHAKSTVWCLLNGQGEALERGRVATSTAALMELTHELTATEELLVGQEVGTMAYLVHDAITAAGVRILSFNAYQLRMIVASRKKTDRRDAYWIAKALQAGMYPHPVYIPSAPVRELRVLLSQRRVLKAEQNRWRYRARTVLRAAGCPAPTSPAALDAALGMPVGSGPTSIPLLPETLALYAQQERATRRGLREVEARLQASSAPHNAIARLMTIPGIGPLAAATIYAWVGDVRRFPNAKALGAYAGLVPTVRQSGSTQQVGAITKEGAKPLRATLIQAAHVVLHRCRSAEAVPLQRIGERLLGARSKRRKIVVVAMARHLLRLAYYLLRDGTTYDATRVSANSPTPVAA

SEQ ID NO: 100720 - protein, 366 aa, unidentified
MKKTSTVRVNGNMIFKGHKLTIGLDLGDRSSNYCVLDEAGEVLLEQKLPTTPEAMKQTFERIPRSLLALETGTHSPWLSRLLKELGHEVLVAHAQKVELITKSKRKDDRHDARTLARLARIDPELLGPVRHRSAQAQIHLTVIRARAELVSARTALVNAARGLAKSYGQRLPKCGTQQVSRELGAGLPAELREVLEPLLKEIESLNERIQEYDARMEKIAKEEYPEVSLLKQVKGVGTQISLTYVLTIEDPRRFPKSREVGCFLGLRPGRRDSGESQPQMHISKEGDRYLRTMLVQGAHYILGPFGEDSDLRRWGLRLAERGGANAKKRAVVAVARKLAVLLHRLWVSGEVYEPLRNSQKAIRAAA

SEQ ID NO: 100721 - protein, 343 aa, unidentified
MDHFAGLDVSVKETSICIVDDTGRIVREVKVASEPEALLQVLGNPIYRFKRIGLEAGPLSQWLFSALAEAGLPVICVETRHMRAVLQAQINKTDRNDARGMAQMMRAGLYRPVHVKTLRSQKLRMLLTHRKLLQSKAIAIDNDLRGTLRNFGLKVGMVGTVKFEARIKELVENLPDLAVLVEPLLMVRRVLREQFSILHRRLLAIVRDDEVCRRLMTTPGVGPVVALTYRATVDVPARFRNSKAVGAVFGLTPSKYQSGEINRTGAISKCGDEMMRVMLYEAAQIMLVRTAKWSWLKAWAMKIARHRGMKKAIVALARRLAVIMHRIWVDGTEFRWTREVTAA

SEQ ID NO: 100722 - protein, 357 aa, unidentified
MLVIGCDYHPSVQHIAWMDTETGECSEKQLRHSDGEAEKFYRDLKAKGVEVRVGIEATGHARWFEHLLAELKFELWVGDPAQIKAARVRKQKNDRQDAEHILKLMMEDRFPRVWVPGAENRDLRQLLWHRHRLVQMRTRIMNQLQAVAMNEGVRGKKGLWSQSGRKQLESFQLAPWATRRRQDLLQLLDQLTPSIAELTTAIEQQAEQSPDAQRLMTHPGVGPITALAYVLIIGSPGRFGCGKQIGSYLGLIPCEDSSAGRQRLGHISKQGNTLLRFLLVEAAQAAVRGDADWRRQFLHLAMRREHKIAKVAMARKLAVRLYWMWRKGWDYQQLLQFGSQGRKLLFSHSVGTTDSTR

SEQ ID NO: 100723 - protein, 476 aa, unidentified
MSKKTSNKTSNKTSKKTEKKNIVTMALVNPHAAGIDISDKEHVVAVPENACAERVRKFGAMTCDLLEIVRWLKECLIETVAMESTGVYWKPLFSVLVREGFEVHLVNSKHVKNVTGRKTDEDDAMWIQKLHSCGLLKSSYLPDDEQDALRTLVRYRRTLLQDSSRFVNRMQKSMELMNIKFHTVISDIVGQTGKAVVEAIIGGERNAEKFLPLIGKGIKADHETIKKSLEGNWRDEHLFTLKESYEFYKMYQQRISQFDKEIEKQLQCYEAKCNEGVIETKKSDADKSNTDIPKPAKEKKKKKKKDKNHPPFDVRGFLERIHGVDVLAIYGLSETSGLEILAETGTDLSRWESEAHFRSWLNLCPNNKISGGKIISSSVMKKKPNAASQAFRYAANAVQKSDNWLGDYFRKKKAKGGGNKYAVLATAGKIATIYYNMIRNKKEFNPVNLEEYQQKCKQAKIAYLERTLNRLKQEAA

SEQ ID NO: 100724 - protein, 438 aa, unidentified
MSNKFIFNLDDLFISVGIDVGADFSWMSIALPNQQIIGKPYKILHNQMNSLATAVSKIKEAEELYSLESRIFLESTGIYHYPLFCYLRDKGFNCSVINPIITKNSTNINIRKVHNDRFDSKKAALVGLKPDLKVSLMPSDLALNCRNLCREYYDLMDNRSAYVNKLQGELRMAFPQYLGIFSKITTNTSLTLLETYTSPSAFIEADPQEIIDTIKSTARFGVAYAASKYNAIIQAAHDANEFGYILDSNIKRIRLYISFIRKYDEEIKNILDAMHELIDANEETDFVKQIHLVETFKGAGFLSAVTLMGEIGNFSAFSKPKQLFAYFGLDPAVKQSGKFEGTKIQISKRGSAIARRAIHTLTLQSISTSRTGEAKNPVLRDYYLKKCESKPKLVAMGAVSHKVCNMIFAILRDNKPFEIITPQEHIQQYNAAKCDIAA

SEQ ID NO: 100725 - protein, 359 aa, unidentified
MRIIGCDLHARQQTLAMLDSTTGEVVKATLKHEGNMVREFYGNLPRPVRVGIEATGSMQWFVNLMEELGIECLVGHPAEIRAAEPRKQKHDRRDADLLLSLLAEERFPAIWLPTKELLDLRALLRHRHQWVGLRVKIQNALQAIALANGLRRGSSLWTRAGQQAIASLPLSPHAAYRRNELQAMYVQFETEIEKLNQRVEQQARERFRSRLLMTHPGVGPITALATEVFLGDPARFAGSKELASYVGMIPGEYSSGKRQRLGGLTKQGNPLLRFLWSEAAIHAVRRDPELKQFYRRKLIQKGLGKARAAVARKLGIRMWIMLRDRIEYNEFCRRGQMQQKSGDACAGMPAARYGAKITG

SEQ ID NO: 100726 - protein, 365 aa, unidentified
MNKTTKVSIDQEQTEQKGNWVLKLGLDVHYRQVTVAMQEGDGRIKAVGKMGHDAFGNWVEKKLKAGFELYSCYEAGASGYWLHRDLAELGVKNLVIAPKAMGQDKRQKTDRRDSSQLCDALDRYLRGNRTALSPVAVPTAEQEEKRALIRYHRQIMADRSRYEARGKGLLCAQGIEVGGKWWQPKTWKELKTHPRFKSWMEQALQAWRSKLLAAEVEQQDLRRKVEALAPALLPKGVGAYSAVALEYEMKGLARFKNAGQISSYTGLCPGIHSSDGRAKEASINRCGNAAVRWNLVEMVWRLLKWQPDYQPMRQLAAELVKSKRAKKRLVVKAARHLAIDLWRLQTGRSTPEALGLIMQPTAKAK

SEQ ID NO: 100727 - protein, 346 aa, unidentified
MTFYIGVDFHPHQQTLCWCDEQTGETQTLDMDNDLEKVREFYSSLKEPAVIGIEASSRAIWFENMISETGHKLRVGNPVLIRKSAPSRHKNDRRDAEHMLELLLTGKFPAIWRRPRESNETLEVLRLRHNFVRQRTQAFNRLQALAHDVGMPKSTMRNAAVQEVLKRWVMGESGTLCREHLFSILSHLNERISKLEEWLKQKAATNSQVQLLLTQKGVGYLTALTFVHTVGDVTRFEKGPKGATHFAGYDSVEDSSAKRKRFGPISKAGSPMLRFQLGLAAQMAIRSDVKLKTFYKRLAKRKPRALALTATARRLLVKLTIMLRDNITAEEFDRRGSTVGNARRIA

SEQ ID NO: 100728 - protein, 345 aa, unidentified
MQITTVGLDLAKRIFQVHAVDASGDVVVRKALRRSQVLPFFTKLPPCLIGMEACGTSHHWARELTELGHEVRLMPPSYVKPYVKRGKNDAVDAEAICEAVTRPTMRFVVMKSAEQQAALSLHRTRNLLVKQRTQLVNMIRGLLAEFGIDIPEGLERALKLARQIAAKKSTLDVPAMALQILCLLCEQVLDTHARLQTIDRSILAQQRTNEMARRLSTIPGIGPIGATALAASVADPGQFRSGREFAAWLGLTPSQNSSGGKDRLGHITKMGDRYLRKLLVIGATSLIRRARRKPEAADPRLLALLARKPARVASVAMANKMARVVWAIMTRGETYQARHAPNLAA
